United States Patent Application Publication US 2011/0191912 A1 - sequence listing, part 17

SEQ ID NO: 25929 - DNA, 3003 bp, Unknown
  misc_feature (1)..( 3003): 2750-1469P.txt file - cDNA_ID_2709205; gDNA_ID_2214545; Annot_ID_134555
tgtttgttcttttgatgattgtgcaggtaaaaggagtattccacccatacttgagtctcaccctgctgatgttccgcacttctttggtcaacctcacacaccaactgcctataagccacctcggatgatgagacgtctttcaaagaagcatttactgccaccttttgatccacctgatataaaaaatccaggaaagtcaagctattgagtctaaagaagcgtttagtgggaggcaacccacttgtatgattttctttttcttttctttttcgttttttttttctcgcttactccggatttgaatgccacttgggacagtgacgtttaagtctggtggaggcgcttactaactacgttttctttttgagtgttattcttatacatatttttctttttcagtcgttttattgagtcaaaattttgttaggaattatgatctctattctttagattatatcgtggttgattaatgctgcaggttcgactcaatccgactattgtaaaatttagatggcaaaccaacaaacttgaggatatcctagtttccaatacaaccactaaggttagagctaatctcactgctctttcttttacctcatcaatcggttagtattcatagatattgactccttatcatacctgatattgagaccaatgtgataaagaaaagtattcctctccccttataaaaataaaataaaatgaatgatgaataagagattgataggactttcagatagtgtataggggtaggaatgtttcctatgaccccattattatacattatttggaatgatcaattacaaaggttggaaaaatgcctagggtgtcgatccagtatgcgagttcccctttgtttactctctaaaaagaataattctggggagagaaagaacaccaaaaaaagaatataaagaacggtcgatttatcatggtatagtacaggattgaatctagacggatcttgaatgttagcttgtttgatgagacccagcgatgaaagcctaggggatatagttgtggaacttatgtatggaatctagaatgttgtgtaagcttgcagagaagtacatgttggttaggatttgattagaactgctagacatatggatttggttaggatgatcaaggcaataagctagagaatgttgggagttcctgtgttttcaaacctcttccatgggttcggcttttgtgttttgcttgagggcaagcaaaagctaagtctcggggagttgatataaccctatttttactgcttttagctatgatttaggtataggttttagagtccttttgtgatatgatcatggatagcattaacgatatggagcatgaaccggagcttgaacgtgagcttgtagccgaggaaggagctaagcttgtagctgaggatgagcttgtagctgaggagaacttgtagcggaggatattcttgtcacaccggccgtcccaatgacttgttctagagctaagctattcgaccaagccattgccgggatgcttaaccacatttgggaccgaccaaatgacttgagccaagtcactacctctttggttttgattcaagctcaaggacctcatcaagatggataagtgattcatgagtgctctttttccctgcctttggttttgtcccactgggttttccaaaggaaggtttttaatgaggcttatgttttcacttcatataatccattttgatgattcaaggcccaaacccactaaaataaagagacaatttcgtggccttagtagttgaagagtttattttgattttcaaaaattgtttttaatttctgttgttttctaggcagccttggagcatgttccaagacttgcctcttcatcttctcttctccttctctttatatactcttgtatttacttttgagaacttatctttcttttaatcaaaaaccttttctaagaagatcatcttgttggtgtgtatatccagcaaaatccttagtctcttttagtgcgcatatccaaaggatctaagtctcgatatcttgaagcccttccgcaagcttctgtgatatccatcgattcatttaaatctatccatcatcacggcatcacagccacctctatccatttctcaacctaagagtgccgagtccttgggaggatctcatcatgtggtatcagagcacactctgaaagttgagttttccatcgttatcattttgtatattttcatctttagatctgtgtccgtctgtcaccttgatttaattttcataattatttggtgcatgctaaaattgcgaaattaactgtcacgggtttgaaaaatactctagtattttttaaaattgtttctggaatttttgggaacgttatgataatatttagcatccgaacaagtgaaactgtcgtaattagggttctagggcatctgaagggttatttcgtgtttgtttaaaaagaactagttactggtgttgttttgttgtctctattgcagaaagaatggctgaatctgaggaggaagagactagccacaatcgaaacaacaaacttttggtggaagcctttgagaaaatgatggataccaaactgaatgcttttcgccaagagtttcatgagaaactagagttggggcagactcgtcctcgagaatgaaggagagttaatgagccgcttgagcaaagagatgaagctacagatcagtactatgggcataggagcacttcatctcacaatagtcaaaggagacaccatagacgtgctagagaaggtagagatcttttgcaagacaatcttggaggtcttaagcttaaaattccaccattccatggaaagaatgatccagatgcttatttggaatgagaaaagaagattgaattggttttcaaccttcaacactacaccgagatcaatagggtaagagttgctgctactgaattttatgactatgctttgagttggtgggatcagctagttacttcacggagacgtaatcaagagcttccattggaatcttggtccgaaatg

SEQ ID NO: 25930 - DNA, 3000 bp, Unknown
  misc_feature (1)..( 3000): 2750-1469P.txt file - cDNA_ID_2709221; gDNA_ID_2214561; Annot_ID_134876
tttgatggtaaaactaagttcgtatttcgctttaagaatatagaatgatgaaaaaccttttgtgtttcaaaatactgattaggtaggattttagacagacgattaacttttaatatttttaagacaggcgattaaaagttaatcttcctttttggattttatttgattattttagttgagagattcgatctgtttagcttttggtatccaaaatatatgtcattgaaaacagaatgtgtcggttttgagtatcatgggttggttttgtcttatgtttatctgtgatttcgcatttgcagcagaaatggggatatgccccgtataattaaagaccttgattgtctcttgattagatagaaagtaaaattcattggaaaataattgtttggatcggtcagtataatgtcaaaatgtgtaacaaacgaccagctcaataaaaaaaggttgaggtaattttgaaatatttctgtaatgtcattagaatattctcggatgtataaaatcaatgacaaacattaaatatatgacgttaagatggagaaaaccgagaaagattttgtaggtttattatttgtttcaattataaacgaatcgcctcaaccttttttatattatgacgttaaaacccccgtaaatattatcataaaagccctcaatatgatcaaagtacatgcacttcaattttaagagacatggatgatggatcttacggtgttatagctagagttggcttatattcttaaatagaactatacatcgtttttttttgtttcttcaacagtaaatgataaaataggtacccaacatgacaattggctagccaaaactgagtaatattatacatgtcagatactcggttttaggatataacaagcaaagaactttaaaagaaaagagatgagagtttatctaccaacatcaagaacgaaggccattcctacataaacctcgtctaagaaactatatatgaacaaattgtatttaaatcgtaggaagaaactatatggctctagatatttgactatcccaaatttagagattttactcatgagtgcaaaaacgagacatctactaagattgggcaaatttacttgttacctggcttttacctccttttcggctcgtatccgaattgaaactcaagtacccggtacaaaatatgtcaagataaaacaataaattaatatgtgaataagagtgtgttaaataaagttatggttatgagtgggtcgaataaaattgtggttgtaaaatatcttaaaaaatactataagttatattttctaagctttgtactgtaaatgcctaagcttagtgttagaaccaagttaagtgaataagaaagaatttgaaagagtctatgagtgtgactggtttgtataccatgtaaaagaaaagaaaaaaaagagaagaaacgagaagaaaaaagtagaagaaaattgtataccatgtatttatgagaggaaatttttagttgtttttactgaaagtaaaaaaaattgagaagaatattgttggtgaacaaattattcttgattggaaaaatgacaaagagtaattgagaagatttattttttcccaattttttccctcttctattttttttttttttttttttgaagtagcttataagcccattaaaaatgttagcttgtggcccaacatatttaagggccgtcctgaacataatgcacataatttgattgtagctaagcagtaaaagattttaacaaaattgttttagaataaaattataagtttaaaaggtattgtttgacttgaactgtaccggaatttataccggaaatgtcgtaccgtcctgaacataatgcacataatttgactgtagctaagctgtaaaagattttaacaaaattgttttagaataaaattataagtttaaaaggtatggtttgacttgaactgtaccggaatttataccggaaatatcgtaccgttctgaacataatgcacataatttgactgtagctaagcagtaaaagattttaacaaaattgttttagaataaaattataagtttaaaaggtatggtttgacttgaactgtaccggaatttataccggaaatgtcgtaccgtcctgaacataatgcatataatttgattgtagctaagctgtaaaagattttaacaaaattgttttagaataaaattataagtttaaaaggtatggtttgacttgaactgtaccggaatttataccggaaatgtcgtaccgtcctgaacataatgcacataatttgactgtagctaagctgtaaaagattttaacaaaattgttttagaataaaattataagtttaaaaggtatggtttgacttaaactgtaccggaatttataccggaaatatcgtaccgttctgaacataatgcacataatttgactgtagctaagcagtaaaagattttaacaaaattgttttagaataaaattataagtttaaaaggtatggtttgacttgaactgtaccggaatttataccggaaatgtcgtaccgtcctgaacataatgcacataatttgactgtagctaagctgtaaaagattttaacaaaattgttttagaataaaattataagtttaaaaggtatggtttgacttgaactgtactggaatttataccggaaatatcgtaccgttctgaacataatgcacataatttgactgtagttaagcagtaaaagattttaacaaaattgttttaaaataaaattataagtttaaaaggtatggtttgacttgaactgtaccggaatttataccggaaatgtcgtaccgtcttccacacttcggagaaacgacagataagctctctctgttctcttgccacacttcccaatacatggatccattttgacgtcatctttatcactatctctctattatataaatctcttcgtacccttttaccgattcttcaccgtgatcgcttaatcagacctcaatttcgttgttaaagaacaaagctttaagcagccatg

SEQ ID NO: 25931 - DNA, 3000 bp, Unknown; identical to SEQ ID NO: 25930
  misc_feature (1)..( 3000): 2750-1469P.txt file - cDNA_ID_2709221; gDNA_ID_2214561; Annot_ID_185880

SEQ ID NO: 25932 - DNA, 3000 bp, Unknown; identical to SEQ ID NO: 12608
  misc_feature (1)..( 3000): 2750-1469P.txt file - cDNA_ID_2709225; gDNA_ID_2214562; Annot_ID_134892

SEQ ID NO: 25933 - DNA, 3000 bp, Unknown; identical to SEQ ID NO: 12608
  misc_feature (1)..( 3000): 2750-1469P.txt file - cDNA_ID_2709225; gDNA_ID_2214562; Annot_ID_185903

SEQ ID NO: 25934 - DNA, 3000 bp, Unknown; identical to SEQ ID NO: 12601
  misc_feature (1)..( 3000): 2750-1469P.txt file - cDNA_ID_2709235; gDNA_ID_2214562; Annot_ID_134881

SEQ ID NO: 25935 - DNA, 3000 bp, Unknown; identical to SEQ ID NO: 12605
  misc_feature (1)..( 3000): 2750-1469P.txt file - cDNA_ID_2709247; gDNA_ID_2214562; Annot_ID_134885

SEQ ID NO: 25936 - DNA, 3000 bp, Unknown; identical to SEQ ID NO: 12605
  misc_feature (1)..( 3000): 2750-1469P.txt file - cDNA_ID_2709247; gDNA_ID_2214562; Annot_ID_185895

SEQ ID NO: 25937 - DNA, 3000 bp, Unknown; identical to SEQ ID NO: 12603
  misc_feature (1)..( 3000): 2750-1469P.txt file - cDNA_ID_2709251; gDNA_ID_2214562; Annot_ID_134883

SEQ ID NO: 25938 - DNA, 3000 bp, Unknown; identical to SEQ ID NO: 12603
  misc_feature (1)..( 3000): 2750-1469P.txt file - cDNA_ID_2709251; gDNA_ID_2214562; Annot_ID_185893

SEQ ID NO: 25939 - DNA, 3000 bp, Unknown; identical to SEQ ID NO: 12622
  misc_feature (1)..( 3000): 2750-1469P.txt file - cDNA_ID_2709259; gDNA_ID_2214563; Annot_ID_134900

SEQ ID NO: 25940 - DNA, 3000 bp, Unknown; identical to SEQ ID NO: 12622
  misc_feature (1)..( 3000): 2750-1469P.txt file - cDNA_ID_2709259; gDNA_ID_2214563; Annot_ID_185919

SEQ ID NO: 25941 - DNA, 3000 bp, Unknown; identical to SEQ ID NO: 12623
  misc_feature (1)..( 3000): 2750-1469P.txt file - cDNA_ID_2709263; gDNA_ID_2214563; Annot_ID_134901

SEQ ID NO: 25942 - DNA, 3000 bp, Unknown; identical to SEQ ID NO: 12623
  misc_feature (1)..( 3000): 2750-1469P.txt file - cDNA_ID_2709263; gDNA_ID_2214563; Annot_ID_185920

SEQ ID NO: 25943 - DNA, 3003 bp, Unknown
  misc_feature (1)..( 3003): 2750-1469P.txt file - cDNA_ID_2709265; gDNA_ID_2214563; Annot_ID_134902
aacatggctaaggaaaatgttttgttccacaaaattttatggctttggtttatttcatgagctttttggtcgatttcatcatttcgtatggaaaaacgaacaaaataagatttggtttagtgtttctttggatagacaatgagtcctttatacgtatgtgtctatgtggtataataagacatcacgatgttaaagaagattagaaaaagtcttatggataaggaaacataaatccataattggacccattttggagaattttgagttaacgttcaaaaacgacgtttcttctcaagtttttctttatccaaccttttccagtaaaactaacagttaagtattaaatagatttcgaagcatatgatttattcataatgtttacttacttagaaagttcatttggtaaaataagaataagaagaacatccaagggttcaaaaaggatcactcgggaaatagatgaaacgtcttaaacgccagtaatgaagatctctctgaactcgagtgtctaacgtagtaacgttcgatacccatttttaaaaagtaataacgttttctaatcattatgctagcctcttctcttgcttagataatggtttggttaggttattttatcagaaatgttgaatttggtctaagtagtgctatttcagttctatctcctataccggtcggttcatggtttctgtttctaatccctttttgctttcttttctttcatttagatcaattttagtgatattaccaaaagaaggaggagggtttgaattggtattgtgcgattgtttttggaatgtatagaagttaacattatcatttcgaacgatgggtttgaagtccattggagacgtgtaagaaccgtaggttagtagagagcatggcatttacacgtggaaccacagagaatagtttagctgttgaagcatacgatgcttgatatggctttcaacgttcaactcttattttatgggtttggacgcaaaaaaaaaagtaaaaaatattgaaaataactcgagcctttaccagctgattaaactacccatatgattcaattttgatgttgtcaacttatcgctaaccctgtcattactttaatacattaaaattaaacaggtatttcaaatttgatatatgaaatatttcactcgattgaaaatttcagtttgaaaaaggatataattttgttttttttcttatttttattttttggcttatttctactggtttgtaatatacttcctctattctttaataattgattttctaaaaaaacacacatatcaaaaaatatattaaagctcattataaatatattactttttgtgatttatattttttataattttaaactaataatattagttatttattttaaaatttgatattcatcaattataactaattaatattgtataaaaatctaaaatattaatatttttgaaacaatttttttcaaagaaaatcaattaataagaaacagaaatattattttgatcccagaagttacagaggatagtgattaaatttttagttggtgcagtattttagattattaaaatataatattattagcgtggaacatatatatccatgagtactgctagttgacaaaactgtatccgttgaaattgtgatattaatttcatttgttcactagtgactagtgagtaaccaaagagatatgtatgatggtattgtatttgcatctaggtcttttgacaaggcacaatctaactttcctctgatgatatttactttttttagcaaaaagtaataatatttggtttagctagttttttattttagttattatatacttttttgacgacaattgtgagtatataataacagtcaagtattagtataaaaatactgactcctcttgtaagcaatttaacaaagtaaacgtttttttaacgtttccgttcatcataatactaaatagctcagatctgattgtgttacttgcaaatataatacgtttttgctttcagagctacagtatgttgtccacaacttcgcaaacatacttttaaataagagtctagaaacgcttgcaatttgttaaagagcgacctaattaataaataaacgtgagtttctagtaattactgatgtaattaaaatgatgcgtaattataaaaatatacacctgtttttctctagcattctcgaacggtatttaattttgccgatttgcatcgttcaattaactatatacaacaaagttgtttcctaattagactccatatataattggattatcaaacaaattcctcaattccaaaatgctttcaaaatttgtattcgaaaaataaatttacaaaatggtatcgatgttaaaattatgaattttgaatagaagctacaccattaaacaattttcatcaatggtttctcattgaaaaactgttcaatataaaaataaaatataatcaaaaaatatgaaaaagaatataattagtttctcaagtgagaaactttaaaaaacgcataaaaatacttgtatatcatctattgatcaaatattattttattattaaactttaattatataactaatatttattaaaatactaatattttttttttttgagaaaccatgaaggtattttactgatagagatgtttttagctaaagctttaacttctttttttgaaaaaacaaaagctcgaattaggcgaaaaaaaactagaaaagataaaaaagatttcaaagaattaaagattctatataatctttctcaatcaatttatgagacttctcgatcatatctattagcatggattatagtgatcttttgatatgattttctttacattttatatatgtgtatatatatatatatccccttaaataaatatgtcattaactcattatcttccctcactcgacatagttgactggtttcttgtcgccaagttttgctgcccaactataaatatgtgctgtgctcatgcactcttcaatataagtgttttgtgtaactaaaacaaaatatg

SEQ ID NO: 25944 - DNA, 3003 bp, Unknown; identical to SEQ ID NO: 25943
  misc_feature (1)..( 3003): 2750-1469P.txt file - cDNA_ID_2709265; gDNA_ID_2214563; Annot_ID_185921

SEQ ID NO: 25945 - DNA, 3000 bp, Unknown; identical to SEQ ID NO: 12626
  misc_feature (1)..( 3000): 2750-1469P.txt file - cDNA_ID_2709268; gDNA_ID_2214563; Annot_ID_134904

SEQ ID NO: 25946 - DNA, 3000 bp, Unknown; identical to SEQ ID NO: 12626
  misc_feature (1)..( 3000): 2750-1469P.txt file - cDNA_ID_2709268; gDNA_ID_2214563; Annot_ID_185923

SEQ ID NO: 25947 - DNA, 3000 bp, Unknown; identical to SEQ ID NO: 12627
  misc_feature (1)..( 3000): 2750-1469P.txt file - cDNA_ID_2709272; gDNA_ID_2214563; Annot_ID_134905

SEQ ID NO: 25948 - DNA, 3003 bp, Unknown
  misc_feature (1)..( 3003): 2750-1469P.txt file - cDNA_ID_2709280; gDNA_ID_2214563; Annot_ID_134908
tgatatgtgaatttggactatattcgtccatttgatgagttacattcctagagtctagagattcagctgattttagttgagaatcattcaaatagcttaaaaatgttacaagactaattgtaggacgagttatgtcagaaacttgtttcaaatttgacatgaagaaattataagcaaatagtaagtaaagatttcacttcctttttctgttggtaaaagcaaaaaagtacatacatattgaaatattctaaacaaatttagcgcgttggcttctttctttacggataagttaccaagatttccttctttttatacataaaagaaactaaaataacttcttttgcccatcttgcttttgtttatgatgatgatgatattttctttatttattccagttattaaaaggcaaagtaccaaaggaatcttcaatgagtgttccttgtgcgattcagcttcatgtttattctcatataacagaaagtatcagtgcacagcacaatttctctaacagtaaacttatatccaacttttactttgtatgtgtcgtcgggatttgaatgtgtggtatgatattttattttagtcttctataacaattaagtttctataaggttggatattaatttgctctgtttttattaccctagaaaaattatattagtgggagtcattggctagttcacgtttggaagttatgcaatttttgaggatcttgacagtttactttctttgatttcagttataattacttttctgaaattaagctctaaaaataaggatcaaatggatacttaccttagttatcaaatcaaagcaaattcgatatggacgaatcaacatcacaatcgtcttctttagtgttttcaccatcttccacctctaacttacttagacagctcctttccacctgtttcttctctctctgtctttcttttttctctttcttcttttatattctccgacaaaagaaaaagtacaagatacccagaaaaagagtgtagaaactacatttgttcttcttctctgttctgcttcgaaattatgggttcctctgtttctaaaaccgcttcctctgcttctgcttcttctataacatcgattttgaattcacctccggagacggaattcaacatcccttcttcatcggtacctaaagctttcacatttccgatgccgtcgattcatcatccacctgctaaaaaaggcgacacacaccactttgtctctcttacatcgaccacttacggttctcttgttctcgacgacagacaaacattgcctcacatctccgtttccgggaagagtaacaagaagatgcctgaaacagaggaggctcgcgactcgttctctcctgactcagtgatcaacacatgggagctcatgaacgacctcgacgacgaattcgattccgcgaattccgatacaagtaagagtaattccgtcgtaaatttggattccttttctaaacccatcacgaatcgagacgtggttattaatgggtctgcgtatggatcttacgaagatgaggaagattggagattattgccttttaaacctaagcaacctctgtggaaacatatgtctgaagaatcatttctctctgatttagatcctaacattatctcatcttacaaaagagcactgtcctccaaacagctaggcaagaacagtagcaatggccactcaaatcattcggttttagtcagtttaccagaatatgtatcttctagtccattgagttctcagacttcggaaaaagaccaagagaaaccaagattgcttgaaaaagaagataacgagaacaagatagtagtatacttcactagcctcagaggaattcgaaagacgtatgaagattgttgttgcgttagagcgatattgagagggtttcaggttgcggtagaggagcgtgacatctcaatggactccaaatacaggaaagagcttcagaatgcactcggcgaagagaaaccggtttgtttgcctcaggtgtttataagaggcgtccgcattggtggaattgaggagatcaagatactcaacgatggaggtgaactggcagagatgttaaaagattttcctgcttgcgaatccattggagcctgcgatagctgcggagatgcaaggtttgtgccgtgtactaattgtggcggtagtactaaagtgtttgaggaacaagaagatgggtttaagagatgcaatggatgcaatgagaatggattggtacgttgtaacaagtgttgtctttagtaattggattcgtttgagtgatgttgttgtgaaaatgtgaagagaagaaaaagaatctaaagatataacttttgacttaagatatgtttggttggttgtgttctttgaatgatttgtttgttttcatgctgtatattataagaagtggcctaaagctcaaacctagaatgtcaagcctcaattgtttcttcacgttgatctttgtaatttacatgttataaaatgatttttttttccaaacaaatacaaacaggatgaaaatatttatgtaaacctagaactattttatttctttgaaaataatagctaaacctttttttaatatggatatgcaaactgaaaaattagagtttgctgttttggccttttggtcttgtacaaatttgtttttgttacattttacagatgacctgttacggcagtagcggtaacgaaaatgttactaggcattccacagtaattgtctcttaacgtcatctactatcttatctcttctagctattttagtatggcttaccatttttccaaaaaccagtgtcactaaagttacagaacaatcgcctttgactacatcacctgcttgatcattggctaccatccaagtctgtttgtaaacttcatccgctgtcacggtaaaaacgtcacgggtaaactgattattgaaaacgacaacgggtcttatcatcttcaaacccctcacattactcaagctttgcttccttccccgagaccgagagagagagagagacgatg

SEQ ID NO: 25949 - DNA, 3003 bp, Unknown; identical to SEQ ID NO: 25948
  misc_feature (1)..( 3003): 2750-1469P.txt file - cDNA_ID_2709280; gDNA_ID_2214563; Annot_ID_185930

SEQ ID NO: 25950 - DNA, 3000 bp, Unknown; identical to SEQ ID NO: 12630
  misc_feature (1)..( 3000): 2750-1469P.txt file - cDNA_ID_2709291; gDNA_ID_2214563; Annot_ID_134911

SEQ ID NO: 25951 - DNA, 3000 bp, Unknown; identical to SEQ ID NO: 12630
  misc_feature (1)..( 3000): 2750-1469P.txt file - cDNA_ID_2709291; gDNA_ID_2214563; Annot_ID_185934

SEQ ID NO: 25952 - DNA, 3003 bp, Unknown
  misc_feature (1)..( 3003): 2750-1469P.txt file - cDNA_ID_2709295; gDNA_ID_2214563; Annot_ID_134912
caaactgttatggtaaacatgaatgcatagatagatgattttaagtatgcgattaaaattttgttgggatgcaaaatgaaatatgtatgacaagacaagacaatggtgtgtgttattgcatgtgaagagatgtgatggtgacttcaatgacttgacctctcaatctcctcctctctctgtctctctgctggtcctctcttaaatttgttttcttatttttttctttttcttataactaattcgattttttttaatgaagctaagctaccaaaaaaccatctcctttctaattttcgctatagtaattaaatgatcaaaacgcaccaaaaccaacacccatatgtttacatgcatagaatttaaatgtaattcatattatatactaattagcttctttttttttgcaactttttgttttcttatatagcacataaatttttgtaccattgcctcttcacttctatagcttgccgaaattaatataaatattattattggctatttattttgttgtcaatacttttcttgtaggtaataataattacatgaactttttatctatcacatgagactatgagaggtcccttcctagttatacggttatgcgaaaatagcggctttcaaaaataacggtacggccgaggcgtttactttaaacgggctccgtttacttcaagtctgtcacaacgttcgtcacgtgtcattgaacacactatcacctgactagcttaccacaccccagaccaataattattgctctgttactaaacattagccacgtaaaagtcttgagtttaagaaaattgtatagtaataagacaaacttttacttatagttcaataattttttttatgtaattccatatatatatatatatatattatcacatggtatagtatttaattatgtgatggtctccatctacaccagattttctttgcaatgacctaacaaaccaagaccaactttaaccatgtgttgaaagcacttgaaaccgtctatgttcacaggttagctactcaattataactaaagttagctaacgtaatagtatatgaatgatttagttggaatgcgaataataatttttgttgtaggagcactgacttccacatgccatgagtaggcctagagcttaagtctcagtctcattttcatgcgtctctctcactcaatgttccactagttccagtagtattaaatgaataatagagcctttgcatataaccagagagagtgagagacctttgggccaaaagctctaacaaaaattccttttgtttcagagaatagagagaaagagagagagctagagagagaaaatgacaattgaaaaaacttgggagttggagttaagagatacctgaaactttctgtttctgtgatgactgtgaccactggactttgcttttctctatcatctctgctctcaggggctttcttgtctattcatcatcttatatatatcattttcagttaactctacttatcaaaatttacactgtattattgcataaaataagatctggattagactaaaatcttgtattgacactaatcaaacatctcagtgttttctctttgtattttcctcggtcaaacatctcaagatttttttttttaattattttttttcattttacaaatttcgtatctttacattatttgtttgacaagacatatacttctctgatttgaaagcataacaagaaaacgtacttgtgtgattgatacctcagtaacagtttttttttccgctcttcatattatctaccatatggaaaagacattcttatagatcaatatgttttttaaatgaaactatggtctaagacaaaatagctagacacaatggccatgatattttctgtatatataaaaacgaaaaaaaaaaatattgatcaaccagtatatgaaatttaagatcatgtaaataacaaataaagacatttagtagcaaaaaaagaaggatagatcgcgtaataagatacatttatcatcgaacaaatcacatattcatatgccgacccacaaaaaatcacatattcatattacagtcataattcataacaacattcgtcttatttatttgagttgcagacccccaatttatatagtacgtatgtatagtagacgggtttaaggtctacaacaattattcgattttgataactttgaaccatatggttcacgtggacaagagtggtgttttttattccacatatcatatatggtgttgagtgtcgatcaaattagaatccaaggaaaaaagaaactccataattaaatttattattctttaattatacagactatatatagtaatgttgcatttgtggacaagactaattaatatgttttcgataggtaaaatcgaataaaagagtcaatggtgaaacaagttggcgataattaacctttttctaatcgaggggccaaagaaaggtaaaataataatggcccgacaaatgaaattcgatatgatttaatgaggatttaccattaaatttggttgtcactttcatagacttttttcaccaatttccagatctcccactttaccattccatcatttttgggaatttcattattctaaattcaagtatcagtctaattaattaactaatactcctatctttccgtagctattattttataacagttacaaaaatacgtggcaagaaaaagagtgtatttccattttccagcgttcaagattaatgggccatttgattttctaaatattgggccaaagagagaatccatagaagcccattttaaactatcatatcttcccgcgaaaaagatagtgtaaccactttctttaacagcgaatatgaccttcccgtgatagtcactcttttggattccattcaccacctttgatcaattcaagtttgacacgcttctctcgaatccttctaacatataatagatccatcggatcctccaaaaccacaagttaaaaaaattattcaagaaacacgagaacaaaaacaatg

SEQ ID NO: 25953 - DNA, 3003 bp, Unknown; identical to SEQ ID NO: 25952
  misc_feature (1)..( 3003): 2750-1469P.txt file - cDNA_ID_2709295; gDNA_ID_2214563; Annot_ID_185936

SEQ ID NO: 25954 - DNA, 3003 bp, Unknown
  misc_feature (1)..( 3003): 2750-1469P.txt file - cDNA_ID_2709320; gDNA_ID_2214564; Annot_ID_134924
ctcaacatggatcgcttggataatgaagtgtatctctacagtcagcttttcggttctaatcaatggttctccacatggtcacatcaaccccactcgtggaatccgacaaggcgatccattatctccctatatattcatactttgtgctgaagttctctctcacatgatgaaccaagccgagatcaacaagcagcttaaagggataaaactatccacaagaggtccatctatctctcatcttctctttgctgatgattctctattttttactatggcaaatcataggtcatgccatgccattaaaacggttctacgtacttacgaggaagcttcgggtcaagcagtcaatttgcgaaaatcaactattacctttggcaaaaatgttagcaatgacataaagcgaagaatgagaaatctcctcggaatacacaatgagggaggtggcggaaaatacttggggctaccggaacagtttgataagaagaaatctgagatgtttcggtatattgttgagaaagttaaagaaaaaactcaaggttggagcaagaaatatctgtcacaagctggaaaagaggtactactcaaagcagtgctttagctatgccaatctactccatgaatgtgtacaagcgaacaaaagagatttgcaatgagattagtggagtactagcaaaattctggtgcggttcagacgctgaaaatcacggtatgcactggtttgcttgggatcgtcttgctttgccaaaacaggagggtggtcttggttttagggatcttgaaagttttaatttagcattacttggcaagcaaacgtggcgaatgcttcaatatccagagagtctaatggcaaaacttcttaaagggcgatatttccatgattcaaatatcctaaatgcagtccaagggaagaaggcctcttttatttggaaatccatcctacatggtagagatttagtcaggaaagggcttcgattctgtataggtgatggcacaatcgtcgacgcttggctggacccatggttaccaatgcatccccctagaccaagtgactccaccacctagaaacgttctcttgaaacaaagactatggaaattaagaactgctccgaaaatcaaacacttcttctggcggcttctatctacttctcttcctactggtgcaactttgaggtatcgacatattactaatgatgctaaacgtgtgagatgttgcagagaggacgaaacggtcaatcatctcttcttccgctgccattacgctcaagtcatatgaagaggctcgagaatcccaaatcccatctttctcgaccaaactgctccatgggacgataaaattcgcgccatctttaatatcaacacctcagcacgaacatctcatatgagacagttgcccttatggatcatgtggcgattatggaaaagtcgaaacacacttatgttccaacaacaaagtatacactggcggaaaagtctaagattagcgaagcaagatgcatgcgaatggcaagatgcagaagattatgttcaaaaaagctcaagcgggactcagattctaccctcaacggttaatattcaaaaaaattggacactcccacctagcggctggacaaaatgcaactatgatggtactttcaacagagacttgccaagtaaagctgcttggattatcagaaatgacagaggaacgttcttaggagcaggacaagcggtggggataacaacaacaaactctcttgagagcgagttacaagctctggtcatggcaatgcaaaattgttggagcaaaggccataagaaggtttattttgagggagataacaaagaggtagccgatacaatcaatgacaggaatccaaactttgcggtttttaattggctaagagaggttgtggcttggaaaacaagatttgaggattgtcgcttcacatgggttcgacgaaattccaacatggcagcagacacattagctaaacatgcactaccttcacatacttcttatcatttttctagttttactcctcatgtaattacagacatactccatcgagactttgtctctgcagttcaataataagattgatgttgatgaaaaaaaaagaaagtaaacttagtaaccgaaatatccgataaccgaaccgaatacccggaaacccaggattagctatagttaacaaaattaaatggataaaacaaaacgtacggttactacaaaatatccggcccataaaaggcccagtgatctctgaaaacatgcttcatgtcagatagataaaaaaaaaaaatagttattacggtcaaactttttttcctcttctgtgtttaaatttccaaatctcagtgtaccccacaaaacaaaattcgaaaaacctcgcaacgagcgcgagattcaaaaatcaaaatcaacaacacgcgaatcaaaagaaactgactcacacgcgcctctctcctcgaactccgtctcttttctctgctaaaacaaaaatcatctctcttctcgctctctgcttttgaatctctcttttttctctccaccacctgagattttcccatcactttcccggaaaaagcagcgattatcttcatggcttctcactcaccactatcccactgatgcttcagagtatgtttcgctactctctcttccccttaatttttcactttctctgcatttttctgtgttgttctttggaattagagtaatgcgcgatgaagaaaatggttgaatcgttactttagagtaattcgctgttgttttttggttattatcatcgtcttctatccaattttagagcgaattaagtagagattcgattttgtttagagtagagaaaatttcgaattcgctgttgttttttggttattatcatcttcttctttccaattatagagcgaattagggagagatttgaatttgcttcttcgattcaccagatccttgagctacatgtctcagactcaattctaattccttgttgcagttattggatttgaggaaggattatg

SEQ ID NO: 25955 - DNA, 3003 bp, Unknown
  misc_feature (1)..( 3003): 2750-1469P.txt file - cDNA_ID_2709350; gDNA_ID_2214565; Annot_ID_134930
tactataatctagtaatcagaacaagacgatgattagtagtataatacttttttttccaaaacctaccactaaatgtttgtaagaagttcagattagtaatcacacagttcaaaaatttcttcaccttaatcaccatagaaaaaaacccttctaaatccgttcacaacacaagagatcctaagattaatcactacagagtcaacactacttcaaaatgatttgattcatctgatgaatctgcagctatcacaaacaagttcgatctctagagatctaaacgcagagagacgtgaaacttggatcgatgaatatttcaaaatcatacaaattagagaattcagtaactaagaagaagacgaagcggcacccaacaaaactttctaataacccatttttctgaaaatgaacttaaaggatctgaatcaatttgtggtcggttagaaatcccgaaaaaagagttaagaagatcaaatgatagaaacagaccatgaatttgaaagtgcttaccaagtggagctgatgaatctgagattggtactctgttttacttttccttgtttagattattcagctgggaaaaacgcagaaagagtagatgatgatgacgaaagaaatgcaaattgggtgtgtgtgagagagagaaggagaatcttttagggtttataaagtggagagtgagtgtggggtcgtttcgtatttttgaaagccaaatctggcggacgagaagaccgtcgcattttgtttttatttcccgttttgccctttgttttctctcattataatttttagtacccctaaatgtgatgtggcacaaattgatcattagcttccattaattatcaaaatgttacaaatgtaattgttttattttaaaaaataaaagaactagaggtaatatgtgtggtgtgtatattgacatttgacactaaacaatgataacaatagtgctgtaaaaaaagacaatgataagaactatctttatatatagtaaaagagagaagtgagaagatccaatgtttgttaaattactgtacacatcatatttttaaaaagtttttagttttcttctatactatttcttatatacaattaatctaatgaggttataaaataaaaaataaaaaaaatctttatatttagaaaatttagaataattagttttttgaaaggtgtgtttcacatttgtgataaaacttaatatgtcatatgtaaaccataaaacatatttagtttgcatgttataatgtatacctaaagttacttttaaagaagaaagtgatcaataacacatctaaatagtgatttatgcctaacatgtaattgaaatcatggattaacaagaaataatcatggattaacatgatttcttactaaaaataataattatgcattacctcagtaaaaatagcatattttactcaattaaaaaaaaagtgaaaacatctaatacaaaaatgacattgaattgcattagatacatatgttatatttaatgattcataattttttgtaaggagttgaccaaaaaagtatgtagaatgaataaaagggcagattagtcatttgggaagaacagaagaagaacaaaaagagaggcggtggctgaacggctggctggtcgaaaaaagcgagtaagaaggcccacaccaccaatggagccaccgaccgaccaaaccgtcctcaccatgaaatctaatattatttccttcttttagatttgacccctcagcttttatttcctatttaatttcccctaatatgaatagagacgctttcactttatttatttcatttgttatggtatcaaaatccacatcacgttgattattttttctatttaaagatttgtttcatttccaagttgtgcaattgaaaatgtatcgtcaccgtcctgaaatcgtcactacaactttttcaataagactacaaaatgacaagtttagttatctacacagtcaatatcacaaaatgtttggttcgacttttatgttcggtggctataaatgggttttacaaagttacatgaacaataataattatggtttacatgttaaatgtatgactttgtttatatatgagcttaaggaagtatttaaaattcaaaagtggtcaagttagccaaattggcggctattgaaacgtccacattgggtcaaagttcaaagaaacgcagccaatgctcttccggacttttcatcgtactttttttgttattaagaagaaaaactaagaaagtcacaagagagaaattcaaacaaaatttttatattagaagtcccaaaacataattcaaattaactaaactacgtcgtactatatgaaattcttattaaaatatctttttgaataatacttctgttgaataatatgtagaagaaaaagagaataaaaagaaccggttcaatctttgtcaaaaaaaataaaaagatttaagattaagccaactcaacctcaactatttttcaaagtgggcgtttttcaaattttctcaaacatagatctttttccaaatgaatacaaaaatataagggtcgacttgctattataaaaagttcctaaattctctcccgtgctcattttgaaaacctccctctttcgctgcaagcagagaaaaagacgacggagaaattttaaatctgaggttcttttagtcctcgcgaagccagatgctactctctattgcacgtctgtgacagaagagctcgattagggaactgaagacaaagacacggagaaattttgaactcgagaggtttgattttgaacctttgaatctctgggtttctgatttcttcgagatttaactaggtagttgaattgaatcctgataccaccttgaagcgtttttgttgtgctttctcagattatccatgatcatgtgatgcactaatttcgtagtattcaattgctgggattctgaaattagcaaaccttaaaatggttgatttgtggaaatttgtctaaccggttaatcggttaacagagttggaactagtgttatg

SEQ ID NO: 25956 - DNA, 3003 bp, Unknown
  misc_feature (1)..( 3003): 2750-1469P.txt file - cDNA_ID_2709354; gDNA_ID_2214565; Annot_ID_134932
ttattatttagagtgattctcactaaatcttaggcggttagcaaccgccatagttttcaaaatctcattctatcgggattaaatctgtttttggtgactatatataaacattggtcgaatttttaggtaagtaaaatcagagttatattgaaaagaatcatgaaattaaattacaaaccaaagtagaacccatgttttgcttttttctttaatttgactttaccaacgtcgagtttcagagaaacttaaagaaacaaatgcagaagcaaaaacttaaacggcaaaattgtaagaccccaaattacttattagaaaaagaatatgtatatgttaccttcaccagtgcaactcatatcactagacaactaagaccccgacgaaagaaaaagtttttaatatcaagattcattttcttacagtaatatcaagactttttcatcttttagactacaactttgaatacattgaagaaaactacaataagattgagaaaaattatgtttctctaagaaataaaaaagtaagatatatattaaggttaatttggaactgtattattttgaatcaaaaagaaactcaaaaagtgtgaaactcaaaattaagtctcctcatataatttgaaactcaaaatgaactaaaagtaaaccattaaatgatgtatgtatcctcaaacaatttttgaaacaatttaaaatttatctacgttactataaggatagaagagtacatatacttacttaaaagtgttatatttaaaatttataaatgtgctaaaaggaagaaagatagagcatccctatatataactgcaacatttatggactatcttttatgaaaacttaggctcaccacacttctttgtatacaaattgtatcatttatacatttatgaaaaattaatttggatgtattcatgtatagattgtcaaattaatttgtacacccacattttaaatatatgctaatattaggataagtattctgcattttaaatatctaatggcaatacaaagtttagttagtaaagtcaaaatagttaattatttttttctataacataataatttgaaaaatgtattatgtaatttgataatttgtacattaattttattagtataaagacaaataagttagattaaatacttatagaatttgttgacaaaaaaattaacaatattaaacgaaaatgacaggataatctgtatccagaaagatgatgtgtatacataactgcgtcaagacggatattgtatgaatatatgtaatagaacattaagaatcaaataaaaagatgtaagcatatgaagatgtaaaaaatgagtcatagtatcgacatatttagagtttgacttgatatgtttaagcttcattaccattatttttctctagctaagagaggagtcaacttgtgtgctacataggtccgtacattttatgtcgacattctttcgccattctttttgaaaaaagaaaaaggaaatattctttgtcttatatcttttcatcttttcgatttcttaattatttaaaaatagtatcgtaaaccagggtactcgtgacgacgtgtctgaatcagtctagtttgaattaatataatgaaaaactaatcactatgaagcaaacgatattaatttactctcttttttttcataatagtcgctctcgactacgtttacgatgcccacattttcctttgagaacatatattaatttgtagtcactatgaaaattaatactgttacatagaagacatatagaattccactttaacttgagttccacaagagcaaaaaataatatttctcctttttacaagatttaatttttctatgagactatattttcaacataattttgtgatatatgacttaaataaattaattttgatttcatatactaattatatgaactggataaacattttaattacgtcataatatcatatgtcatgcttccagttaatcgttatcggaggcttcggcccatgttgtctgaaaacccaagccatatcaatcatttcttcatacaaactaaaattccttcaattggagaagggatatgaaaataagagaacaatccaacaaacaaacacttacaaaaagatttagagacatttcctccagatcaatactcaattactcaccaaaattttgaacgatatatacttctgaactaaacatgttatacgcatctctcactcattaaaagctttcccaatatcatattaatcccgggatactttgaccatttattcatgtcgcatggacaactagttaagagtacatcgagacattgtatgagaatatcagtgtccccaaatctctgccaactccaccctggagaagggacatcacgtcggcaagattaaacgattactggtcgtacacagattcaaccttacctaacgcatgaacaaaccctccagtgagaaaaagacgcatcaccccatttacaattatcctcgcgcggactaatcccaagtcgaggacgcaactaaagctctgagactcatgatgagtttcctatttcatacccaaacgatatagtaatatcaaattattgctatattaattaaattaaacaattcgttcaagttgactttcattagatatgatcagatttgtctcttatgaatcgtaactaataatgcgcattattatataaaacaagtttaaatacatggtatacttcctaaaaaattacgtattgagtttgaattaattttaccatcaagatctcgtgaagataaaagggcaaaacgagatacaaaatcattagttgaatattttagtttttgttagtttaagaagttcaatatcttattaacgaatgaccaaacgaacaaaattaatactaccacacatttttatatgatattaatatacgtatatatacattcagtacttccattaccataccaagcttttctcttcttttcatcatcaagaatccaacctatccggttcataaaagccctaattttaaaataagatagagattatg

SEQ ID NO: 25957 - DNA, 3003 bp, Unknown; identical to SEQ ID NO: 25956
  misc_feature (1)..( 3003): 2750-1469P.txt file - cDNA_ID_2709354; gDNA_ID_2214565; Annot_ID_185975

SEQ ID NO: 25958 - DNA, 3003 bp, Unknown
  misc_feature (1)..( 3003): 2750-1469P.txt file - cDNA_ID_2709371; gDNA_ID_2214565; Annot_ID_134939
ccgaatacttgctttgtgatgtgttgcatatgtatgtagaaatctaagagctttcaattggtaacttgaatcgttatgaagattagtaagttctttttgttgagtgttttaattggtgtgcatgtatgtttttgcattgtaaatttcagttgactgaaatcttgtaaatttatttagtcttgtgtcgctgcatcttgcatgttaaggttacaaaatcaattttattagttggaaatgtaaaagtcagatgttctcttgtctctataggtcaggtttaatgtatatatcgtatgtgtgatacttttgttgaatttattcagttggaagaaactgtaaagcatgatgagaatggaaagcctgtaaaacgattgaggagaagagaaactttagtgcattcagaaaatgttgctggaagaagcttttggaatgagcactcctctcttcataaagatcttggacattttgcaaaagacattggcaaaattgaaccagattatgttaagtcgtttcagtttgagagtagattattacctttaacttgggttgtggttaggattgatggctgccattttcacaggtaatatgctttttagtctttgtttattttcattgttagacaatgtgtcttgcatggaagccttagacttgttaaaaaatatacatatgttccctacgatttccttaagctataatgctatattacaagtttatacacttctgaatgctatggtcggtctattcttacattgcgattgcttttgtgctctgctttaaattgtgatttattaggcaatgcttctactttttggaacttagaaaacatataagaacagtagttgacagctttgacaaacaaacgcctgcctattgcttgaatgattactatcgttatattgtaagtgaaactcatagagcttgctttggattttgatagattttctgaagttcatgaatttgagaagccaaatgatgagcaagctctgaaacttatgaattcatgtgcagtggctgttcttgaggagtttcaggatattgcctttgcctacggcgttagtgatgagttcaggtatgtaactctcagcccctttaaaccaagtttacatttctagatactaatcgagttcatctttggtttgcagctttgttcttaagaataaatctgagctttacaaaagacagtccaggtcagactagttttctatgcccttaagttttcttgttgcaggataaacttatctgtcttctcctaggttttcttgttcttttcagtctttataactttaatttctatatcttgttacagtaagataatatctgcagtagtatccttcttcacatcgacttacatgatgagatggggagattttttccctcacaaaaaattgaagtaccctccatcattcgatggacgagctgtttgctatccaacatcagatattctcctggattatctagcttggagacaagtcgactgtgagtatacttgtcttataaatgattcacttgtcttgtgagattgttgcttgatatcaaatagactcgtagtttgagttggatgctcctttcagcaattttgttttgtcttgcaggccatatcaacaatcagtataatacatgtttctggatgcttgttaagtctggaaaaagcaaaattcaagcccaggattacttaaaggtgctttgttcgagtagccaatgctccctcttagttcaatgaataaatggcttgtcacttacatttggctctgtttcagggtacccagacacgagaaaaaaacgagttacttagccagcaatttggaattgagtacaattcattacctgtaatcttccgcatgggttcttccgttttccgcctaaaggtgctacttttattatcatactccaaaatccttctagtgtttcatagcagattcttattattgtgaagaaaagaagggtcctttcaagagaaaccttttaaggcattcttgtttttacaagtggtctgaaatagttttaaacaagtggtctgaaataagtggtctgaaatagtttttacatttagacgcaggaaggtgttacagaggagaatggagaagtttcaggaaagcaagtggaagcagaagtgggcgtagactattcaaacattatcgaccaatgtttctggcaacaacatcctcacattcttagcttctcctaagacaggtattcattgctaccaaaaaaaaattccaaaccgaaaaccgaatgagattcagctcttattttgataaaccgaagctaaagtacaaaacaatcgaaccgaatggtttacttttttctttcactattttttgtttttttccattattttaaattaacctttttcaatttggtagttaattttttccttcaatgagagatttgggttgttaattttcctttgactggtaggataagcaatattagtgcttttcttttttttggtaaagtaagattcgtaaaatgtattgactaaaatgataaaagaggaagaaaatctcatccaaattttttgactaatatgttcatctaaggtaagttgacccaaagtgagatacattgtgttcttgcctaatgattactatagtagaatctcattccaagcacaacaatatttttaaattaatttcaaggggaattccctaattttcaattaatttgtatttataacacctaggtagatttttctctattaattgaaagaaagttccattactaattaattaattagagatttttaacttcaatcataggtgctaataacacaattaataatattttatttctttcattcctttttcaccattttaaaaaagtttattaattaaataaaaaaataagcgttacctccttcgacgatcagacgattctgccattgtcatacatttggcttagctcgtaacgtttcctctctctctctctctcgttccacaccactacattctccgtccgtcagaatcttcgaatttacctgttccgccaatcactcctcgcgtaatg

SEQ ID NO: 25959 - DNA, 3003 bp, Unknown
  misc_feature (1)..( 3003): 2750-1469P.txt file - cDNA_ID_2709393; gDNA_ID_2214565; Annot_ID_134946
cattgataatttcgtagtcacagccgataacgtttcggccagaaccaaactgaacttgaccggctataccagtaaagtttactttcagaagtttctcaagtagtaactccccactgttgaaaaatttgattttctccaagtgcagtttggttccccgtgcatgaagtaacttttcggagtaagaaaacgttatgttgattccttcattcagcaattcctcgatgccatgcgcaatcatccacactgtatcataggcatgtaatgcgtaggcattcattgatctgttgctctgcagtttatgcgtgaaatgttccatctttacggattctgggatatgttgacgaagccccactactccttcaaggcgttttagagtacctttgtcactcaaagaatctaaggtaacagagagccagtctgtggcgagccatacgtattcatgggtcatcatctgcagcttttgcgctatatcaaaaattctgagcaatgggtccggaccaaaatgaagaatataaactcgaggaccgatggacttggatttgttcaaagcattagtaaggaatttttcatcagaatgaactgagagcggcactttataggaaattctggatcttttcttgtacagttcatcatctagagcagaaactccatttcttccgagctcatcatccgagtaaactgagatcacttctttccatccataaaaattgataagatccacaagggcagacatttggtgggcatcattaggtgtagtccgaagaaagaagggaaattggagggcagagagagttggatcagttgctgcaaatgagacaagaggaaagtggagcccttttgcaatatcggaaattgtatgagcaacagaggatgaaattggaccgatcatagccaccacttctttctcaagcaattcaaaagctgcaaaacaaaaaccactgaagcttaaaccaggcccttagtggtaaaaccaaagttttgtttccacttatgtacaggaaacacaggtcctagtaacagcctgtttagggtatgcggtctatattgttctatgcattattagcattcggaacccaaaatatgtaccaataaaaaacggattaaaacgtaaatcgatgtgccaatcatttccaactatcacaaaatgaaatattgttgctactgatgtgcattgaccgctttctataatatgtttgatatactgtatcagccatggatgagtgtcacaagtgtttgaaacacaaaagaactagaagaacagtcacggtacctccaaaggacccacgaaagacattgcaggcagaatcctccattaatagccgtagctccgtttctttgagaaagcttttatcattgttcacatcggaaacagctgcctctagagctacttttgcagctcttccgataaccgaatcaaaagcaaaaacagcaccgatgttcaccagttgaggtctttggcaatccattggaaccaccagaatgaccacaatcagtgccgtaatagcgacagatgggtcaatgcccagtcccatggagataatgcaatcaaagtaaggaccacttcagatagtttgtgttggaactagaaccatctcatttaaatctagcaactcttcattcagcattgaggatgagaagattagagaactaagcaaggtaaagtttccaactttgacctgtagagtcaatgcgattagaagacgaatcaagatctaagcgaagagcaatcacaagtcaaaccaaattgattattttagctgaaaactagcaacaatgtggatatgaagacttatatacacaaactcatccggacagaagaaaaatctgaaaaagagtttttacaaattcattgaaattaacaacagtgagacattctctttacctctttgagctaccttctggttctctctgcggaatatacgcaaacactttgtaggcataagttaaaaaagggaaattttacgacaacgcaacgaatttttaacaagagaagtcaagaactatcttttttaaaaaaccatgatttgacaggagattactaaaggaagagaaacaaaactagagagatcaaatcatgcccagaaattcatccatcattcttcttcttctgagaacaaaatagaagagagaaattgaaaaacgtgtgactgaagtgcttttttgattcgagctcacaaagtcctatctagtctatatactctatagtcacagcagccgtttgtttgtatttttgttttcagtggggcccatcattattgggccctacatgtaacggcccattttgttaagtttatttaagattagattacaatataaatattttaattgccatgtgttaatcattttatttcttctcaaaagtttattctcttaagttaatttgtcaatgaaatgttaatagtatttcattttatttttgcataaagagagacccgtagcaaggcaaaatttgagttggcgttttttattcataataaagatttttaggcggcaaaaaactattacataatgagattttatcacttattcatctaataatatttaattaaattacatatgtgtttttttctagctatgtcatttatttttacaatttatataaaattttgatatgtttccatgtatatatatattttaataaatgaaaactcaatccagaaaacataaattttgattttattttaaattatatgtttttatttataatttgttatctcttttatacattaaggtgtttttgcaataatacagtcttaatttttaaaaattacaattaagccctaaactttgtaaatgttccaaattaggaaggaaataaagaaaggagacaacttaaggttctcttattaaatgccattccctttctttcttacaagtcacaacctctctctctctctctctctctctctctctctctctgcgtctttctctttctctctgtctgaagttgagaacacgaaccactgaaaaacccgcgaaagactcgagcacgaaccaacaatg

SEQ ID NO: 25960 - DNA, 3003 bp, Unknown
  misc_feature (1)..( 3003): 2750-1469P.txt file - cDNA_ID_2709413; gDNA_ID_2214566; Annot_ID_134966
tatgtttttatcaagaaccacagccatcttcttctcctcgtcaacaaagaaactcccacccgaataagagaaggaattaccagtgagaggtttcatgtcaacctttaagaacaacttgttccacgacactgcattgggctcaaccttgctgctaatccatatcttcaaggtatacggcgaagaagaccgctgacacaagaccgcaatctggttatccccaacgctagatagagccacagtatcaccaaagtaaggctgaaatggcagaggcagaggcggtctaaatctctccgttgtgaaatcaaaacacagcaagaaataagaaggatcttgtcctccatatggaacaaccttgtctcgtgcaaaccagtaactgtttccatcgatagacaaaccacggtgaacaaaatctatctcccaatccggattcacatcaagaacctcccatgaatcagactcaaaactgtagatttcaaactcacaaagtaagtgtctccttccatactcaccgtcatccacaaatctcaaaactttatgattcttcatcacatcgtagcccagagcatacctatcccatttgttgaaagagtttctgggtttgatccaaattgtttgcccaacacaagggttccaaacaacaaccctagatatgtctttagtggtgcataacaagaaaccctcgcagtgaaaaatgttagatatgtcgacttgtgcaccaccgtctaagctaacaagttgacctaaacgctctatgggattagggtttagtagattgagactgaataaagaaaccctaaaatcgagcatcatcacaacatgaaactccttactctgcttcttctttgcttcttctttatcgatgtgcttccttgtaaaagacatatctttggataaagtgttcaactttttgcatgtgaatcgtactcttctcagagatgtcactggaaacttcgagagcacctcctccgccacatcctttggaagatccgagagcatcgtcgttgattgtttttgcatatcgaagaaattttactttaccttttactctgatttcttcagagattatgagagaacgaacacttcagaaatgttagatgtttctaaattgggcttgggctttaaagtattacccaaaggctattaaagtcgttttttccaatttgggctcctgatttattagtatgggagggcttagttttgggctttaaagtatgccccaatgcctaataatgtctagctagttcttcgttatactaaagaacgaattttggaaattcttgaattacgattgtacccttatattaatttcatcttttgtcttattcttatttatgcaaaagttatgcaaaagttttaagaaattagcagccaagcctaaagaatcattgagagtttataagggtgatttggtaattgagtagtttattagctaatttgatttcagtggcacgtggtaaattactggtggtttaaaactattgtacgtggacgattcttagccaacgaactagtacactctagtgcgaacaggtacatgattaaattcgtggacatccaatcatatctcgtccaagataagaccaaaacatatgaggtcattactcactaataaacatttaaacttttgttttgtcaacgaatagtgtgtttttcttttgtcattccaatttttttctgttttcttttcactattcacttttggtccataatattttatgggtatataagataatcgtttttgtcttcatacatggtaacatggatgtttatatatgtaatagtgttaaaaagaaaaagtggtcggttatacttaacttattatgatagagctttgaaaacaaacaacacgagatggagaaattagtcattcaacaaaagaaaaggacgaacgcagtgacttaacatgaaactgtgagcggcccaaaatcatttatgtaatggacccttaacttttcatgcacacgatttttctcatttatatgtttttctgctctctttttttcctctttatcattactttaatttattttatgttcttttttcgaagcaccataattgtatgctttcaccaaataatccaaatttagaatcattaatatgtcaaaaaagaattgcatatattcaataaaacgtaatgctaagtagtacaatgcatgtattatacaaaatgtaatgatatagatccaacgtatatatcaaagtggaccaaaatatatcttatgtattagacgagtttactatgcaaaatttatgattctattccgcatggagcgtgctaatactacttcgaacccctttgagaccaatatgtgattctatattctatctagtacaaattatgagaagtatatacgtacgatgagagtataaaacatttcaatatttgtatagagaggacaccacttggttgacttgacccacgataagatattgaagaaaccaaacttgtatagtacgaattcgaaatcgtaattgatgatgcgattcgacaagtccaggggctccctcccacgcgcaatgggcccagcaaccacgtgtggccactagagagaataaaccattagcccacgtgatcttgggcccaatcaatctctccctcacattaaacgacaaaacaaaagctcttctgggttaaattgataaatatcaaaactttaaaggtaatttgctaaaatcgccacacaaaaaaagtcgcagaaaatatatgaggaaacaaaaagcgaagacgacaaaaaaaaaaaaaactctgatttttttttgttatctctctctatctgagaggcacacattttgcttcgtcttcttcaatttattttattggtttctccacttatctccgatctcaattctccccattttcttcttcctcaagttcaaaattcttgagaatttagctctaccagaattcgtctccgataactagtggatgatgattcaccctaaatccttccttgtctcaaggtaattctgagaaatttctcaaattcaaaatcaaacggcatg

SEQ ID NO: 25961 - DNA, 3003 bp, Unknown
  misc_feature (1)..( 3003): 2750-1469P.txt file - cDNA_ID_2709421; gDNA_ID_2214566; Annot_ID_134962
tagaaaaaaagagtttcattgctcggtgctttcccggcgatggttctccgattcaccagacttgagtctcatccggtggaggttgtggaagattcacgtgtccttagcttattattattggtctgacacgtcttaagcttatctcttttttgtgacgtaaaagtctgttgtggacctcatatgtagactgtcttgagccttttatgttgtaacactgagcctcagtatattaaaaataaatctttctctgaaaaaaaaaaaaaaaaagttaaaaacctacgctaaaaaattctaggtcttggaaaagagtatttgggccaaatgatcacattaattagttatgggctgaaataacattctgaagttttatgaggaccgagagaactaagtttaagaaaaatgttgaaaaaagcgtattagcagagggacaaacgctttttagggttttagatttcctctgagagagaattttcgaaagcttgagagagatttccaactacgttagccatggcgagcaccaaagttcaaaggattatgacccaacctatcgtacgtttcttcttcgattcctttgttccatctctttattgtttctatcgaaacctaattttgtatcttgctttttgttttccggtggcggcggctccagaacttgatttttaggtttcttcaaagtgtaagttgttcaatttcttctgatttgctctctgaggttttaggttattagtagttcgtctactgatttgttccctggtcttttgtgtttgtgatgcagaaagctaggatccagatttggctatttgagcagaaagatttgaggattgaaggaagaatcactgtaagttgatgttgaagctccgttatcatgaattgattagattcctggctttgtttataggacattcgagggttatgctaactttaggagagtttgaaatgcattagcagtgtgactatctctctaatttagtctgtgtttgaactgttgcatttgttgtgaattgaaaagggatagttgtcactgttactactactgcacaaagaactgataagagcctgccaatagaaactagtttgattagctagctgttcttaggttgagtatgattgtgtcattctcttcggcttaaaacttattgtctcctacagcctacttggctttgggtgttacttgtttcagtttgttgctatgcttgtagttgtatgtcctctatgattttcgagttatgattcaagcattcaagcttttcttagtttgattctatgataatttggagaaacttgagattttgtgatggtgtcattctcattggcttaaaggtttgagttgtctacttgacttttgttgttccatgttgcagtctacttgacttttgttgttcctcgagttaagatcctagcttttctgaggttgattatatgtatggaggaacatgatatttgtgatagtgtcactctactcggttttaaacttagatttttgtctacttgaatttgggtgtattattgattcttctaggagaatccatcaaaccttgcttatccgtcgtcctttgcagggttttgacgaatacatgaatctagttttggatgaggctgaagaagtgagcatcaagaagaacaccaggaaaccacttggtgagttatcctgaactcactctttgataacaagtctcagatctgtctgcttatggtttgataactcgtgttaatacctattttcaggaaggattttactcaaaggagacaacataactctgatgatgaacacgtaagtaacacaatctctactctgtcttctctctttatgatgtatagcagcttgatttgtcacataacaaaagattgaaacaaaatcctttctatgttaacaggggaaagtgatgtctgtctcaaacaactctcttcgatgaccttcaagcttatgttaaatatctgttgagttcttcctcagcttaattggtacttgacgataccttcttttcttcaatgtcgtataatatattgcaatgtagtgagtgacaaaggagcttgatcgaatctagtggattggttggttaaaacttcaaaaaagagatttggtcccttttggttaaatctagtgttatgtaatttggctgatctttgttgcaactttttaacctctgtttaaatttcaaaccttaaaaaagtaaaaccaattgattttgattataaaaaaaattgtatcatttttgtttgtttggtgaactgaccgagttggccattctcagggctcaagtagattgaaagtttaattatactaatagaccaatcagaatataatctgttaaagttaacataaaaatacagaaatctatgtgaacattaacttttcattgcaattagatgtttttatatccatgttgattgttgaatcttatccctaatcttgctattggtgaaatgaatgtatttttactattaaagtctttttttaataacaaataattggactttatacaacaaagtattattatttaattatcaactttagaatatagcatgtgccaaaaatacatacactagccgccggcccaagaatgtcgtccaataaacgaaaagcaaaagtgacggcaatccaagcctactgtgatcttgtccgcacccgataactatctttaattactaaaactagtcaaagtactcgactaatcacaaaactagacaagtgtttcaagtaaattaatttttgatcttttcattttatctctctctctttttcttctatccaaaacaccatttttgaggtatttttctctctccttcgaatcgaattttcaggtttctctttccgtttgtttgaagaagcttttaagtagaattcataaaatcttgcttagcttctgggtttgatttgtttgtggtaaagttttgattttttttttagtttgagagctggatttgtgattctttctctgggttggtgaagttttttacttgcttcgatcttatagatcagagcttctagcagcgtaaaaaatg

SEQ ID NO: 25962 - DNA, 3003 bp, Unknown; identical to SEQ ID NO: 25961
  misc_feature (1)..( 3003): 2750-1469P.txt file - cDNA_ID_2709421; gDNA_ID_2214566; Annot_ID_186015

SEQ ID NO: 25963 - DNA, 3000 bp, Unknown; identical to SEQ ID NO: 12686
  misc_feature (1)..( 3000): 2750-1469P.txt file - cDNA_ID_2709429; gDNA_ID_2214566; Annot_ID_134959

SEQ ID NO: 25964 - DNA, 3000 bp, Unknown; identical to SEQ ID NO: 12686
  misc_feature (1)..( 3000): 2750-1469P.txt file - cDNA_ID_2709429; gDNA_ID_2214566; Annot_ID_186011

SEQ ID NO: 25965 - DNA, 3003 bp, Unknown
  misc_feature (1)..( 3003): 2750-1469P.txt file - cDNA_ID_2709433; gDNA_ID_2214566; Annot_ID_134957
gaaattgttaaaaaaaaaaacgtacagacatctcttacacttaaatatttctgatggaaacactaaaataaaatattttgatcgtagaaatataactaatatttacttattttttctttttttttaggttttaaaattctcattatgttggttttagtatgtttttattttatttttaattgcataattaattaagatatttttttgtacaagataatgccacgcaagcattttacgggactttttttccttcgcatgcaaagtccggcggctcattttacacgataatgaggatttgctcatgtttctacgaatttaacaaaaaccgaaaattgcctttaaatgaaaaagggagagtcaaaaaaaaggaaaaaggaatattcaaaatagaaaagtagaaaagagaataatataaaaataattatctcaagaggctatagataaagtgggacccaagcaaatcttttagacaacgtggctgatcctatcgggccccacaaagacaatggttatgtggaatttggatatgtctccttttttttttttgctctcccacgctcttatcttgtatttagttagaaatctgaaacaattccctcaaaaaaaaaacaacactattcgccactcatttcatattcaaactttaaaaaactgaataaattttaataagaaaatttttaaccttttgaacaagagttttttttgttatattttgataatttttcctaacttcaaccaattaaattataatagacaacaaaatttaccgttttgttatttataacttacatgcatattgtccaattttaaacgtgaacgacatgatggtaacgttagttacattgtagtctcagttaaattcaaaacatttgattatttataacccacacacgcataatatccattttaaacgtgatttatacatgatgatgacattagttacatagtagtgttcgttaattacaaaaaaaaaaaaaaattggacgtttttcttgtttagaactcacaagcgtatattgtccagtctaaatttataaaatagtggtgacattagttacataatagtctttcgtcaaaaacaattttttgaccacttttatcattcataattcacacactcatattgtccaatttaaacgtgaactaaatatggtggtaacattagttacttagtaatcttcgttaaataaaaaaagttcaaccgttttatcatttttaacccacacatatatttaacgtgaattatatcacgagttacataatagtctccgttaaatttggaatttagctcaaatttgttgtaagtgaattgcttgttaccaatgtcgtcagtaaaacataacggtaaatgtttctattttgtattataactattttaacataaaagatataaagaaagatttctatgtataatacattatttcgatatatagatttaaattatagttataaatatattttttgcttgatatctctgtaaattaataagacggaatttaaaataattacaataaataaattttaagcaaattagatgttagttaaaagttagatgagaaaacactgtagcatatgaagaaaaaaaaacacaaaaaagtataattagatgtgaagcattaaaaatgttcccattgagatgacgccacgtgtcacaatctgaggtcggcggtcgatgttataccgttgaaatgaggaagaaacggaaaaaaagtttgaaacgttcctaggagggaatggatgacgtgtcataatatgattggagtacatagctgccgttgatcgcgaaagtaatgccaagtcatcagtcgcacatgcctcgtgacttttcttatctttctcttcccaccctaacacgccacgtttcctctacatgtttgccacgtggcttttcactatccacccaccaatattcctaacactaaaattagattaaaatttatttactatgggatatgaaattatgaattgtgaagttatgtgattatggttaggctgatgctacgtaatttgttactctttagtagcagtacaaatgtactttacaaaaagatttggtgtgtttcaagcatatcatacaattctttttatttttacagtacatatccctattttacaataaaaatatcgtattttatttatcaaaatgttgttttgctaataatatttagtaaaataattttaacaatagtaagaaaaagcttgaaaaatcaaattttgtaaatttccccttctacttgttagtaattaatagaaatagataaatattagtttcttttgattttatttttcccaaattcactagcatttgtggaaaattgatgtgagtacaaaactgatgtgatttttctttgttattcctcaaaaatataatttttcaaccttcaattttaagttttttgatggatatgagcagcttttgtcaaatctattaaataaaaagacgtgtgccacaaattatccacatcagcaataagtttttttttaaaacaacatatatatggaaaaataatagctgtaaaatatttatttcccatttaggttaaaaaagtagaaatataattggagataagagacgaaacagctcacagcaaactaatcagtaattagggttatagctttttaaagatttgtttccttttatttcatttttcaaagacaaaagtcggtttgagttaaccacacgcgcttatctaacggttcagatataccaatcatatccatctcgagaaaatcgagaccgtccaaaaattgtgttgattttttaaactttaattttgtttcctctttcgttttcgttcttatcctcaccgaaaaaatttccgttttttcttccttcttaaattccacaatatggacgctctcttccttcttcttcttcgtaaaactatccttctttttcttctctccttgttatgaaatctgagaaacccagaaacaatatttgatttcttcatttacccaattttaaagttttgatttttttttcttctcttcttcgttatg

SEQ ID NO: 25966 - DNA, 3003 bp, Unknown; identical to SEQ ID NO: 25965
  misc_feature (1)..( 3003): 2750-1469P.txt file - cDNA_ID_2709433; gDNA_ID_2214566; Annot_ID_186009

SEQ ID NO: 25967 - DNA, 3000 bp, Unknown; identical to SEQ ID NO: 12447
  misc_feature (1)..( 3000): 2750-1469P.txt file - cDNA_ID_2709449; gDNA_ID_2214552; Annot_ID_134694

SEQ ID NO: 25968 - DNA, 3000 bp, Unknown; identical to SEQ ID NO: 12708
  misc_feature (1)..( 3000): 2750-1469P.txt file - cDNA_ID_2709461; gDNA_ID_2214567; Annot_ID_134987

SEQ ID NO: 25969 - DNA, 3000 bp, Unknown; identical to SEQ ID NO: 12708
  misc_feature (1)..( 3000): 2750-1469P.txt file - cDNA_ID_2709461; gDNA_ID_2214567; Annot_ID_186059

SEQ ID NO: 25970 - DNA, 3000 bp, Unknown; identical to SEQ ID NO: 12709
  misc_feature (1)..( 3000): 2750-1469P.txt file - cDNA_ID_2709464; gDNA_ID_2214567; Annot_ID_134986

SEQ ID NO: 25971 - DNA, 3000 bp, Unknown
  misc_feature (1)..( 3000): 2750-1469P.txt file - cDNA_ID_2709476; gDNA_ID_2214567; Annot_ID_134978
tcaatgaaatataaatgttctacgtcatcattaaaaaactatgatactaatctcgtttcctattgatattaatatttcaatatataagaacaataactctaacaagaataatgactgaatcttagtatgaaaataactttactcggtatcaaacgacgtaaagaaagggaaaaaaaagcatgaaaaagatgaaacctgtcatttacaacttctattttatgtctacttttatttttattttcaaaagaagaacaaagaagagatctttcaaattgtctctacattttatcttctcttttacttttccctaacgattttgttgtatgtagtatatatctttaataatcagtcgtttcgtatataaatgcgaacatctttttcagaaagagattgcctaaaatggcgtatatgttgtattattaccctaaaaacaaataatctttaacgttagttgatcatgcatgaaatcatcagcaaaccttttcataatcccactcatctcttttgtgctcttgtccttctccattttgttgttatcttctctctttttttcttcattttgaccatatatcatttctcaataatttttcgaatttatcatgaaaaacgtagaacttctacatgtcaaaagcttagatacactgaaaccatgtattttagtggtttatgctacaatcgtgtctatgtgttactattattaataaaatttatataatgcatattgttaaacaaaaagttgacgaaattatgacagaaaaaaatgacgaaacaatttcttttaactctttatccacaaatatctgattttttttttttttttttttttttttttttttttttttactagggaagcaatgaattgctctttttttctctcctggtgtcaatgcttcaattatgaacgttaactaatttattgctttatgagcttctttctcgtccaaacattcttaaaaacaatagtgaaagtctcgattacgaattcaatatgactacgttcaatttcatatatcgctttccattctaattttttaagatttggcataggtgtactaatcatttgcttcatctgccgaacaaattttcataattacttttttaaagaacgcatatgcggttataatttgtaccactcttaactttgcatatgaatttacttaattacttatgcacccattaatcaatggaagcccgaggtaatatgcaacctgattaaaaaatattacgttattattctgatggtccgtacatacaaatattactttttataattttcctatgtatcctttgtatatgaattgaaaagcattttagagaaataatttctatttagtaacaaattaatgagttattacccataaattattcttacgtctccatcaaaaagtgagtttagccttgaaagttctgtgtcgacgtcgttatgttataaaacaataaatacgaactcttaatcgttcgttgtcatataaaattaagaaaaaaatacaacatcatcattttttttattttttttgtcaaacttacaacatcatcatttctatcaaaaatttatgttaaaaaacaaattatgaaataaataattatttcacaacgaaaaataataataacaaatataattattttcaaaacaactttaaatttaatttctatatatagtatttggtataggtctatatatgatcgtgacgtgtgaaatataattgaggaacggtggatgattcttgaaaacaatgtggaagatatttaattcagtatgatgcttaaaaaaactcataacgttagctatgttttgttgaatattacatcacataaacgtatgggtgtgcacttagagcgagccggtgattataggtttgttttttttggtaaaaaattattgagagattattgattataggttttgaagctatcgatctgagctagagattaaggaacgaatccctctatgaacatttaaaccttgttctttttgcttattaactgagagattaggatcctaaaatctatacaacactagagatcattatccaaaagattttacttagtcccatttgcggtcacatttaattccctaaaagcatgaaaattctatcccatttgttttttccactagacttgggactcaaagcgtaatttataactatcttacgttagagagcattatttacgaccattatttaggctgaactcattatagacatcgatcaagctctagtgttaaatacattttctttgtgggattaatctttaaaggccttgtaatcacttactatttcgtaagttatgaagatttgggaaccggattatggctttgggaagttaagtcctatgactcaagcttacctttttagggttgtgtataggttctcgataaatgtttcagattagttcatttgtttttttgtttataaaaactacataatataaaacgtggaaagaaagtgataatgacaagaaataaaagtaagaaaggtggtggtgtgagaatcagattcgatgtcaactaattgaaagagagtacgcagctttttcttcacaattatatatattttgtggaaaagcttaccatacattcacaaagcattcgagatttgatttttatagaaaagtatttacataaagtattttctaaatcggtttctattttgtatgctttcagttttattttgtgttggggaagtgatccatgcattgagcttggagattgatggattggtaattaagcctattaagttaagcaggcctgtttctaaaatgggccctaataagcccaaactacaaaaagcaccgatatatcccacgttagatacatgtccacgtggactcctatgactggatgtaatctccaccacgcgcgatcaccagcttcgtctctcattttcattttccaatttattttcaaaaaaagataaatccagaaaaaaatttacaaaataaaaaaataaaaatctctatcttcttcttcgtctcttctcatcctcctctcaagctccaatg

SEQ ID NO: 25972 - DNA, 3003 bp, Unknown
  misc_feature (1)..( 3003): 2750-1469P.txt file - cDNA_ID_2709490; gDNA_ID_2214567; Annot_ID_134979
attttatatgacaacgaacgattaagagttcgtatttattgttttataacataacgacgtcgacacagaactttcaaggctaaactcactttttgatggagacgtaagaataatttatgggtaataactcattaatttgttactaaatagaaattatttctctaaaatgcttttcaattcatatacaaaggatacataggaaaattataaaaagtaatatttgtatgtacggaccatcagaataataacgtaatattttttaatcaggttgcatattacctcgggcttccattgattaatgggtgcataagtaattaagtaaattcatatgcaaagttaagagtggtacaaattataaccgcatatgcgttctttaaaaaagtaattatgaaaatttgttcggcagatgaagcaaatgattagtacacctatgccaaatcttaaaaaattagaatggaaagcgatatatgaaattgaacgtagtcatattgaattcgtaatcgagactttcactattgtttttaagaatgtttggacgagaaagaagctcataaagcaataaattagttaacgttcataattgaagcattgacaccaggagagaaaaaaagagcaattcattgcttccctagtaaaaaaaaaaaaaaaaaaaaaaaaaaaaaaaaaaaaaatcagatatttgtggataaagagttaaaagaaattgtttcgtcatttttttctgtcataatttcgtcaactttttgtttaacaatatgcattatataaattttattaataatagtaacacatagacacgattgtagcataaaccactaaaatacatggtttcagtgtatctaagcttttgacatgtagaagttctacgtttttcatgataaattcgaaaaattattgagaaatgatatatggtcaaaatgaagaaaaaaagagagaagataacaacaaaatggagaaggacaagagcacaaaagagatgagtgggattatgaaaaggtttgctgatgatttcatgcatgatcaactaacgttaaagattatttgtttttagggtaataatacaacatatacgccattttaggcaatctctttctgaaaaagatgttcgcatttatatacgaaacgactgattattaaagatatatactacatacaacaaaatcgttagggaaaagtaaaagagaagataaaatgtagagacaatttgaaagatctcttctttgttcttcttttgaaaataaaaataaaagtagacataaaatagaagttgtaaatgacaggtttcatctttttcatgcttttttttccctttctttacgtcgtttgataccgagtaaagttattttcatactaagattcagtcattattcttgttagagttattgttcttatatattgaaatattaatatcaataggaaacgagattagtatcatagttttttaatgatgacgtagaacatttatatttcattgaatagttaatagtagacaatcaatggttgttttattgtgaatttggttcacccctttcatttgttttattgcaagattacaagcttatatatgtttgcaatcaacaagataattaatatattcaaaaaagattcatataagagataaaaccatcgccatgaagatatctaatgaacgaagacgaaaacgacagatcagggacaagcctactcttgagtcttgacccacaaagataccctaattaagctttcatgattacggatctatatgataatgaaccctattaagcaaagttaatttatacttagccatcaacgtacatatatatttccaataataaatgcaaataaaaatgataattatgacaaattaaccaaaagttaagttagcaatggaccttggcgttttaaatattggcatggttagcaaatagcatacaaatatatgaaatgatagcctgaaaatctagtaatattatttttattttagtttataaggctcatccattactttttataaaaatgcctttattctgtttactgaaaaaaaaatcttttaacatagttttgtcaatttaaaattctgactgacacaaaaatgtaagtgtaaccaaaacagaaaagtgcgatataatattaaaaatatatagttactgataaaaagtcatactatttagttcagcattttacaatttcaaaataacaagattcccaacataaaaattgctgaaccagaaagcacgactatagctagatctaatgactagaatgaccaaagatatgattttcatttgtgagaaaaaaagaaagaaagaaagagttaaatttgtttgattgcacaactttttcgaaagtccctcttatcactaaaccaattctgaaatgttcacaaacttgttttacttaatggtaaagataaagctaaaatagtattttattaataaacacattgcttaaagcaaatcaaggtctttgactcttttggttgtcacttagaattaatgtcttcaattatctattcatctaggtccctcttatttcttcatacttagaccttgtaaatcatatgtatacatatgtggtattttctaacaaaaatcatatattatagatattattcgacagagggaaccttataggcgaagaaacgtccctccactcaaaccctaaaaagagaatcacaaaaataataatattaatacataagcatatacaaataatgcatgagagtggaaaatatatataagaaaagaaataaagcataagaacatgacccatgtttagaaaagcattatgttctcactttatctttgtgctccttcactatcatcatcttctctctaaacctctatcttctctctttctcttttggttctgtgctcgatctcctcacatctctctttaacctttggttcccttctttcgtttttatatgattctcccaccatttttgttcttttgagttttaaagatccatcaaactttattaaagaaagaagaacaaagagataaaagggaagaagaacaatg

SEQ ID NO: 25973 - DNA, 3000 bp, Unknown; identical to SEQ ID NO: 12705
  misc_feature (1)..( 3000): 2750-1469P.txt file - cDNA_ID_2709492; gDNA_ID_2214567; Annot_ID_134976

SEQ ID NO: 25974 - DNA, 3000 bp, Unknown; identical to SEQ ID NO: 12705
  misc_feature (1)..( 3000): 2750-1469P.txt file - cDNA_ID_2709492; gDNA_ID_2214567; Annot_ID_186048

SEQ ID NO: 25975 - DNA, 3003 bp, Unknown
  misc_feature (1)..( 3003): 2750-1469P.txt file - cDNA_ID_2709504; gDNA_ID_2214568; Annot_ID_135011
atcaacacgtccggtaaacacattccatagcggccgttcaaactataacacatcaaacatagaaactcagggagttagaattgattattggtttcatttgataagaaagacatctaaaactaacatatgcgactagtaaaatactaaatttttgatttctaatcatgaaattttttagacgagtttgttcatatgtattacttcataagagacggcatctcgggcggctaaagtgagaatgtcagcgcaagagacggtgttagggcatcgtttttcgagaatatacttgatctcatcgatgatttcaaacccggaaagcgagagattaggtctcgcttccttctcggacactgcttttccagcaaccgaatctaaaagcagcgatgcgtcgcacccctaaaaatcatccacatcagacttatctttataagaaagatgttcacataaagaaaaaaccctacatgcacatcataccctaacaaagcagtcatggtaatgaaccctcagtaacttgggagccaggctacggtttgcttcgactttcttccacactatctgcctcacgatatcctcggctccagggcagctattgtgatagaagttcatcttcagcttaccttcccatcttccttttcttatcttatggccattattattgaatcctttaccatcaacacaaagtaatttcacaaccaaaaacaaaacaagtggaaataaaaaccgaatctctaaactcttattagccatgtgatcgactttagatttgatattttcttttaagtgtttcttccttttgtatatgaggaatgcacttggcagagttgctttatatagaaactgaggctccatacttcatatatgcccgttgagtttctaatattttttagcaattgaataattattgaaataataatatgtctgggtggccaagcaaagttccctgtatgtgttgtgaaaatgaaggattaattattaagttgcaagtcaacataattatttagaagtatttataattcccgcaaataataatttagcttcattagttgaactataacgtgaacatccattatgcagatatttatagatttcactgctatctccatttattcacgcatttctttttttgttattcttttaaactttcattgtcctaatgaaagtttaaccttctttgtcagtggccggccattatcttaaattcttaatccttccatcttgcaataacttggtgtttttatatatagtatcaaaggagtaaacggattgtaaatttcacaatttgaagcttttacatatcatacatacactcacaaaagaaattcaatatccatggtctatttaacattaattcaacaaaaaaaaaatcatggtccaaatcaaaatctttttccatatgcaatgggaattttgggaaaaaaatcaaaattttgttcacatatagttgaaacgtttgttcaaaattttctgtctcttttaaccttttagttgacgcaatcgtcttttgtctacggctatatttgagacgaaaacgttaagttgaaaagtcaaacgaagtcgtcgcttccaaaggcaccaatcgttttaatctattttctcgggctcatatggcctaagtccacaaggtaaaggcccacttattattttaaaggcccaactcccaactctagtatgcgttgatttagcatataatttttttttctccaaagaagcaaagacacagaaattcacaagttattaatgaatttatactatttacattataacctctataaattaatactcgataaattaataacttttataaattaataaaaatttttggtcatgagttgggaccagtgtaaaaaattacacaaatcgataaattaataagataaataattattttaaaatccctatgtaaatatatggtcttattaataacataaattaatagttgtaaaaaattcttaaaatatatatatatatatatatatatatataagttatactcactctattcctttttgttgtatatatatatatatatatatatatatatatatatataagttatactcactctattcctttttgttgtatatatatatatatatatatatataagttatattcactctattcctttttgtttgattgtttagaaaaaaaaattgtttctaaaagattgattttttaagttttccatgtaatatttattggttagtattgacgaattgtaattttcaagaaaaatagttaattattattggtttaaagttataaaaaactgtaaaaaactaaaaataatacatttataatcaacatttaatatgttttcttaatatgtgtgttttttctaaacaatcaaacaaaaaagaacagagggagtatgttagaaatattagtaaaatatgaatctgctattatttttatttttattatactaattcttagtaatgttcaattttaataattttactacatcgaaaacacttttttgttattttatagacacaataatttagtcttatttgcaattatttctagaaaaataatgattataaataaaacaaaattaatttaaacataatatttttttaaaattacaaaattagtctaaactctctataaattaataattattaatttattgataaattaatacctctataaattaatagaaatttatggtcccaacatcattaatttatagagattttactatggaataagaagcaaatctaaaaaatttataaattaatatcaatatttatgctattacttcttcattttttaaagtcttgktatttacttaagtaagcctaaatttttaataatgatcttatcttatgtaattgattaaaaaatcgtatagtagactattcaacaaaacgtgaatcatagtgttgttaccaaaacccattagtgtagcgacaactgtcctttcacatccttatacaaattctcttccctccggtcatctcggaaacttgtatcatcgacaaaacataaatactaatg

SEQ ID NO: 25976 - DNA, 3003 bp, Unknown; identical to SEQ ID NO: 25975
  misc_feature (1)..( 3003): 2750-1469P.txt file - cDNA_ID_2709504; gDNA_ID_2214568; Annot_ID_186093

SEQ ID NO: 25977 - DNA, 3003 bp, Unknown
  misc_feature (1)..( 3003): 2750-1469P.txt file - cDNA_ID_2709513; gDNA_ID_2214568; Annot_ID_135007
aaaaaaatgcttcgtatttgaactttacgaagactactgttatcagtttattgtaagtttacttatctatgttttgtatttggattttcataaacacaccaatgtgacgtagaaatctgatttgcatgatttgtatttggatttaatccgctaatttttttagctatttaactattttcatcataaattacaatttattttcttataaatttccttaaaatcagtacttattccaccatattatgcaattttcttataaatttaaatttacatgtagaaaataaaacaaataagctaagcgcgtttatattttttttacgaattcaaaacatccaaattcaaaaacgaatataactttttccctttagtcgacactaaactcatcacaaatttgaaatagtaggagaccatccttaaatcccaaacaaaaatactttatattgatgtcgcttgaattgtcaaaacttccatctaaataatgagaaagaaacaaactacaggaaagaaatttcagtgaaaagttgacgtggacaagttagatttcgaagttctgatctaatccaatgatatttggtgagccacaaaaccattatccaaaaagacaatgtacattccgacccaaccacaagctcatcacgatccacaaatgtcgccacgtctctcgccgacatcatagaagtgtactaaccgtgtggtgtccagatgccatgtctcctgcttagaagtttccgcgacagaagattcacttcttcatctttttaaaaaaaaatgcagaatcattttcgatatcttacatgggtcactttttaatagttattgttctgttactttttttttccttacattaattaatactttatcgaatgtttgtttaagccgttttgggtaagctatttgttatgaacaataaagttgtcggaacaaagaatggagaaccttaaatgaagcctttgtatttcacgcaattgttttttacttttaagcagccctataccaattttttcacgtgttttaaacattcttgtttatagtaacaatttgagtctttttgcttcttcttttttaattacagcacgtattagcagcaaaatgatattattgacttatagtcatgtgactcatgtaaaaaataaaaattcaaaacaagaagatgttataaaaatatggatgaagatgaattgtatacatagaattaatattacaatgaatccgaatgtgtttagataagttgtaaattacaaaattgcgtagaaaaaaaaaaaatgttttgctatcagtatatccgtaatactttttatgaacggtcccatctctaggaaaaatgagtaatataattcatgaagcaattcattttcattttatttacagaaaaaaataatggtcgtcgctcgattattaagtgggacatttgtttttttttttggtattattaagtgatgcatcatctgttgtagtcttgtagaactctataatccgccaaatgcttcgcttcaaatatattcttgtatttatcttggtgtccaatcctactctgccatggacgggcctagctacgtaaattagatgggtctaccacggacaccacgtggacaagatttaatgttcatggttcatggaggtcgatcgtcttcccaaaaaaacagtcatttgatcctgtgttaataaaagtggatgatattcatgttaatatttattaaattatatggtttctcattctccattcttcatatcgtaattcttgctccacatatgaaacatttcaaatgttgggaataaaaggtttttttcagaaaatataataatcgtggtaaattcaatcccatcgcaagctctcctattggggttgggaaaatctttgaaaattttctttcaggctgtgtttagttccatggccaccttaatgaccagtatctttaaatacggcaagagttttaaatttgaaaagaaaaacaaaaacgtaaaatttcaagtattagacaacgtacattcttaaataggtgattgttgactccttgattaggagagctttcagatacattcgccccatttcactgtcatgtcatttgtatatactgttgctcgtcaaataatctgattctttgtttcaatttgtaatagcatttaaattacttttatttttctgcgttaaacttttcgactaaaggtcggtccaatttgcattttaaattactcttatattttctgcgttaaatgtatgagcgacgactctttcattttaagtagtctttttcattactttgcaacatctatcagtgtctgttattttgcattttttttggtcttttaagaactgaaatctaagaatctacgctaattacatgaatacaaccattctatcatttttctgtaattatggtgatatgaggaaaaaaataaataatggttgacagttatactaaacctaaacatattcgggtattaaagttacttggttagaaagaaaaattaaaaacccaaaatttatattttaaaatttctctttaaaggtttagctccggctatgaggatattgcgcacaacacaaagcctcgtatcaagtagtctacatgaaatgtttgcccattgtaattttgtaaactagcttgtttgttcgtgggtaaaataacttaataggaaaataccagcaaaaaaaggcgagaggaattagtgatttttccccccaacaaaattgttgcaaaataaccaaatcaaaatcaattgaaagcatattctttagacatcaatagagtcttcatagactaatcacaatcataaacacctgtagtgttcccttattttacgaactttttaataaataaaaaagaagaagataaattaattaacctcattgcaaaagaggaaaaacctaaagccacagctttccataaatagacccactcaccatctctgcacatcacccacatcttctaacagtctctcactttctctcttctctctctctctttcttttttgagtccgtgaaggctaagtctgaaagaatg

SEQ ID NO: 25978 - DNA, 3003 bp, Unknown
  misc_feature (1)..( 3003): 2750-1469P.txt file - cDNA_ID_2709531; gDNA_ID_2214568; Annot_ID_134997
gttagtttgaacgtttggtttattgtttccggtttagttggttgtatttaaagatttctctgttagatgttgagaacacttgaatgaaggaaaaatttgtccacatcctgttgttattttcgattcactttcggaatttcatagctaatttattctcatttaatacaaaatccttaaattaaatttgtacagtacctttgttttgggtatagacaattacattttaagtcagttgatctgtatcaaatactacacttacaaaatcacaaagtaaaggcagcaattaattttgctttgaattgaaaagctttgagagagtaatcaaatgcttaaatcacgaaaacttacaaatttcaaaattttgtctctccataaattctcttaataaaggctgttgtttttccaatttgaaaattctatttttcaaaatcaagaacaggctatggaatttcaagaagctggttcatcatcaagtagaatcatcttcctctgtttcctctcctatctaaaatctctttagtcttcagaaactgattatactttgtgcagcagcaagagtaaagattgactttgtgcagccgatggcacacaaagagagcaaatggaaccatcgcaaaagcttggcctgggacactgctttttccaccaaccctggtttcttcctatttcctatagattggttttgtgtagaaacaaaatgttaaattatatgattccaatgattttaccactttggtttgtaggagtgttagatcctgaagaattgtttgggagcttaaagattgacgagaatgagattgaagttgaagtaaatcataatcacacacttccttcgaaaaccgatgctcgtccaagttttgcttgggacaatgctttttttaccgatccaggtctcatctttttacttcaaagttctttaccctacttgattagtcaattatttcacactattccactattcctctcatatataacaatcaaaccttataatttagctttgactctgtatattcaaggctgacattgtctatatttatgctaaggtgttcttgatgctgaggagttgtgtcttgtgaacaatggtttcaccagtaacacgcagcttcgtaagtctgctgatacgacgacaactcaaggaagcagattttctgtggccagcattgagtttgatctgttccacgacctgagagcctctttacgtaattcaccgaatgtgaagcagacagtaactcaagagacccatcgtaagttaccagatggtataaaggtaaacggaaaacctcagaaactgtttcaatcatttgctttcatctaaattttacttattaattggttttgtttgtcaagaggactaaaggatacaaacagaaagttcaacctttgagtctcattcctcaaccaaaagtgtcttcttcttcttcttcttctttttctttatcatccatctccaaatctttgactcctagtcaagctatacgcgagaagaaatgtgttgcaagtgaactcggtgaggacatgattgatgatacatcttattctttcttcaaaacgagaagaaaatcaaaacatctttaaaagttgcacatctttgttttattttgaagagaggaataaggaaaaacacaagaatcatggttttgaagaacaatctggatcgaaatctaacataaggtcatcgtattcaagttacgcagtcaaggacttgacatcatcctactctggtctgaggttaccacttccaaagatgggatttttcgactcggtatgcttcctaagaaattcgttttattgaacctagcaaatatcttgtaatgtaagattcctgagatgatgaagaaaaaacaaacttttgttacagcaggagaacggagagaaagaaaacagagaaccaaatgctcttgaagcaaacagaagaagaagacacaaatccaaacttgagacttcttctacaccagaaaaccgcagcattctgggacaacgcaaaacacgaaagtgaaacgggcaatgatatatatgtcttgggtgcgttacaaggcatcgtttgcatgttgagttggataagtcaactgtcttcttttcttttggttgtagtagctgccttttttttcctttgttgctttaagaaatagcccgaaaaaaagaatgttctacatttcggagcagaaaactaaccgaatgagtttttggtcggatcatcggatcgatcagatatattttgagttacgaactgttataaaaaaagccataattttgtgttgagtttgcaaaataccttataacttgttatttgagattgcacctccatatatattaattcgtaagagtatttattaagtaagctttagtataaatccttttttcctttaaagtaagttaatgttctactaaataatagtaaagttgaagaaccgctccgttttacaccatgcacgtgttatctaacaaagaaaatatggtacacctaatggctaatgcaaaggacaacacaatgaaactaacttgactctgtgttatacaaacccatagacatctgcatacatcctagtatttgtataaattggactcaaattcctgaggacaatcatagcaaacaatcacatcatcgcaatatacataaacaaaagaggaagaaaaatggcaaccgagtggtgtagttatattggttcgtctttcatcctcaatttctacttttcattctttgatattggtaccgccctttatcgattttctttaatcttttctcttctcgctcacgtcaaatcgtttactattatttaattctcatgtgtcagtttcacatagcacattcttgaggaaattaattataatttggagcatgcattgtttatcgattgacacagatttatgtttcatctattgtttgaataacaatggattacacaacaaatccccaatatatgatatttggagagccatatagtattagtagggatatatagtttgattccataataaccgttggacctactgttttaccaaatg

SEQ ID NO: 25979 - DNA, 3003 bp, Unknown
  misc_feature (1)..( 3003): 2750-1469P.txt file - cDNA_ID_2709537; gDNA_ID_2214568; Annot_ID_134995
aagcctggactatggagaacttgagctacatgaatctcatgtttgtggagtcaggattctagagcatattggctacaaggagcatgtatgcataagctaagcttgggcctcgataaacctagactatgcatgggacccttgggttgtggaaagcttggatttaggagagcttctgggatgtgtatgtgtagaaaaatccatgtgtattttgtagaaaaatccatgtgtattttgtagaaaaattcatgtgtatgatgatcacactagtcactaacacgtgtaatagacctctacaagatgatcacactagtcactaaacggtctattagcttaaaatactcttgtaaaattttgttaatcatatgactttttctaaaatttgtatatatcataagtgctttaatttatttattttggcagcaaaacaggcctgctttaatttattaatttgtacttcacttattattttatttatttgaaatggtccattatccattatttgctaatttttggttttcctgattcttgcttggaagagcttcaaggcggaggactaggtcggggtgctccttctcccctcaaccatttgttgtctacacgttgccacttgccacacgtgtttttctcttagaaatcgttatcacaatctgttcttttgaactttaaatcaaaaaatttggctgacaaaaaaaaattgaaacattacaaattgaaatataggatactattttcattcataactttaggcatcagtaacacagaaattatgaaggcaaacgattattattttacatgattgattactaaccaaccacgactcgtctatagctttttcattatgaatatagaaattatacaagtctagccggatttgggggttttgacgacgatacggtttccatcaacaaaaactctgacccggtcgcacctgaagtctgcggtcaccggactcccatccaaaatcacggcagcattgacggtggggttctctctctctatcaccacggccgcatagtcaccatttgttcccgtaagctccggccacgagttcttccctgcgatcacgttacgttagatcggtcaatcatttacgtttgggattttggagatcaagaagctcatatttgagtaaatgaaaacaaaagaactagaaacatcaccatggattgaccatatgtaacataattaaccttctaacagactttagaaaatgtaatcatatatgttatagctattgaattacaattttaaatgccttgaatccatatctaattgaacattagctaactatttacaaacatataaaactttaattatgaactatacaatacaaatacaaaaacttactaggacattcggtcgacatttttcttcactcttgtatatatttatgtagtcttctgatgtatttgtatgctcacctttagagatttgagtcccatttatagaatcggatacgtacgttacgtcttggtgtcggtgtcgtcggtgaggttgcagattcaaaagtcaaactttgacgaaaccagcttttaatagccccttcgttgacattattaatttgtttggtaaaagctttgacacttctgattttgttttataaagctttgaaatgtacatatttatatcacgatgttcaaaccttatcgagaacaagataaggtttctaaggctaagataatgtcgaaatttgaaaaacaaacgaaggtgaaaaatatttctagcgtcgactgaattctgtttgcatgcaaaaaaacgcttctgccaaatttggcacttagccgacaaaaatgaccaaactgtccttcataaaattcatgtataaaaatactataatcaattgttgtcacacacacaaacaacgataatgtcaattatgttgaattgttgacgtacataaaatttgacaaacaacatcacaacttagtcatatagttttttttttgttcccgtttgataatcttgtcatatagttaatattcaatttgatatgtatatacagtttaaaacacgtatatacagttcaacttagtcatagtttttcttttggtctgtttaagattggtaaaagcacgtatccggaataaagatttaggtattaattggtaacaactctatatgcgggtttcgaacaaaattacaaaatcacatattatatgagaccaagtcaccatcacacttaaatatttgtggttgagaattaattagtgtttagttttgtgtatgtttcacactgcccaatgttacaaacttgtgtgtgtcaagaagacgaggccgcctgaaaacaaaacatgtaagcccattgaaacagacaccaaaagacatatggtctataagcctctccttgtgctggagctggacacaaattctttaagaccgaggttttcaaacgtaggcccaaataaatagaaccaaatccagttagaagcccaataaaatgttaattacttatctttgtattttaatttttgttctttaaagtttaggattttttacataagtaaaagaatttgttctttaggcactttgaatccacattgtcgttggtattgttattagagtatcttaattttctatgatttatttacgtagataattcattgaaaaattaaatgaatttatgtttaaattctcatctaattattatacaatagattgaaaaagtcacccttagtcaaattgttcatatagttttcttaaattgtctaattaattaccaaattaatccttgtctgaaaacttttacaaaagctaatacagaacaaatacaaaaaaacgtgtaatcatatcatataaacaccagtcgcagcgtttcgtagaaaaattcgatttctctaaagccctaaaactaaaacgactatccccaattccaagttctagggtttccatcttccccaatctgtacgccattttcgatttccttttttgttgtttactttagcttcatcgaccatgtttaggtttcaaattgagtgtttgttctgtttctgtagagtataaatg

SEQ ID NO: 25980 - DNA, 3000 bp, Unknown; identical to SEQ ID NO: 12730
  misc_feature (1)..( 3000): 2750-1469P.txt file - cDNA_ID_2709542; gDNA_ID_2214568; Annot_ID_135005

SEQ ID NO: 25981 - DNA, 3003 bp, Unknown
  misc_feature (1)..( 3003): 2750-1469P.txt file - cDNA_ID_2709550; gDNA_ID_2214569; Annot_ID_135028
ttaaatgtgacaattaacaggtaacaacacgctggaaaaccagcagagatattaaatccggttaaggcttaatatttactgcttacatttccagtgacaatatagagaatctaacattaaattatatgaacatgagattaataaactcactatagtaaaataagcaggagacatcacgtgaagcgtcggattgtttgtcataatgtcttcatcgtacggcaacgcgatgaattgaaacagaagacatcacgtgaaccagtgctacatggttaactcaatcattaacggcgtatattttcttgtattgattcttctccggatcgttaactatgctcccgatttaacaccgtcagttcagtatttatacggcgcaataaattacgataatgtagcctcttgagagaatgttttgcgggttggactttggagaagaaaacaatcatataacctatctatataaaatcgagtagaacgagaaataaaattattgtaaagcgagagtgcattaggattatgtggtctaattatgaaagaaaaaagattatgccaataatgatgatatcgaataaacaccagcacgatggttttctaataatccacaactaaacaaacgtaaggcctttatttatctatttttatgttaatcttgaactatcgaagcacgacttgagctatctatgagttattacaaaaatatgatgtcgtcagtttgtcaccgagggcttattaattagataaattacaaaccaatttttgtccttcatataatttcatttaacggatcatgaaaattaagaatcaatacgatacaaaatgcataattgtgtatttgacgtgataaaagaacaacgaaccaatgcacatgtaaccatgtgataacgtatcccccgaaaacaaaaaaaaatagccaagacactacagcgaagtcgtcttttgtgatgtcgattctatatcgtcgcccccacttacaacgacgtcgtataggtttaatcatcaatcatggtttcatttataaacaatccaacaaaaaaaactttgtatacgttctaattgataaaacaaaattaaaaaagagagggatggatcctaacactgagttacagagacattagagacaaatttgcttgtgacttaactaggtcaatataaaacaaaatcaaagaaagttccaaaaaacgacactgactcgtatgtcccccattcttacttgtcacccatctaatctaaccatctcctaggcagcttcacgagccgtagtctaatctaaaatcttatcattagacatttctatatatattttaatttctttacctttttacaccactgtagaaaaccacgaattttactccataagttgatatcattttcatttacgtctccgtcactctttctccctatccactaaacacagatcccaaaaaagaaataaacgagtaaaaaatgtaaagaaacgtccctttgtttctacgcgattttctgtaaattttccttcgttttctcgcagtttctttctcaccaaacaaacccttatatcactctatctctttctttctctcacattcaaagcttcttcttcttaactctacccctaacgtcctctcatcttctctggcagaacagaaaacgatgactaacttctcccgatccaaatccaccggaactatcgggttcccggagtttaaacccactcgacccggtccagacaaatacgagaacatccacaacgatgacgacgagtacgaagaaggacatagcactacgagtacagactactacgacgcttcaacgccgttgagctcacacgcgtcaagatccgggaacgggtccggctcgggtcagttaacggtcgtagaccttcttgcggcggttctgaggaagtcgttggtgatgtcgtgtgcgatggagagaggggaagatgacgtggtggcgtctatggatataggttggccgacggaggttaagcacgtgagtcacgtgacttttgatcggttcaatggttttcttggtcttccttctgagctcgaaccggaggttcctcctcgagctcctagcgccaggtccgttattaattaattattatcccaaagatgagtaatattccaaacaaaaaatgaatttaatattttattccatatatattgaaaaaagattatgatatgaggaattaaataaatattttcctagctggaaatctgtatatggcatgttactgtgttgggtagaatcattaagatggttgttgtttggatttaaatgcatgattacgacactcgtttcttcacaaaagaagattctctttttgtttttttttctctcttcaaagattttcaatggtatgtaaagtcaataaccatttattcaaacaatgaaactatttagacataaatttggtctttaatcaactcatgaagtagtggttgaatgacacatcctggaattggggattagtgtttaagctttcacaacataatgatattatttttgggctttccctagagattggtttgtatgatgatacatggagctctaataagtttggtttgtatagaagatacaaacttttgggtcctatggagatatactaacagaaacacgattacacaacaaatttctcataaaaaaaaaagtaaacaatttgtaaaatcgaatttttcccctaatatgtacggctaaaagaatggaaatcatgaatttttcaaaaagatataattggtcttcttgaattgtgaaacttatggctttccgtacgtagatggatttgtgaagtaaaagagtgactgattatttttgatgatacttgtgagtttcactaagttggtgactttgtatatgatataatgattggttctttctaacgattgagcttatatgttttctctagatttatttctataagagtaaaatataggtttttatatgatctaacatattggtttttctatgagtaaagatttcttattttaattcagtgtaagtgtatttggagtatcggcgaagtcaatg

SEQ ID NO: 25982 - DNA, 11 bp, Unknown
  misc_feature (1)..( 11): 2750-1469P.txt file - cDNA_ID_2709550; gDNA_ID_1564439; Annot_ID_149458
tcggtctaatg

SEQ ID NO: 25983 - DNA, 3003 bp, Unknown
  misc_feature (1)..( 3003): 2750-1469P.txt file - cDNA_ID_2709559; gDNA_ID_2214570; Annot_ID_135036
tacctcacccagccaaccaaaattaccaaaagcctacacttatcaagttatctaaaatgctaagcaaacccctaagtaccaaatatgcttcgtttttttgtaactgtaatattttcttaaggcttgtgggagattgtgggtaatgactgtcccactttgaagaaagaatggatgtggaagtagactacaggacacttacagtctccagctatatgaaaaagcatggcgaatctttctgttctgcttctgaaggtgatagtgcagactgatccttgtcttgcggcttaaaatatcaaactcagcctgctcccatgtatactgccaaatgaatatggacaatcgttagtacggttatctctagtaagttcgatatttatggctctgacacccttttttaccgaatgaagtacaagaatgaactattaccgtgaaattagggaatttccgttgaagcttcaactgtccctcagcagaagcacctccatataaatccatcacgaagataccacctttcttagacaaagcgtcacgtgcattcttgaagtaagaaaccaactccgagcgtttgtggagacaacaacaactaaaattaaaagcacacacaatatccctctttggcaacgaatcaggtccatctttctctaaagattcgacaacactcggatcagccaaatcttcattatcatcaccatcatccaagctgatattttgtatcagctcatgggatttagatttcacttgcttagcctcaagaggagttaaaacattcccatggaaaagcgacattcttgaatacacgtcagaaccaagtttactaatgttgttatccatacaccattctaacgcctcaagatcaaaatcaagccctatagcagtccgtctagtgtcagtcttcagccactccgcactattccaacaatcaatgtaaaaacttattcaagcaagaaaaccaaaagctacattattttgtaccatttagtgaaacacacaacaaccttaaaagagcagtgccgcagaaatcttcttggaaatggaaaggttgtcttccaccaacatacattaaaaagaacttctgcaagtaacttatgtctccttttggtgactgcaacaaacaaaaagcaatgaaaagacaagaacaacaaatgttaaagcttagtgcttgatgatagaacaagaacagtgaaacacaaacaatacaatttgttaaatcttagtgcttctttatacaagagatacagagaactctctccctaagaaaatttaagtacttttaactgatttcataaaaccagtaagaaccactcaatgaaacttagaaggccaagcacagaattgcagttacctgaacggattgttggtaaaggagaaactttgaaggcaaatccgatgattcgtttccatcattttcttcttcttcttcgtcagagttttcttcatcttcttcgtcgacggaggcaacagccggcgggtgttgatcgtagaaatcttcagcatcattcgaatattcacctttgtggcgacgtcgattaggttttttctctcgtttccccatttgtcgtcgttctcagtccaaattctcaatccagagaatagagcagagcagagcagtcgaggaagaagagaaaagcgttgactttgtgtttagtgtgtctttagactgaagagtgccctaaactatgccacgtaggccctattgctctcggtttagtgttttttttgggtcaaataccggtttttagtggttcggatggtatttatcatgtggggttttttttttttttttttttactatggtttagaaaaacttggttaattatcacctaaaatagtgttttggtgtttcgttggagatgactagacgcataggtaacaaatagtactttgaaaatctcaatagatcttgcaatgatctcctcttattataagtttatgatggataatgtatttcttacttgaagatatgtgtttcttgccaataactattgattatcttgtgtttaagacaataatatattaccatttttgtattgcctaatcgcttccacactaatgaacatattctttgaacttgaaaatttccttttttctttaatgcattgtcaactagtgaaaaattcattcgttcgttttatcattgagacataatcaataatcttgctagttgggtatcaatagaacctgttcgctttggttgacaattacgattcgctgctgaaactccggtctttgcgtttgcaatgtgcacaagtgactccaaatgttttgaatgaataaaaggaatgtcctttctgcaacttaaatgttctttgttgcaagtttaattttggtcactattttttgctacaattgcattcaaagtagatttactaatttgtgttgatgttaaggtttgtttttgaaataatatttctagtttgttttcttaaggttgataacaagaaaacttatcatggtcatgctttatattgtcactatttgaattttttttcaaatttgcctcctattagaaggaccttgtacttaatatatttgaatggtgggattttgatgtatctctctacgtggatttttttgtttttcttctgctttttaatacaatttgttttctttttcaaaccatttaatacaaaattattggaaaaaataagcatatattaaaaaacggcaagcgttttcgttatcattcatcaaaacattgagccaattcttcacaacttccaaaaacgcctcaccgtttcattcttctaccaacctacgctccgctgttttcaagaccttttcgtcttcgtcgtcaaatctagcttttttcttcatcgctttgcataatccattccttcttctctcttctccatctccttcctccgatcttcgtctccaattcggaatcttcctatcacaatttcaaggctcctttaacccttgatcatcaccgattcaatcaattcggaatcacaatttcaaatcgagagaatttcaatttctcttgtaaaaccctaaattatg

SEQ ID NO: 25984 - DNA, 3000 bp, Unknown; identical to SEQ ID NO: 12757
  misc_feature (1)..( 3000): 2750-1469P.txt file - cDNA_ID_2709566; gDNA_ID_2214570; Annot_ID_135035

SEQ ID NO: 25985 - DNA, 3003 bp, Unknown
  misc_feature (1)..( 3003): 2750-1469P.txt file - cDNA_ID_2709603; gDNA_ID_2214571; Annot_ID_135077
taaaatatttagataaaatgaaaaagtgtacattgctattagaattcaattattatttgaaaaattatatatgttttttatattcgcctatttaaacggggtttatctaatatatatatatatatatatatatatatatatatatatatatatatatatgatcttataaagaaataattaaaagatagagaggaatggacgagaaagcaacatgacagttctctcttattaactttcactcctcttcttcttattaatactgagatccaccagaaaagggttattgctattgattgatgaagatgatccattgctttacgagtacgattataacttctaagcttttttatatggtttcccatagatattcttagctttaactgaccaaggtagttatatgttgtagtcggaatagccattaatatctcaggtgcatcgcagcactgtaaacgccttgcaagcctggacaggtggacagtcatggtctagaagaagatcatgttcatagcttttttggagactttggcttttatagaaatcaaggaataagaaagtattttaaagtatagaggctttaggtattttaagtcatgctagaagtgaacaattggcatgggaggctgctcaattgaatcttgtaggagagataaaggaaagagaagtacttccaatgttttctccaataattttgtgccagacgagttgtttttaggaagatgcaaaagtagtacttttaaggcaaaatgtcacaggaggaggagtctctcaccgattcacttggaaatggaagccttattatatgagccatgaataataatatcctatcaagacggataaattatcagctttttgaaatacattgtgtagaacttgtcttaatagtggaattccttgagaattaaaccattttctctaatcttttcgatgaatttgcttcgagttaagttttttatttattttcaaagctaattatttctcgttcttgtaacttcaagttgattgtttagccaagacctcataaacctttactttcagaagtttcttatgtacacactctttctcctaattggattaccaatcaaaaagtgaatttttaactagtacaagattgaaaaaagaaacatttatataatatccgtttagattgaaagaatttttcttttgttaatctttatctcttttttatatttcgatataagccgtttctcggaaaattaaaaattctaagccgtttatatggccataagtaatgaggcagctctaagcccgaaatagccggtggccacacatattcacttgggacttggcccttttaaaacacctaatttcatgccttttcccgctaaacttgccactttctcctaaccaactcatttcttcatataaaaccaacaacatcacacaaaaagagccctcatttattcacctttcttttcccttaaatataatctttataaaaaaaattaaaaattaaaaaaaggaagtaaattgaaaaaacaaaattggtcccctgtcttcttttgttcactggacccttttcttggcttcgctaaatcatactatctctatcttctcaccgacactttcttcttctttgatcatatcatatttatcttcactacaaaaaaaacaagtaaaataaagccaatcttcttaaatatctccagaagatctatcagcatttacgtattcaggtcctccaatgtaagtttcttttttactttcttattctatttgtgtcaatctggtttcattagtcgtggcagctgggcaggtacaaatgctgatggcacatggcatcaaaactatcaatttatttatgtcctaaagacaaaatttaatgataaaatacaaaggatttaggtgatactatgttgtctcttaatgctcatcgtgtatctcttaaaaatccaaaatcttcttattttccttatatttaattaaatgtgtcttgaattttcaagtgtgtctctctctcaatactctggagtttttgtttgtttgtatctgatagttgttacaacatcaattttctgattattctatctttcaacttccctataaaataattatttagagaacaacataaagtttgtattttaaaaatatttaatagccattgattacttttgtaattgcgttttctattagttcttctcacaaagaaaaaggaagaaaaaaaagaagttgtgagagcaaaaaaaaaatggcagtggataaagtgattgtgaagcagaggaacattatattggttggaattccaattgatgaaagtggcgtagaggttttaaaatgggcacttgaagaagttgcaaaacatggagattgtgttgttgttgtccatgtttgttttacttattgtaagctcttcttcttctccttcttgttttgttcttttgaagttactaaattttgatttatggatcttatttttgagttatgattgatacagaccgtgccttgaaaagcaagtcatcgctggatcggtacttaaaaccatacattgaattctgctcaacaaagaaggtatctttcgatctttttgccgcgtcgaaagacacacttttttagcaatgtgtaacagagaatatttggtttttgagaacagattgagctcaaaggagaagtgttaaagggaaattcagttctaggggttttagttaaagaagcaaagagatacaacgccatgtcagttgttgttggagttaaacaacaaagtaaattaaggtgagatcacaaaatctttaagcagagacttatataattttcttgataatctcttactgattttagatattttttcattagtctaaaaatagctaaaggctgcgcaaaagagcttccttcaaccaccgatattttggccatccacagagggaatatagtctttagacgttccaaccattaccaactacctcttggttcgttggttctctttacaaccataatctttgaatctatatatataacattcttcaaactcgaacctgttgaccagaaatg

SEQ ID NO: 25986 - DNA, 3000 bp, Unknown
  misc_feature (1)..( 3000): 2750-1469P.txt file - cDNA_ID_2709634; gDNA_ID_2214572; Annot_ID_135091
aatctgatgcatcaaatctgatgcatcaaatctgatgcatctagcaaaatgagagctcaaattgtaagatcagcaaacaaaaatacatcaaatctgatgcatctagcaaaacctttatggtgtttgatcacctcttacgtgcccttatttactttaaactgtataagaaaaagaaaaaacctcgaatgagactatacattacattggttgttgtgtagaacagtcaaatatcaaatttatatcatgcagacaaaaatgtcaaagctataaaatactcctatttttttagccacacagcctaactataaaactcaaattaattccaaggaaaaactagtataggaaatcaaagaaccatgatttaaggtcgatatgaaaaaatatagagatttggtaccttttggtcgtgccctacttctcttcaacaatgacaagagccaataaatatgaaacaatgaaaattatttagcatataaatgggtacttatggccacttggaaaagtatgtcgggaaaacatggagctgaaccggatacatcgtacatacattgatatttgatacataccaaggttatgttcaacttggagagagcggtcaaaagattcgagaaaaaaagaagaagattatattgaagttttaacatctaattgaagcttggaacatgttacatgtgtaaccggaaacatcagtttttggattgtggcttaacttgattgcactagaccggattactttattaaatttgaatatataaacgtaaaataaatttataaatgattataatggttattatgtgtcagattattaaagagatgtgcctccatctcttgctttctctcagtgctacaatcatgtgtgcttcgctctttttttcatagcttcttgttgatattctcaaacttctcttcatacttagaggttttaattcactctttcaatctagttctctttgttttgtgtctttttgataaacaccaaaacaattaagtaacttagagagaataaatttatgaactatacattttgttattggatcaaaggataatttcttacaacatctcacacacatacatatagtggtttctctacttgccatacacttgcatccatacttctactaacctagaccttacttctagacataattatcccatggttcacttacacaagcaacctaacaactacaacaattattatacttattctttagctatgctttagactaacaaaacatcactatttcttctttgggcctaacttaactaatagctcaacgctaaaaatattacaaaacacacaaagcccaactccttcttcttgttgacttttggcctttatttttgtgtcgttggcttctattcaggacatcattttttttttgataaaaggtgaaattttataccatttttgatttgtgacagagattacacggaacactagaaacggaataaagcaacctacaaaacttaaaaacaacatcactgcttccattgcttctcttcacggtatcttcttcttcttcgcttctgcttcttctcttttcttcatctacttcgaaacaacaacaaaaacatgtcgtgcataacaaaatctctgaactaaatatttctacacaaaaaataaatatttttttttgaatttaatgttaaattatattcaaagacaaataaactgtttatacataaaaatgcaaacttttcttaaattgaattaaaagtgtatcctatctatccttgattttgatcttgcattgaagcaaaccacacatggattcctcttgtgtacttctcttcacctctcacccttagcatgcttaatcgattccttatgtttttgtctattagcctgattagcttctccgtcatcgatggagtctctcctttctcctctcatttctttctctccagataaaaaaataaacattctattctctaatatcgtcaaaacttcatacgactatccttaaatcaatactttcgagtttggtttgttaaaaatgatggttttgttaaaaacaacaacaaaaacatgatgtaatattataaatctaaaagatcaataatattactaagatacattttataggctgattaaaacgatgaaaattgacaaattcatgcaaaagtttaaaactttaacatcatataagagaagaacaaaacaaatgatgtttacacttaacatgattttgtgatttttaaatcgacattaacttttttgaaactttgttgtttgttttttaataattaccatgttattttactgtatatgtatatctaaagaaaatctgtaacgcttttaaacaaacaaaaatggagaatatcaattcaatgacatatgtttactttactgtagaggaatctttaaattatagccgaataatttagttaagagatcttttcataaaattaattactagcttgaaggaggtttcataaaattaattacatgaagaaggcgtttaaaataaatatgccaattatattaaaatcccattataaaaaattattattctcatcttttattcctctacatatataaaaaaaataacctttctctttctcattacaattaggagaatataatttgacaaattaaccactttgactaagcaacttcaacactttcgccatcctaatccacatggtcataactcataagtcataaaccttttagtggaactagattttctccatgacatcttactggattagatcaaagatatttttaaggaacaaatcattaatttatattataaatcaaaggagaaaaataaagaataaggaaaatgcatagaaatgccactaaccatccacttctatggctatttccgcgaatcaatgcaaagtcattcatttattcccaacttgccccatatgttttctttttcttaatcacagattcttcttttttatttttaatccatagaacaaaaaaaatataacctttaaattttctctcatttcttcatcttcctctccacaaaacccattttaatg

SEQ ID NO: 25987 - DNA, 3000 bp, Unknown; identical to SEQ ID NO: 25986
  misc_feature (1)..( 3000): 2750-1469P.txt file - cDNA_ID_2709634; gDNA_ID_2214572; Annot_ID_186218

SEQ ID NO: 25988 - DNA, 479 bp, Unknown; identical to SEQ ID NO: 13022
  misc_feature (1)..( 479): 2750-1469P.txt file - cDNA_ID_2709642; gDNA_ID_2214590; Annot_ID_135405

SEQ ID NO: 25989 - DNA, 3000 bp, Unknown; identical to SEQ ID NO: 12823
  misc_feature (1)..( 3000): 2750-1469P.txt file - cDNA_ID_2709644; gDNA_ID_2214573; Annot_ID_135125

SEQ ID NO: 25990 - DNA, 3003 bp, Unknown
  misc_feature (1)..( 3003): 2750-1469P.txt file - cDNA_ID_2709670; gDNA_ID_2214573; Annot_ID_135117
tagatttgactgttactgagcagctagctgtccaaatcgtgccaaagcggcaaactcgtacctatcttattaaaactaacgttacaatattgtcttattttattttattagtgtaaaactgtcgttatctttttttgttgacaaatgaaaacatttcttttcggaggaatgaggatggttgatattttttattgagagataccacaaaataacatgttttggatacttaagtatctagcaagattgtttgaccaaaaaaaaaaaagtatctagcaagatttttacaaaaaaaaagtatatctagcaagagaaaaagtcacattattcggatgtaattcagtacttgtcctccataatcaatcgaacaaaaacaaattgttcagaatcagtcacatacttgaggtggcaaaatatttaattagcaaacgagtaagaagtggcaaagtattataaaaggaaaatatttgaattaagcaacaaaaatacaagttaaattttgattaaaccaaatatatatctctcaagtatattactcactcattactaactgactatatctgaaaagttcataaaattttacgtatgccatttcgatttcgattgaaaacatgagagcacaacttaaattacgagagattatcaagaaataagtaagcttatatgtggaacattatcacataggtatcctgagcaacatgggcatatagtaatctaaatagtaattagaaagtcactggaacataaatgtggacacgacttcaatagtatgagtgggttacacgaaaacccaaaattctcattaacgtgaaaaaataggcatataatacccaaaagaaatgcattatataagactaacgtggagaagtaggcatataaaacgtttggtatggctgttatatctgttttccagaactttatactatacgcttcaatatataagacctagatgattctatttacccattcttacaagagatcacatgatccacataaatctgtatacgtaatactatttgtttgttttatgacgcctgtccctttcaattttgtttaatagttaaaataaatgttgaacaaattcttatatctatataaacaaatgttatcaaagagaaccagttctggcagctaatttggtcgaacatgattgagggcctgttcctgtttgctagaaaatataatataaactttcgaatataactaacgaaaaatatccaagaatatctgtttttcgatgatctcttcattgtcccttattatcgaaattagtcgtagttaatctttgtttgtagtcatcagtgatatagatttgatcaaatcatgatcgttttgaaatcgttagcaatagtgacaagttatagtgataacaatatattgcatcgattgaattatgctatagcaactgcaaaccagttaacaaagtattttgatggtcgttgttgctagcgaccgcaaacaaacaaacaaaaactatcatataattttgcatattaccttttgagcatgcgaatattacctttcaaaatctaaaaacctttatgtattgctagattaggatgtatataagtcaatgcccagaagctgaaatcacaattaccggaaaaagcaaaacatgtagcaaacactttataacttattcacatagagcgcttgcaagagaccattctaagctaagtgtttgtgcttgagtcttagaaaactgaatttcatatcgtcattgtcacgtacaaggaacttacaagctataagcaaacatttttaatttctttctatgttattatatcttcaatcttttaaatgtcttctctcgaaattttagttttcaagtggtacaacaatactctatcatctaactttccagttgctaccagttgacgaactatgaattgagcaaacatatagcaagttaactagcatcagagacgtccaaactatgaattgcttaaggctgctacggctagaattgaccaacactattctatatatatatatatatattttgttgcctccaacatcaatctatgcatacaaaaatatgttctggtaagacttataattgtttgctataattttgaccagactttgtaagtgtgtttattatgattaaagaagacttggtaaaaatataagtctgatatggcttacgtaattgtgctatgatcacgacatacttacttaaaaatctctatgactacgacagactaacatcaaaccatgcatgggagagttataagttataacattgttttactattagttacacaaaaatagtcaaatagcaacatatttttcagcacgggatatgtgactattcgtgaataacatacaaatattggccgcaaactacatctgtgactgtaaccatgacaacaaaaaccggctggtaaatttggcccattcaatcacgaactacaaactcgtggccatggtcactatatcatcaatatgtgaattttgctgcaaaaataattgaattcttttttttctaactaaatgttatttgaggagaaaaaaaagattgatgggctattaattttatctattttcaaaattttattatatgagataacgttttatattgacatcaaattatgtaaggaaattctatcctatcttaaaaagatattactttttgaaagaataaaatctagttttgataagacacaactggcgtaaataaatgcaaaataactaactggattataataatttggtaatccaattattaaacaagtccaaattgcaaaacctaaaaaaacaaaaaaaaaagacacgtaggaaaatgttgaaaagaacacgctgcgtctgacttggtctccaatctctcgcattgttgcactctgtttttgtttggtctctctccatgcgatcttattcttctccaaccagtaatatcgtttgaaacctgaacaagaccctaattttagcctaattcaaaactcaaaatccgatcatcgagagaccttgtgaaattttggagaagaagaaagaatctcggcgatg

SEQ ID NO: 25991 - DNA, 3000 bp, Unknown; identical to SEQ ID NO: 12803
  misc_feature (1)..( 3000): 2750-1469P.txt file - cDNA_ID_2709682; gDNA_ID_2214573; Annot_ID_135104

SEQ ID NO: 25992 - DNA, 3000 bp, Unknown; identical to SEQ ID NO: 12183
  misc_feature (1)..( 3000): 2750-1469P.txt file - cDNA_ID_2709684; gDNA_ID_2214536; Annot_ID_134371

SEQ ID NO: 25993 - DNA, 507 bp, Unknown
  misc_feature (1)..( 507): 2750-1469P.txt file - cDNA_ID_2709688; gDNA_ID_2214573; Annot_ID_135130
tcctctagggtttaaggtttgattttcagacaaaagtataatcaatcattctgtaacttaaggtttgatattcagacaaaagtacaatcaattcggcgattggtctcagaagatgcattcttgttctcatactcacttcgtatctttcaagcttcctcatttcttcgcgcctaaggtctcttctctcattctttatctcttttgtgtgtgctttgtcgccaattaagaagaaaagtttaaaactttggattttcttaacagagttttgtggtgtcttcacggagagaattaagagtgttcgcagtggcaactaccgtcgaggaggcgtccggtaacataccagcggctccgatttctctacctcaagggtcatggaaacaggttttgaattgcatataaaattagaaatcttttcgagaagttgctatcaaagtctgaaaatttgagtgttttgtttagatagctggtggagttacagctgctaaagggtttaaagctgctggtatg

SEQ ID NO: 25994 - DNA, 3000 bp, Unknown; identical to SEQ ID NO: 12824
  misc_feature (1)..( 3000): 2750-1469P.txt file - cDNA_ID_2709695; gDNA_ID_2214573; Annot_ID_135126

SEQ ID NO: 25995 - DNA, 3003 bp, Unknown
  misc_feature (1)..( 3003): 2750-1469P.txt file - cDNA_ID_2709731; gDNA_ID_2214575; Annot_ID_135170
ctttaggtagtcttgaaaacggtagccacttggatacaagagctttggagctggagatattatggcatcaccagccggattgtaaaacgtagcaatcgacagtctacttccatgcttcactgtcattacacggtgaacaacactcttgtacctcccattactcagtatctctagttgatcaccggtattgacaaaaatggtattgttcttggatggcggtataggaacccacttcccatctttaaagaactcaagaccaggcacttgatcatcctgcaggagtaatatgattcccccagcatccgtatgttctctcagccctctcataagctcaggacgtgggcattctgggtatttagccacttttgttccaaaagctggaccttttggaccagaaaaggcattcattatgtcttcctgatcaagaccaagattctcacacatgagcttggagagtctctctgcaaacttgtgcagttgacaaacatattcatccatcgtcttgctgcaaatatcaatttcaccctctcacattgtttagttaaataagcaaacaggtaaaaatggtagagcctttggtactattcaattcttaattactttacctgagttcctctgaaatgtttgggatctgacagatatttgaagttggtttatgtgagatgaagaaactgctttcccaatctgcatctgaggttttgccttcactcaaagccttgaccatctctgactggtaaaacttctctttcaaatgctcctcatagtgagagttaatcatcttcttcactttctccatcaactctttatcaattccatgattatcaacctgaaaattcactaactctttaaggatatacagtagacatatcttagaaaacactgccttgtgcataaagatgttatacataccatgaagaatccccacttatcacatgcatgatcaagaagtgacatggtcttgcttctcttctctccatccaactctgcaaaatcaataactggaatctccatctctctctctttgatcaaaaccatctcttttttatttactttttctcacacacagatttgttgaatgcaatctagaaagagtatttataggcataagtgaaaattaaatctctgtttctcttgtgtgttaggaggcatagttgcctacttggaggcaaaaacaatagtttctttcaacactattctgttaactcattgaatttgaagcatcattacgtttaatgaataaaaaattgtataagaatctgctttggaaatgtaaaatgaacaataggattgaagaaaagtccaagttcagtccatacaaccatgtgatcacaagtttttgaatttttcataatttcttaatggttttgggtcactcccattgtgtttccttgtaacatcatttatgtgaagtttctttcttcttcacaaggaaagttttttttttttttttttttttttcttatccctactcatattcgatggacctagccatcatgtctaattgtgtattatgtttttcttttcactgattttttttttctttaaaacttcactaaactacccatctaagcgtcattggcgtacttgtaaaatgtgttattctggtgtcaccaaatttggatatgcgtggtgttgtgtttagcaaggagctctataacactcatcaaatgataatatgacccttttttggtatgaagaaatctacttggcctaaagctacagtatcgaattgttacttgagaatagatttgtgaaaaggtacagtatcgaattgtttattttgagattaccggagtactacacaccatttgcaatagaaaaagaaataatgtgggtctaagcggaattaagcgaaagaattggcccctcctatgggcgctctcggttttgaatatatatttttgtgtgtcatattttataacaccttgtaaagaatttgggattgtgtttaaagaatgttatcattttactttttggggtcgaatatttcggatatcgttagttagtgtagctctagtctatataaatcagcaccgacaaatatattttttatgtggtgtaaaattcaaccatgacggccccttagagcgtaaacgggccaagacctaatctacaaagacttttcagttatatataactttgtttcgtttagtttgactgtttgaggaagaaatggtaatgttattgaatcttttgttttggtcatttggtgttgtaatatgttacataattcgaaatgatggtttatcgttaacacggactttaaatatcattaacatgcgtgtatttgagattacaacgaattgattcaacatttcaacttttaacatgttggagttaattattcaaaaagttaataccttgtcaagatatctaaacgttttcaaatttcatgctattgatattagttagggtcataagacctctttagagtcttcatatattgttttagtaaccccattaaaccttctgcttcaccaagagcctttctttccaatttaggtacattttcttttaagtatgagaatttggtaaacttaaactccaaactaaacaagccaaaagagaccaaacattacaatgaaccctaaacaaaaattataaaaatgttaaagtgtaatacgcaatttgcaaattcagcaactatcacctttactttgttcactttgttgtataaatgatttttgttctcactccctgaaccacgcgctaacggtggcgcgtgttcttaacacactttttagtttccagaatcgatggagactttaattaacattttgcccttaagcaaacaataaacaataataaaaaaataaaattaatttccctctctctctcaatctttgtgctttctcgttctccaaccaccggaaagagagagagagagagatctttgtgtgcttcttctacttcttcttcttctctctatcgctccgccgcgccacattcactgagatgcggcggtgtaaaaacaacactgacaaattctctgtgataacgatg

SEQ ID NO: 25996 - DNA, 3000 bp, Unknown; identical to SEQ ID NO: 12840
  misc_feature (1)..( 3000): 2750-1469P.txt file - cDNA_ID_2709735; gDNA_ID_2214575; Annot_ID_135168

SEQ ID NO: 25997 - DNA, 3000 bp, Unknown; identical to SEQ ID NO: 12840
  misc_feature (1)..( 3000): 2750-1469P.txt file - cDNA_ID_2709735; gDNA_ID_2214575; Annot_ID_186326

SEQ ID NO: 25998 - DNA, 3003 bp, Unknown
  misc_feature (1)..( 3003): 2750-1469P.txt file - cDNA_ID_2709741; gDNA_ID_2214575; Annot_ID_135162
attagtttttttcaagtcaaatgtaatctcaatttacttccaaaacaaaacaaaataaattaatgtgttgaatttttaatgcacatcatatatttggatctctaattaatttctttgactgcattctgcaaacattatctataaatacttatttgatagtgtaatttttattcatccttaaattactcaatcaatttttatttctaaaagaacaaattattgttatggaaccactaggagatcgtcgtccttgctgcgtatgtatcaccaaaaatagaaattgtcctagattctgcgaatatgcggaatactttccatatgagttgtatactttttttaaaaactttttttccttactattatcttctgctaaacattttacttgatattaattaattttaattttcaggcgaagtcattatgaaagtactaatgaattgtttggcacaccaaagatcattaagatgatgaggcatgctcctgaagaaaaaaaacaaatgcttgcaacttccataatcatggaaggtaatgcttggacaaatgatcctgtaagtggtggatttggtatggtgcaaaagatcatgtggaagattatgttacacaaagcctaccttcatgaactcgaggagaagattaaggaagagaaggaaaaaatcgagcttcatctttaagtgatacattgtagcatatattatttatgcatcaaataatgattatttaatataaaatcatatttaagatgaatattaaattaccgtcgagcaagttaataccttatatttcttattcatatttcttgtgattaaattgtttgtgtatttagatgatcataaatgaaactttgaaatctagagaaacatattgtacatataataaagtaaaagtataaaaaattgataattttaaaaatacgagaacttctcgtttcttgttctaagtaaaataacattccaatatagaattagggtttagttgcctttggaaaattgctttgtaaaaagctagatattatgtttcgtttagtatatctttgactcatgatatttgacatttgattaaaaatcatgtttgccttacatgcataatatcttaaatgcttgtatcacatgtctctaactaccacgaaaaactttgtgtataaaaaattcaaatctttaatttttggacgacaaattcattagcgttactaatttcattgtacctatcagttttatgacgataataatacaatttatttcgtcccaaaaaaaataatatttatttattaagttaataggaaaataggtgtaaatatacaaatatgtatatgtaatatgcaattagagaatatatgaaacaccactatactatcaacattaatattagtaagatgagaaacataaattagatgatttgagtcaatatttttccctagtaatcttagtaatagttttttttttcttttatttgcatagttcatatacatatttgtatacatatatgttgtgcagatctaaaatttttgtttaatacctattttgcacctctaccaaataaattgtgttagaattttaaaaaattcataatcacaacaaaatttctaacactatttaatttgttgatcataaaaaatctgaatttttatgcacaaaacgtttcttaatagtcaaaactagtgatataagaagtgcaatgccaagaattatagagatttgaagcgaaattttaaaatgacatgattatacataacttttaagttctaaactataatcataataaaaaaaattaagatattaaatagagcgaacagacgtttaggtttttttcggatttaccatattcatcagattaatccatgctggattgagaaaaagcctcaagcttggaacaactacatgtaaatcataacctcgagatattttaaggctttcaatgtcccaaagaaagttatttggtgtcgaatccatgagtgaaaattgagcttttcacatagaacaaagagggatatgaaatagtacaattttatgttttaaataaagaagataaaatgaaaggtaaattttataggtttagccagcagagaacaaatgaaatgaatgttttaagtttagacaccaagaacaaacttagggttcaagtctaagcttagtcatatacttctgaacaatattggactttattgttcaagtattaaacaaacattgaaatcttcttaaatcacttttcaaaatgcaacgaggatctattctttttttttttttcagaagaagctacaagaaagaacaacaagtttggatatgaattataaagttagtaatccatgtaagagacgcttatattaattaatttatactgttaattatttcatccgtaatttttattattattcaataaagtatttattttactgaattaaaaaataataattatgggtgtttggatattcggtcgggtattttgggtttgagtttttcgggtttagaattttaagatccgttcgagtaattcaagattccgggtcgggtttggttcggtttcgggtttagttatatattgaaatatcaaaattttgtgtccgaatctattaaattatttgaaaatttcaaaaattccctaaacaacccgagtagttttgcttgaatatatttaaaaatacataaaagtaactaaaatatccgaaaaatcataatattgtctatatgtaaatataaatataaatattttagttatatttatatttaagatatgtttgggtaccagttcgggttcgggtttttcaggttttgaagtttagattcagtcggatatttgaaaatttcaggttcgaatttagattgggatttttggattgggatttttggatcgggttcagatcggttttttcggattcaggtattatgtccaaagtaaaaatggtaaacggtggttgttttgtttgtatttgtaaagcagaagagagagagatatagagacactgaaagcaaagaccaaaaaagaaaaattaaaaagagagagaggaaaatg

SEQ ID NO: 25999 - DNA, 3003 bp, Unknown; identical to SEQ ID NO: 25998
  misc_feature (1)..( 3003): 2750-1469P.txt file - cDNA_ID_2709741; gDNA_ID_2214575; Annot_ID_186320

SEQ ID NO: 26000 - DNA, 3003 bp, Unknown
  misc_feature (1)..( 3003): 2750-1469P.txt file - cDNA_ID_2709757; gDNA_ID_2214575; Annot_ID_135158
aaaattatccggctttatatcacgatgaagatacgacttagaatgaatgaactcgagacgatttatctgacacaagataaacccaacagtgagagagttacattaagaatgacaagacaccaatccaaagcataattaccatttgatcagcaagcataagaacagtcttcaagctaaactgcctcttgcaataactaaacaaatcttcaagacttggaccaagcaaatccatgactaagacattgtagtccccctcaacaccataccatttcatatttggaatcccagctacattaacgaacatacacaagaaatgaataaccaaatgagaattcaataacaatagagataaacatttcattgcatacttccaccctgaagaactctatatatcctcgactcatatgacaattgcggatgcgcagtcttcacactttcctgcacacacacaaaaaaaactaagttttgatgatccaagttgggactttgaagagatgaaacactcacaagcttaatagcaacttcttcgttagtctgaacatcagttcctgcaatcaaaacagtctcatcaaacgactattgaagagattttatatgtatagagaggggaggaacgaaccgaggtaaatctctccgaaagagccgctcccaattttgcggccaaggcgaaacttgttcccaacacgaggttccatacccaattgaaaaaaccctaactttgtggttttatctatctactacgtcgagcggatttctcgatttctcatgcggaggagagtgaagtgcgatgatcaaaactagggcttttgcgaagaagaggggaagaatcgagcaggttgaaattggaagtgagtaggtgaggaaatttagggagattccatggtgttttggttaagcaaccagaagcaagcaagatgaagaagactgcgcgtgtgtgtgtgtctcgcttagcctgttgcttttggtcttttctattccttttctcaatttattaaatatctttattcggtgaaaaaaatatacagtatatttcttagaaactttataataagaataaggattttgtttttatattttcctaaattccataaatctcttaagtttacaaattcatatatcttttaacatttaaacaaataaccagacttctagtaatatatataaatttatttagggagtgttattggtttgtgatgtattcgaagtttcagtgacttaaaatgttatgaagaatttgttgttattcaataaagatttttcaattttttgttaaagtttggtgttattagtttaagatttgtaaaaagtaatataaaatcttcataaatgtagagttattggattcatatttttataaagttattaaattttttgtgtaattcatttaaaacaaagaatctatgattattataatgaattaaattattgtgttattggtttatgactttctacccttttttttataaaataaagttgtgaaaaatatcataccctttttttttacaaaataaagttgtgaaaaatatcataaaaataaagaaattgtttgagaaactttacaaaattattaaaaactaatcaacaagtttattaatgaccttaaaccaaaataggtacatataatattagatagatcatgcaaatgcgtttggtggttatgttacttttgtatcatttgattggcatgatgttctacatttttttaccatttctctattcttaagtcgaaatctttaggaccaaataagcatttttccctaaactaacaaagcagcatctcactagatgttttccaatcagatttgcttactatagtgtgctaatatgaaatttgagtgactcatgacaatgcatcaatccagattaagcattaacatgtgatcagctagcattcatgagaatatgagaattgtcttcgagctaaaagaaagtagactcttttttcacttgagaaactcatgacatactttttttttatatacatttgttttttgatgattaggttaaacttttgtaataaataaatttttagttaaataaataaacttctatcatcaaaagactcgtgagtttcttcctatgttgcaatgaaatggaaacgaaaacgcgaatacgaaacgtttcggaaacgagaaacgattttttcttaaaattagggattggaaacgattttttcttaaaattagggattggaaacgtatacacatacatacatatatatatatatatatatataacattaacataaaactatattaaagaaaaaatggtttaaacaatacaagtccaaaacatcaatattaaataaataaactaaaattctaaaagataaaaattaaaaggttcaagttcaaatagttaatttagaccaacattttcattttcattagtttcatcaaagataatataaagctcttttcaaatctggtttatcaaaagaaatatcttaaaactcaaagtcttccaaaattagttatatgtattaataattttaataattttaattttagttattaaattttcaaagttgaaaaaaatttgtcgtatgtctatttgggaaacatgagtttctatctttaaaacgtaagtttccatcgtgtttccaaacataaatttttaaaaaacgcgtttccgttacgtttttcatgtttccggagagtttctgttttcgtaacgtttcggaaatgggaaatagacctcggggcgagtttccatgcaacctagatttcttctaaccaatagaaatgctcttaaaagcctttttttaaaaaaaatcaacagaaatgctcttaaatgttaaaaacaaatattcatgccaaattttgatgtaaaaatttgttattttcgctttagttgtgtcttatttcggtctggtcattttctcaaagcccttttagttatttatatatatattctctgtctcgtatttgtccccaaaaatctagggttttaaggtttcttatccttcctcttcctccgccagattcttttcttgcgaagatg

SEQ ID NO: 26001 - DNA, 3003 bp, Unknown
  misc_feature (1)..( 3003): 2750-1469P.txt file - cDNA_ID_2709761; gDNA_ID_2214575; Annot_ID_135171
tgctctacatggccagataactgtaggaactcttattcttcaggtatctctacctgataactctcaaaactatagcttctctattatcattttcacacgtttttttgtttttcctattattctaaaactgcatatccttttgatccgaaatatgattcaaatccaattccaataggtagtatgttgcatgcagcaagtacttttgttagaactttaatttactgtttcatgaatcaccaggattgtgctgtgggcttgctgtttgctctcctgccagttcttggtggcacatctggtgtccttcaaggagtgttgtccatggcgaaatcgtatgtatttttctcttccacgaatttctatgaaactatcgacaataccctgcttccattgttcacttgttacaataaaacctagtttttggttacactttctttttgactgggttttaatatctttccaggttggctattttgattgcgtttttgggagctttgtttgtattatcccgtacctgggtaccttggtttctaaaacttatgacaagcctttcttctcaggtatagacacatttcttacctgctccagttttggtctttaaattgtttatcaactcaagcgtttttcaatctttgacagactaatgagctctatcagttggccgctgtagcattttgtttacttgtcgcttgggttagtctgatccctttgttcttcttagctattggctgtttgcacatttgtgactctcgaattttcatttcttaaatccagtatcgttttggcttcttcagtgtagtgacaagctcggtctaagtctggagttgggttcctttgcggcaggagtgatgatctcaacaactgatctcgctcagcatactcttgaacaggcaagaagtcaagtttgactgtttcgaactagagggtctctacccatatattttggccactctcttattttgaaagtgtctttcttgcttatatactatcttggtttcctgatgaaatacgtttcctttctttggcacattctaccaaagtttttcatataaacctgttctgatcgcttctgtttccttgcaggtggaacccatccgcaatttttttgcagcactgttccttgctagtatcggcatgttgatacatatgcacttcttgtggaaccatgttgacattctgctagcagctgtgttactggtgatagtgataaagacggtggtagttgctatcgttgttaaagtctttggatacaataacaaaactgcagtacttgtaagaagcgaacccttttttttttccttctttctcatcattcgaaagaagccttaaggttttcttgtctgtaggttggtatgtcccttgcacagattggggaatttgcttttgttctgctaagtcgagcatctaatcttcacctaattgaggtaagctctctatgattattgatgcttagttatattatatgttagcatatatctttgaaaccgtgtgtgaccataatagatttctcataatttgcttttggtggagcgataagtaacaatgaaggggttttgtgtttatttgcagagcaaattgtacctcctgcttctgggaacaactgctttaagcctggtatggtctatttcctcatcatatttataataagttcatattcaaaaacgaataaacgaatattgacacggacgttgctttatcaatgaataacagtagaatttacatactccagtatcaatattgtataattactaaacaaattaaatgatgtaacaggtaacaacaccattgctattcaagttgataccagcagttgtacatttaggagtgctcttacggtggttctctcccgacagctcaaccgaggtaaatacaaatcatcgtcgtgtgtgtctctctcaatgactttggctcaaactcaactatgaactataatcttcatctgtacagattggtttcaaaggagagttgtatcactcagagagtgcaaagcgtatatcactgatgatccaaggttctcttcacgactcttgaagtgttgatggtatgttcacagcataacacgcaacatgaagccacatttggtctcaaggtaggcaaaggcaatgaatgggagcttccgaatgtatagatgctttgagatatcagaagagaacccccagaggaacctgtataaaatctctctacacgaagataattacagagacttgtaacttcacttcaattttttgttttgggattcttttttgagtaaaaaggtaggaagaggttatattttagtttgtttactttcttctcatgtgctctgaaacaaaataagaaacatctccaacgtattgtagtgattaccaaccgataaaaagctaaagaatttttgagttagtcgattacaaagtataaacacaaatttgaattgatacaccaaagatttctttaacatttcgtgggaggccgagtattatttggctttagcttcgaaccaagactctctggagatagaagctctggctaaatacatgacggactgagaggactacgggggctatcttaatttccttttatatgaatttttctatgttaatttaactttttagatattgatttccattgtaattaaaacgctgtttgtcctaattttattttatatatatattgtataggttccattaaccctacgatcaaaacagtttcatacaaactcgcctcatcttgttctctaagatcaacgtgtctgatcaagcttgatctgcttctcttttttttttgtttttgtaattattcttgcttgattcgatcaacgtgtctgagctttgattcaagtgggggtttggaggtatgtgagcgtcaaatcttcaagttttaattctggaattaggtttctcttagtgggttttttttttgtatcatccgagtgttgttgtttgaatataaatataaatccaaccactagaacatgttttacttactttggttttgttttacctccagatatataccgccatcgccatg

SEQ ID NO: 26002 - DNA, 3003 bp, Unknown; identical to SEQ ID NO: 16608
  misc_feature (1)..( 3003): 2750-1469P.txt file - cDNA_ID_2709775; gDNA_ID_2214575; Annot_ID_135153

SEQ ID NO: 26003 - DNA, 3003 bp, Unknown
  misc_feature (1)..( 3003): 2750-1469P.txt file - cDNA_ID_2709779; gDNA_ID_2214623; Annot_ID_135918
tccaatccttaaggatgaaaagtcaagagttgtttggtcctacttccaataattatgcactcacactactctaaaccttttcacataaccatgcaatgtctatatctatccatgtgtacattgttgtatattatattctctgtcttgtaatttatatattagttgtgtaatttttttggtggcccaaccattcccaaatcaaacttttaaacaactctctttcacttttgtttaatgttattttaggtgtgaaaaggctaattcttctctgttctctctaggtgtttcatggattacaccttttatattactttaaccatcttagaatttgccttgttcttgcatgtgctatgattgaattcaatcaatgggtgatgagaaaattgacccaatagaataataaattaacattgataatcgtcgaatggttcggtgagatttgcacatccaaattttccacacacaaaaaagaatgttatgttttttatagtccaaaatccagttgggttacattatcttacatgtatgtacaaagttttataatattaataaaaaaacaagcaaagagaattattgaatgttttgattgtggtaaaagccatgaatcatggacctccacagtcaattactcattcaatttctcttggagctatttgtctctgccagactcatttaatgtattattttcatttgcttccactttctctcatacatgtattagtactaaccattttgatttttgagacttgaactctcggttagacattttatccatccatgcaattgtgtttatcgatcaatgatcatcagtaggataataaaaggctttattagtgaatatagtaaaattgtttcactgataaaaccttttggaatgtgtttacttgattattttgatcaatgatcataacctaggtagctttttgtattattcttctagtcaatatataggtaatataagcaactcgtgtgtctttgacaagctggtgactgaatattatattttaattaccgtctaatcaaacactaaaccatttttaaaatcgttaaagcgaattttggcatatatgcagagaattccacgtttttataataatttagagaatgtgcataaatgagaagaaaatgcaaagcacaataggctacattttaaaggtcaatgacctcactttgtgtgtagattttattatttgattgtttttttcgttgggtatagaaatgtctgatttatgtgtggaataaagacgacgactttgttaaattataaattattaaattttgttctcttaattaatactcaatcggctttttcttatttttttattattatggctgataccacgtaaaccacgagtaagtatgtagtacaaatcaattactttctaatactacataaaaattatatactagtacttaatttcttacaagaaatacatacatcatttaaaaacagtatttgatgttaatataagtagttaatagtagaatagctgataaaataacgtgatttatgtccacaattcgttgattaaaatattgaatccatggttggaaaaaactggcgaaatcagtaattattgtcggctaccatatagggacatgatggttttggttcgtcttccatgtacaccaaatcagcaatgagaaaaagaaaaatggggaaaataaataattcttgttataaatattatcctaagatttattatcacttattatgggagtgaaaaagaaaacaataagaaggaaaatgaatgggaaatgggagaaaatgtaaaggaattaggggaatgaagtcaaaacggtggtccaaaagacataacgaaggaccattgtaaaattgtgtgatttatttgaaatcagaaagtttaacacgaaaccctaaaaaaacaaaacaaaaaacaaaaataggaataataattatgctatatggtcaaagctaagcagttgggctattttcatttaaatttattcgttttggtctaaaacctatcgtgaaaaaagtgagaaagtaaagtttgaggtactgtggaggaaacttcttcatttgggtaaatcccaaatccctataaggtaaatattatgtgttcttacaaaatttggtttttctatgacaagtatattcttttgaccagctaagctaacaaatgtatgttcaattggttatatatcgatcggggcaagggtaatactcgaatctatgttcttttcatgcaagttatgtatgtagccttgtgtagttctctggtacgttgatatgcaatgattctctcgaaaactatttaaaaaaattatttaagataataatgaatggggtcacgagtcaagactaatgtaaccaaagtcaaatggattttcgtatgattactacttttgtaaccaaagtcaaatggattttcgtatgattactacaagcttgtaggtcaaaaaacacatgtcacctctctgtttagtataataaaccaattttataacatcattctttttatttgctagtttaatcgtctaaataagtgacccaaccataaaccatatcagattatgaaattttgactttacgatagtttacgtatcctcaaattcctcacgtatatgtcatgaacaattcttaaacaacaaaattataactctcttttaattaatgtagttttttcgtaagaactcaaattgatatttaacaaaaaaaatgaatgaaacatttctcaagttttaataattattttttggaattttgcaaaacatatatagagagataataataagtatgaatgaatccaaaaagagacaaaaagaatagatggaaaaagagacagtcatctttaagaaagaagccaaaaacaaaaacttgctcttttaatcccaacccacacacctctcaaatcctcctctcctcgtttctctttctctcctcttcacagaaccaaaacatatcaaacctttttttctcttgggtttaagtaaaaatcgaatctttgtgtcggtttttagggttcttgaaacgatatg

SEQ ID NO: 26004 - DNA, 3003 bp, Unknown
  misc_feature (1)..( 3003): 2750-1469P.txt file - cDNA_ID_2709779; gDNA_ID_2214623; Annot_ID_187726
accaaagtcaaatggattttcgtatgattactacttttgtaaccaaagtcaaatggattttcgtatgattactacaagcttgtaggtcaaaaaacacatgtcacctctctgtttagtataataaaccaattttataacatcattctttttatttgctagtttaatcgtctaaataagtgacccaaccataaaccatatcagattatgaaattttgactttacgatagtttacgtatcctcaaattcctcacgtatatgtcatgaacaattcttaaacaacaaaattataactctcttttaattaatgtagttttttcgtaagaactcaaattgatatttaacaaaaaaaatgaatgaaacatttctcaagttttaataattattttttggaattttgcaaaacatatatagagagataataataagtatgaatgaatccaaaaagagacaaaaagaatagatggaaaaagagacagtcatctttaagaaagaagccaaaaacaaaaacttgctcttttaatcccaacccacacacctctcaaatcctcctctcctcgtttctctttctctcctcttcacagaaccaaaacatatcaaacctttttttctcttgggtttaagtaaaaatcgaatctttgtgtcggtttttagggttcttgaaacgatatgggtaagtctagtggtagaaatggtaacggaagctttaacggcaataaatttcacggagttagaccttacgtacggtctccagttccacggcttagatggacgccggatcttcaccgttgtttcgttcacgccgtcgagattctcggtggtcaacaccgtaagtttattatactttttttctcttcaaatcttttgtgaaaaaaaccaaacttttgtgtgtttgtttgcttcaaacatcctaaagttacgatataactagaaaaattggacttttctcattcttttgtctcaatcatcgtaaaaaatcagtttttgaataaaatcttcacacttttgttactttgtttcattcttatcttcaaagtttggatttttatgctaaaaaaaaggtttgaagtttccttattgtgttgtttatcttcatcatcgtaatgaatcatctttgtcaagttaccgagtcaaaaccttcacgcttttgttgttttgtttcattcataaagtttgagtttttgttttttttcataaagaatcatcatagtcacctttttgatattttgttgggtttgatgaaacaggagcaacaccaaaacttgttcttaagatgatggatgtgaagggacttaccatttcacatgtcaaaagccaccttcaggtaaatagtaattaattttaccaaaaacatcaattttgttttcttctttattcatatttcattcataacaccttgttttgattgttttgaacatatatataaacagatgtatagaggaggttcaaagctcactttggagaaaccaggtattatttttttccttataattatgaaatgaatcaatgatgatatttggaaaaagaatgggaccgttgattttaatttgaactgttaacatcaaacacataataatggatggaatttaattattttactgtatctgtttgtagtatgtactattggtctagtgtcatgattcataagacaaatgtcataaatacatttatatatttttcaagagtaatagaacagaaaataagagaatattcattaactagtttttattgtttcttacacagaagaaagctcatcatcttcaataagaagaagacaagacagtgaagaagattattatcttcatgacaacttgtctttacacacaaggaatgattgtcttttgggttttcactcttttcctctttcttcacattcttcatttaggtatttatttttatttataattgttttctgacaaagttttttaattttatttcagtaaaaaaaaaaaaaaagtgttttgcttttttgtttgtctgtatttgaattgtccttttactttggtgcagaggaggaggaggaggaagaacaaaagagcagcagacttcagagtctggtggttatgatgatgatgctgactttcttcacatcaagaagatgaacgatacgacgacgtttttgtcacatcatttccccaaggtataaataaatttctcttttgtcaaccggtttggaaatttaatgttgcaaaacaaaatcaagtccggttatgagttctaaccggtctgattgagactggtcaaatccaaagggattgagtccggtttaagtactacttgtcattgaatctaattagtttcatataaatggcatttaaccggttttagtccggtttggtaactaattttgtcttttggttcattagggaacagaggagtggcgggaacaagaacacgaagaagaagaagaagatttgtcgttgtctctgtcgttaaatcatcatcattggagaagcaatggatcatcggtggtgagcgaaacgagtgaagcagcagtctcgacttgttcagcaccattcgtatccaaagattgctttggttcttcaaagattgatcttaatctgtcaatttctctcctcggtagctaaataagttatgcaagatttaggttcagagaaactattcggatgtgtttttgaaactaggatattgaatgttagtagagaaacctagaaaatgaagtttagataaattatcaacgcagcgttttgatcgcctttgaacggaaaattaacaaacagagccaaacgcagtgttttgatctttgaaggataacccctaaacgcagcgtttctatatcaagatcctacggtttagaatgttcattgttattttggtcggcaatcctacggtagaaaaaataatctcgcagataaaacccattaaacgctgcgtttcatcgttggagggtaaactcattaaacgccgcgttttacattcaaaaaacttgaaactaccttataaccgcccagacgatgaccaacgtcgtcaacgtcggcgaagatg

SEQ ID NO: 26005 - DNA, 3003 bp, Unknown
  misc_feature (1)..( 3003): 2750-1469P.txt file - cDNA_ID_2709783; gDNA_ID_2214576; Annot_ID_135176
ctaatatttattagtcaataaaaaaattcaacagtcattatggagaaattttttaaaagtaacttataattgacaaatattgattttttattattttatttttaaaattccttagttttttaatttgagtcattttacaaccaccacttttaaaaataaataagaaacccctatgcttattaaaatttatgtagtctagtactcttatttgtttaaaaatatatatatacaattagcatcaaaaacaattggaaaattatagtaaaaattattggtttaaagtggttaataaaaattttgatatcttatggatatattatctaatcatttgattgacctatatatgattgcatttgatatcttactacattggctatatatcttttcaaaatttgctaaaatctattaggaaaattgtcattggaactgatatttacatggtgtatatatgaaatggttgatttgttaacaagccaaaattaagagttagatttaaaaagtaaacgaattgattggaccaaattaagggacttattctgtgattttttttcattttcttttgttctcacacttggaggttaaactggtaaatactaaaataactaattattttattattattttaaagtaatttaatttataaatggtaattaagtctaacaccttttgtccagttatacaattagtcaataatttactttctttgaaagtaattaattaaagtagttaatgattttgcaaaactgcctaaataacacctaaatttattcttaacccatctatgtatatgtttactatgtatgtatatatatttatatatatatatatatatatatatatggccctctacttcatacttagaagcaagaagctcatagaaatttacttcaaaaattgacctcaaacgacaagctaaaagaggtgaagttctttttcctatcttttattttaaatatggctctgtttatatatctatatttatatattacttactgttgatttgaaagaaattttctattcgaatatgtatgtgagaggaaaggatatggttcaagtgtcattgttatcgggaatggcaaattatattcctttcctcaaaaaatttagcataacaaaactaattatccatcatataaaaacaatcacatcgtatttgttttctattgtcttatgctaaacaagttttatatataactcatgctcacgttaacgaagacccatacaaaaatgggttgattttcttgatctccttcattggagaacatgactgattttcaatagtcactaaagtatatacatagatatatactatatagttgtttttgatattttaaatggataaaaaaaaagatgacgggatctatcatttgggaaattattcatagatttatttaaatagttcctaactaattgcttgaatatgggaagagacgacgaaatatagttaaaaaattggagtatcctttttggtttttactttaccatatacatgaaaaatatatacaatcattcttctttttgtcttcttttatctttggaatatttcttttcacattcaatcttccatgacacacagacagacatatatatatgtgtgtatgtatgatatgataggaactttttaaaaccaaaaaagagagacccatatgagatgatgatgacgattgagacaaataattattttgacaatttaagaaaaacataagatgctttgtggattaacttttgaaaattcaagaaatctgtccctatatatatgaaaacattagctttagaatacaattttatgagatttatttagtttatagtttatagttttaaatttatatttatgtgttattaaaattgtaaaattatatgaaaacatagtcgcttagttttacaaccgctaatttatttcaaactcaaaatattatatttttattccttcttcggttacgtatttttcttatgagatattatatggtcaaacatttaaaattagttaaatgttacatacacacaaattccaacattttcatttctttttaaggaaaaaaccatttcatttctttaagatatataaaaccaaaaaaattatgtttttatatagcttagatcgtgatgctaaacttttcttgtaagagcaatctcgtatagatattttatgttagtgtcaaatatcttcttctacaatttctaaagtcatattacactatggtaattgttttctaaacccttttagatccaaaaaaaaaaaaacttgaaatttattattcacatatgttagcgagagagaggagctgttgagggttgtctcacgcaccatccactgtcgttttgtggcaaatggattgggtccaccgacctctgtagctctcatagtttcttttttttctaaaattaattacatatttagaaaaaatgatatcaaaaataattaatagctctgtatatgtgttagtgtctacaggcgacaccaaaattatataaatattcttatttaaatgcgttacaaacaaaagaaaaattatataaaattttacaaataaatgtatagagtttttagtatcatatgtatcatacatatgaaattagagctataccaaactaaccaagctagatttaaattcagtttgattatcttaccctatttttttaaccgaatatgaacttttaacactctaggctataacattgggtggtgacttatatttcttctttctttttactagcctacactctttttcacctgtcactttcaacttctctcttctattacctcacaagaatttctatgtttttttaataattttatatctatttaaaaaaagtataaccaattaattaaaaatctggaatatcccaattttagggctttattgagataagatatcagtggaagtcaaaaaagaatttaatgttaaagagtttcttctctctaatttcatttcatttctctttttttttttctttttcttctttctctctctcaccatcacatagaacacagaagaatccatg

SEQ ID NO: 26006 - DNA, 3003 bp, Unknown; identical to SEQ ID NO: 26005
  misc_feature (1)..( 3003): 2750-1469P.txt file - cDNA_ID_2709783; gDNA_ID_2214576; Annot_ID_186342

SEQ ID NO: 26007 - DNA, 3000 bp, Unknown; identical to SEQ ID NO: 12854
  misc_feature (1)..( 3000): 2750-1469P.txt file - cDNA_ID_2709787; gDNA_ID_2214576; Annot_ID_135177

SEQ ID NO: 26008 - DNA, 3003 bp, Unknown
  misc_feature (1)..( 3003): 2750-1469P.txt file - cDNA_ID_2709791; gDNA_ID_2214576; Annot_ID_135178
acactttcctcttcacttctttggttgatttttgtttcagcttccatgggagattgtgtcctcttcggtgaagctgtagattttgttctctttgaaaccctttgttacatacatcgcatatgaatctgtttgtagccattagtgtctttggagataatgctaccacttccgcatcaggatctgtttcatataattaaagaatttaatcatttaaattaagtcaccaattagacccaaaatgtcaatctatgtagactatatcgaaaaaaatgatacacacacatgtaaacataaatcaaatgacatatacacgtataaacatataagatatactggcctgtcaatatatatgaaatcttgatactagctagatatacaaaacaaaatagaacaaatgattagggttctttttcttcttggtattatcttaaagcttatatatagtgattcttatagaaaggtgataaatatatagagatttatatgtaagagatacttgcttgggtttccgggttggtttcttcgtttcttgggtggtggagctgaggagttaggttgttgaatcattgacataaaagtatctttccggttaaagtcgttatctccggtgccggagctggtgatgaagaaaggctgagcagaggatgatgatgaaggaataacgcttgtgttatatgatgatgacgacatctttagatcttcttctttgcgtggaagagaataatctacaaataattcgtaagacaaaaaagttaagaagaaaacgaagggaggaattataagaacaggaaaaatccatagagattgacgacatgaagaaattttataaaaaccatttcactagaagacataaacaaagaaaaacaaattaagagtttatacttttgttttttgttcctaaacttttgaaagaattaagaggaaagatttctaagttgtatttttcttgtacctgagatcaagagaaagaaaccaagtagaagaaggaaaaaaaatagtcaaaattaaaagctataaatcggagctaaagaaagaaccaagaagaagatgatgcatgatgatgatgatgagatagaagatgatgatgaagaagaagacactattcctatatattatgtattataatacaaacacaaacctcaaagccctatctctctctatctctatatctctttctctctctactgttttgtgttcttcttcttttaaaaataagccatatatgaaatgatcttgaaaagtatgtctctaaggtcccctctctgtctctatcattttattttatttcgattaatataaaataaagctactttttttctttcttataatttaatttgacagaattaagaaggatggttacggtttgggtgtcactgttaaaacggtgaaatgtgtccacatgcgggggtgtgttgtgggtaccacatttttctcattcgtatctttctggtgagctttaagacaaaaccctcgttttctcttcatttaacttgattaggttttgttgtactaacttttttttaattgtttttatctaataaaatcgtttataatataacatatcgtatattaatacacatgatacaccaatcaatagagaattttttaaaatttgttagattcttgtatgaaaattaatatattgcttttcttctttggttcaattcttcaacctttcagaatgttcaatgcaaaacaatcgaaccgattggttttgaatcaaacctaattaatcctgaacgagtaaccaactctcaaccgatctgaatagattttaaaacgatatatcacaaaatctccaatatcactttaagagctttgagaaaatattattgatatattattattcgaccgtaaagtttgattttctccttttcacttgggctttttaatcttatacaatttagttttattttagtttacaaacgacaacatatttaagtaacaggtgacttctcaacttgatcctctcttcattaccatcgatgctttttaagttatactgagatcgtaccaactgcaatgggtcagtgccgggccatattcaatcagggcctccctgattgggttgtaatatgatttcaagttagtaatatgaaatagcacacagtcacgcacacaaaagagcctatataaggagagatataccacaaacagcccaagacccagttgttttagatgaaccaaaattgtatggaaatatttagtatttgaaactgccgtcaccaagatggcaaggtcagagaaactcaataacaactctgtttctgccattccgagagttaatattaattttcagagttaatggattagctagtaaacatatatatacaaatgataataacctgtagaatgaggattaagatcgagaacgacgaggttatctttaccgcaacattccaaacgtagccaaagctctattaccatacccctcaatgtacatatccagcttataagactcctatccagtatccaccatccaacgaaacacactctcagattcttccacattatgaatacatgtcaaccaaataatttctcacctcaaccatcatttcaaaaccaaatcttcaagcaaaccccatggatttaaaaacccttttcaagtgcgtcaaacaaaccacaagcttttagatttgtcgagaaagtgaagtcgttgggcccatttcttcggatcccttaagttcaccattaagtactcattagagcccatttcttggggcccattaagagattaagtccgcgcgcatagcttttggaggatgccgctcttttgtaagaagcaacacgttgttgagtctctaacctttctttgaaatcttgacctttcccttccttctccgctaaattcgttttaatttcatcttcttcttcttcttcaattcgatgcaataatagtcacttcaatctcaatctagggttttcaattttcttcatgtgaattttttttccccttcttctcaatttcaattcaatctgggattcgtaaattctcggaagatg

SEQ ID NO: 26009 - DNA, 3003 bp, Unknown; identical to SEQ ID NO: 26008
  misc_feature (1)..( 3003): 2750-1469P.txt file - cDNA_ID_2709791; gDNA_ID_2214576; Annot_ID_186344

SEQ ID NO: 26010 - DNA, 3003 bp, Unknown
  misc_feature (1)..( 3003): 2750-1469P.txt file - cDNA_ID_2709806; gDNA_ID_2214577; Annot_ID_135196
tgttgggatatcaaatcctcacatcagtgattctctctcaagtggtagtgtgttcctatgtcatggaagcataagaagaaaccaaacagggttgctactgactcaagaactcagttcttgtagtcaggatcagagtagtggcgctaagtcccatgacgttggtccttttgaaatattgaagcctcaacagttaaaagaaaagttatcttggttgacattatcgatacatgaagaggattgtcgttatattctacaaaaggaggatgaagttgcgaatttgcgacaagtaagtgtttgtggtgatcttatttgttgtttcatttagttcaacctttggtatgagtattcttacatgtagctgttactctttatctttcagggacatcaagaatacttaaactttagctccttgaggggaagtagctccttggactttaataaagagtagaaatatgaaggctgtggaaatctgtaaagtgaaaagtctgaaatatgcaactcttcctagttctggagatagctgctgcaaaatgatacttaaagtcattgatccgaactccgaagtgtacagcaaactttcaagcttacattacctgatttagtgacctttccagattttcttgtgaaaagaagccggtatgaaggagcgatacagaggaaatggacttgcagggacaagtgtaaggtttggtggagaaacaaaggcgaagaagatggtcgttggtgggaaggaggaattctagctgtgaaacccaaatcaactcattttcttgatagtccatgggagaggtacaaagttaaatacaagactagcccgaccgagacacatcttcatagtccttgggagctttttgatgctgatactaagtgggagcagcctcatattgataatgagaaatgaaacagtatgctcttagccttaacaaacttacagacttcagaaaaaagaatccaggtatgtgtgtttaggcttatgtttaaatttgcttaggtggtttagaagtagaaaataacataacactatcacaagaacatgacaatatgatataaacttgacagattcgtttgaggattcttatggactccaaaaactgaaccagatcatgggaaactcaagctacaccaataggtaatattctacaagactagaagaggttttgatatggagccgaatttgacatggttttgttctatggattatctacaggttcccagttcctttgtctcttgaggtaataagatcaaggattgagaacaactattaccggagtatggaagcgttaaggcacgatgtatcagttatgctatccaatgcagagactttctttgatctaaacaaatgtgtaggtgtagcagtcaaaatttcagatctttctcaatggttcgaccgcacgttgtcttctttgtagcttatctgcctatgtatagagtacgtgaattagggtcgcttgcgttgttgtatctgaaaggcttcttcgatctaacgagtaagcacatttttcattgatctaatttttgtttgtctcttgtgatgtaatgtaccctaatgtcctaaagttggagctaatttttgtcattttatgtgcatcagtacaatgatgttattacagcattttagtgtatattcgggtatccaagttttaagctatacacgaaaatcaactcttacttgacccacaactacccaactttggcgtggtattagtcgtaataataattttatgggttttggaaagttaagcaccaactattatttttcttttttttttgtagagttttggtcgatgtgagacatcttatcaaagttagtttagggccattgttttcaggtccgatccgtaccgtccggtccgatcggttaacccatgacccggacatttttccggtttagattaagtgctaatatccgataatttagggctaagcgattgtcccacaacctcctgtaaacgctacgtatgccggttgctaacatttaacaacaaacacacaaatttctttatactgttacagattgctagatatcgcttgcaatcgttagattttaaaacttcatttccgccagtgtttgcgacagcaggcggttgcgggtggttcaaatgattttttttttcttttttatctacattagtattttgcatcttttgctatgtattttgagatagtgaagtaatataacttcatttttcaggacttgtagtttttatgaaagaaaaaacaaaaactagaggctgattttaatgatagatcctaaagaaatcaaaccaaatgaaatcaccagaaccttaagatactttaacctattgggtctataaaacggattttattgctttggatctataaagtcacgttgtagacccaaagcaataaaagatttgggatagttaaaccatatgatggttagtgtgtggttttaaaaccttaagatatttgtgtaggagactaggaattgtgtgttttgaaaagaagcagccactaaaatcatatgataagtcaataaaggaagcagctactgaaatttacttgaaaatgatttttcagtaccaaaatcaattaatctcttccatgtctcgtttaatgtatataaagaccgttgagaaaagtcgtatttggatcaccacaagttagtagaaagacttgttagtcagtcaacccatgtgatatatatgagaatgaaaccatgttatcacattacaatttccactttcttgctttttcattgttgatactcaaaaaggtaaaaaaacttaaaagaaagatgaaagactcttggaacacaatcagtcattcttattactcttttctttcccttctttctcacttctaattatggagacgtgttagcagctcctaatagaaacttgtgtcatccagaacaaagagacgcaattctcgagttcaagaacgagtttgagattcaaaagccttgtgtgttgatgggcctcttaagacggagtcgtgggcgaataacagcgattgttgttcttgggatggtatcaaatg

SEQ ID NO: 26011 - DNA, 3000 bp, Unknown; identical to SEQ ID NO: 12884
  misc_feature (1)..( 3000): 2750-1469P.txt file - cDNA_ID_2709833; gDNA_ID_2214578; Annot_ID_135211

SEQ ID NO: 26012 - DNA, 3000 bp, Unknown
  misc_feature (1)..( 3000): 2750-1469P.txt file - cDNA_ID_2709837; gDNA_ID_2214578; Annot_ID_135210
aaacacgagtttccgatcaatcaatccaagctagatccttattttgcatcattaagtttatggaacaagagcagtgattgttgttattggaagggtgtcaagtgcgatgctaagtctggcaaggtgatttcactttaccttaattacgtctttctcaacaactccttgaaaccaaatagtggtctttttaaactccaacatcttcaaaaattaaccatttcaacttgctatctctatggggagattccttctttattcggaaacctttcccatctcacaaaacttaaccttctcaataatagattagtaggtcaagttccatattcatttggaaacttaacccatcttaggcacctagaccttagtgaaaacaacttaagtgggagaaccagttcaagggacatatagagtttgggaatacaacttcatcgcctaggcttattggtatacaccttggcgataacaaatttgatggctcagtccctgaatctatatctaaattttcgaagcgcaaaatgttcagtcttacaaacaacaatttcatcgggacaatcccaaaatctatatcacagttacataacctctatatccttgatctttcctacaataagatggaaggaacagtaccaggttgcttatcaagattgacatggttatcgctttctcacaactcttttagtagtattggaaagtcattagaagttctagatagagctccaatgcgtgtattgagtcttgagtcaaattcattccaaggaccgtttccccattggatttataagaaaagtcaatagaaattttgcttccccacagaggccgaatatctccaaacactctttcttcttggacatgttacacatgatgttgaaatggacataaagcccgctggcctgaaaggatacggtcttattttgtggacccgaacccgtttaaagacactatataataggttgacccgtttagatttgactactaataatggatctgaaaaatactaaaaaggtagcccgtttagacctaattactaaattgtctgaataagatgctaaaagtctttgctttcactattctagtgatttctttcggaaattccagaaatttgattcgaaatgatttgtggatttatttgaatgaaatccacaattttctgagtatttcgaaggagtcaagacaaaaatttcccctcttaatcatgtgaggaaatgaagcatatcttgttctttgtttcttgatttactttctggtagtaatggataactagagagattcagtggaatggccaaaatctcataagtagaatttcattggttttgcactgaatattagatggctttatggctctgaaaaagcagctcttgccggccagtttagcatgtttttcaacagacaaatatttaataattataccttgataatgtataaacaatctttttttttatgttgtgtttattgtttgccttgggatccaagtgaacaaagaaagcaagtcaaggtttatactccatttcactacaaattttagttatctgcaataatcaaacccactgtttctgttatcaacatagcaatctttcatgtcctcatttcccatgtttttttgtttattaatatatatatatatatatatatatatatatatatatatatatatgtatccatactcaaattattccatctatatcgtagtgacactgcaattataatgataaggtgttcattttagagtagtgcaagactattgtaggagaatttaatttgtatgggaatgtgactatgtttgttactcacgagcagattttaaggaagttgtgagataagagattaaaaattaggtagaacttctaggcattgtctgatagtaccattggcagtgccgtctcgatataacctatggcaaaaccaaacaaaaattaaacctcttagtaaaaaaaaaagttaagaaaatttggacttttcttctttaagtgtttttctgaaattaatattggacccttggcatttgcctaccttgcctataggtaataggtggagccgatgctgaccattgggacaccttttacactgcgaattttcccttttgtctccaattgataaattttgttgggaattaacctatgaaattagctaacgaacgtttttttcaggaatgagacaagtcgaaacagtatgtggcagataaggtggaaggaatgagtcaatggtctatggggcacaaatcacaaagacttagagaggataagaagactgataagtttgtaaagatttcccatcagtgttctccaatctccaataactcgtttttgtaacaaacgtctttgagggttatttttctttttttttgatcatttgtctctttcatgaaacccttaattcacgcctcactgactcttccatatgaagaattttgcaagtcaaaaagtccaatggaaatgttgcgtctcctaaaccattgagactgaaaatgcccaattcgttttctatgtcacatttcccaaacactctttcttctggcacaagttactcatgctcctctctattgtaacgattttgattgtgaaattccaagaaaacttataccttaaaaatttataatgaaggcattaaaatttttgaattgtaaaaaaaagataatgaaatcgacaatgtcaagtcaatagagtgtgtgatgggtcaatgtcagagttgacgacagtactagtgttcaccgaaagtcaagagctccacaactgatttttgttattggttctttataaagagagatcagaagccataattataacctatcacaaccacacaaactaaaacttaaaaacaaaagaagtaatgatgataccaagccaatcttattcctttaatggtattgttgttattaccttgtatttcatctccttgttttcgttttttccacacactcttgcttctcctacggcccaccgttgccgccatgatcagagggatgctcttttggagttcaaacacgagtttccgggagcagatatg

SEQ ID NO: 26013 - DNA, 3000 bp, Unknown
  misc_feature (1)..( 3000): 2750-1469P.txt file - cDNA_ID_2709837; gDNA_ID_2214578; Annot_ID_186390
tccaagctagatccttattttgcatcattaagtttatggaacaagagcagtgattgttgttattggaagggtgtcaagtgcgatgctaagtctggcaaggtgatttcactttaccttaattacgtctttctcaacaactccttgaaaccaaatagtggtctttttaaactccaacatcttcaaaaattaaccatttcaacttgctatctctatggggagattccttctttattcggaaacctttcccatctcacaaaacttaaccttctcaataatagattagtaggtcaagttccatattcatttggaaacttaacccatcttaggcacctagaccttagtgaaaacaacttaagtgggagaaccagttcaagggacatatagagtttgggaatacaacttcatcgcctaggcttattggtatacaccttggcgataacaaatttgatggctcagtccctgaatctatatctaaattttcgaagcgcaaaatgttcagtcttacaaacaacaatttcatcgggacaatcccaaaatctatatcacagttacataacctctatatccttgatctttcctacaataagatggaaggaacagtaccaggttgcttatcaagattgacatggttatcgctttctcacaactcttttagtagtattggaaagtcattagaagttctagatagagctccaatgcgtgtattgagtcttgagtcaaattcattccaaggaccgtttccccattggatttataagaaaagtcaatagaaattttgcttccccacagaggccgaatatctccaaacactctttcttcttggacatgttacacatgatgttgaaatggacataaagcccgctggcctgaaaggatacggtcttattttgtggacccgaacccgtttaaagacactatataataggttgacccgtttagatttgactactaataatggatctgaaaaatactaaaaaggtagcccgtttagacctaattactaaattgtctgaataagatgctaaaagtctttgctttcactattctagtgatttctttcggaaattccagaaatttgattcgaaatgatttgtggatttatttgaatgaaatccacaattttctgagtatttcgaaggagtcaagacaaaaatttcccctcttaatcatgtgaggaaatgaagcatatcttgttctttgtttcttgatttactttctggtagtaatggataactagagagattcagtggaatggccaaaatctcataagtagaatttcattggttttgcactgaatattagatggctttatggctctgaaaaagcagctcttgccggccagtttagcatgtttttcaacagacaaatatttaataattataccttgataatgtataaacaatctttttttttatgttgtgtttattgtttgccttgggatccaagtgaacaaagaaagcaagtcaaggtttatactccatttcactacaaattttagttatctgcaataatcaaacccactgtttctgttatcaacatagcaatctttcatgtcctcatttcccatgtttttttgtttattaatatatatatatatatatatatatatatatatatatatatatatgtatccatactcaaattattccatctatatcgtagtgacactgcaattataatgataaggtgttcattttagagtagtgcaagactattgtaggagaatttaatttgtatgggaatgtgactatgtttgttactcacgagcagattttaaggaagttgtgagataagagattaaaaattaggtagaacttctaggcattgtctgatagtaccattggcagtgccgtctcgatataacctatggcaaaaccaaacaaaaattaaacctcttagtaaaaaaaaaagttaagaaaatttggacttttcttctttaagtgtttttctgaaattaatattggacccttggcatttgcctaccttgcctataggtaataggtggagccgatgctgaccattgggacaccttttacactgcgaattttcccttttgtctccaattgataaattttgttgggaattaacctatgaaattagctaacgaacgtttttttcaggaatgagacaagtcgaaacagtatgtggcagataaggtggaaggaatgagtcaatggtctatggggcacaaatcacaaagacttagagaggataagaagactgataagtttgtaaagatttcccatcagtgttctccaatctccaataactcgtttttgtaacaaacgtctttgagggttatttttctttttttttgatcatttgtctctttcatgaaacccttaattcacgcctcactgactcttccatatgaagaattttgcaagtcaaaaagtccaatggaaatgttgcgtctcctaaaccattgagactgaaaatgcccaattcgttttctatgtcacatttcccaaacactctttcttctggcacaagttactcatgctcctctctattgtaacgattttgattgtgaaattccaagaaaacttataccttaaaaatttataatgaaggcattaaaatttttgaattgtaaaaaaaagataatgaaatcgacaatgtcaagtcaatagagtgtgtgatgggtcaatgtcagagttgacgacagtactagtgttcaccgaaagtcaagagctccacaactgatttttgttattggttctttataaagagagatcagaagccataattataacctatcacaaccacacaaactaaaacttaaaaacaaaagaagtaatgatgataccaagccaatcttattcctttaatggtattgttgttattaccttgtatttcatctccttgttttcgttttttccacacactcttgcttctcctacggcccaccgttgccgccatgatcagagggatgctcttttggagttcaaacacgagtttccgggagcagatatgaacttccggagacttgaaaatatg

SEQ ID NO: 26014 - DNA, 2610 bp, Unknown; identical to SEQ ID NO: 12891
  misc_feature (1)..( 2610): 2750-1469P.txt file - cDNA_ID_2709841; gDNA_ID_2214578; Annot_ID_135221

SEQ ID NO: 26015 - DNA, 3000 bp, Unknown; identical to SEQ ID NO: 12888
  misc_feature (1)..( 3000): 2750-1469P.txt file - cDNA_ID_2709845; gDNA_ID_2214578; Annot_ID_135217

SEQ ID NO: 26016 - DNA, 3000 bp, Unknown; identical to SEQ ID NO: 12876
  misc_feature (1)..( 3000): 2750-1469P.txt file - cDNA_ID_2709845; gDNA_ID_2214578; Annot_ID_186398

SEQ ID NO: 26017 - DNA, 3003 bp, Unknown
  misc_feature (1)..( 3003): 2750-1469P.txt file - cDNA_ID_2709849; gDNA_ID_2214578; Annot_ID_135215
attttcatcacccagttacaaacttgaaaaagaatcacacatcagaatattttaatttttcttttgttttgccataagaatatatatcatgacgataaagaatgtactttttgttctagtaaccatttgtgtagcagtttctgtaaatgctcaactacagcaatatccgattattttctcaaacccgcttccatttctgcgctcgactggtatactaaacctaccagacgtaaaaaaatgtttctcgtccgtgaggaatgttccaggatgcttattagagatctctcaagcttttggagagaaattcggtcacatgatgcccgcttgttgtaaggctttcatggatagcataaaatgcatgccaaatattctatacagtgtacttttccctcctaatttgaaagaacaatgtaatcaggcagggatccactaatttgaaagaacaatgttctgagggatccacgcctagtaaagaggtggtagttgccaccacttaaaaaacagtttttaatataactttactaaatataaataattgccaccgtaacaatttaactctttccatgatcccatttttttaaaaataaaaatatttaagatggccaaaagctcactttactagtattttataaataaaagcgtaatttgtaaactaaatctaacttaactaattaaaactaggcttgggcgtttaatctgaaaccgataatccaaaccggaaaatcggattaaaatccgaatcgcattcaatatccataggtaccagattatacttgatccgatgcaatattcgatatgtatccgaatttgtgtcttttgttgtaccagggacatgtccaagtttgaaaatgtagctaataagaagcttgaggctggcttgttttcactatcttccaaaatttttttactactttcgattgaattctgctacttttttaatttttaggatgttatggtttaccttcgctttaaaactttgatatattggcatcgttttatgtctcactttggtttcccaactctatggtttgctaaggtttcatgttagttcaactagtcatttcagttttgttttgcggttttcggattgtttggattatgtttagattttttgtttaaatcagatattgaatatcacatgcataccgattcaaaatccgaaatatccaaaccgaagtcgaaccacattctataattatttttatagatattaattagaatctatttccaaaaactcgaaatccgaaaacaccaaaccgaattcgattcgataatcaaacgcccagacctaagtaaaaccctacaacttttgaatccaattttttttgtcgttctttctttttcctcctagtttttctccagacgagaactccctggtaagtttttgttctttgttcaattataactgtttatttcaaattttaatcattgttttttcattaatcattctaactgtagaaatctaaggacaagtttgtttcttcttattgtagaggtttagttctcgtgtgatttgatgatactttacacatgtgctaataatgattttgtgtttagttttccaaaataacgttgttgcttcatttcgtttgaatttgtgttggatccgacccaagctcgactcttttactatttaagagatgttatgccacattttaacctaagatttaagataggtttatttcgctgaattgtctaagagtttagaaaggcaatatagacctaagtttttactatttaagcaacgtttgctacattgtcggtgaagatatccccccctctagcaagtagcaacattagtgaaattgttttatgaatccatgtatctttacgcagtcactacgtatgttgtctcatatcgatcgaagtgcatgctttcaatatattcattagtaagtagtcccgatgggaacagtgaatttggtagattagggagattgtgatctatgatgcttagggtagaaatatatgtttctaatttgaatgcacttaaaactagatttgaatttgctaaagatattaaaaattgttatttttgtgtgtcgaaggtgtttgatgcacagtttaggccaatcctaatagtgttcatgatacttggtcaatgagaattgatgattaaggtgagattagtggactaaaatggacctgttgttttcattgccaattgatttcctaatttgcaaatggaagttcagataaattgggtgtttaatagagcaattaaaaccatggaagtaatctaccttatttaattgtttcacccatgatccatagcttatcttatttgctaatctggtttcattattttgtttaatcttattgtttagtagtttcccacttttcctttcgaattgaatgtctctttatttacttgtttacgccatctatccacctagtttaattagtataacatacacttaagtgtgttatagtctaattctttgtggattcgatcacaatattgtgctacaagtgacttaactgtactcttcccgttttacaattcatatttaaaatttgacggacctatagtccactcaatttagctggtattgtaaatgtctacaaaatgaaagtcatgaatacattttcacttcaaagtacgttttttatttgtttgagatgtcaagcacatgtttatttcgttgttttccaaataatatctaggagaggaaggttatcaactatgatctctatctttctagtttgtggtcacgcatgagtgacttcaccggtcatttcataccttcgactttaacatatgacactgtacacgtaccatgttaaaaatgtgtggatagtaaccttttctagaaacccccttatttgatttttgtatatcgaatgacaaatccatgtgatgtgacctaaccataataatacaatgcaaaactaaaacgtgattcggccaaaactatgacaacctaaaaagctagagagtaatatatatagacatacacctgaagagttacgtatagcataataatacatttattcaatatg

SEQ ID NO: 26018 - DNA, 3003 bp, Unknown; identical to SEQ ID NO: 26017
  misc_feature (1)..( 3003): 2750-1469P.txt file - cDNA_ID_2709849; gDNA_ID_2214578; Annot_ID_186396

SEQ ID NO: 26019 - DNA, 3003 bp, Unknown
  misc_feature (1)..( 3003): 2750-1469P.txt file - cDNA_ID_2709853; gDNA_ID_2214578; Annot_ID_135212
tgatattccagattattagatctaaaatactcggagtcaaacgaatcatatcagtaacaaaatacaaaactagtcactacttgcgaatcaatcaaacaaaaataaaacatctaatcatggatgtgtattcacaaataacttaccattacaagtgtgtagtttacaaatgctctgttttgacttaaaatcaaaagtttcgacgatttaattttttttgatgtggtcataaaaagaaacttgaagaaatagagaatgattcttcagatttcttgttaagtgatcgtgaaatactttgattagggtttttgaactgcacaaaaaattctaacagagacaaaaggattgaaatcctctatgaaaaaacattatgttttaaaagagttgatttttcttttacgggcaacccacaatctgcgacgagtttatccacatgaatttgtgatctacgatggatctatccatgaagcccactaatttatatacaaaaaaaccaacgtccaatccgcctcgacagaactaacccaacagattttaatgcctaaaacatatttaagtttatttaaaattgttaagcatttttaaatctatttctaattaaaagtcacaaaaaacaaagctaaaattctaaccgttcactaataagacattaatctatgaaataaccactagattacgaaacattttcgaaatttgttaccttttacaactatctataaatttgtgtgcctaaagcatggacttcagccgctttagccaagggcagagctgaaattttcgttcatcaatttacattctagaaagaagtccaggacacaataatggttgagtcatgactcatgaggtggccagtagaactgttcccttctttgatgtgtttgtgtcacgttgataacgggtggacattttattggttttgtgagataaattgttgaaaatcgtagcgaagcaagttgatagggttcaatcatatctcgtattatctactatatataaaacattgtagaaaagtaaaatattttcatttaaaatattataaaacagagaagaaaacttatactatttgaccaaggaaaaaaactacctactcacgacacgaccatcacgtttataatgttaatacacagttacaccatacattttttcattgtagttctatacaataatatatcatcgtttgatctaacaagtattcgatagatagtgggaacttttttttcccttttggccttatatttaagaacatggagcctgtgtttctaaaattctatctaaaaaagtatattttgtattgatcatatctgaaattgcatatattgtaaaatattgtgtacaaaaggatccggtccaagattaaacacacaatacttactgagactaaaaggggctaaaccacaagaacaaatccttgaaattgcaatggttaaacttacaaaaaatatgtctcttattaccagatcttaatattgtttaccgaatttctgaactaaactacattttttgcccaaacaaacaaagaactaaactatatttattcaagtcaagtcaaataattgcatgcaggagacaacgcaaaaagatgaaaaaactaaaaattcagagatgaacatcgagaacacaaataacattatccaaatctcattaggatcctattaaccaaccacaaaaacgtccacttcataatggtctaatagtacaatttgtttttatgtagaagtaaaagtgaagttcgaatattcttacattgatttcaatcatattttgctactatagattaacatgtatacatcagcatacacatggtccaacgattgagtctatactgcacaaaactctggagatgaatctaaactttggttcgaaattccggcaatgtatggaaaagaatattcaaaaaaataagaagaagcatattgaccgtttcttgttcaatatactagaaggtaaacgtcaaaaatgtcagcatgttttctttcaaaaacaaaaaaaaaaatgtcagcatgtggtcagaactcagaagttcttaccaagaaaacttaactaacagttaccatttagaccctaaattacttatgttgtatttttgtccgaaaactttgattaaaaaaataaaggtgtaagacgatgaaaaagaacaaaaaattatattgtcactgtatctttcaaaatcattctaaaatgatagacatgtatcttagcgcctccaaacttttccactctatgaaaagttgttcttcgttttttttttttttttttttttttttgtcaattgttcttcgtttttgaacttctattttgcttcgttttgatatttttatgttttcgtttatatttttgaatttttctttctttcgtttgagttgaagaaaaaacagttgttattatgtaagaatttaaataacaatttcaaaaaggaatattttttttggtcttactaaacgtctgaccggcatgtttgaaatatttcagtttcttgttgcttcttgatttaaccatccgaatctatctaaaccaactaaccaagtgattgaacaagaactaaaccgatttttctttgatttgatctgaatccttaagtagtaaagtccaaaacagcaaatactaaaactgaacacaaactggagccgaactgaatcccgaaggaacaggtgttacctattccgacaacgataaatctcctatttttgggatgttttatctattgaaaagttgttgaatgaggatggtctaatgatttttccggtctctccttacaaattacacttttatggttcaatccactcttaaaaaataattgaagtcaagattttcagcctgtggtcggaaagtccttacacgaaactgaagtatgatataaatttatctttagcatatggtcgaaaagtctttacaataaacttagttaaatagtagtaaacatatacactagctacacgtatttcatctttattatggtcacacatactacacaaccaacaaaaactacaagacgataacaacaaaatg

SEQ ID NO: 26020 - DNA, 3000 bp, Unknown; identical to SEQ ID NO: 12897
  misc_feature (1)..( 3000): 2750-1469P.txt file - cDNA_ID_2709857; gDNA_ID_2214579; Annot_ID_135235

SEQ ID NO: 26021 - DNA, 3000 bp, Unknown; identical to SEQ ID NO: 12897
  misc_feature (1)..( 3000): 2750-1469P.txt file - cDNA_ID_2709857; gDNA_ID_2214579; Annot_ID_186431

SEQ ID NO: 26022 - DNA, 3000 bp, Unknown; identical to SEQ ID NO: 12896
  misc_feature (1)..( 3000): 2750-1469P.txt file - cDNA_ID_2709885; gDNA_ID_2214579; Annot_ID_135233

SEQ ID NO: 26023 - DNA, 3000 bp, Unknown; identical to SEQ ID NO: 12896
  misc_feature (1)..( 3000): 2750-1469P.txt file - cDNA_ID_2709885; gDNA_ID_2214579; Annot_ID_186429

SEQ ID NO: 26024 - DNA, 1440 bp, Unknown; identical to SEQ ID NO: 12912
  misc_feature (1)..( 1440): 2750-1469P.txt file - cDNA_ID_2709897; gDNA_ID_2214580; Annot_ID_135259

SEQ ID NO: 26025 - DNA, 3000 bp, Unknown; identical to SEQ ID NO: 12911
  misc_feature (1)..( 3000): 2750-1469P.txt file - cDNA_ID_2709909; gDNA_ID_2214580; Annot_ID_135252

SEQ ID NO: 26026 - DNA, 3003 bp, Unknown
  misc_feature (1)..( 3003): 2750-1469P.txt file - cDNA_ID_2709917; gDNA_ID_2214580; Annot_ID_135250
ttataatggatttaacaaaaaaaagaatagtttataatggagtcttgagagagttatttgaattattttgggaatttacaaaattgttggataaaaaaagtagttacaagaaaaaggaaaatatttacaagtgtgtttctaattttttcctactagaaagacaactagataagatcatttcaatagtcttctattcactaattatggacaagtaaaaattaaaagatttgttacaccatctctatcttacatttctctatttatagattcacatacccaatgtaaaaacaaatctcttgcctatataactctagacataattcattatattacaacaaacaaagattcaataatcaaaagaaaaatttagaatgacaagtaaatatttctccgtactagtgttcatcatcttggcttccaatgaagttgttgccaagagacactcttcaacacctaaattaagaaaaactgatttcccagaagatttcattttcggagctgcaacctctgcgtaccaagttgaaggagctgctcaggaagatggtagaggacctagtatatgggatacgttttctgaaaaatacccagaaaagataaaagatggtagcaacggatctattgcagatgactcttaccatctttacaaggaggatgtgggtttattgcatcaaattgggttcaatgcctatagattctccatctcgtggtcgcgtattttgcctcgtgggaatcttaaaggaggaatcaaccaagctggtattgactattacaacaacttgatcaatgagcttttgtctaaaggaattaagcctttcgcaaccattttccattgggacacaccacaagaccttgaagatgcttacggaggattccgtggggcagaaattgttaatgattttcgcgactatgccgatatttgtttcaagagctttggagatcgagtgaaacattggattacattgaacgagccattaacagtggtgcaacaaggatatgttgcaggtgttatggctccaggaaggtgttcaaaatttacaaaccctaactgcaccgccgggaatggagccaccgagccttatatcgttggtcacaaccttatcctagctcacggagaagcaatcaaagtctatagaaaaaagtataaggcttctcaaaaaggtcaagtcggtatagctttgaatgcaggttggaacttaccttatacagaatcagctgaggataggttagccgcggcacgagccatggctttcacattcgactatttcatggagccgctcgtgaccggtaaatacccggttgacatggttaacaacgtaaaaggcggtcgcttgcctacatttacttcaaaacaatctaacatgcttaagggatcatatgatttcattggcatcaattattactcgtcttcttatgcaaaagatgttccttgctcaagcgaaaacgttacaatgttctctgatccttgtgctagcgtcacaggcgaaagagatggagttcccattggtccaaaagctgcatcagattgacttttgatatatccaaagggaattcgtgatcttatcctctatgcaaaatacaagttcaaagaccctgtcatgtacataacagaaaatgggagagatgaagctagcactggtaaaatcttacttaaagatggcgatagaatcgattactacgctcgacatctcaagatggttcaagacgctatcttgattggagcaaacgttaagggcttttttgcatggtcgttgctagataactttgaatgggcatcggggtacacggtcaggtttggacttgtttacgtggatttcaacgatagacgtaagagatatcttaagaaatcggctcactggttcagacatttattgaatggaaaaaaggagaattgatgagatatgcaacattccaatatattaactaactagattaatacatgcacaatggtttgtttggaaaacaactattgttaatatacaaataaggtttgattttactgtattatatcaaacttaaatctcaaaaatagtggtttcaatgtaaaacttgtgcacactaaattaaatggaatagtatgcatttaaataaaaaaatcaagaattttcattcttatttcggccttctaaaattaattaattagttaaattagtttgtgattttattttgttgtggttgtcactagtggtaaattattaataatttaaaaatctaatattttcaataaaaattaatgatctatttttaatattaaataaaaatagttaaaattatagaaatttagttcatattgatatctctctaattcatttggaaaaatatttttagcacagacaacagtttatgcctgcatcattacaacaattttttttactattttctcataattttttaatactatttgagttataattgaaaagctaattacggttaaggagcagctatagataacgaattaatagattagagaggttaattatagagtcgtcacatctctctcacatgcctctctaagttccctttagggttttcttcttcactatagagactcatgctcttctcttcccaatcgccgcctctgatctctcttcctcgcttctcagattaggtattagacattcactctttcttacattgttataacattgatgaagtagaagcttagattcatatcattgccattggtcacgattaatcatctctttcactaaatcatcaattgtttcaatgagaaccaataacagctgaatcaatgtcgatacatttgttgttacgaaatcttttgaatcttcactgaatccgctttgtcatttttcttttgcagcctttgttttgttagattgatttgttatgtccaacaatctattgcctcagccttgtatgcaaatgggtcaattcattaatgtccctactcccactcctgagctgatttctaatccggaaatgagattgtcacaaccaatctgtagtcatatctctggtgggagacaagattttcatgtaatg

SEQ ID NO: 26027 - DNA, 3000 bp, Unknown; identical to SEQ ID NO: 12909
  misc_feature (1)..( 3000): 2750-1469P.txt file - cDNA_ID_2709921; gDNA_ID_2214580; Annot_ID_135248

SEQ ID NO: 26028 - DNA, 3000 bp, Unknown; identical to SEQ ID NO: 12909
  misc_feature (1)..( 3000): 2750-1469P.txt file - cDNA_ID_2709921; gDNA_ID_2214580; Annot_ID_186458

SEQ ID NO: 26029 - DNA, 3003 bp, Unknown
  misc_feature (1)..( 3003): 2750-1469P.txt file - cDNA_ID_2709947; gDNA_ID_2214581; Annot_ID_135272
atctctgggagtaccggatttagcaagaacctcaagatcaacgagactcatagacataagacccaaagtaagaccagacattagtccagcgaacaagactagtaacactatcacagcgatgtgtatgaagaagctggtcccgcagcattcatattccaccgccatagttataagaaacctagaaatcgaaactctaatcttacgtcagagcttcgacatctacgagaatcaaaaccacgtacggacaaaatccaccgtttcgaaacttagaaagacagtgaaaatcaaatcagattgcacaaaattttttttgaggaagattgtgttttgtgtgagtgtgacacgagagatacgaaaatcaaaatggagagtgatttttagtgtgagtggagagacgaaaaggtgatgaagaagaagacattaaaacaaattttgcttgatgaagctggaggagatggtttacgtggcgaaagactgtaatgtccacgggatgttattgcaaacgtgttttcggtgaagggtgttttcgtcatttagttgatttatcagtttgattattattagcaatgattattcgactttttggtagttagagttttgatatttgggttcgagtattaatggtataatgtggaaaggttatgatgtgattttatgggaataattgttaccaaaaaggtacgagacctatatgatgtttagaaattataaaactgagaattttaagggcttgattggtttatccgctaacaactgtctagtagttgttagcggtcggttgtggttgttagcggtcagttgtggttgttaacggttggtactaatcatagaaactgttccatatcgtttcgaaccgttcgaaatcgctggatttcaaaagctctttcccgcaagcgtttgcggttgtgggcggttacggttaatttaaaaaaggaaagaaactaaaaaagaaaaataatcaaattaaattatatatattatcaagtcttatatatattcacattaattctaaaaaaaataattatctaactttaaattttcaatattaataattatttttgttttcaacgtaaaatttatttgaataattatttatagttttaaatcattaattatgtttaaaaatttatactttttcataattctagtttttggtgtttaaattttttttttaaatcatatattaattttttttggtaaattttggtttaaccgctatcgtacccgctgatcaaccagtcgtaaatcttctgcaaacgcacatgttttcaaccgctaaaccaatcggtcaaaacgctaaataacgcttgaaaccgcaattgcccatttccgcaaactcccacaaccgctgcgtttaaacgagtcaagcccttaatgtttctgtggcaatttctttgttggttggtacacgcatgtcaattaattggactaatccaatacggccggacttgcaggttcaacatgattcactccgtaccggttttttttcttaaacacaaatgaaaagcgaaaccatttgcatctgtgataatgagattgtaactttgtaagacacattcaagaacctattttctgcaactaaggaataaaaagcaaatcacttggacactaaacacactcttcaatcgtaggcagaacagactttcataggcctcttagcagagcacaaaataagctaaccatcagagtgttataagtgaaatgatgcctattgtattaatgtcaaaacacactgaatcatacaacaaaaccaaataacccacaatcactagagattcaccacattaagccttctcacaagtcaattcatcaaagtagtagtaatagtaagagcatagaggcccgattcagttaattattggacatatttctcaatagtttgaaaaaaaatatatataaacagaatttaaattttttgggttttttctaatttgtttcaatacaaattagcctaaatactgaagaaaaatgtcaaaattatattggaccctattcaaagttccaattgcacagcccaataatcgggcctgagcgcacaaacaaaatcataaaaaagaaggactgtactaagaacatcatcagcccactcaatctttccccaaatctcttgagtacttcgtctttcaagcgcaatcacaacacactaaatcattttgtttctacatgaaggaacgcacttatcccacaaaagagtcatctttccactataatctaccaatctaacacaaccatcatcgtcaaacactggcagaccttcctaacccttcaaagattcccagtatcttgttttagagttgaagcattggatttttggtaaatcaatacaacgatataacacattttgtataccatagcaagaaagtaagttccatcatgtttccaaataatgcagcattcctatagctttccatctatcttcttttgccttgtaagccacgcgattttgcacaaccacatacttttgtcctttaatcactatcctcttcgagatcagagttttgtatttctcttcaaaagggtacaacatatgctcccaagtttggagttttggatccgaaacgttagcctaattggtggaattgaagagtctgaaacatcttgctacaaatatttctccatgactaatattggcagatgggtaatattgctttacccacacattaggagcttcacgccacgtgttagatcggtagtctgattcaccgtccggatcggatttaaaaacattagttttaaatttgtcggatattaatactaaactcaaactaaaaatggatcacgggttaaccggtcagaccgaacgatctggatcgagcatgaaaacactggtctattggaaagctagtgttttttttattcaaaacatttttaaaaattgaggacttctttttgacattttccggaaatatataataaaattaaatcagttaatcaaataactcaagtagccaaaatccaaaatctccgccatggctgagagcttctgagagagacacagccatg

SEQ ID NO: 26030 - DNA, 3003 bp, Unknown; identical to SEQ ID NO: 26029
  misc_feature (1)..( 3003): 2750-1469P.txt file - cDNA_ID_2709947; gDNA_ID_2214581; Annot_ID_186503

SEQ ID NO: 26031 - DNA, 3003 bp, Unknown
  misc_feature (1)..( 3003): 2750-1469P.txt file - cDNA_ID_2709959; gDNA_ID_2214581; Annot_ID_135275
cagaataagataatagggagtagactttagcgttgagccttaaatatttgaatatgacatagaattctaaacatattagtgacttgcaaacaactttttgaaaacccaaatagtatttcatttgaaaatttctacacctagcactcaaaactttaattaaatattaaataggttcttaaaagtgggggcttactttctttactcattttacactctccattatgtgttactcattttacactctccattatgtgttatacaggcgattttaggaaggaaaaagagagagtttaaaatgtaatgaaaatagtgtttcatgcgtgtatgtattttctaccgtcttgtttatgtttgatttgtgaacatatatatgccgtcacgtttgtaagaaaacttgtaacatgaaaaaatatcagacatatttatctacaagatagcaacatgaagagtggaacaaaaaaaatgatagcaacagccttctttaataatctacggtaaatccatgaaggaagaaaacaaagatatcttgacttgttaactaaaaaagtctttgggaccaaccaataatttcatgtttatctttcttgctacttggaggtgttatggaataatcaaagctgcttccttattgatataggttaaattaggcaaatatgacatatttattagttttaaaaaattacttagatgtaattatactaaaataattagatgctattttttggaaatttttacaaaatcaagattacacagtcaattattaaaaaatatatagtcatgaagaatgttatatagtcttttaatgattttgcatgtatctctcccacttgctttacatatgacgtcatgtttaaaacgtaggccgaaccagtaacatcggatactatcagacacacattcatatctatggccagagatgacctgaccattatccatgatgcaatataataaaacaaagctatcttgacttgtttactaaaacaattcttaagacttatatataattccatggttatctttactggcttcatgcaaggattatggaataatcaaaacagctgcttattgaatgaggttggttaaattaaattacgaaaatatgacacatcattataaaagtctaagagctcatttgtttcaaatttggaaaaccatatacatcatctatattcaacatcctatatattgtttaaaactttaaactcgttcttttttttcaattttttattttttataattcggatgatttggttcaacagattttatgatctctgaaccagagcacgaagatttctttttctagctggttcttgggtcaatggaccatgagaactgactaatcccaggacgaggggaagccatgtgaaaacctctaacactcacacatttgtggagtagtttttagggtagatcaaactttggatagctcattacaactttttttagtctgatcactaccactagaccaagcttgtgtgggcaaaaagacttcgttctcaagggcggacctagtaaagaagaagggggtcacttgacccaagttgaatagtcaaattttattttttgcatagaattttgtttagaattagcagaacaattggtaaattccaaggtgttgacacccccaaaacatgagttcaaatctctataatgacacttttactcttttctcctcaatttagttttaaataaatgttttttttgtcttatatatttctttactttttccaaaataacagcaattaatatactatttttatttccttatgaaattgattttatttttgtgagtttgtataaatattataagaaagttagttataaaatactgtttataaattttttttgaccccggtaaaatttatttatgggtccgctactgctcgttcttgcctataaatgtaaattttgtttctatttgagtatgcagaaaaatacaagtactatatatataaaacactcgttttttaagtcatgtaaattatcattaatgaatgaaggaatttgtaagttaccaaaaaattgcttaaccagcgaaggggataaaccttgccaaaaaagaataaagaacaaggatatattttgcatgtcagagattaggtattaccgtattagcaagccaaagctgcattagggaaatcccaataaggtttttacgttcatgatttcttgcacgactatgatctcgtcaatatggaattatacaacgtctgctatttgaatatggctgccttaggctctctcaaatcttatctatactgcatattcgattggacgaaatggaactatgattatttgccaattttgtccatacatcaatattttcaaagtattccctggaattgtttcttattggtgttaagattttgtcattgttgaagtacttttgatgttatttttatacgtaattaatttaaatgaagtgaaaaacaagaaatgaaacttttttgtttttattcaattgtttcttttgttagtttttctatttctaaaatcttatttttcatactttggaatattttttagtttttttgttcatcaaatatcctataatttatttaaactttttaacctaatgtaataatacaaaataaattagacggtatgctgttgtaaatgttacagaattcagatcaaatttaatcaactatttttaaaaaattaacaagtaagtcatgaagaacatatagtctttttatgtttaatgcatgtatctactatctctcccacctgctttatatatgacgccacgtctatgacgtaggtcaaaacagtaacattagatactatactatcagacacacattcatatggccagagatgaccaaccactggagatgctctaagaaatttatcctcgtaggcttttctcttttaaaagtcaacatattggagccagatgtttattttataaatactaagaaccacaccaaagaaaaaacatttcaaagcaaaacaaaagagagagagtgtatccatttttggaggggaaaacaaagtatg

SEQ ID NO: 26032 - DNA, 3003 bp, Unknown
  misc_feature (1)..( 3003): 2750-1469P.txt file - cDNA_ID_2709979; gDNA_ID_2214582; Annot_ID_135281
agactagaaagagaaagaaagagagagagagagagagagagaaccagagattatcgaacacgaagcagaagacgattcgtggaagagacttggagagaatatttctcaatgtctcctctcccaatcttccatcgtcttcctcacgccacgttctcttcctttctcctctcactggttcgttccctccattgacgaatgttgcattttgcttgttacctacgactgcttttgattctctttctccatttgggtttcttccgattactttaatacttcttcaatttggacttgtcgtcaacattttcttgctaaagtatggattttttgttgttgggttactgttcagtttgactttgatttcagagaacccattctttgttgttcttgcgtgctacattgcttttagatctgattcactaaatccgttaaaataccaaatctttatcgtgtttgtctttttgtcctctaagagcattaaaacttggtgtttttcttgtcctctagttctgggttctctaatcgttttctcttttacttgtcattgtagtctcaagctggaagttctaaaacatcagtggcattcctcaatgccttcaaatcagaagatatcattgctcgaattggactatggtggcagcttataagggctgttgtagttgtacctgtcttcaagttcctggtgcttctatgtttggtcatgtctgtcatgttcttcgttgaggttatgtacatgggaatcgttgttttgtatgtcaagctgttcaagagaaagccagagaaattttacaaatgggaagccatggaggatgatgttgagtgtggcagtgcaagctaccctatggttcttgtgcagatacctatgtacaatgaaaaagaggtagttactgaaccagcaactatttttccagtgattggtttgtagttgaacttatttggtgggatgttaatgtttgtggtaggtttgtgagcaatctattgcagctgcttgcaaaatctcatggccatcgaatcgtataataattcaagtgcttgatgattccacggatccagccagtaaggtccttgtttaacctctatagacacttgtccctttctcgtctaaatccctctgttttagactcatgattgtgttgtgttaaagtgagttccttaacatttgattatgtggcaatgatggaaggaaacaggagttggtgaaaaaggagtgtgacagatggtctaaagaaggtgtcaacataacgtttgagataagggacaacaggaacggatacaaagctggtgcgttgagagaaggaatgaggcatagctatgtgaagcagtgtgattatgttgctatctttgatgctgatttccagcctgatcctgacttcctccaccgcactgttccattcttaattcacaatcccaagttagcacttgtacaaggccggtgggagtttggtaacattccttagttacctttcttttctttttccatcataagtttatagattgtacatgctttgagatttttctttgcaaacaatctcagtgaacgcgggtcaatgcatgatgacgagattacaggagatgtctctaagttaccactttacaatagagcagcaagttggatcttcaacatttgccttctttgggttcaacggtatagcattctcaattttcttttcttttctctccataaagctttttcttattctctgaaactattgcaggaactgctggcgtctggagaatctcagcattgaatgagtccgggggatggaatgaccagacaacagtagaagacatggatttagctgtacgagctacactgagaggctggaagtttctatatatcgatgatctcaaggtatgtatagaagattcctctcttttcttggaatcttggattttgcatttgaatcattaatgcgttatctgtaggtaaaaagtgagttaccttgttccttcaaagctctgcgtagccagcagcatcgatggacttgcggccctgccaatcttttaaggaaaatggctggacaaataataagaagcgagaatgtatctctatggaagaagtggtatatgttgtacagcttcttcttcatgcgcaagatcgtggctcacatcctcacattctgcttctactgtgttatcttgccagcaactgtattgttcccagaagtcacagttccgaaatgggctgcattttatctcccttctttgatcactctcttaatcgcaattggtagactaagatcaatccaccttttggctttctgggttctatttgagaatgcaatgtccctgctaagagcaaaggctctggtcatgggcttgttcgaaacaggaagagtacaagaatgggttgtgacggagaagttaggtgatactctcaagacgaagctgattccacaagttcctaacgtcagattcagagagaggtaagttagacatttcgtattaggcctcctttacttaaccgagtttgagcttaaaccattgtgttgcaatcagggtgcatttgctggagctattggttggagcgtacctgttattctgcggaatctacgacatcgtctatgggaagaacacactctatgtgtaccttctgtttcagtcagtggccttcttcgttgttggttttggatttgtaggaaaatatgttcctgcttcctcttacttagcataggatagatcatagagtctcaatatgtttcagaaggttttttgtttgatgtcatattgagaacaatgcctatatactactctccatttgtattaacacttgagtatctgtaaccaacgaagctcagatgtgatcgatattatttttttaacagtataaaaccacttaacacttatttagtttgttgacctcgtggcttcatattgactacagaatgaaataggtaaactataaagtctacactatttatggctgaaatttatttgaatacatatccaccacttgtcttgttcttgaaacacacggtcgtggccatgtctgttctgcttccgatg

SEQ ID NO: 26033 - DNA, 3000 bp, Unknown
  misc_feature (1)..( 3000): 2750-1469P.txt file - cDNA_ID_2709986; gDNA_ID_2214582; Annot_ID_135283
acttcagccattcccctacaaaccgaaatgcatatgcagatgccagcagaggaaacaacctgttctgctgagttttataattaatcacctgccaattataacaacatcaataactggtctctatgtttatggtcatgactgatgaccatattctatctagagattggattcttacttaactaagttacagaaaacatttttgccccatagttatgaatagtgagatttgttgaatacctgtgtctcaatgccaccatcatgtgagccaaactgccttcgaacagcactgtacctagtagcaatgcaaactgcccgagccagcgcggtggaagcatttgacacaatagactgtctcacatacaccatagtaccatacaccaattgccttggaacatctgatgctacatattttccttctcttgtaacttttgacagtctataagaagaaaaatgcacaaccataaatctgtttctcttagggatattaaatgataaaatgcttttattcatagaaagggccaaagagagaggacctcatgagcatttgatctctaggaatgcgaaaatgatcaaacataagaaaaccattgtccattgagttatatgccccgtttccaaacttcattccgatatcaccaacggttatacccggaagaggagaatgatcatccaaactacgcagctgcacgatgaatcctgaaaaacagaaaaatcttgttactcaatactactgatgattattaaaaaaatgaataagaaatcgttctagtgccttaccatgtacaccatggtctttgccattggttattagacgagcataaataacagcatgagtagaaacttttcctaacccaccaggccaccactaatgtttcaaacaaaacaaaatcaagacacaatttaaacactcagagatcaaaatagataactgtctatacttcttccccttactttggatgatgtctgagttggactgtgaatgataaactgatctgtctttggatcaaaagtagcggttgtctcaaggccttgaacattagagccatgaccaagctcagtttgagcataacatccaattatctgcatcttagtagctaaagacaaccacttttgttgttgttgctctgtgccttgtcctttaattgcaggcacaaacattccctatccaccacaaaaccaattcaacaccaaaattctaattaaaccacccaagggaaattgtaaattttgtgttatacccaatgcagatccaagaagcctggttgatccatgaaagatctcaatttgagtccttcctcatctgagagacgaagctcgttaatcaacttccaagcgtgaacacttttcctcaacgtgttcttgaacaactctttcctactcatcacagctcttttgcttttctcaaagaccttaacatggcaaaagtttcgaaattcacatcggaaatgtcgccggaaaaacagagaaaggaggaaggagaaatcttaccggatcattagcgacgaggcgagacatacgatttgaaacatcgaaagcgtggcgggaaccggcccagacgatcttcatatcgtcgacgttgaactctgctttgttcctctcatcggcaaggtgatcaactctctccattgttctctctattgtctcagattctcgagtgtgtgtgaaaaattggataaatcaaagaaagagaagccactaaaaaagctcttacctttgggtgattcaataagaaagaattcgttacagaaaaaacagaggattttgttctatttttaggattacaagtttgaacagaaagagagactaatgtaataaaggtaacaaaaaaattggtaatagaaagttccaagtatttatcatttatatcggattctaatgaaagacgtgataagatttggtttaaaactaatcaagctctctctaatcatctacacatcatagttgccattagcccattagcccattactacactctcgtgggctgtagataatttgctcagctacttttgatttttttttgttgactttagtaaatcactccaatataataaagcctatttgcagtaatttctattttgtagcctagttgtaaattctttttactcgaaagtattacccaggactagttttgtttgttttgaatttaatattttagaggacttagatactttttcttaagctcaaagagaactttatttttggctcaagaagtcttgaattttaacaattaaaaacataattttcttttcatttcaaatatgggtaaattaattgttcttttaaaaaacttaaattaatttgatacttaaaaattaaagaaaggatcttatccaaaacaaaaaaaagagttaaagaaaggataatcctaatattatccgggccttgtgcgacgcatgactctttctccataaatcggcaaaacacgtgtcaacagagcattgactttcacataaaagctacaataagaggtgaaacgcttgtcagtttagcaaaaaccctctcattgaaaacactgagatccttctttttttggttctcctctcttaaagagaaaacctaaaggttgagtagagattaggcaaaaacaaaattctcgatccccaaatttcgaaaacttgttcttagggcgattcttctctttggtcatttggcgaatttgatttatatccatcggtgatcggatttttttcagtcttctccgtctcgtcgttaccggcgtttgatcggatcatcgttttgtttcaggcgaaatatggtggtgatctccctgaagattttgaattcaaaatttcttcggttgcttcctcttgactttatcgcgatttcgattacgtgtagactttcttcttggctttgtcttcgaatcaattaggattgtgaataatcgtgtctgtgtatataagactggtgattgattattagggcatcggttggcaggagaatagattgtttttttttttggtgtgtgttggatctttagatctttgactgaggaatatg

SEQ ID NO: 26034 - DNA, 3003 bp, Unknown
  misc_feature (1)..( 3003): 2750-1469P.txt file - cDNA_ID_2709990; gDNA_ID_2214582; Annot_ID_135284
ctcgccagcagactcacctgcattcattcttcgccatcatcatcagtagacagaaatgtcgacgcttatgcctcccatggaaagatttttcccagaaagcttttggtcctcacgcaagcccagccacagacacgatatcctcgccatcgcagcctgccccaccactttcaccctgtacaccatgctcagatctgcagctgccgcccatagctcattcccattaactttcactgacctccgtgaccgtgagtcatcatcattatagccctctagatccgagtgggtgactacaaccattgacccatcatcaaacaccactacattcccagaacaaacctgcttcacatttctcgggatcaaagctgaagttgcatcagttaagcaactctgagtattcagcaccttgacatggtagtactcaacaacggcctgcaaatacatcaacaatcagaagaagaagaataaatgactaaactctggttcatcggtgatgaagaatgggacccctgtcagataccttccattgggctgctgctaaaagaaccctgggcctgattgatctcacgtaggaatatgctgcttcaggtgtcatgtttttgtgttgaacctgtgttgaaaaggtatgatcagagaaaaggagaaaaagtgtctctgctcaaaatgtttttctgggatttattgcaatacaaaccaagtagcatatgacaatagttgtgctgcgaccccgacccgctttgcagtgaacataagtcgtctttccaagcgaagcatttccttcaaggagacaaaatagaatttgagatcaaatgaacgcgggttcggacaacagtaagctttttaataatggtcagtggcaaaaaacgtaaaagaataaaatgagaaggtacacttactatggataaattctacagcttggcatattgcttccatggaaggagcaaaacaataatctcttgtagcaatcaccaggtggtcaatgcagtaagacttccataagagtaagaaaattaaatgggccgggtcagtacatagaagaaaccaaaagacagaacggccacattaaataactcactttgtagagagacgatggaaccaaagtttcatatggctcattcagagtgatcactccacaaacaccgagctctttcagctgtggaacatcagatggaaatggaacagctcccagtaatataaactgcagaaaccaaagagagagagaagcataagcaaaagacccagaaccaaatccagaaaacatacttagaggagtatctacaagagatacaacaacaaatgaagacgattttacacaaaccatcaaaagcagcacaatctacatgatcaatgtatcaatttccactaaaacagctcaaaggacaatcaagattttacctcagccacgcgatcccaccagcgaaactcagattcgagcttattcctaacaacgttgtaaaccagagtaggataaaacaaagcacgagcaccaacaccaacgagtgccctctttgtagtcaacacaatcacgtttcctctgctcaccaataccgccttatctccatcatcaacgttatcctcaaccgatctctccctcttctcctcatccgtttccgtcagttctttgatatacatattcctcagtcaaagatctaaagatccaacacacaccaaaaaaaaaaacaatctattctcctgccaaccgatgccctaataatcaatcaccagtcttatatacacagacacgattattcacaatcctaattgattcgaagacaaagccaagaagaaagtctacacgtaatcgaaatcgcgataaagtcaagaggaagcaaccgaagaaattttgaattcaaaatcttcagggagatcaccaccatatttcgcctgaaacaaaacgatgatccgatcaaacgccggtaacgacgagacggagaagactgaaaaaaatccgatcaccgatggatataaatcaaattcgccaaatgaccaaagagaagaatcgccctaagaacaagttttcgaaatttggggatcgagaattttgtttttgcctaatctctactcaacctttaggttttctctttaagagaggagaaccaaaaaaagaaggatctcagtgttttcaatgagagggtttttgctaaactgacaagcgtttcacctcttattgtagcttttatgtgaaagtcaatgctctgttgacacgtgttttgccgatttatggagaaagagtcatgcgtcgcacaaggcccggataatattaggattatcctttctttaactcttttttttgttttggataagatcctttctttaatttttaagtatcaaattaatttaagttttttaaaagaacaattaatttacccatatttgaaatgaaaagaaaattatgtttttaattgttaaaattcaagacttcttgagccaaaaataaagttctctttgagcttaagaaaaagtatctaagtcctctaaaatattaaattcaaaacaaacaaaactagtcctgggtaatactttcgagtaaaaagaatttacaactaggctacaaaatagaaattactgcaaataggctttattatattggagtgatttactaaagtcaacaaaaaaaaatcaaaagtagctgagcaaattatctacagcccacgagagtgtagtaatgggctaatgggctaatggcaactatgatgtgtagatgattagagagagcttgattagttttaaaccaaatcttatcacgtctttcattagaatccgatataaatgataaatacttggaactttctattaccaatttttttgttacctttattacattagtctctctttctgttcaaacttgtaatcctaaaaatagaacaaaatcctctgttttttctgtaacgaattctttcttattgaatcacccaaaggtaagagcttttttagtggcttctctttctttgatttatccaatttttcacacacactcgagaatctgagacaatagagagaacaatg

SEQ ID NO: 26035 - DNA, 3003 bp, Unknown; identical to SEQ ID NO: 26034
  misc_feature (1)..( 3003): 2750-1469P.txt file - cDNA_ID_2709990; gDNA_ID_2214582; Annot_ID_186527

SEQ ID NO: 26036 - DNA, 901 bp, Unknown; identical to SEQ ID NO: 12946
  misc_feature (1)..( 901): 2750-1469P.txt file - cDNA_ID_2709998; gDNA_ID_2214583; Annot_ID_135292

SEQ ID NO: 26037 - DNA, 901 bp, Unknown; identical to SEQ ID NO: 12946
  misc_feature (1)..( 901): 2750-1469P.txt file - cDNA_ID_2709998; gDNA_ID_2214583; Annot_ID_186548

SEQ ID NO: 26038 - DNA, 3000 bp, Unknown
  misc_feature (1)..( 3000): 2750-1469P.txt file - cDNA_ID_2710001; gDNA_ID_2214583; Annot_ID_135299
taatttaatgatttgatgtgcgtcgtttgtcttatatttagcctgatattgtgaaaaagaataaattattcctcaaacttatctatatatatagcaaaccaatataatattatatcgttaaaaattgttatatagacgattaataagcttaatgaatatgattaattgaaactttgacaattttgaattatatatttttagttattattagaacacagaagaaccatgatgcgtaatataggtcattattatgcgttaagtttcatgtgtcgtgatgaaagaaaatcctttttgggtgactaaagaggaaagattctaaatcggtggctaaaatgtaattatgatggttgaaccattaaaacaattcatatcgacacatttgcaggaaggtttcatattcgataattctaacttcttctttcttatgcacccgattagtctaacttacaataatagttttatctagaaattcattgaacctttatggtgcatttagtttatatgtctatgttattatacctactcaaccatgaagattgtttgttttcgtatttttctacgatctgatttgacaattagacttacaaaattatcaactaaatagaagctttgttcaaaaaatcggatagagtccgcagcgattttgtccaaatcagaaagattaatcgtttatccgatttttgtccgtatagatccgctagacccgcttaatatatatatatatatatatatatatatatatatataagttttatattaaaatatccaacttatattcgtaatttatatgaaaaattataaatttgaacctaaaaccttattttcatatgtctaatattattttaaaaataatattatataaatttcttaattataatggattaatatgttttaaaaatattaaacaaccctaaaactaatccacgattaatccccctataatctcctattttcctgctagacgctatgtccactctcaccacccgagtagcacctagcgattttttgaacaaggaatagaagtaatgagaacattaaattgtttatcaatttgaagtaaccacattaggttttagtttaagtgaactaaaggcatcggtaggtcctatttttgtgtcgtattgtatgttccatgcatgatgcatggggctatatatatcgtagtcaaacaagaacctaatataatcaaattcgacccatgaggttggtatataatagggagcaaaaatatgaatcttcttggattaaaaaccggtccaaaccacgccttatacattaggagttttatattgaataaaacgatcggattacttgtaatatatgcaacgactgcatcactctcaggtaagaaaaaaacgtagatacatcgaacatacatcaaacgcagacgcgttcactaaccgcgattcaaacacgcacttgatcgatctaggacataggttaggaggcgtcgactcacgtgaccatgtctcttccaaagtcaacataaatgtgccgcgtaaggatagagactacttttgttgttgttttactacgtttctaattttatactaaattttacgtgtttaattattaacctaatggctaaatgtctctagttattaaccaattaaaccctacaaatcgagagaccacgaaacgacagagaaaccccttaaacactttgacagagacaacgtccaattattaattacgttgaattattggcctttatgccttaaattgattctcttactacttcttaattttgttgacctaccaatatatatttacaaagttgtatcatcgggcgtttaatgttgaaacccatgctactattattaatctgcactaccacgtaaattttgcagtaagagctaatgaaacaaaaaaaaatactattgactaataagtaataaatgaccatagctcaatttgtttactaaatacctcaacttgtagcattattctatagagtatcatatagtgttaaaagtgtactgatgcacgcaaatatgtcgttaagttaaatgatacacagaaaaattgctccacacttgcaatacgaagtgttttttaattataatccaaaattttgttggtttgtcctcattatttaatatctaacacttgttatttgggtctacacccgaaatttacaaactaatcgaattatttcccatatgaattataaaatatatatgatggaaataagcaattaagcatgatcaaatcatcatcatatttggatttattaagggatagacataaactttaaactaaatttccgagtatataaaacactaaagtataaaatcagatccgtgtgctgaaattattatttgtgaaacaaaattgatattttaatgaataatgatgtaataaaggttttttttttttgttaaagatgtaataaaggttatgagatgagatcattgataatttgataaacatatgtctacaatatttaacataaattaactaaaaatggatatgatagagaagggataaatttataatttatatttacgaaatgagataaatttagacttgtagctatgcttattggtacttaaaattaacatacatttttcttttaaaaaaccccaacattagctttagcttctcgaccaatgatgaaaattccaagaaaagaaagaaacattcataattgtttttttttcaaacaaaaaaaaagagcggccgttttattataaaaagaagataagctattggaggttgatacaacgctttttgtctcatctccttcttcttctccttctcaaatcttttttttcaggcgtaacgaatcgaatcataaacacttacgcagaaacaaaaactaaactttggatcttttaaccgaccatagagattcgtgggttcttcttagtttcgacagattcttgatccgttttagttgttacgctcatctttgcttttatacatcagacccttctcttctcttccttctttatctaagaaacattagggttctttgaaatcttgctaaaaaaaatg

SEQ ID NO: 26039 - DNA, 3000 bp, Unknown
  misc_feature (1)..( 3000): 2750-1469P.txt file - cDNA_ID_2710001; gDNA_ID_2214583; Annot_ID_186557
atgtgcgtcgtttgtcttatatttagcctgatattgtgaaaaagaataaattattcctcaaacttatctatatatatagcaaaccaatataatattatatcgttaaaaattgttatatagacgattaataagcttaatgaatatgattaattgaaactttgacaattttgaattatatatttttagttattattagaacacagaagaaccatgatgcgtaatataggtcattattatgcgttaagtttcatgtgtcgtgatgaaagaaaatcctttttgggtgactaaagaggaaagattctaaatcggtggctaaaatgtaattatgatggttgaaccattaaaacaattcatatcgacacatttgcaggaaggtttcatattcgataattctaacttcttctttcttatgcacccgattagtctaacttacaataatagttttatctagaaattcattgaacctttatggtgcatttagtttatatgtctatgttattatacctactcaaccatgaagattgtttgttttcgtatttttctacgatctgatttgacaattagacttacaaaattatcaactaaatagaagctttgttcaaaaaatcggatagagtccgcagcgattttgtccaaatcagaaagattaatcgtttatccgatttttgtccgtatagatccgctagacccgcttaatatatatatatatatatatatatatatatatatataagttttatattaaaatatccaacttatattcgtaatttatatgaaaaattataaatttgaacctaaaaccttattttcatatgtctaatattattttaaaaataatattatataaatttcttaattataatggattaatatgttttaaaaatattaaacaaccctaaaactaatccacgattaatccccctataatctcctattttcctgctagacgctatgtccactctcaccacccgagtagcacctagcgattttttgaacaaggaatagaagtaatgagaacattaaattgtttatcaatttgaagtaaccacattaggttttagtttaagtgaactaaaggcatcggtaggtcctatttttgtgtcgtattgtatgttccatgcatgatgcatggggctatatatatcgtagtcaaacaagaacctaatataatcaaattcgacccatgaggttggtatataatagggagcaaaaatatgaatcttcttggattaaaaaccggtccaaaccacgccttatacattaggagttttatattgaataaaacgatcggattacttgtaatatatgcaacgactgcatcactctcaggtaagaaaaaaacgtagatacatcgaacatacatcaaacgcagacgcgttcactaaccgcgattcaaacacgcacttgatcgatctaggacataggttaggaggcgtcgactcacgtgaccatgtctcttccaaagtcaacataaatgtgccgcgtaaggatagagactacttttgttgttgttttactacgtttctaattttatactaaattttacgtgtttaattattaacctaatggctaaatgtctctagttattaaccaattaaaccctacaaatcgagagaccacgaaacgacagagaaaccccttaaacactttgacagagacaacgtccaattattaattacgttgaattattggcctttatgccttaaattgattctcttactacttcttaattttgttgacctaccaatatatatttacaaagttgtatcatcgggcgtttaatgttgaaacccatgctactattattaatctgcactaccacgtaaattttgcagtaagagctaatgaaacaaaaaaaaatactattgactaataagtaataaatgaccatagctcaatttgtttactaaatacctcaacttgtagcattattctatagagtatcatatagtgttaaaagtgtactgatgcacgcaaatatgtcgttaagttaaatgatacacagaaaaattgctccacacttgcaatacgaagtgttttttaattataatccaaaattttgttggtttgtcctcattatttaatatctaacacttgttatttgggtctacacccgaaatttacaaactaatcgaattatttcccatatgaattataaaatatatatgatggaaataagcaattaagcatgatcaaatcatcatcatatttggatttattaagggatagacataaactttaaactaaatttccgagtatataaaacactaaagtataaaatcagatccgtgtgctgaaattattatttgtgaaacaaaattgatattttaatgaataatgatgtaataaaggttttttttttttgttaaagatgtaataaaggttatgagatgagatcattgataatttgataaacatatgtctacaatatttaacataaattaactaaaaatggatatgatagagaagggataaatttataatttatatttacgaaatgagataaatttagacttgtagctatgcttattggtacttaaaattaacatacatttttcttttaaaaaaccccaacattagctttagcttctcgaccaatgatgaaaattccaagaaaagaaagaaacattcataattgtttttttttcaaacaaaaaaaaagagcggccgttttattataaaaagaagataagctattggaggttgatacaacgctttttgtctcatctccttcttcttctccttctcaaatcttttttttcaggcgtaacgaatcgaatcataaacacttacgcagaaacaaaaactaaactttggatcttttaaccgaccatagagattcgtgggttcttcttagtttcgacagattcttgatccgttttagttgttacgctcatctttgcttttatacatcagacccttctcttctcttccttctttatctaagaaacattagggttctttgaaatcttgctaaaaaaaatgggtgttgagaaaatg

SEQ ID NO: 26040 - DNA, 3003 bp, Unknown
  misc_feature (1)..( 3003): 2750-1469P.txt file - cDNA_ID_2710015; gDNA_ID_2214583; Annot_ID_135307
gctgtcttccttgcataattgctcttctttatgccgttgctggaacggtatgaagccatctcatcgatctttgttgtctactactttaaagaacttagagacgccttttcttgcgggttttatacaggaaggtgtatcggaggcggagctcggtgttcttcccttgtacaaatttaaggctttccatagcaatgagaagaacattactggacctggtaaaatggttcctataccgatcaatggcttatgcttagcaactgaaagaacactgcttgctgaggatgcggtaaacacgaatctagtttgacaacgatttgttacttatgaactctgcttttgcttagtttcaaaggcttcttctacttgatttttcttaacaggattgttgcatatgtctgagttcatatgaggatggcgcagagcttcatgctcttccttgtaaccaccattttcattcgacttgtattgtgaaatggcttaagatgagagcaacatgccctctttgcaaatacaacattcttaaaggaaccactgatcaatcttgaagacaaaactcaaccaaccagagggaataagattctgcacatatagaaacagattccatttcctcaattaaaaagcttctgtatatatttatttacataactatcaaagtcatgtgtcttttgttaaaagcatccattttaaatgtaaaagatcacactttacaaatgcccttttctatatttgcccatatttgagaatacagctgatgctcatagtcatagctcaaatcataagaaagttcacgaacagttcacttcattgccacactgtttgctgcaatccgcatcacttactgctgttacaagcccccttctctgcatatcaagaagcaaatccgaagcagcggccatgtttccctccttttcataagctctaatcaagagatcaaaaacagccgaatcaggacttattccgctattcaacatttcatcgaaaacttgtcttgcctcaaccatcaaacccttgctagctagcccgtaaatcaatgtagtataggctaacaaatcaagcaaaagaccttcctgaaccattctggtttttaacttaaacgcatccaccaaattcccttgcttacacaaaccagctatccaagaagtgtacatgaacttatctggaacaagtccagcctctgagattttactaaacaatctctcaacttctataaagtctccttctttgcacaaagcatcaataagcacagtgtacataacatcattagctttctctatacagaaataaactatagcttcatgtagttgtccattcttcgcaatcccatcgatcatagtcgaaagagctacaacatcgggctcaaagcctctctcaattaatttgtggtacatgttaaccgcagccttcatgcgtccggatttaaaatatgcattcatcattgtagtaaaaatcaccatatcaggaactaaatcacttttctccatatcttctacaatctcagttgcctcctttagtttaccattaccacaaaggcctgatatgattacgccgtaagctgttatatcaagtctcatcccttgattgagcattttggccagaaacttcatggcattatccgaatctcctctctgaaaaaaaccatcgataatcgtagtgtatacaagagagtttggctcaactctatcctcgaccatccttgaatacatttcctcagctctctgcatttcccccttcttgcagaaaccatctatcaaagcagtataagtaacaacattcaaagacatccgaacgcgtctcatttctttgtataacgaaaccgcaacctccaagtcaccagctttacagtacccatcaatcaaacaagtgaaagtaaccacatttggagataaagcatctctcttcatagagtgaaaactcttcaacgccaactgcaactccccggatttgcagaacgtgtcgatccaagtactataagtaacaacattcggcgaacaacacttcaacataacacccatatacacaaaaacctcatctaacatcttcatcttgctaaacccattaaacagagaattaaaactaactatgtcaggcttgcagataaacccatgagaggctcttaaactctctaaaaccaaactagcacttctgatatctccatttctacaatgcccatcaatgagagagttataagatataacatctggttcacacccgaatctaggcatcgagtgaacgatatcttcagcgaatttaacttgccctagtttacaaacaaacgatacgaccgaattgaatgaagaacgatgaggagtgtaacctctggagactaagtaagctaagaatttgagagatagaatgccgcaattggaattgattagctgatgaatatgcttgttgcaggtgaatgggtctgggagattcgaggattttctcaggcgagaaagaaattgaagagcttctctgaccattcatggacatgggtttcttcagaagattcgaaaggttacaactttgaaaagatttttaaacatcaaagctaaatctaacggagaaggcttaaaccctagaaggttaaagaagaccgtcgttcggttctaaacgacagcgtttaattgtaagcttattattaaataaacatgaaaatgtaaaaaaaatctgaaaacggtaattatctctctctactcgctgtgacttagcataaacctcttttaaatccttctctaccaaaaaaaacttgctatttctcttttgtttttgtagaatctccggtgaagccgaattcaaaccctaacacttttggttcatcagttcttcttgacgattcagtgttgttgcgcgtcttatttctacattttgctttctcgatttgagaatgtgctgattttaggtatgtgttgattttttttttttgtttctggtggatggatttgagacttcaatagatatggaacttttgatgcctgtgtagattagagaagtaagggttttatagatcgggaataaatg

SEQ ID NO: 26041 - DNA, 3003 bp, Unknown
  misc_feature (1)..( 3003): 2750-1469P.txt file - cDNA_ID_2710015; gDNA_ID_2214583; Annot_ID_186567
agagacgccttttcttgcgggttttatacaggaaggtgtatcggaggcggagctcggtgttcttcccttgtacaaatttaaggctttccatagcaatgagaagaacattactggacctggtaaaatggttcctataccgatcaatggcttatgcttagcaactgaaagaacactgcttgctgaggatgcggtaaacacgaatctagtttgacaacgatttgttacttatgaactctgcttttgcttagtttcaaaggcttcttctacttgatttttcttaacaggattgttgcatatgtctgagttcatatgaggatggcgcagagcttcatgctcttccttgtaaccaccattttcattcgacttgtattgtgaaatggcttaagatgagagcaacatgccctctttgcaaatacaacattcttaaaggaaccactgatcaatcttgaagacaaaactcaaccaaccagagggaataagattctgcacatatagaaacagattccatttcctcaattaaaaagcttctgtatatatttatttacataactatcaaagtcatgtgtcttttgttaaaagcatccattttaaatgtaaaagatcacactttacaaatgcccttttctatatttgcccatatttgagaatacagctgatgctcatagtcatagctcaaatcataagaaagttcacgaacagttcacttcattgccacactgtttgctgcaatccgcatcacttactgctgttacaagcccccttctctgcatatcaagaagcaaatccgaagcagcggccatgtttccctccttttcataagctctaatcaagagatcaaaaacagccgaatcaggacttattccgctattcaacatttcatcgaaaacttgtcttgcctcaaccatcaaacccttgctagctagcccgtaaatcaatgtagtataggctaacaaatcaagcaaaagaccttcctgaaccattctggtttttaacttaaacgcatccaccaaattcccttgcttacacaaaccagctatccaagaagtgtacatgaacttatctggaacaagtccagcctctgagattttactaaacaatctctcaacttctataaagtctccttctttgcacaaagcatcaataagcacagtgtacataacatcattagctttctctatacagaaataaactatagcttcatgtagttgtccattcttcgcaatcccatcgatcatagtcgaaagagctacaacatcgggctcaaagcctctctcaattaatttgtggtacatgttaaccgcagccttcatgcgtccggatttaaaatatgcattcatcattgtagtaaaaatcaccatatcaggaactaaatcacttttctccatatcttctacaatctcagttgcctcctttagtttaccattaccacaaaggcctgatatgattacgccgtaagctgttatatcaagtctcatcccttgattgagcattttggccagaaacttcatggcattatccgaatctcctctctgaaaaaaaccatcgataatcgtagtgtatacaagagagtttggctcaactctatcctcgaccatccttgaatacatttcctcagctctctgcatttcccccttcttgcagaaaccatctatcaaagcagtataagtaacaacattcaaagacatccgaacgcgtctcatttctttgtataacgaaaccgcaacctccaagtcaccagctttacagtacccatcaatcaaacaagtgaaagtaaccacatttggagataaagcatctctcttcatagagtgaaaactcttcaacgccaactgcaactccccggatttgcagaacgtgtcgatccaagtactataagtaacaacattcggcgaacaacacttcaacataacacccatatacacaaaaacctcatctaacatcttcatcttgctaaacccattaaacagagaattaaaactaactatgtcaggcttgcagataaacccatgagaggctcttaaactctctaaaaccaaactagcacttctgatatctccatttctacaatgcccatcaatgagagagttataagatataacatctggttcacacccgaatctaggcatcgagtgaacgatatcttcagcgaatttaacttgccctagtttacaaacaaacgatacgaccgaattgaatgaagaacgatgaggagtgtaacctctggagactaagtaagctaagaatttgagagatagaatgccgcaattggaattgattagctgatgaatatgcttgttgcaggtgaatgggtctgggagattcgaggattttctcaggcgagaaagaaattgaagagcttctctgaccattcatggacatgggtttcttcagaagattcgaaaggttacaactttgaaaagatttttaaacatcaaagctaaatctaacggagaaggcttaaaccctagaaggttaaagaagaccgtcgttcggttctaaacgacagcgtttaattgtaagcttattattaaataaacatgaaaatgtaaaaaaaatctgaaaacggtaattatctctctctactcgctgtgacttagcataaacctcttttaaatccttctctaccaaaaaaaacttgctatttctcttttgtttttgtagaatctccggtgaagccgaattcaaaccctaacacttttggttcatcagttcttcttgacgattcagtgttgttgcgcgtcttatttctacattttgctttctcgatttgagaatgtgctgattttaggtatgtgttgattttttttttttgtttctggtggatggatttgagacttcaatagatatggaacttttgatgcctgtgtagattagagaagtaagggttttatagatcgggaataaatggaggaaggtggatatgcgtttgaggttaacaatggaagaccaacggcgagtgagtttggtacgacggcgaggatttcgtcaccgtcattgactatg

SEQ ID NO: 26042 - DNA, 3000 bp, Unknown; identical to SEQ ID NO: 12949
  misc_feature (1)..( 3000): 2750-1469P.txt file - cDNA_ID_2710027; gDNA_ID_2214583; Annot_ID_135301

SEQ ID NO: 26043 - DNA, 3000 bp, Unknown; identical to SEQ ID NO: 12970
  misc_feature (1)..( 3000): 2750-1469P.txt file - cDNA_ID_2710038; gDNA_ID_2214584; Annot_ID_135322

SEQ ID NO: 26044 - DNA, 3003 bp, Unknown
  misc_feature (1)..( 3003): 2750-1469P.txt file - cDNA_ID_2710041; gDNA_ID_2214584; Annot_ID_135323
atatatgctatatataaatggccacaaacgttaaagacctacataatgaaattgattgacgtattagtaaaaatctattactgtatcacgattaccaatataggctctaagcttgaactagtaaacatattacgtaataatttaggtgtcatatattactttatattttgatataaatatcattttggtatttaacacaagaattaattgtttttttttgtttttatgatcataagatcgatgaaaaatggtaagtataagatcgatcaatgttgtaataagtataaaattgaaatacaataaaaaagcttttttttttaagcaaaaaaaaaacaattaaaaactagtattacccaaaataacatgtatttcaaaaatttaactttacttatccacaataatatgcctttaagaattgtaattgtaagatcgattaaaagtctcatattctcaatttacatcaattcttcttatttttcgtttgtttgtcgtttgtcaatttttttcttaaacatgaactcacccaaattagcgaagcttaaatatttagttctttttatacaacaattaaagattccaaatttacttggttaaagacattaatcaccacaaacaaatacaatcttctcgagtaatcaataatcatgtacggtcaaaccttaatcacgtggcacttaagtcatatgctttccaaaaatatacatttacaaagattattctatactctctctcctttatctttgcctctttcgagctccaacctgtgtctgaattcgatatcaccattaggtgctttaaccacatggttagcaacatgttaatctatattatacatttccataaataggttgaggacacgtgtctccatacatgtgtttacaaatatcatgttgtaggtaatgattctaacaaggaccagctaaaaagaaggtggatttctagatagctcttaagttatggtcctagatctgtttagccagttaattaatcttgtttttttcaattgttaaatgttaatacttaatactattattaatatattctttctattttcgttcatgcagcttttaaggcgatcttgtataacttcgtggtggtccaaggtatacatggcacaacatagaagcattgtgtcaatataatattttcttaatcaaatcgaaataattgtttagctcaaaactttgattggttcacatattatattgtatataataacctttttccttcaagaaacaaccagtaagatctatatcagctgtaaaataaatacgcaagaacctattaactcgactcgccatttattactaaatgcggtagtgtcattaggaccaatctctcgaatttgacttctgaccatataaaatagggagtgtattttcattaacatttgagactttttcttgtaacaattgatttataatttttcatgtgcctacttgtatctttagagtctgtatggttagaggactgaaaacttttgtaatgttttaggcttatttgaataggctataatacattagacttctagttcaaatagttaatcatttttttaaaagatagttaatcacgttatggaataactcaataagtagaatatcatataattatataattgggtgaaaactttaatttaccataacatggaattaacaaaaaatgattgcgacgagggaaaagaaaaagagagaatcagagaacgaaagattggaacatgggaaatggcatttcttgttgtctttgttttcataatgactaaaagtctaaaactataagccgtcataaaaaatttatgtaaattatttacaatagcaaaaaattacgtgtttggtaaaacatactgcacaattattcccatccgactactacatttataattatgtttacgggctttataggctcaaataatttactaaacttaggatgcatataaatgaatacattaatgggccacatttcttatagcccgataaatagttgagttactatctttcatagtcttgagtcttcacattaaaacgggtttaaattagcttcaattcaaagtcaaattataccaaaccagtaattaggatttactaacaaagaattgaacagaaactgttgacaaaaaatatctcttggactttgagttattccattgatgcatttttggcggtggatctttaaatgatattgatgcaggaacttaatcgttgtaattttaggtaatttacatttataaactatttaatattttggcaatttttattggttttccttctttttttatggggttttctccataattgaacttaactcggtctcaaaccgaacacgtataaatttctaaaaaaaattataaaatcgaatcatactaattttttatttcccacgcacgtcatatatatgacatatttattttgatacacgatagtgcatataatgatatcagaatatcaaaatttcagtgttaattatatctttagtaaaaatgcaacaaatgaaattagtatcttatttgtaaataatttttagaatgacaaaaaaaattgcttttgttttctaaggtgaggaattaaaattttaaatttgtcatttttaagtttattcaaaaaaacatgctagtttaattggagaatcgagtccgatttttgaagaaacatgtctaaatccacatattgaagaaacatgactcatatattctctttctgttctttttctacaaattttggcgttacaaaagtaggcatggtagtttttgttaggtctcgctaacaaataattaatagcatgtcacttgtcaatgcctcatccgaaatccaatccaagattattttgttccacagaaaagaacaaagtttataaaaataataatatagcgactataacgtttactattcatccctttatgggtcagtgtatatgtaatctcttcttttatcccaaatcacacattggcattgccattgacaatcaataaaacatcttgtgagacaagaacgggtaagtgataagatcatg

SEQ ID NO: 26045 - DNA, 3003 bp, Unknown; identical to SEQ ID NO: 26044
  misc_feature (1)..( 3003): 2750-1469P.txt file - cDNA_ID_2710041; gDNA_ID_2214584; Annot_ID_186600

SEQ ID NO: 26046 - DNA, 3000 bp, Unknown; identical to SEQ ID NO: 12966
  misc_feature (1)..( 3000): 2750-1469P.txt file - cDNA_ID_2710065; gDNA_ID_2214584; Annot_ID_135314

SEQ ID NO: 26047 - DNA, 3000 bp, Unknown; identical to SEQ ID NO: 12996
  misc_feature (1)..( 3000): 2750-1469P.txt file - cDNA_ID_2710168; gDNA_ID_2214588; Annot_ID_135369

SEQ ID NO: 26048 - DNA, 3000 bp, Unknown; identical to SEQ ID NO: 12996
  misc_feature (1)..( 3000): 2750-1469P.txt file - cDNA_ID_2710168; gDNA_ID_2214588; Annot_ID_186685

SEQ ID NO: 26049 - DNA, 3000 bp, Unknown; identical to SEQ ID NO: 13000
  misc_feature (1)..( 3000): 2750-1469P.txt file - cDNA_ID_2710188; gDNA_ID_2214588; Annot_ID_135381

SEQ ID NO: 26050 - DNA, 3000 bp, Unknown; identical to SEQ ID NO: 13000
  misc_feature (1)..( 3000): 2750-1469P.txt file - cDNA_ID_2710188; gDNA_ID_2214588; Annot_ID_186698

SEQ ID NO: 26051 - DNA, 3000 bp, Unknown; identical to SEQ ID NO: 12999
  misc_feature (1)..( 3000): 2750-1469P.txt file - cDNA_ID_2710192; gDNA_ID_2214588; Annot_ID_135380

SEQ ID NO: 26052 - DNA, 3003 bp, Unknown
  misc_feature (1)..( 3003): 2750-1469P.txt file - cDNA_ID_2710214; gDNA_ID_2214588; Annot_ID_135370
gtcgtagatgagaagcttttcatcgacagaccaataataagctcgaagactagcaatgttaggatgttttagtttccctatggcttcaacttctgtctgaaactccttgaatctctgagaccctccttcacccaatctccgtacggccagtgtgagcccgttctctagaaccactttgtagacaattccgattccgctcttccccagaacgaaagctgacgcctttagcagctcctccaggttaaacgcaacctgagcgtcgaggggaacaatgtcgcaatgctccacgttttcagatggcgtttcggattcgtctttacggaaacacagacactcagaagcccttttcttggattctttctcgactccgaattggttctcgcggttacaagcgcagaactttgagtagcagtaagtgaaaagcaaacccacaaggcagataccaaacacgtcgcagagaacaatggcaatgacggcgcttttgctcaaaccacttgatttctgtttggtttcagagttagtactatcagaatcctcaggtgggttgttgcttgggataaaagggtaagaggcattgaggccaagttgatatccttggcaaaggtccttcaatggaggcccgcatagaccagtgttgccgataaacgctgttggtcctctgttcataagagcaccggtttgaggaatgggaccggagagattattgaaagtgagatcaatgtaaaccttttcaggaagatctccaagggcaggtgggattgagccggtgaagtgattatgagagaaatcagcagttccttgaaggttggagaggtttccaatgtcgctggggatggagccgttgaattggttgaaggcgaggtcgagtttctccagagagacgaacgctgagccaaacccatcaggcaaaggaccagacaagttgtttctgctgacatcgagtgttttaagtctgttgcattgcagaatcgaaagtggtaacgacccgttgaagagattctgtgacaaatctaaggtctgaagaagcttcagcttaccgatctcttccgacaatgacccatcaaaggaattgccgtaaaggactagactttggagtccctgaagatggaaaagctgaataggcaacgacccataaaacctattgctccggagattcaagtgacggagactggagagaaaccctagagacgaagggagagaaccgtaaagattcttccttggaatgcttagagacaccaccctgagttctttgcaagttacaccgttccacgaacaggcgttctcgtctgatgagttccaattgttaagagaacctgtaggatcatcgtgaacgctttgtttaaacgttaagagcgcaaagccttcgtcgtttaagccacttatgacagtcacattgcagagaagagcaacgaagatgatcagcgaggccaacattatcagatgcaaattagaacaaaaagacgagtgttggctttgtacaaagcaaagagagatagtagcaagaagagtgtgatattgatggagtgaagagtaaagtgaaaaagatactctcgttgaagaaaaaggagaaagaaagaatacaaaaagtagagagaaagagagagagagctctgtttttgcattgggagaagagaattaacaaaaaaaaaagaaatgaccaaagaaagaggtgaaagttggagaaaagagaaggccatggcgaagtaatccatacgctaatttgaccactaatctaatgggtttgaatggtaacaaacttaagctttatacagttttgaatcgatcataaaaactttattaaaagtgttacaaaaagttttacttttagcttttttgtacagcttttttatacagcttcttctaacagttttgcactattccgataaagctaatagcttcagctaacaggtaaaaaacttgtccagcttttggttaccaatcagacccaatatctttgtaatctctcctatatacaaaatgttacaaatgcagatatctttattcaaatagttacatcttgtaataccttttgtcatgattgttgttttattccgaaaagtaatatattggggtcctttgattgatctgtcaagtgtcaatgtaggtaacatttacagtgtttgtccttttctattaatctatcttgtcaatatattactactacagtagtatcattcattttttatttcttagatgatgttgctctagcacgaaactccataaaataccaagtgatgcatattaatagagtgtagcaagtgtagtaacaagtagtaacaagtgtagtttcaaatgagcattgaacaaactagttacgattgggagagagcaaacataacagtggagtttactagagaagaaaggtgccacaagataccaccacgctcttcctgctttctttattcctcgagtctgcttttacagtactagtactacctcttttatatcttactttaccatataaatcacagctcatctttcttattttacttagaatagtagcttgacatgttttttcgcaagaagaagattcatataataaacgattataaatgtggtttagatttagctaaagccttaaaagggtaaaaggagaggacatgtgtacaaacattagtccggcccttattgtcgttatggtgatacgataaaattgtcgataagtagacttggtgaagtgtgatgtctcctagtttcttaggatagagagccccaaaaaaacctaaacctaaacccagagagagtgtgccagagtgggcctattttctcctcacggactaacggcgacgactccgaggctacatactagtaaatcaaacaacttgggttttagtgcaatataaaattattttgggcataaattgtaattatggaaacgtttgggcatgaattgttattacggaaactgttggggataaattgaaattacggaaactttggggggcttaatttggctttttgctggcacggcaatgggaggagacgaaaccgagagaaacaatg

SEQ ID NO: 26053 - DNA, 3003 bp, Unknown
  misc_feature (1)..( 3003): 2750-1469P.txt file - cDNA_ID_2710218; gDNA_ID_2214588; Annot_ID_135367
tctaaacaaataataaaaaaattatatgatttaaatcttacatgaatctcttaaatttgatgaaacctaagccaattgtttcttaactaaaagataattagtcttggtttcaccaaatttaagagacccataattaaaaatattatttatctatatttacattttaattttgtttaagaagggtttttaggtaattcttattgcatatgaaagtagaataggaagatagagaataaaaaaaaactcttatctaaaatttatataagagtctaatgagacacatgtctcttttatattggtttatttttttttctaaaaattaaaatttaattatttagtaaattatattaaaataataatatataggtatttagaagaaaaaattaagagtcctccattgaggatgcatccctaatggtagtttctaaacaaaactcttaatatataataaaaaatgtatattatttaaatattagatgggtttcttaaatttgaaaaaacttaattcaattgttttttagttaaaaaacaattgggctaagtttctttaaatttaaaaaatccttcattaaaaattattatttatctatacttatactttaatttattttaaaaaacctatgttaagaaactcccattagaaatattagaaatggtcttaactcttaagcttagaaaactccattgaaaatgttctaaggacttaatttaaaagccatgaaaggtataattccttttgtaactaataaatatagttaaataataccagtagtagtagtacgtgaagagccgtcggatgcaatctgaatcgcaaaataaggaggaatctacggacaggatcacagtggaaagatgatacagagtagagagatttcttcttcttctttggcagattccagcgaggaaccaattagtaggcctgctgtcaaataatgtgacccacaacttctttgattccttaattacaacttttgattagtaacgcttataatgtctcaccttttactaatcaaagtaattacgaatcagctttccataatcatatcatcgtccaattttattcattactttgctttaggaaactctattcatcttattcctttctaaattgttgattaaagtgatttgaaaaggtaataatctcgtgcatttgttgctaatgtgccaaaatatatttgttttggggttattcaccattttcatgtgaccttgttgtatgttataacttataaccgttgggttttttttataactctttttggtaatattatatatttatatatattaatatacagtagtagtagaaaactaaattatcatcagtttgttgcttttctttaacaaaataaccaattaactaattaaattatattaacattgtttgactgtttgtagtgggtatactagtttactaaataaaatatttttgtcaccagccgtactacaatagcctaatgatacgttaaatttaatcatatttgcgatcattatattgtgagtttttacattctaactaataacaaaaaaatactacctttgtattaaaaggtaggatgttttagctaaaatgcatacacttgaaaaaaataaattgtttttgaaaagaagtattaaataatttaattcaaaaaaattcagccaatgatataaaggctgcataatacaaatggtcataaaatatcaaaatatttaaaatttgcataaaaattggtaaaaagtatatattattttaaaatttttctaaaacatcttataatttgatataagggaagtagtgtttatggaaaatcccgacatatatgtaaccacatttatggaatctccgtctctcaatttccagttagctcacatacacaaattgtatttactcgttgacaaacggtttatatagttgataatgcattagatgtatccataagaaagtcgacaaaataacattgaggcgatcattatagtgtgagtttttatttcctaactaataacaaaaattttaagatagtgataaatcttactctctttgtattaaaatatttttttaaaaaataattatttaatatttaattcaagaaaatttgtcaatgatataaaagattgcataataaaaatgatcataaaatatcaaatgtatttaaaaatttgtaaaacatgatatatattttaaaaaaaaatcctaaaacatcgtatattttgatataaaggaagtaatgtctatgaaaaatcccgacacgtatgtaacaacatttttgagaactcggtctctcgattcgcagttaactcgcatacacaatttatacttactgcttgacggatggtttatatagttgatcatacatacatccatttgaaagagcatgttggtcttaattgcatcaaacattcttatcaacacaaaatgatatacatggcatcagataaaccatcacgaacaaatacaattttgaaaggtaatacacacaaattcactaacactattaaggtaatacacacaaacattcttatcaatttcatgattttctattaaaatgtcattataaaaaaaaaaaaactgaaagaaattggactgaaagagaaataaatttaaccataattgtttggtaaaaatagtaaaatatgccaaaaatgagatttaagaggaaaataaaaagaagaaaaaaaaaacagctgtagtctacatttacatacaagtcgtggactaacagctatactactactaagtactaactctttctctctctaaatatcaaattcaatttaatttttcttctgcaaatggaaccaccgccttcttctctgtcctccaccgcggtggcttccacctccatctccgccgccactgctcctgttcctcctcctctacctcctcacgtgacttcttcttaccccgaatctctcgactcctcccctcgttctcgcaccaccgatggctgggatgaccttcctgctccttctggcggcggcggtggcggtggtggtagcgccgtctcttctaaacttcgttttatg

SEQ ID NO: 26054 - DNA, 3000 bp, Unknown; identical to SEQ ID NO: 12995
  misc_feature (1)..( 3000): 2750-1469P.txt file - cDNA_ID_2710222; gDNA_ID_2214588; Annot_ID_135365

SEQ ID NO: 26055 - DNA, 3003 bp, Unknown
  misc_feature (1)..( 3003): 2750-1469P.txt file - cDNA_ID_2710240; gDNA_ID_2214589; Annot_ID_135392
tctagtactcttttgtcagtgtggattctgtgacggtacacttgtaaattctagtattaaccaaacaagggtaatatcggtatttaagcagccaattaaagctcttgggccgtttaaaattcttaaaagcccattaatttcgaaacgccacctgtcgagacataattgggtcagaggattttaacggtggaagatgaagaagcttatctttttgcaaaatcgtttcttccttcattcatcatagcttcaaaatcttaaaaacaacaacaaaaatgaaaagtctccactttttagctcccaattcaacgattatcaatctgaagcaacaatcttatacaaaaaccaagttccagttgcatcgtagcaacagaagaactctatcgataaactgcgtaaacagtggcggtgatgaagagaagattactcagccgttggatggagtggagataagattcaaaagaggatccagaaggaaaatgagggaagagggttcaggagaaggaggaggacaaagcgggaagaaaaaagagactgttcaaaagccatgggaagagatgacattgaatgagaaggcattggagctttatgttggagagaaaggtttgttgttttggctaaacaaattggcttacgcgtcgatatacattgtcattggaggttggatttttttccggtttgttggaccggcgtttaatctttatcaactcgatacaccgcctcttgatcctaagaacatcttaaagggttaagaaatgctttgtagctgtgtctgcattctctgttccaaaacattttgaggcttatatattcaagttagtttcgagtaatgtgtagccatgtctcactagattaagatacacaagagaacaacactcttcatgaattttcaagattgttctgttggagttatgtcctgatcaaggatatctcgtgtagtcttgcacctgacatggaaaagaaaatatttttttcttcggctttttgtttaccttaactcaatgcaaagaatcagaattattaactgaaaaaactagattaaaactcacctattgcactctgctcgtgatgcataattgtgattcttgcaatttgtacacatccagtcgccatcacgccattgtttcactctaagaaatcagacaacacaaagaattgggaaggttgcaaaagatcacgccattgttctagcgtttagaaaacaagaaaacaatggagaccagagatcaatacagtaccccattccaagtaaagcaggtgttgagtgttgttgtagaaacgggagaggaagttgccaatttgagacccttcctaggctcataccaggaaaagatgcatatatcgctgactgtgtttgcatgcttgtctgcacaacgagccagaagaaacagaggttggttaagcagcaagtaaaattgatgaatgtactaatcaatttatgcgctctaactaatccttacatatccttgattcagtcttttgctatcccattcatgagccaaagcttctgatgctaatctctttgtaccaagggctgcaacccaaaataaactttcccatattaaaactcgtgaaaggattatcagacaccttcgggttatataagattgcacgcgcatcggtcttagacaaaaaccttacctagtggagctatttcattgcactttttgcactgcagagacatacaaaacagaaatgagtaaaacaacaagccggaatctgcaagtcggttttgcattgtgaacccatttcctcacctgtatacgagaggaataattgtgaaaaccacatctgcaaatccagtcaccactcctccattctttatgaaccgaagcttgatttgtagcgttagagaatgcgagtaaagaaccaggttgatcatgtgactcaggtccacgggtgaagtaatggagatgagtttgaagagaagctccagggatagcaagtgctgacaatgctgctacttccttagattgcccacatttcttgcacttttctcgtgatgcataattgttgttagtacaacctattgccacaccacaccacaccacacacccaaacgcaaaacgtagaacgaagaagatacacacgcacgcacaccacaacacacccaccagcaaattccatataccacataacacagaatacacaaaacagctcaacctagttataagtaaatcccctaattcacaattccaatctaatgaaacatcaaatgtaaaagggcatttgaaagttgaaggatttgaactcagaacttacgaattagatcaatcctagttttcattcacaattcaatctaatgaatccgcaaatggaaaagggcatttgaaagttttaaggatttgaactcagaacttacgattctgatcaatcctagttttgcttctagttcattagcacaatctgggaagctataaaagaattgaattgagataggagaagaaagaacgaaccagtgcagatccaatcgccgatacgaggaagccacttagagtttggagaagtattattatccatgataagacgaggctgcttgcatctgttacagaatgatctaaacgcataattcctgtttctgcatcctaaacattcccagtctccttctcttccgtctcccatttcttcttcccggaaaaactccagtctccggcgacgacgactcactctttttcgttcagagaggagaaagaaagagaaagttgaagaaagctaaagctgggccacatttgttgtgaagtgactaggcccattaggcccattaatttcttcagagaaaatctctttcgtccttctcttcgcaggtggcaatcgttacttactgacatacatcttcatcagtgatttttgggtttgaaatttctctagatcgattttggatttagatctctttgtttctactgcttttcatcgttggatctgcgttttgcaaagggagatacagaaaggaatagctttgaattgacaaggtttctctctaatccaaccgaatctcaagcttccatg

SEQ ID NO: 26056 - DNA, 3003 bp, Unknown; identical to SEQ ID NO: 26055
  misc_feature (1)..( 3003): 2750-1469P.txt file - cDNA_ID_2710240; gDNA_ID_2214589; Annot_ID_186724

SEQ ID NO: 26057 - DNA, 3003 bp, Unknown
  misc_feature (1)..( 3003): 2750-1469P.txt file - cDNA_ID_2710251; gDNA_ID_2214589; Annot_ID_135396
gaggaagaatttgggtttgaccatgatatgggtctaaccattccttgtgatgaagtcttcttcaggtctcttatctccatgtttagataaagcccgatatcggagacagattattattcttgaagaaaagatttctttattggaaagaaaatttgaagccgagatcagtaaatccaaaaacaagaaacaaactcattttttagggttgtctgattaagatgcaagaacatggctaaaaagcttcgtaggcattaacccgtttgtggtttttttctttgctaaatttattagtcattttctcttttaaatattttgttgtagttggggtggggtgggagactttttccctcaagtcaacgtaaaatgttgatcgatgatcttgagaggattagctagttaacttctaaaactttattggttaagatcaatcaagaatcctcaatagttttggtggtttgtgctaacgatgtttatgtgttatcatcgttcgagttaaaatccgcgtaatatataatgttgttttataaaaaaaattagtacatgaatggtccaacaattcataactcacgttcttaacctaatttgtgactaagactaactaatcatgtgtaaacagctttctatttcttcgaaaaatttagaattacaaagacatagtttcgtatgacaaagtatcacggtgtccatcatttgacaaaagtaatgatagaaatattacttagcatctttataaaagtaatactttctcttttactaagatacaggttacgagattaatcataaaacactcgagtcataaaacaatttgttttgttttctttcaacacaaaagttttgctatacgtgtattcaatatttatttgtcggtgtgtcaatcaccgtaatttgactcatttccttttacatgtagacgtagcaagtagtatttcaaaagattttatgtgtatatatcaattatattgagtcagatttttgtgatggatcattatggtcctaccaaccagagtccctacatatacttgtatctgtgcgaatttatagttgttacctaagctacaaaaaaaattgaagagatcttccgtaatatagatgaactaatttgatgtcccattatgtttctcgtaaaagaagaaatacatgtgtatttgacaagatggtacatagaccgctaaaccatcatgtcctaacaaagtagattggtatcatttgcaaaatatgtcacttaacattaatgttcttcattccttaataccagtctacttgatgagtctctcctctttttgatgagctagtctcgcactttttttcatctctaacttttgtattttatgaaatgttcatagactttattcaaggcacattactatcatatatctggatttaaattgccataccgtattcacgagacaatttatatgtaataacaatttaaaaaatgcattgtctgctcagaagctagcttgcccatattgtgtgttcttctaacaattttttattgtttcttctgagggtttttgcattaaatatgttattgttgacatcatagatgctagtggatatatcatcgacgacgaactcgagttgcttaataattatttccagtttcatacatcatcatcatattatagaacatatacctttatcatatgtatctcaaaaatctataatcagcttgatattaacttattctaaagttcaaatcagttttaacttttaagaaaatattatgagttttctaatttgattcggttttcgccgggttaacctgaaatcggaatctggattggacaaagtacaaaccgtgggttagtattagtaacatccaatttgggcttgcccgtatttgtctgctcagaagctagcttgcccatattatgtgttctccaaagaattgtttattgttattttggagagggtttttgcattaaatatgttcttgtgttgacattattgattattagatgctagtgatataccatcaccaaaattagaattgcattatcatcattttatatatcaatctatatatttatcatatgactcagactatcatgagacgcattttttttaagtattatgaataatataccacttgttcacgttttaacgtttgaaaaacatgattttgctactttttacgattcaaagtatttattaagaatttacgttcttgaaaagtgattatactgtatatataactataagtaaataaaacttttttcgacgaaatttctgatgataaataaaaggtcggatatatttgactttttttttttttttaattattttttgacgataaatttttcgttgaaaaatcatcgaaattttcgacggattccaatgatcaaaaattcgtcaataatttccaacgatattctgactaaactaaatctgatgaaatatttttgacggctttccaaccaaaatatttcgttgtgacttgtcaaaaatccgttagaatactaagcaacttttcgacagattttcagcaaaaatattcggtaatataacgtgttaaaaatatgataaaaaaaaaaacttgatgaatctactaaaactaaattttcaatcatatatatctattattcatatatttcattcattttattatttttctcttaacaattatttagttattctggtatcgtgtaattatattcatatgatttattctgatattgattcggttagcatccggataaatctgggttgggctttttaacttggtttttctaagaaaaattctaatatgatttggttagcatccggattagtctagtttggtaggcctgcctttgtgattcttaactcggtcttttgtatgggtttgaacaattactacaccatttagattcttctgacccatatcaaataaagatccacttaggcccattagggttagaacaaacatgaggttgcagaataaaaagggttcattttcctcactctcaagttggatctcaaaaccctaatatctgaacttcgccgtcgagagcatccatg

SEQ ID NO: 26058 - DNA, 3003 bp, Unknown; identical to SEQ ID NO: 26057
  misc_feature (1)..( 3003): 2750-1469P.txt file - cDNA_ID_2710251; gDNA_ID_2214589; Annot_ID_186729

SEQ ID NO: 26059 - DNA, 3003 bp, Unknown
  misc_feature (1)..( 3003): 2750-1469P.txt file - cDNA_ID_2710260; gDNA_ID_2214589; Annot_ID_135403
ccatatatttacatagaattttcaaaaattttattatcttattaatttatcgatttgtatcaatttttacactagtcccaactcggaaccagaaaaatttattaatttatagaagttattaatttatcgaatattaatttatagaggttatactgtatttctcttttatttgggttgtatttcttctttttttactgagtttgagatttaattttaataaaaattatcagtttgataaaaaaaaactaaaaatataattttctttataaactaataaaattaagtttctcattctagctaaaaggcttagcttaatattattatgaatattattcatctttcctctttcaaaaaacatatttttcatcttgattatcatcggttgcaaccaaaacgaaaggctaagtttcatattcattttactcccaaaccaaaacaaatagaggtaaataaatttttcgtatttcgtactggagctttaatgttaattttaccatttgttttcacccaaaaaaaaccacctgaatttcttgaacaaattcacaaggaaattaaatttgttttctgggttttaatttgtaacaaaatatcacctggttttattaaactagttccattagttaaaattaaaaattgccggtattgttttgttaaatattttattttgataaaatcctctgatctctatcattcgaagtcaaagctgttttgttcacgtaaaactgcatgtgtgatcctatatattgtatattgataaatacgtttaacaatgacaatctagtgagatagctcatgtcacatcgacctatgatcaatggattacttcagtttgataatatgtttgtatgtgatcacgaattatatattatataccaatcgatttttcattgttttatgtactataatttgatttcagctcactacatataatatttaaacgtgacatgttcatcttttttcgtcgtcgatcgacatatcaactataagattagtcggttgtacgtataaatcttgaccttttaccatggatttgtcctataaaagcttactagagactagagaccagaacgcattaatattattaggtctatcttctatcacttcatagtgtttctttaacactcatgttttgcaagtgtcgttttgtactattggaaaagattattgttataaaaaaaaaaatgaaacaaaactctaaaaaatcagttaatcttagttataaaacattatcctgctagaaatcattgcaactttaataaagtattgagtcttgaatcgttatgtccacttcgtttattttatataaaagtttgtcaactaattaatagctgattttttttttcttttaagagaaagaagatctcgaaatgagaattaaagataagatatatggttaggtagcgagtagaagaccaaagcaagaaactacgaccacgacatcttgcacataagaaaaaaaaaaagtagttcaatttcattttcgctttggtccactttattatttaacaaaaaataatatctaataaattacattaatataacagtccgtgttagactaagacacgaagcctcccccactaaatcgacgcaaataaaaataaacaaatggtggggttaagagtttaattcgagctgtggaatttttttataaatatacaaaaataataatatttaaaataatatatattacgataacaaatttttatgtcaatcaattatattttaagaatcttctaaaatcaaatattattgaactaataatttgaataataattttaattccactattattgaaaatattcatatcattagtttttaagggtgtatagtgaaaaaattcctcaatttcaaatatgttaatacaaatttccctttttaaaaattatcatgaaattggacaaactatatttatattgaaaaagatatataaacttatacaacacaaattgtaaacaaaaataacatgatgttcttcaataaaattataaatcatcaaacctaaactctaaaattgtcaaagtaaaaaacctaaattgacgaattctaatttattatagcgaaattctctgatgtttgtatgatgtcgaagttgattatgagagattttgtaaaattttgtgttttaattttaaccatagtttatctaatttttacgacaatgtagaaagacaggattaagatatttgaaaaattgaagtttttttttataaaatatataattgaataatttcttatagaattttagaaaaaaattttagataaaattaaaaaacacaaatgtaattcttttatgtagaatttggggaaccagactacaacaaatcataaatttctctaaatttacctaaaatcatattaaaaattaataaatcattatgaatcttaaattacttaaaatataaatttgaaaatactcctctaactcagagatcaattttttctaatgcctcgtgatttttttgcatcttgtagcttagtcacctatatatatttttagtggtaacaagattctctgttaaaaaaataataaaaattaaaaataataatagtttattttatgggaaaagacgcgagtggctcccaccagcctcaactttgcccacgtggaaccagccatatgcgcggcgtttagacaacaaaaaaaaagcgtgttgtttctttctctctctagaaagtcaaaaaaaggagacagacaaccaaacactgccttgtcacatctctctctctcttgcttttggcgagtaacgagtaagtccattttccatgtgcccactgtgtcttctctccttacacgccaccatctcctccacctcctcctccctcccttctccaattcccaattctcctccaaaccctagggttagggtttccacgattgcttcaccttcccttctttttttaaaacctcagatcttccgcttcctcgttcttgtctttttgttgagctgagaagcaaaaaaaaagtgttctttggcttcacgaggagccaacaacgaatcgatg

SEQ ID NO: 26060 - DNA, 3003 bp, Unknown
  misc_feature (1)..( 3003): 2750-1469P.txt file - cDNA_ID_2710264; gDNA_ID_2214589; Annot_ID_135404
gcttgtgttaagcgtactgaagcattcttcagatcgagatctaaatggaattgtggtaagttgttcaatttttatctgttttctcttctttgagatggttcatagtgatgaggatggttttttggtttcaggttggcacatatgtactacttgtcaaaaggattcgttctacatgtgttatacttgtccgtattcagtttgtaagaggtgtgttagaagctcagagtatgtagttgtaagggagaacaaaggattctgtggaatttgtatgaagactataatgcttattgagaatgcagctgaagctaacaaagaaaaggtatgagaatcctgtctacattttgttactttctcttactcgcagtactacaaggttatttgtggaacttgaggtctgttcttgtaatgtcgctttgtttttttaatgtggattctttcttctagctaaatgtattacatgtacattttctaggttcaggttgattttgatgatcaaggcagctgggagtatctttttaagatttactgggtttctcttaaagaaaagctaggtttatcgttagatgatcttaccaaagcaaaaaatccatggaaatcttcttcttctactgccgctaagcgaagaactactagtcgggttcatgaaaaggatgatggaaattctcctggggttatgaaaatacgtcgtgctaaagtaaggaaaatggatgctgtttctgtgagtaatttgggtccttctttggattcaaactgttctttgggtgacagacttccacaattgactagtgctgctacttgggcaaccaatgagcttttggactttgtggggtatatgaaaaacggtgatatttctgtcttatcaaagtatgatgtccaaactctcgtgctagagtatgtgagacggaataatctacaaaactctcctcagaattctgaaataatgtgtgactccaagcttatgagattgtttggaaaggagcgagtggacaacttggaaatgttaaagcttcttgattctcacttcatcgatcaagttaggtctccagtcacagataattcagccggaggagtcactgaaactatgtcttaccaggttaatgcgggcagaagctgtgataggttaaatacatctgaacagcatcaagaaggggaatcacagcaattgaacgggcacagtattcaagttagaccttccagttctgatagcagaaaccatgcagttgtaaaacctgacacaagtgccactctgtccaataagccaattgatggtttggatacaaatatggtatggttatatggagatccagatgggaagattcatggaccattttcgttatataacctgcgacaatggaattcaagcgggcatttcccaccagagctgagaatatggaggttgggtgaacagcaacacagctccatacttttgactgacgcattaaatgggcagttccataaaacagggttattacagaatcattctatccccaagcaggaagtgacagctactatagctaacgatcaaaacaggtctgtggctgttcctaaaatagagagtagaatacttgacttcagccccaactcagtgtgcactgaccagagtgttatttctagcagtaacagtgtcatcacaaggagctcggatgtgagtaacaaaagcggaaacaattgtagccacgccgtgccattggatttttctctttctaatgaaagggatactgtgggttttatctctctctgggacaaaagaaaagttgaaagttctttgcttgtacaaagcccaataagctgttcactctcgctggctacattacctagaaactcaaactgctctctgccaccacatgaaagatggagtgctggtcagacagatggaaacagtgcagcaacgactgcttgcaatcaaaacggtagtcttagcggctcagctgagaaacaagtcacggctacagtccagtcatgtggacagaactggaatgctgcaactccaagcagtgcttcaaatgtgtgggattcgaactcgggtttgacgtctttcccagacaatcaagaaatagactttttagatctctttagtccaactttcaaattcaactttgcatctactaccactgattggcaacccattgtggctggacctgacgaatgcgacgaatcagtctcagatcttttggcagaagtggaagccatggagtcccaaaaacgtcttccttctccaacttcgacattccgtggtcctgaagaattattaatccggcactcaataaacgatagcttcagtcccgcagaaggacatagcccagcactagatgtaagcaaaggtgactccatgagctccacaaacgatcttcaaatgcattcacgatctaacagcaccgtgcatttttagtcgtgggctcgggttcacatagagagaaatcataacctggggcacaggttaccatagatcatccaatgtcctagattcgtctgatcgatggtggactatgccctctttcttctctttttttttgcaggattattacagaacataaataaatggcagaatcatcagcaaaaatgaaaaaaaacgagtggtgcatatgtagaagatgtttcttcgcggtatttttgactgcacccattgttttcttcagtatttaggttttgtaacgttgtcctgtgttaagatttgcacagacatacccaacttctgtatcttttttttttacattgtttgtacttaggaacaagtataaaaatgggaagaaattgttgtccatggatgtaatcaaaacatttgtagggatcatatcatcttattattctatatatatgataatgatagtgtaacgtttcattctttttgttttgaatgtttcaaatctatttatatcatgacaagtgtaggctccagtttattctacttgtttttggaaaatgagacgaactctattgatcgtttctggatttggaaactttttgttgtttcttcgatttcgtttttgttgatctgagttgatg

SEQ ID NO: 26061 - DNA, 3003 bp, Unknown
  misc_feature (1)..( 3003): 2750-1469P.txt file - cDNA_ID_2710271; gDNA_ID_2214590; Annot_ID_135412
aaccactctaagttggaaggtaaataggagcgtatccttatcgactcttgatgggctatgcagccttttgcttctccactaatgaggacttaatacgatatagaggtgatacatcatatattcctacacacatgtttgggaaaaaccgagtctaagtatgaaaatttcaaagatgttatatccaacataatcatatgttttgctcatatgtttttaatactaagaactattttctatagtcttgattacttaatattagaatttagaagactagaagttttcatgccctatgagaataagcaaaatgctaaattttccggctacaatctacggtattaagtttgaacgaactattttcaatcttttgcaaagatttttcaagatagttgaagttaaccaaaatctttgatcgaagagagtcgtcgttccatatggtaagtttatacattgtgactgattttacaaatgtttaggaaaagtaattgggtagtatagtaacatcattacatcaacatgttggataatcgaagaaagagaaggtgggggatgatgggatcaatcaagaaaagcccatatggtgtgttccacagactggacgaatcaaacccatttattccaaatgtaaccgtccattaattgccaacccaagctttgtctcttaatttattctttactctataaaaatgaaccaaataagaattataaggaaaaatatcaaaagcattttcagaggaaagttttatactcttactgcattgttgcaattacatatgggtatgtacatatagccggtcctgagttttagaaggtcgaaaactagagaaaaaaattagagaggcgacaaaacattttttcgatgactagagaaatgacatgaataataaaatttcgatgaagtgaacaatatcgtatacgtttactaaaatgaattttctttgcaattcatcttcaatatataaatatgtgagtttccagtagaaacgaattaaaatgcaaaactgatggattttttatacattaacaagtgtggaaggtgtatccaacttattttagttttgaaatctgtcattttgctagttcgagactacattgaccgattcatcttatactattgtaatagcttaaatctcaatataatatgcaaatagtcttcgtattttgaggggtgtttggcatttttttaaaaaattttttatgacatgtgaataatctaacgaaatatacagtggtgcaattaaagcaatctaatccgatgagtaaatacgtcgagatttgtgaccaaattattactatcgtaaacgtagtttcggatagatttaatgaatagaagacaaatatggtttgctataggcgacgaagcaaatactataacacttgaacaaattagttaaaacatcatcaaatgcatgtatgtatcaagggcctagggattgattcaattcaccaacacaacacttacaaagagtcatctaaaacatgagggaaactggaacctaactttagcgtggactaaaatgctctataaacaagatgtatatctagaaagaaacaaacaaagtaaaactaatcagtagttcgtaaaaattggaaccaaattaaatatttaagagaaacttgaaagtcaagcagtgtggtccgtgcaagaactggtacaaacacatggctggattccaaaaaacgagtcaactccttggatcttacaaatccaccatcttattaatttttgaactctatgttactactattagtatacatgtccatgtactgacacacatacacaaatattgaaggagatatgtttttcttttatagtgattggctttttttgtaacactatattgttaaagtgtgatttcgaatcattgagttaccagtgactaaatatcaaaccgaagattttttgaatcggttgatgtttttgatcttgtaagtgaattttcctaatcgttaatctttacctttgttatatctctacattaataagtattcttgagatgatactggattccgttctagtggagacatatgatcattcacattcactaatatttcccttgttcatttctaatttgagtatgttcttgatctcggttcatcgattctccaccttcttcaattgcgcgcgatcggtttggctaattggctgtattctattaaccttcaatctcggcttcatcttaatgccagtttctcaacatgaggtgtgtatttcattacattaatcaacaaacaaattttaaattaatcagatttatatttaaatggacaaactctttctttctttattctattttttttcatccaaaaaaaacaacaacttgtttttatcatcataatttggctttgtactttatataaattacatatgtgtaaacaactatattagtaccacagtagctacgttttaaaagtgtataaatcatgtgatccgtacaaaaaaagttccactttgtccacacacacaccattgcactagaaaccttttttagcatctctttctaacatttttctttcttttgttctttttctctcaacacatagtctctttctggtcctacttcttattcttacagcttcttttgttggtgttcttgtgtcggtgccttaatattcaactttcctttttttgttttcacatcgaacatttcccctaaaagtaatctctctatctgttggagggttttacggcttttttgcttgtagtctaagcaactaaaacttttttccataaaccagattcatctcatctaattcctctttaaatcatactttaagcttctcttctgtaatcttattgctaatcatttcttgatattattatgcggatttgatctttcgtacagttgtctacaaacacacgtgtctgatccaaatatgggtttcgctttcttcccttttcttctggaaaatttaatgttcccaagttggcttaaatggttccttcattgataaagtcagaggacttctcgtgaagtcagaggatttgataaagaagaagacatg

SEQ ID NO: 26062 - DNA, 3003 bp, Unknown; identical to SEQ ID NO: 26061
  misc_feature (1)..( 3003): 2750-1469P.txt file - cDNA_ID_2710271; gDNA_ID_2214590; Annot_ID_186763

SEQ ID NO: 26063 - DNA, 3003 bp, Unknown
  misc_feature (1)..( 3003): 2750-1469P.txt file - cDNA_ID_2710285; gDNA_ID_2214590; Annot_ID_135410
ccttcgaaatcttcaaccttcagagaacaaagatgcaatggaaactcttgtcattacgagattatctacgcggacaaaacctattccaagggaatcttggcaaccgagacggtcacgataccttccacttcaggagagccctttgtgatggctgaaacaaaaattggttgtggcctcgacaacacaaacctccagtactcagggtttgcatcgagttcttccggcattgttggtctaaatatgggacctttgtcgcttatatctcagatggacttaccctacccaggtcttatctcttactgcttttctggtcaaggaactagtaagatcaattttggaacaaatgccattgtggcaggagatggaacggtagcagccgatatgtttatcaagaaagataatcctttctattatctaaacctagacgcggtcagcgttgaggacaacctgattgcgacattggggacaccgtttcatgccgaagacgggaacatttttatagactcaggaaccactctcacgtactttccaatgagctactgcaacctagtgagggaggcagtggaacaggttgtgacagcagttaaagtacctgacatgggcagtgacaacttgctttgctactactcggacaccatagatatctttcccgtgatcacaatgcatttttctggcggtgcggatcttgtcttggataagtataatatgtatctcgaaacgattaccggaggaatcttttgtttggctattgggtgtaatgatccgtcaatgcctgctgtctttgggaacagagcgcagaacaattttttggtgggttatgatccttcttcaaatgtgatttctttcagtcccactaattgttctgctttgtggagttgaagaaacaaaccaagagattctcttttctacattttcatggttttaacttcagttttgtttcgatttatttgtactgtcactaaaagcatatgacatagacatgtttaaatgaaaaaatatgcgaatgagttacacaattaatcgaaattcaaatcacaatctgctataatctcaagttttttctggagtttgcaacttgttctatcaaagtcttttataagttcattttttctcaatgcttcttatagataaacatgaccaaagaaagaaatcactaatattgcaaagcacataattttacctagaaatactaagttatgttttggtttagcctctcacagcttgaacggtagcaatcatgtgagccatcacgagagcgtaacgaacagctgtgtgttgtggagtgtagatgtctccaagtccaaactccccaaagttgagatctatgttcacaaacttacccggcaacgaccttttagccagagcttcattccatatctccaagaactcctccatcaccttttgtgccttttccattgatgatataggaagatactccacctgcaagtaacaacacacaaactcaaaattgagattacaagaaacaagacaatcaccaaaagggaacagctccatataccctttaggtgattagattagcattgagactatagggatttaagaaaacaaggattttttcatcatcattgtgattacacgaaacaagactaaagaaacttgtagatgcatagtcaacaatcaacaatgttcaattttcatcatctgtcttaacatcataaacagcatcaaggatcatcactaaaagatattacaagaaactcttttaacaagaaaaatctgtagaaaaacaagattttcatctttaaaattaatcaccactgttcagtgttcatcatatctgtcttaaacaagaaaaagctggaaactttgtttacctccatgacaatgcctctaacattctcagaatgagtaggaacaactttaccaactctcaacctaaaatcaccaagctgatactgaaacccatcaaagtaaagagccactttagatttataagactgaagcttctccataatcaactgaatcgaagaatcagcttccaagacaatcctctgcgtcctgataatgaaatagtacttattcggctgatccgcaagtgaaatccctagaaaatcacgaggaaactccaattgattcgcttggtcttttaacatgggtttgtaatagttgagtgttgctttccatcttccttctttcacaccattgatgctctctacacattgtgttgcttcgtttaggatttggctgcttactgttgatccttggtttggttgccaatgtaaaaccctagaaaaaaacaaaacccaaatacaagaatcggaagagtaatcagaacagaaacgaaaaaaatcgagattttggaaaacgaaattggatcaaagcttaccacttgacgggcattgttgttgagggagaatgacaaaacaaacactgttcgaaactgacacaacaaaaaataaaaaaaacatatgtatatgttatatcaacaaacccaatcgaaattgaggtatgggccgaaggcccaaaacagcttaataaatgtggcccaacacagcttaattaaatactccatgtctcttgattctattaactgttcttaacctggacttcacgtagacgaggaagaagaaccttgaatccgacatttgtttcttcattttaaggtagggttaagtctattttcggttctgggttttcttctctttcaattctcaaacaataactcgcaattttattttcacggatcttttttatttcaaaatcgaattgaaaaaaatggttcttcacaatctagcatatatgaaatttgggaataaagttacgatttttatatataatatggttttaatttcgttgattctatgttttgctactatgattgttaaagtgtcactctcattttcaacttctcggtgattagtgtgtttgtgttcttcaaagattgtaaatttgaatagcttggttttgttttctctaatagactgagatatgttatgatgtgtagctaaacctcttcactggtgaaagcaatttgatgttatg

SEQ ID NO: 26064 - DNA, 3003 bp, Unknown
  misc_feature (1)..( 3003): 2750-1469P.txt file - cDNA_ID_2710289; gDNA_ID_2214590; Annot_ID_135411
tgaacctatgaattcaactgctcctcctcgaccctcagtcacagcagcggaagctacacctccaaatctttcagctcctctcccgcactgcaacactcctcaaccaagtccaatatctcagcaagcagcagtagaatcaaacacacagatgcaatcaaccgcccttcctcgaccctctgttacagcagaagctcgtcctttacatcaaccacacagcaacacgtctcagccaagaccaataccacaacaagcattagcacaatccaacacaaatatcacttcaaccgcccttcctcgaccctcaatcacagcagaagctcgtctgttacatcaaccacacagcaacacgcctcagccaagaccaatacctcagaaagctttagtacaagccaacacagatatcaattcaaccgcccttcctcgacccttagtcacagcagaagcccctcctttacatcaatcaagctgcaaggctcctcagccaaaaccaatatctcagcaaccagcagtacaatccaagacggatatcatcaattcaaccgcccttcctcgaccctcagtcacaacagaagcccgtcctttacatcaaccacgcagcaaaacgcctcagccaaaaccagtatctcaaccaccagcaaaacaatcaaacacagaaatcaattcaactccccatcctcgaccctcagtcacatcaaaagctatatctctgcaatcaccgccctgcaacacacctcagccaagaccaccgcctttaatctccaaccatactccaacttcttatcaaccagcttctgctccaccagtgcatggtatagcgcgaaggaccatggcacctcatttaagatcatctcgagctcccaactctgctgctgcaccatcaacatatccaaggttggctcaagaacaacaaaagcaacaacaaaagaagtcaaacagtagcttggtctatctctcagatgacgactagtgacaaatctttgggagtatataacatcagtatatagtttttgaagtttctcttaagggaatatataagttcgagaggccctttaaaacatttgagaatgccttgtacgaaggatcatttcgaatactaattttttggagaatatcaagtaagttaactaaaatatttttcacaaatttgcagtttaatcaaaatttatttacataattctgttatttttactctataggaattttcaaaatactttttttctccttacttcgagttttgaaaatatttttcatgcagcgaatctctgatatcaatttagcgccacgtggcacgtgacataccccgatctctaataaatgaactctttttaaaatcgcccccctcgatacatcagttcactagtttagtgactccactcgaccacaaacgctaacgcaaacgcagtcgcgtggactcctctgtttatttcgcgttttagatttcttaattctcattctgatttgactgtggaaagggattcgtttctccttcaaggaaaaagttttatctttgctggaaactcaactacaaacgcggttttgctccatttcgcgtttgcgttttagctccaatgctggtactctctgttctactataagctgtagcaagctccaaatcctcaaaaatcgacattgttgcttcttcatattaaggtgggtttctcattaaatatgcgttttcaattcatttccctacatgtatgaagaaatcatgaaatggggttccccaaaaacttcaccttttacttggagagagcatcattgaatttgtgggacatgattctttccatcaaaaagttagattttttcggtcaatggtggaggaaacaggtcctacaatcgaaaaccggttttttaaaccggtttccgacaaccgacaccgggaattgtgagtcccacaatcaaaaaccgggttttaaaccggttcctgacaaccgacaccggaaattctgggtcctaacaaatttcaacagtttgcttcgaccaacgttttgcttttccttaaaagcaaagtcctttttggctctatctaatttggtttgtctataattttggatcaagaatctacaatgtcaagttcataaagaaagagtcatgtgagctaagttacagtatcatcatatagttcttgttaagattcacaaaatctaatatttatcaattttggtaaagtttaagatgttttgattataatataaagattttgccattagtaaacagtttaaagttaagagcttttcaatgattctgcctctttgattactataatggttgaaaggtcactctcagatttgcaatgcccgtttctttctattggtggttggtctgttttcattccatttattattgtatttgccattctttgactaatcctatactcaatcatttctttaatcacattattttagtaatcaatatccttcaagatgctccattacttctttttaatatcctcttgtctgcaacttccttttcttgactctgtagttcttacttcaacttcaccactttgcagggtaatgtaatctatattagctctcttgtttggttcttttagtgttttggttgttgtgttatgatgtttgttgtctgtatgtgaaaacatagccaactaactttagagggaactaaagattttgcagaatcagatgagtgacaatggatctttaaatgattgatgtggaccgtatatctatcgctatgagtttcttgttttctcttctaactctgggcccttttaagaattggagactcttgaccaaatcatagaatgtttttggttcatagtgggtgtaacagagttagaatcttttcgatgtctgttcaccaactcattcattcacattacactgtagttttacctgtgaattctataaaaattctactctacttgtaatctggtctaatctaaacataacttgtttcaggttttagattcttgcactcttggaggttgagcttagttcgacatgaaggtctttatctaatctccactcgctggcaatg

SEQ ID NO: 26065 - DNA, 3003 bp, Unknown
  misc_feature (1)..( 3003): 2750-1469P.txt file - cDNA_ID_2710293; gDNA_ID_2214590; Annot_ID_135414
aattgggcaagctttcaagtgtacaaagtcagagtgcgattacttcttgcacaagtcatgtttcgaccttcccggtgagatccatcacaagtctcacacaaatcaccctttgaccttgctccattctccaccgaatggcctatccacttacacgtgcgatgcgtgcggtgagtatggatctgctttcacttaccattgctcagagtgcaaataccatgttcacgtgggatgtgcgtttgtccccgagaacgtgaagcgtgaagatcacgaacacccactcactctactttacaacacaccatgcaaaggtcgtaaggacggtgtggtgttcatatgtgatgtttgcgaagtagatgtgtcggagaatctttgggtgtattactgcaaagaatgtgactatgggacacatgttcattcatgcacgacaaatgaagacaatgggccaaaaaaaggaggagaagaagaaggagaatcaagctcattatcgacttcaaggataaagtcattaatggaggctgaaaaagagatgagagagatggcgataatacatcaactacagttagatgctcttgacgcagcaggtagttatgtcggttcatgggaaccaaggagaaaagattattggtaaatgatgaatcttgggaggaccatcaaactttgtttgaattatattcttttgttttcattctgatatcgttctttctttgtatggtttgcaaattattatttttcatgtggcttgttgtaatgttatgaaataaaaatagttatatattttgctgtttgatttatattcaccgattctgattgatgcttatatattactttgtttccatcgcttctaaatgtcaaatgataatattctaagatcatagcaattgagatcacatgcttaaacaacaaacaacgacatttttttcacgaatccagtcttactattagaggaataacgaatcaagaaaaggttgttaagagagaaaaagaaaacaaattcattctcattcatcttaattgggaccggaaagattacattggaacctcttatatagtaagagatactctaaaactgagataagtaaacaccacaaaacaaaattaagagattagggtgtgtttgggatttgcactgagcttggaacataagagcacacaagtgggtaacaaaacttgtctctagattcgccaagatccactttactcaagattccattatttccaatgatgtaagcaatattgcgagcgggaaggtgacatttgtctattatctctttatcaagaacaaccgcgaccttcttctcctcgtcaacgaagaaactcctaccgacattaggaaaccaaaaaccagcgactggtttcatatcaacagcaaataacaagttgctccacgacactgcattaggctcaatcttattagtaatccatatctcgacgacggatgcccggtgaaacagcaccgcaagctgctcttctctaacactagcaagcgtcacagtatctccaaatacggctcggaaaggcagaggcagacgcggttcaaatcttgaaatcaaaggatagtagaaaatcagggtgatctagtgatggtagaccatgaaatgggatctcttctagggcataccagtaagtgtttccctttagagacacgccactgtgtttgtacaaaatataccagtctggagtgaaatcatcaatgacctcccatgaattggagtataaactgtaaatctgaagctcacgaattcggtccctactggtctccaagtactcattcacgaatctcaagattttgtgattctttttctcgtatccgagagcgtacttcacgcacttgtggtagatagaatttctaggtaattcgatataccttgtttgtcccaaataagggttccaaacaacaaccctagaagagtctttgtctctgtccttgttgatgcataagaataaacccttggcagtgaaagattttagatattttgattccatctgcattgagattacctataggatctatagacggagagagtagatctacgctcatcaaggaaactctatagtccatcatcatcaccacctcaattccattcctctgtttcttctttaaaaagctctcacttttcgttatagtgttccactttttgcaggtcaatcgcagtttccccagagatttcaccggaaccctagagagcacctcctcctccatatcaattggaagatcgaacatcttcgaatcgaatctcccaaaatctctctctcttttccgtgtctatcaatccatctcttcacgccctcttttagtgatataacttatctttttcaatttgggctttatggtaatgggtcaaggcccattaaggggtctcgtttagaactcttgattaatgtctgaaataagttttatacatttcttcatttggagagtcatttcgcagagacgacgcatagcttcttcacttgtcagctctcaacgtttctcacctgaaatttcacttctgcttcgtcttctcgagccggatctctaatttgtaaagctccctctctctttcttcttgttcttcttcgtctccttctacactgatggatcgttatttagctatttagggttttgtgagttgcattaactagagtaactcgcgaattcttctcctttgccttgcgatttggggaattttttagctccatcagccaattttacaattttgtatgtatccgtggatttatcacatgaattgtggacctctgagttttttttttttgttaggttcttctcgctttagttttgcttttaggtacataaattttcctcctttatgatttacttgctcttgggctattttcttttatttgtttggtatggagtatggactctagagtttagtttagtttttttttttgggcacattggttggaattagtcttgttttattctgaattgtgtaatcaatatctgcatgcttgtggtgatgcagggaattcttatgtgatggtgtaatttaagttaagatg

SEQ ID NO: 26066 - DNA, 3003 bp, Unknown
  misc_feature (1)..( 3003): 2750-1469P.txt file - cDNA_ID_2710297; gDNA_ID_2214590; Annot_ID_135415
atagtagacagtatacacttcataagacattctggctttaactgcacccttatggttgccatctgactaggcattgctatcagaagaggagaatctactgatcatcaatcgacttcaccaagttcttcgaccatttgttctgcgtcggctgaaacataaggttcataacagaatgtctcctttgtgttactttaatatgttagagatatggaaggatattttccaatgcaattatctcagttactttaagttttatttaacatactattttattttggtaggttgaaaatgagcttcccgaaaagatagagagattgatacgctgtgaggcttctgcttatcagaagctgttgatgaagagggttgaggataatttgggttcgattggaaatgcgaaggtgttgttttatgctctaggtgttggtagttttgcgataatgttgagttatttttttagttattttcttttgtttacagtctcgtgcagtgcacaactcagtaatggagcttcggaatatttgcaatcatccatatcttagccaactgcattcagaggaggtaatggttttcatttatctggaagtgttattgtaaatgcaatgaagcactggttagcgcactatggacaaccctaatgaagggcatttcacttttattaggtcaataacataattcctaagcatttcctgcctccaattgtaagactgtgtggaaagcttgagatgttggatcggatgttgcctaaactcaaagcaacagaccatcgggtaatgatttctctcttttccctcatggtaataggatagttgtgatgattcaatgctcttaaagacgaaagcttattattgaagttgggctaagtgttttcaagtagtgtgctagagtaccttgcattgcgttcgcctctggaggattaaagtgtctattacgaaaagtttttgaaattatgttttgattggatgaagcattactgttttttttccctttatttggttgcttacttgcttctatatcacttcacgcaaaacatcaagtcctcaactataagattttctgttatttgtgaaacgcacatatatattagaatttgtaacttttttgcatttttaccttaaatttaatactgaagcttataaatggttgttacttttatttatggtatgcatgaattcccacaggttcttttcttttccacaatgacaaggcttcttgatgtaatggaggattacctcaccttaaaggggtacaaataccttaggctggacgggcagacatctgggggtgatcgtggtgctcttattgatggtttcaacaagtcgggttccccatttttcatatttctgttgaggtgatgtatcatatatcatggctggctttctgtagttctaatctctatcgggatgattcatgttcatttttaatagatttagttatgttcctaaatactacaagttgtaaactcttttgggcgttcagtacgactgatatgtatttgtatgtgattgctgaatcattcatggaatttcagcattcgggctggtggagtaggagttaatcttcaagctgctgatactgtgatactattcgacactgactggaatcctcaggttagacctagcatttccatatgttaagttatagttgaatactgtggacatcaggccggacttgaagcagcatttattatacatttcaggttgatctgcaagctcaagctagggctcacaggattggccagaaaaaagatgtgcttgttcttcgttttgaaacggttagttttttatttattgtgctcaaggaaattaaacatctgaataaatgggttgatttgtgattggttgtaacttttaccctggtgtttttagtttatgttgtttcatcattgggctacataatgtagtgttgctgtcctaaatctatggctgttcaacatgacttatgaggcaaatagaacagtgcagtactcttgggagatactaattgtttcttggctttttccctttcaattgacgcgttattatataattaagctgtctgaactgtttgtttgtctttcgtccttaattatatcctaaggtgaattctgttgaggagcaagtcagagcttcagctgagcacaaacttggagttgctaaccagagtataaccgctggcttttttgacaataacacgaggtgaatcgagagacatcccttttatgcttcaagaagtttcaactaccaattctctaaaaaaattcttactttgtaacagtgctgaagatcgtaaggaatatttggaatcccttttgcgtgaatcaaagaaagaggaggatgctccagtattggacgatgatgccttaaatgatcttatagctcgaaggttaatactcttttgcatcgttttttatacagaataatttacttgcacaaattttaattttacaacagcctatgcatacgtggttttaaaataatcctgatagtttggttcctttgcactatgataaatctagaaattctaccaagattactgccaacaatttgtacaaagtattttactttctaactgtaaatatttgtcttctatattattttctattttcatagcatctactgttttttcatgtgttctgtgttaattgatagcttggcttcctttttaattcttagatgacaatctttttacatttccatgcatctcgattttcttttaactttcttgcagatctgacatttttgttatctttctagggagtcagagattgatatctttgagtccatcgacaaacaaaggaaagaaaatgagatggtatgcttgttcttattaactttattttcgggttatatcgttttatgatgtttatttgaaaaagatatggccgtgcaggaaacatggaataccttggtacatgggccagggtcagatagttttgcccacataccatctataccctctcggcttgttactgaagatgatttaaaactactatatgaaacaatgaaactaaatgatgtccccatg

SEQ ID NO: 26067 - DNA, 3003 bp, Unknown
  misc_feature (1)..( 3003): 2750-1469P.txt file - cDNA_ID_2710341; gDNA_ID_2214594; Annot_ID_135452
tgtaaactgatatataattaaatataatatgaaaattcgtcgttaactaattattatgaagttttttctctcttctctctttcataccttttagagagaaaaacactttgattctatcgattggatttttcccgtgaatagccgtctctagtgaatcgagtttttgtccatcatcttgtggctccgttagccaagatagctagcttctgtctggcaaatctagcttctataagcagttttggtcggcttttatatttgtttttagtttttttttatagattttaattgatgattcgttttatagattttaattgatgattcgttttaggtgttagtcacttaaaatcaatctatcgacttgtatctctggaagctcgatcttgcaaatcgcctaaagtaaagagaagaagagttgtttccagcaaatttggattgccatagccgtctctagttgtttttggtgcttcgatcaaacaaaattttgtgaattaatcagaatttttcctttttatcttatagggttgaatgatctgttattgatttacttctctatgtctatgcagaatctggtgaaaaacaaagtaaatcgatgtttaagaaatttacagcatcgattgagttcaccagaatcggaatcgttgacgacaaagattaaccggaatgtttaacgcatctctcatacgtgtctgtttttattacatttttggattgtaggcctgaacctgtacactttgtttatgaatctttaataatagataaaataaaacacttattattccgagcacgggcttgcatatggttcggttaagttcctgtttttcatatctttctttttatacgatttgtcagcatcattcagccatcgttattgacttgttgcctttgaattttgtatcgaaactaactaaataattcattgaacgagtgagactctaacacttgcatggtctatgtttcaggagagcttagatgtgcctataatcatcactaaccacgagacagctcactattagcattaaatgttaatacacatttcgtttctaaattctaacctttacgtgttgggtgggataaacaaacccgagactccacatttttctactagcattgacaatctgtccttatcacaagcttaaaggagaaaaatttgaacacatttttttagaaaaagaaaaaaacaattattgttgtcattaataaagtcggttaaattatttaacacaaataataaataataaaaataaaggataaaaaaaactatttcgacatataacatgtttcatacgaaaatatataaatgatatgttgtccaaacatatagtactttataggactatcacttttgtaaggattttggagataacgactactaagaacatttttaatggaagattgtattgaaaattttgtgaggttatattggatgaaaaattgacagaacccgttttgtgaagaaatttttgagaaaatggaaaaggtggacatgtgttcacatgcatttgattggatgtttagttttaataaaagaaaaaaaaaaaagcgtatattgttatctttacaaaagaaactcggattttctttctctctatttctcgcacgaagataaaaaccggtgaacttttgatttcctatgagttaacaccgttttatgtgtatatttgtggtatttgaggcttccaaacgctcaatttattaatttgacagacggtgttgattatcgctggaggaagataaacccattcagagaataacgaatctgatttggagagttttcgttgaaggaatgtctaaattaggtatgaatcaagccattctagcatgtatatgataactaaatattgtattttctagttaatatatgtaattttaattttatttaatattcttaagataaatttatcatgttcaacatgtgctactgtatttatctaatcattttaaatttgactaatatttaaaaatgcaatagttttgcttaaacttaaatcaaagtattattcctattttcgaaagtttgtgttgttatttatagtataattacatttatttaatttttataaaaaatatattttgcataatacacggtatagtgatccggtatatgacctgacgggttttaatataatacaagacgggttttattgcggaacgggttacataacatagcgggttaaaatcgatattaataaaaaattaaaatatttttgacaaaaaataataataattaaaatacatcattagccaacgctttgaaaaagttaaaatcttcattttattaatttgtcaaaaccaccaatattattttatgttgaattaaactaatttcattaattaaaatatatgaaacagttttttcgaattttaatgcggattaaaacctaattttttttttgttatttatagtattatatttatttaattttcataagaaatatattttgcatccactgaaaatatttcagtattttaggtcctgtaaatttgcaccactttttaaagccgtccgtaagtgtagccctttgatgatctatttattgatcagtatcactttacataggtttaaaatatgtcgactaaaaaaagggtcgtatccataacaagtaccaagagtggacgacttttcttttctgtccaaaaaaacaacaacaatgataatccaataatgaagtttttgcatatcaatattgtttaataaatttatcgaaatatccaaaagactagtgggtttgccatttatggagtttcaaattatttacaatgcgtccaacatccaaccagaataaggggaccgacgcaattaaactcatatatacttagacttttctactttgttttaattgtgataagttccttttctctttattggattacggataagttatttgacttttctcattccctcctcctcgttttctttaaatagaggccatgcatggtaacattttatgcatcacttgtttctccataataagagagttttaagcatttgaaacaaaaaaaatg

SEQ ID NO: 26068 - DNA, 3003 bp, Unknown; identical to SEQ ID NO: 26067
  misc_feature (1)..( 3003): 2750-1469P.txt file - cDNA_ID_2710341; gDNA_ID_2214594; Annot_ID_186841

SEQ ID NO: 26069 - DNA, 3003 bp, Unknown
  misc_feature (1)..( 3003): 2750-1469P.txt file - cDNA_ID_2710352; gDNA_ID_2214594; Annot_ID_135456
ccacttttgtagaaaggggtaagcctcacgttacttttccaaagaacccaaatcctgcctctcctattaaattcataatttgttaaaaccgaccatcctggaaacaacttttcactcagctcctgcatcttattctcctggacccgtgtttcaagtaaacaaccaaattgaaaattttgttcttgaacccatttctttatgattggatgctttgcagattcgtttaaaccactgacattcaagaagaaacccgtcatttagcgatgctttggagggagccctaaactctgaccactaggagtgtgcctagttgaaggagtagaaggattggagagcactttatgtgcagactttgatccacggggtaaagatgcccgaggtggcagctctaaaacccgtgaccttaccactgagtttttttttccttattttccacctcttgtgtttgagtatccgcctgtttagacttctcctcaggctcgtgaggttccatctctttagatatttcctcccctatatcctctgcgccacgaagtacaaagtatgagtttgataaaatagaaacttctccaaacttcaatcctacatgacttttcccggggctaagcgtagtcttaggagtgatccatccttcatcctctcctctctctacctctacttcccccggagcgttagattgaatcttaggcacctcatccaaagttacatgaacaacttccttagcttttcccgtaattggagaggatggctgaactggttctgaagcaactgcgggaatggttacaaaatcactattccccgtgctggttttctcaatagataaacatgtttctttaagatgaccccatttaccacatccattaaatctcggaggcagccaaggatatgaatatgtaataacagcatcgagctctccttcttcctcacccgtgaatacgtactctctaggtagatcttttgttaggtctgcttctattaagatttgtgcttcatcaaaactcacacaagcttccgtttttggatgtaaccgtattggcttacccactgcactagccaagaactccaaacctttatcagtgaacattgacgggggaacatctgtgagagtaaccaaaagctgaatggatttcatagctggttgagaatcttcttgaaaaggcgtccacttcgagagcaccatcggaatgtccataatgttccacattcttctattcagcactctcctcctcattgcctcattccttatgcgaaatttgactgttgttgcgtttacttcatacacatcaattaagtttaaattatctccaaattttattcacaatcatgtgaatctttcccacatgcggggccttcgtactaaggaatcgaccaaccaaaaaatcctcccagagaggttttgcacctgcaaaaaacctctttcggaacaaccactctttctttaccatcaactgcatctaccacaaacttttgttttgtgaagatatgtttttttgcagcgttgagccatgatttcttaactggtggagacaccacctcaacaactgttggagtagcatctagacctaacgagatctgctggtctgaaactgtctcacttgtatccgacaccaaaaccccttgctcacccttcttcgtatcatcagatttctcctcctgactctctagaatcggtaaactgttagccaaatcaatggccgacaccgaaacctcaccggaagtgactggagaggctgtcggctgcagcattcttgcttggtacgcaaaaaaaactaatcgcctttttttgtctcctgccacgtcagccctttttcttctttttaacctttgtctttctctttcttctttgtttgatttctctctcgtttttaccactcttagataaattataggtatgctgccaatctctctcttgataaatctaggctgccaagtgttcttcatattgatgggttttctctccctcattttgtagataatctctttatttctttggtcggaattcaatctttcttaaatttttcgttgtcatgtctttttctataattctttgtcactttcttccgtaacatgttatttctttgaattacacgtaatagcagaatatctctctctttaaaatgttacttttttgtattacatgttatttattaagatcacatgtaatttgtttttaaaacatgattttaatgttaaaacactttatttttctacgcttttctttaagtataatatgatttttttttattaaatgacatgttcttttagagcgataagaaaaaaattacaagtttttctttatctttaatttttcgtagtgcaaatgttaaatcagattctttagtacaaaaaattcgtaccgaaccgcatcatattacctatgtaaacaatatttctcaaagataactcttttgaacttaattattattggttgacaaaaaaacatgtttttttcacaaataacaatacgctactgcatttttgtctatgtttaagaagaaattttcacaaaagtggacgaaaaaagatttgctctaaccgtttgtcaaagtgagaactggttttcacgttttgtcttttcattcaatttcggaccaaattaccctgggaaaacttaataatggcacaaaccaaaccgtgcagcagttcgtatcggttgagttgacggcgtaaaccaaaccctacagcagttggtttcggtttagttgatgcggttcagttttgaaaaagacaaaaaaaaaaaactgaaacgaagaaacccgagaaaacgataaagagaagagagtaacggagagatttgagagagaatcagaaagcgaaacgaaattaagtatccattgcttcaaaattcaacataacttcgaattgttgggtagttgaattgagccacagaactcccacatccggggaagtgaaagttaatgtttttcccagcgaagccaagagaaagttactgtttattccggcaaaatttgaacctccggcgagatagcatctttagctatg

SEQ ID NO: 26070 - DNA, 3000 bp, Unknown; identical to SEQ ID NO: 13050
  misc_feature (1)..( 3000): 2750-1469P.txt file - cDNA_ID_2710363; gDNA_ID_2214594; Annot_ID_135463

SEQ ID NO: 26071 - DNA, 3003 bp, Unknown
  misc_feature (1)..( 3003): 2750-1469P.txt file - cDNA_ID_2710374; gDNA_ID_2214595; Annot_ID_135465
aatactaaaaaagaaagtttggattcatttcctacacaaatttatggttttataaatgtacaaagaatattgaactaatatttcatgttccgattatatataagttcccattttcaatcgatgagattaataaagaaactttctggagtatatatttaacattttcgattttatattatgaagctaaagtatgtacagtatgttggtgaaaaaacatggatcgttaaataaaaaaacatattaaggaggagaacgaccgagcatcttctaaagaagattaaagcataagaacattggaataaggaaggtgaagtattgtcgtggacattcctgagtgggaagactcaccattacatacataattaattagtaacaaagacattggcgcctgtcttgttcccgttgcttttccccatctttatctccaattctctctctctctgtctctcttgttctactactttggggaagatgatagcttcttcttcttctccctccatcacttgttcttgattctacttgtggtcctccgcttctcttttcaggtgattggtcattgatctctggtttttttattttgcaaacttatgggttttgcttttcgtttttttctctgtcttactaatccgaatctgattcaaagtttacaactttaactaggggtttttctcactgaactcttatgagtgagacatagattcgtcttctaggtctgtttccggagggaattaattaataatagtatcaattttcgattatttttctttggttgattctctatcgaagattgtcgatgcttccaaagttgaagcctttgttacttctgaactcaggattgtcttgtgcctcgctgtagattatcgaagatagttgtggttctgggtaattagcttttggtgataaaggtttgtgctttacacatcttctgctactttttgggtatggcctaactaaaaaaagtaacttttagtatctctttccgatgatatcgattttataggagtgaatctctcatcttgcttcggagtgaaacaaatcatgtttttgttttgtcggaatgcttatctgattgcagtgcatatagttgtcaaagtttgttcttgatggtgatgtagaagctcttttatttgacatatttggttctttgtttagtttatttttagtaggatctagaagatcatggctcaaaggaaaggacctgatccgcctccgcctcaaaggcggattctgcggactcaaactgctggtaatctcggagaggctatgttggacagtgaagtggtgccatcgtctcttgtggagattgctccgatccttcgtgtagctaatgaagttgaagctagtaacccccgtgttgcttacttatgtgagttgaaataattaaaaaaatcgcctggtgatgtgatttggtcatcttatatgatcttgaaaaatatcgtcgtggatgtttctatcaggtcggttttatgcgtttgagaaggcacacaggcttgatcccacatcaagtggacgtggtgttcgccagtttaagactgcgcttcttcaacggttagaacgggtgaatatcgtctcttcatttactctgcttgagttttcatcttcaccccgttgtcttgctaggggattatgtgtcattttgccttatatcccaaacttctgcaggagaatgaaacaactcttgcaggaaggcagaagagtgatgcacgcgaaatgcaaagtttctatcaacactactacaagaaatacatccaagctttgcaaaacgccgctgacaaagctgaccggtttgttgacatccctgtcttatctctattgcaatctatctttctgtgattctcattcataatacaaatttgttttacttgtagtgctcaacttacaaaggcatatcaaactgctgctgttctctttgaagtcttgaaagctgttaatcagacagaagatgtggaagttgctgatgaggtgacctgattctagattatattttgtagtatttaagtctcttacttctgatcttatcccatgctttcgtggaaattttgatattctttattgatattatttgtagtatgaaagctgttaataaaaaattttgatattctttattgactcactgggttttgttcatcctttttcttgctggtagattttggaggctcacacaaaggtggaagaaaaaagccaaatctacgtgccttacaacattcttccccttgatcctgatagtcaaaatcaggctataatgagatttcctgaggttaaccaaacattccactaactgtttcaattctatgtttacttgtcttttgagacggaaaataaataacacttttctgcagatacaagctacagtaagcgcacttcgtaacactaggggtttaccatggccagctggtcacaagaagaaactcgatgaagacatgctagactggcttcaaactatgtttggttttcaggtgatgctagcgaatatcctgtttggttagttgattgaggatttatccctgtgctgattgtgctccaaacctttaaaatggcagaaagataatgtttcaaatcaaagagagcacttgattttgttacttgctaatgtccacattcgacagtttccaagacctgaacaacaaccaagggtatgtattcttttcaacttggatatgagggtttcttgctcgtctagtcctctgtatctgcactaacggcctaaattacaatttctgcctttagctggatgatcgtgcattgactatagtgatgaagaaacttttcaaaaactacaaaaagtggtgcaagtatttgggtcggaagagcagcctttggtgaggcatctccttgtaacacctgcttttgagaatttattttgttatttcttaggaatatagaaacagatgtagtacataaattggatactataagtctttgtgcttagttatctctcttttccctgcttgtaggttgccgacgattcaacaagaggttcagcagcggaaactgctatacatg

SEQ ID NO: 26072 - DNA, 3000 bp, Unknown; identical to SEQ ID NO: 13069
  misc_feature (1)..( 3000): 2750-1469P.txt file - cDNA_ID_2710382; gDNA_ID_2214595; Annot_ID_135468

SEQ ID NO: 26073 - DNA, 3000 bp, Unknown; identical to SEQ ID NO: 13069
  misc_feature (1)..( 3000): 2750-1469P.txt file - cDNA_ID_2710382; gDNA_ID_2214595; Annot_ID_186880

SEQ ID NO: 26074 - DNA, 3000 bp, Unknown; identical to SEQ ID NO: 13070
  misc_feature (1)..( 3000): 2750-1469P.txt file - cDNA_ID_2710386; gDNA_ID_2214595; Annot_ID_135469

SEQ ID NO: 26075 - DNA, 3000 bp, Unknown
  misc_feature (1)..( 3000): 2750-1469P.txt file - cDNA_ID_2710398; gDNA_ID_2214595; Annot_ID_135477
caggtcgagttttcactggtccgaccaagcaggtcattcggtcaatatttgttttgttaatcaagtcctaaagatattttagccaccagtgactataactaagtctggctatttttgtacatgtagaatcaagtaataactaataaggagttaaggactaacgatcagttatgacttgctgttgctggtaatttggcgggtgagaatagacaatggatagaagcaagttaaaaatggaaatgaagcatccaatataataagtattttggaagcatgtttttgtgaattatctcattatgatttggttatagagactaatgtgaagtcgtgttggtgaaaggtttgaaacttgttgtgtttcatatattcaatagtttagcgactatttttgcttgtagcctatatattttcagggttatccctcgttactggtaaagatcgtatcggataacactcgaaatgcacagctgagctatcatcgtgccaaggctagggtggaccggtggtaccacttcgcgtagttatccggcaccagaaaaaaaaaaaaagattcgaactcatctttcatatggataaatttatgtgggccacaacagaaaatatagctatcatcatactttgttgttacataagctactcatgattcgtccgccaatattccatcaccaaataagaaccacaaaagcggcgactgatggatcataagattttagattatggtaagttgtagaatgtttgtaatgccttcacaccattatgcctcttgccatgttgggggtatggacaacaacttagccccacaaattgatgccctattttgtttagactggaattttgaaacacatttttctctattttgctatttttggggtcatcagtctacacatggatgttgcaaatgaccaccaattcggttcacttcaggttgggtttaattacgacccgactatgatctagccaaccataatttagcctcgatatctgaggtttaggtctgattcgaccaagctttatagcaatacaagtcaaccggaagttagaaatgatacgtttgatgagttcaatccgggttgaaccgggtgagtttatatgaccaaaacaactcttcacaataaatgaataaaatatctcgagttgtgaatgtatggttgttcttagttgggtctctatcgtcctctctctctattataactatcccaatctcttcggtgttgtaatagagacatgggaactactagacaaggaaaagctcataaattcgatacatccaacattcaaagcacatgacacgaactttgaggcgtaagctgtcacaagttaacatcaaacctagacatatagattttatttcaacaaactgattatttatacaatacttttatttcattctataagtagtgataccacatatttcaggttcaaggctcatgatcgacttgctacctctaatccgtttcctgcaaaatttgacgacagaatctgtaagttgaaacagacaggatcgctgaaagataatcctagaacacatgttccggatcgatagaccaaagtactaaagcatcaatgcatataaatatataatacacaagaactgtaatttgcaaatgcttgtgctgaataagaaaagtagacatatatctgaccaagttataatagttattaagccggcttaagagcaaaacagagattaattaccatcaggatcaaagaagaaaacttgcttgacttttccatcaggaagagacttctgaaaagtttctatccctttctcctacatcataacaaggacgagaaaggatcgattaaataactctgaaagataccaatcatatccataactgtaccatcaaaagctcatgtaaacaagccaaagaaacaataccttgagagaatgaaggaaagagtcgaaatttgggacagagaaacagatatgatgacccattgggagatggctaggatccttaaccgctgaggtagcactgtaaggaccttctggaagatttgttgaagggtttctctggataatatgcattgcaaaagcacctggtaagtttagccacaccacctgtaggtctccaaaatcaggactttcgatctcctcgaacccaaacacctgacaattatacatatataatccattggtttcagaacaaaccacgaagatgaagataacactaacttaatcaaaaggattaaaggcatccaaaagtggacactctcaatagaaactagaaacgagataagtgacaagagaaagagacaaagccacaatagcaacacaaatctctaaataaaaagccaaattacaaaccatagattctaatccagatgggtaatcgactcagtgcgtttgtttttttgggtcgaaattggtagtaacaacacaaacccagaacagagaatacgaagagagataagaaaaagaaaagtgtaagaaattgaaaacgtcgattaggtgtcgttacctctttgtaaaactgggcgaggcgtgtgatgtctgatgattctctggctatatggccaagactcgccatgtttggttccaagcggacaaagctaatcaagaagaacaactcagaaacaaaaatggtcgacaaaaaagagattagtaaaagtacgtggcatcggctccttataacacatctttaatcaaaccataaggttgaaccgatcggtttgactatcagtgaaactaaaaccaactttaaaaaaaagaattattatacgtaattgcagttactccaagaaaaattaatctgttgcttaatctgaatatccgaccaatcagaaatgttcggaccccgaccaaacaatgtatccggtttaaaacatccggtccggtattaaacccttattgctccgtaatctctcacctccaccaattcctcattcttccaatcgcacttcctttaccagatcagacgtcaatttcaactcttcagtgaagagatttctttcaccgaattttctactccgatcgatcaattgaagattgaaatg

SEQ ID NO: 26076 - DNA, 3000 bp, Unknown; identical to SEQ ID NO: 13067
  misc_feature (1)..( 3000): 2750-1469P.txt file - cDNA_ID_2710400; gDNA_ID_2214595; Annot_ID_135482

SEQ ID NO: 26077 - DNA, 3003 bp, Unknown
  misc_feature (1)..( 3003): 2750-1469P.txt file - cDNA_ID_2710402; gDNA_ID_2214595; Annot_ID_135484
acattataccctctaaaaactggaatagcgccagctgtcaagaagaatattgacggtaactaaacaaaaacaatcttaattagtgcttaattacttatatttttcttaagacatttgggtgaatgatattattatctgggcagattttctagtggagaaatttggattctcagaaagtaaagcttcaagcttaagagttgaactcttcaagacttatggaagtactctcgctggtcttagggtaatttcacttctccattttctaaagaattactagttcattatatatcattgctttctaatttatttatttctttcttataaattgtaggcgttaggtcatgatgttcatcctgatgaatatcacaggtaataatcaatcatcttcaacaactatataaatattttgatctcaggaaagcgatttttgttcttaagcttttttttcttgcaaaatctgttttgtagtttcgtgcacggaaggttaccgtatgggtcgatcgaaccaaacaacaagctacgtaaccttctcaacaaaatcaaacagagaaaaattgtaagtttaatcttttatttattgtggcatgaatttttcttgggtccatacagccaacactaataaatgatcatttgttttttcttgggtccagatatttacgaattcggacaagaatcatgcggtgaaggtcctcaagaaacttggtttagaagattgtttcgaagagatgatttgttttgagacaatgaacccaaatttattcgggtcaacaacccgacccgatgaatacccggttgttctcaagccttcgttgaccgcaatggatatttgcattcgtgtagccaacgttgatcctcgccgaacagtaatattcttatttatttaattatttcttatgataaaactattgtatcatcattacaataagcaaactgtttttgtaaataggtatttttggatgataatatccacaatattaccgcgggtaaatctgtcgggcttcgcacaatcctggtaaatttttgttacatttcacatttattaattccctattttgcgacatttgtatgtgttagtttcaagttttaaaaatttggttacaaaaaggtgggaagagcagaaaagacgaaagatgcggattatgcggtggagacggttactgagatagctacggcggtgccagagatttgggctacggcgacggcgacaggcggatttgacgttggtggtgagaggatcagacggagcaagagtgagctggagggtatggcttcaatagcagccgtcggtgcgtgacgtgatcgagtgggcggatcgtggccgttggataattttaacgtctagtggttgggattgtacaggtggcgttaaaatgttgataatgcatatgtgaatataaataatagtggtggtggacaatattcatcccatgtggacaccaaatgtgaatacgcaatcagataatattatgtatgatgattatgatttcaatatgtgtacatttttattcaactgatttttttaaagtttgattgggattttataattagtctgttcgtttcgtcgccgcgggtacctgcggctgcggtagacgcaactagttgtgtttgtttggttgccgcaactacttgcggcaaaacgcagcgtcaaacgcagttttctgcggttaaaaattttagacgccatttaaatttagcgtcaaagatgaaagagttgcgttatatatcctaaatgacaaaaatatccttattatttttgaaaattcacaaacaaaccaagcgattctcttcttcaacaaacaaaccctaaatcccaattctcttcttcgtttcttctgtcaagatcaccaaacatgcggcagcgtcggtggcaacgatggcggcatcgaaacgaacacaaaacctgcggttgcgacagcggctgcggcaacgttggcggcgacgaaacgaacaacaacctgcggcagtgttaccgttgccgctgccgcaaccgcagccgctgccgcctgcggccactaaacgaacagactaaatatagttttttattagagatatgctgtttataattttatctccaaccaccatgatacatattacagttaaatctctataaattaataaattctttcactcccgaattgggaccattataaaaaataatataaatcgataaattaataagataataactttttgaaaagtcctatgtaaatatatggtctcatcaatatcataaattaataattttataaatatatcaattatatatacattatatgtaagaaattgttttgaaatataattctaatatttttttgcttaaaacttgtatttattcttatttaaaatttagttatagtattttactttatcaaaaacttttgatgttgttttctaaacatgatattattatttacttgtaattgatttttgaaagatattttctataatgaaaaaaatcttatagaaatttttgaaaagttactaaattaagaaaatctctgtataaattaataaatattaatttatcgataaattaaaacatctataaattaataaaattttgcagtctcaacattattaatttataaaggttttactgtatttgataaacgaatcccttgcgatttatatcttgctgtatttctaaatcctaccgaagttttttttctactgtaggaagtaattcacagttttatatctatggtatttataaattctgaatgtctggcattacaacatttaaaacgttcctaacttactccattttcattgtaggagaaataatataacatttatatctatgttagtaatataacattttcaaattgctattgttatattttcaaatttggacctcatgttccttagtaggccaaactttaccccattttcatagtaggagaaataataaaacgtacctttcagaaataatcttacgtcaaaatatatccttaaataacagaaaagtctttttagtcttcgtgtatacgaggaaccataatg

SEQ ID NO: 26078 - DNA, 3003 bp, Unknown
  misc_feature (1)..( 3003): 2750-1469P.txt file - cDNA_ID_2710406; gDNA_ID_2214595; Annot_ID_135485
cttacttgtttctccttaggaaatgtcgattgagctaagtttggaggatgtaaagagagttgcttcacattatgggtttgagatggaggtaaatctacacaatataatgacaatgacatttgcctgtcagaaataaaacatctcatgatgcatgttcttcctcacttatatgagtggttgtcctaacaatatttgcagaaagaaaaaacaatagaaacaacgtactctacaaacccccggtctatgatgaaggtcagatttttttccatgtctttggatttgtggttgacttttggatccagagatgggtttaatttgtgcatgatgttgtgtgtgtctgttgcagaaccgatactatcctgtcttctggacaatgaggaagaagtgtgctataacaacaacttaaccaaatattcctcaaaactatatatgttttattctgttgcatttgtttttaaggaattaacgggtccaatctaaaacacatactatttcttttgttgttgcaaaataatgaaactgtgtttttcggttgatgtttgaaaaccaagtaaccaacactcaaagctaaacaaaacctttggcctgtgggcacaaagctaaaattttattattttctcggcactactacgcaaataggctaactaaggcccattaaataatatgaggcccaacttgaaaaagactcgtttcttgttactaataacctttccgatgaaatcaactccaaaaccgaagagccaccaccatggtttcgccgtcagagatgacggagacggcaccggcaattatgacaacggaaagcgaaaggatagagagttcgagggaactcgtggataatgaagaggaggagaaaatacgccgtcagaagaagctcgaagaagctctcgaagccaaatctcttcgccgcattatcagtgcttacctcaagtatctcacttttctcagtccttttaaacactcatccttctctggattttacatcatttcataggcactgtgttttctgattctaaagataattctactgattgggaatttcaaatcacaattctagtttctagattttactttttatctttttctttagcattttggtattggttctgcatcgttgacctttggaaatgtttacagttacccagaggcttcggaagaggatttgaaaagatgggaaagatcatatcggaagctgtctcctgcacacaaggttattttttgcctcatttctagcattgagaatagtagtagcatgttctgtaacagttaagagattaccaaacgatttcaagtcaagttgattttttgtcgaatcttctttgtttgcttatataatagaactaatggtttcagtgatgaatttttgtcctttgtgtaggcattggtaccccattaccctatgaagtttcagagattaagaaggtgaaatctttagtcagttaaatatttcacttatcatcttgtagtcttattaaatgtcgcgattcacttggatgatattcagaattttttatttccatcatagttgcttcgaggtttgcatttgattgcctaaattttgtgttcgggtgtcatttttatgatatccatgcttcttataattcttctttctcatgcttgcatactaaactcgatagtatgcaagattgaacttgactcatttctatcctgtctgtacttgtcccagacaccctgcacatagtgtttgttgaagtgttagtaagttgttggattttgtttgttgcaggtgtatatcggcgaattcatatttcatatttaatatgcttcaggtcagttgcagacatttctttttctaattcccttggtgtttcatttgcttcaacttatttgattatgtgattcgtaacttgacttgaaatgctagaaaatctacagttcatgtcaattgtcatgtaaaaatgtaattcataattacttggcaggcttttgagcctcctatagacttgagtcaggaacttgatggttgtgaagactcaaatcttgactgcgctccacatgagagatacactctagatgaaaggcacgactcttcttgtcagccggccttgaccaatagttgtacatataaggaagaaagcaaacacattcgtgacccaataacaggagtgtctatcgaggtcagatcaagacattggaactttatccttgtcatttaaaatctttaatttatttgtataaatacaggagcttcagaggaaagaagctcatgatcattctcccaaggatgactctgcagacacaagaatcaacgataagacatgtgattgtcatgaaggccagttaaatcatgaccatggcagtgtaatgccaactcatatactcttatacctcagttccgcccagaaaacgtttttgactatgttagctttgcgcagattctttagttattgtatcagttaagatctttggtgggatcatatgagtatttcctggcattctagatcaaatgaattttaactgttagtctatattaagaaagcattcaactgtcaagcataggcttgttgtatatatttttgcattatacttcatttatgactataaaattgtcataattcatgtgatttttctaattctaatgttcctcttttctttcttaggtatcattttcatcccatgattggttggattcatcgttacagacacatgttcctctggttgatgtagataaggtatggtttttcaaatttactatggctggtgatattcattttcctcagtcctagcctcctaggtaatcataattgtataagagctcttgtagcgtgagacaaagatcattatgtgtcatgttagaacttattctcaatctctattagttccattaggcagtttggtaagttatgagggttggtttgctcatgtagctttgcatggggaggtaaatcctgttgagcttaagtgcaccttcttacacgtatgcatatgcacatgatagaggtgacacacacaccagtacaattgcatatatttgttgcgatg

SEQ ID NO: 26079 - DNA, 3000 bp, Unknown; identical to SEQ ID NO: 12655
  misc_feature (1)..( 3000): 2750-1469P.txt file - cDNA_ID_2710418; gDNA_ID_2214565; Annot_ID_134929

SEQ ID NO: 26080 - DNA, 3003 bp, Unknown
  misc_feature (1)..( 3003): 2750-1469P.txt file - cDNA_ID_2710422; gDNA_ID_2214596; Annot_ID_135496
ttcatcggttacgaactaaaagaggctttaacgccatcacacacaattcacaagccaatagcagtttcactaatttcattcggtgtggctcgatagaagaaggtagtagaagagaagagcctaaatgaattttagtttaaattgggcttttaaatattttcggcccaaacttatttagtgtcccaaataagtttggtatttttattatcgaaagtgttcatactattttaaaattctaatatgtatagcttggagtattattgattctggagtttgagtgactttagcatcttattactaaataatactagtataacaacaaaagcgttagatggcatttacacttgtaagataatttaaatcatattcaaaccccttaagactcttttagaaatacaaaaatgagaagagttttaatgactttaaaatttccacttaatgatactagtatagcaacaaaagcgttaggtgacgtatacatttcgacgacgattcaaatcaatcatattcaaaccccttaacccaaattatacttttctttcttttcttatattttatttatttttaaacaaaattttaaaccccgaaaattaagtttgggcattttcttttataacaataatctcaatttaatagggaaaaataattgaaaatatgtagctagctagatttccccacacccataggtaattgttacaaaaggtgcatgcaaggtaaggacctctagcattcgaataatttgcaagctttcaatattcctcttttcttaaaaattagcttggattattattcatatacttatcacattgaaatgtgcaagcttgatttttgttattaatagaaaattaattaactcaaagtacataataaatatgttgattgagtactcaaatcactgatggtctgtccttttcattctcctttggcgttgggaaacatctaaagcttaaacgtaaggccttcaatgatttgtcccaattcaaaattatcaaagttagttcttacgtatagtcaatcatcaaatcatttgtaattgtataattataattgatatctatcaaaaataaatcattaagacttaagagttatgtgtttatttagacacatgataagactaaatccgaaatagattacttatttgttcttcaatatagatcaattagcttgaattatttgtagtattatacaggtacattattgactgaattagttgtgcatgcatttattagacaagaccttgacctattggcttagcaattataaatctagataatatatagatataatgtattaatgtctaattaagtcaattcgtataagctaagaggtatgagtttagtggcatccttatcaaacaattatcgaaaacaactatcttaatattaataatgtttatttattcatactaggccctaactcatacaagtcagacactcgactcatactgcataacagcataagtattaatttggagattctagcaataacagtgttttaacttttaaaggaacagaatacacaaatgtttttctttgaccccgaggctgccaagtgggtgaggagtagtgacgtcgcgtcgttgaattttctttgagcagtacaaactacaaacaaacaagatggatcccattttgtttgtccgttttaagtttggcggtatcattatccatgcacaaatcaaaatcacgcaactttttttataattaattttccataataattaacgatgaaacatattttccaagaaataatgtaacgttaaattaagcaggtacatattttgtaaaaaaaagttttggttattttcttttgttgccattcatcttttgttttttgctaacttgttctccgatcctcgatacattttaagtagataagtcgcatttacatacattttgtttgtctcctcgatacattttgctagcttgttcacctcgatacattttaagtatataagtcgcattttaagtataaaagtatcattgcgttgtgagtttttttttccattttaaaggctgggagctggagacgtacgtgtgattttatttttatggtaaataaatttaatacgaaaacaaatttactagtacttattaaattgttaatacgtaacttcgtactttatactatggttaaattgtttgggaaaagttttttttgtttgttaagttccaagaatttgtttagaaaaagttatgaacttatacgcggtttgctttaaaatgtttcactttttgttggtcaataaataaatgaacttcactttgcatgaatacagattgactatatcatacatacattaaatatactaatatacgtatattcgcaaaaataaagtacatacaatatatatacgtagctctatgattaaaaagcagcaaatgattgtaaatgttacgcacagtctggcaatttaaagccttctttgcattgcttcacccttaaggtttacgtttagtgaactaacttacatacattgtgtggaacatgtaatccatataaattgaccacaaaatagagttgtgaaatgtttagtttcattgcatcaaagagaatatattttttcaaataaaagatagtacttgtcacttcctatatctcttacctgttaactagaaataaataaacaaatccaaaaaaaatgtgtcctacttacttactaatgcttcaagcttggtaacacatcaaattaatattctgatatatcatatatcacctatcttacaaagtcattaattttcaggatggaagagattagattaggcactgcttattatacgataaagattgatatggatgcatcatatttccgaaataaagtacaagtatttacggtatgtgattttgctcgaaacttaagagtcgtttcttagtaagaaattaattaacatcgacacaaatcaaaaatagtaacgaacataaaaatgtaactatatatacatgtatccttaagctgctgctactacaacaactcgctaatcattaagtttcataactataatg

SEQ ID NO: 26081 - DNA, 3003 bp, Unknown; identical to SEQ ID NO: 26080
  misc_feature (1)..( 3003): 2750-1469P.txt file - cDNA_ID_2710422; gDNA_ID_2214596; Annot_ID_186926

SEQ ID NO: 26082 - DNA, 3003 bp, Unknown
  misc_feature (1)..( 3003): 2750-1469P.txt file - cDNA_ID_2710429; gDNA_ID_2214596; Annot_ID_135492
acctaaatgatctcataattagtcagtacccactccacttaacatttttctcacgagaaagtaaaatagatggaatgattagtaaaatagtccaagaaaaaaagtttggtcgactcgacaaagttatttgatctcgtgactaatatacattttctgaaaacttttaataattaacttagcaaatacaatgttgtttttcgagtttatttgccatgacaatttctcaccgccttaacaaattcatttttaaaaagttctagaatcattttggctattggttatttatatatcaaacaaaatataaaggacagaaatccttagaagatgtataaaacgacggcaaggagaaataaactatcaaagaaggtacaggcgataacttagccaggatttagctcctgtgccaaatgggaaagtgacccatttgatctatataacattcaaagtcctgattttgactgttgaatattatcataaaaactcattataaaaaaaccaaagtaataaaagttgccacaacaatatcagtacgcatccaatcttctcgggaagagaaacaaaatcaaattaagaaaggttttcaaagaaggaagagagtcaaaggaacataatatccaaattttcaacttcataaactttttctaaatttattcaacatgaaaaaggagggaaacattgaatggtatcaatcagtatcaggtttctaaaaagggaatgttcatacttacaacaaagaaaatttaaacaacaatcaaaattagaaagacagcaagaaaagtagaaaactttggcattttgatttacatttatgaatttccacatttatcatgaggtcggtggaagcggcggagcaacagttattttaaccgccgcaacaagtcttcaattctccttcctctccgccgccaatctgccgacaagtttcttttcgtcttaagaaaatatattgggtctcgtttcgtacaacaaagtgtagtgtttgggctttactcagaagcccataagtattttattattatttttagacagtaaggcccaatagtattttattgttactgtctgcgctgaaacaatttatgtttttcagcaaagtaatatcttactaatcagtaattacatacaccgtaacaccatcacgaattttcagtacacgacagagtataggtatgattgactgacaacaatataaaaaggctaaattagttagactgtcttattaattaaaaagtaatattgtactattactatactacttcacttaaatatttattcgacacacaaaaataaaccattcgtgtgaatgtttcccaaacacatttggggccgaagcattcgagcgggcgtaccactccaattacctggtacacataattgaagactatagtatgaaaattaatgttttatgtttttgtcacctaaatttttaataaaatgcagttgcagtttggttgtcattgttctgttgatccgttcattccgcgtcctgtatttggctatcacaatttcaatctatgaaaatttgaaatccgtatggtcaaaattatattttaaaaccacattgctagagaataattaaaaaaataataatcttcatgtggaatttatagaaattaatgatatacatttcaggaaaacttagcatgaagtatattattttaatgtgatgattttagaaatacaaaccgagacgcggtatgggatatggtccattacaagtaggcacaatggtccactaataattgttattacgacaacagaattaattgcctatttaaaacgaaatgaatcatcgaagaacatactagatctttttccaatttacaaccaaaaaaaacattattaggtgagtagtaaaaagattaaggttatcagaaactaactgtagtagtatgttgtgtgaaattcttttgtatttcttattaagccaagggtgccctttcaatgcaacgtgataaacgccaaaaacgatgatatgaacaattataaactcgttgagagcattgaactcggataataaatcatcttttatatacatcgtagataacaaacaaacacgtaattaaatttgacgtatagcaaaagacttgaagaataaaacgtcaagttaaagataattttggtatatatgagaaaggtatcgacaaaaaccataacgctatagatgattgtgatttgacaaaaacaccctcaaatcattgttttcagagtttttttagataaggtacagataagaaaccacctctaaaaatcaagcaatagatctcatcgcttaaaagaagagagagatcttcacttgtatgtgtcccactgattccaacacaatgtcccagaacttgccacgtgtcgttcatttcaaaagattgcagtactgttgtccctagagaatcattatctccctcgctgtaatatctttatgctcctgtcactttctgtctgtacccaaaagaagtaatgaacctctctcatcttcttcttctctgtttctttcatgttttgtgagttgtttctcaacaattttctggtctcttagagtgagaggagagagatagagagttgtgttgggcgtggaacttggactagttccacatatcaggttatatagatcttctctttcaacttctgattcgtccagaagctttcctaatctggtcagtagtactctttttatacgggtttttggttttataagatgtggctatatttggaaataactattttgcaagctttcctagattgccagaatataaaaaaagatgtttaacaagagaacggactcatggacttgctttaaattttaattattttaaaatcattctataatgattagagtaaataaactattaggactctgaattataaaattcgattttatatatgctcctccttgtatctcttaatcataagttatcattagctctgttcactagtgctataaaatatattctgaggttaataaaacttttttttctttttattttgaaatgtctccagagatctgacatg

SEQ ID NO: 26083 - DNA, 3000 bp, Unknown; identical to SEQ ID NO: 13088
  misc_feature (1)..( 3000): 2750-1469P.txt file - cDNA_ID_2710433; gDNA_ID_2214596; Annot_ID_135495

SEQ ID NO: 26084 - DNA, 3003 bp, Unknown
  misc_feature (1)..( 3003): 2750-1469P.txt file - cDNA_ID_2710440; gDNA_ID_2214597; Annot_ID_135498
gtcaaaagtatttatgggtccggcgcataggcagacacaaagaagattaaaggaggtcagctggtctttttagaattctacatttgcattgtaaccctttaaaattcatgatattatttatatatatttttttatttttactcttttaaaattacaaattcatatgtaaaccttctaagttttattgtatttttcttctactttgtggtttgacactatttctaacatgttttttactttttttgtttgattcacccataaacattgaaccatattttatctattttttaaatgaagttttttgagttttaaattttttggttacttattatttcgaagttatattttgatactttataaattatttatgggtccgccgcataggcagacccaaaaaagattaaagcaggtcaactggtctctctagaattttatattcgcattgtaacccattaaaatttatgatattatttatatttctattgtttttacctttaaaatcactaattcttatgtaaacatttaaagatttatcgtgtttttcttctactttgtgttttgatactatttctttgttttcaacttttttgtttgattcacccataaatattgaaccaaattttggtgtttttaaaagaaatgaagatttttttagttttttaattacttattattcaagttataatttgatcctataaaaagtattttggatccttgacttgaaatgtaaaattaacgggtacaatgtgatagttaatatcctaaacattatatgacacatgcctttgatacgggtaaatagatataaatataggtgttgttatatccatataatatatattttttaatttcgtaaatgtctctaacttatcactctaaattatgattgattcaagaagatactcattttaaatttttttggtcgaatttcaaaaattttggtatgcttgatctttaaaatttaaatttaattttaaaaaaacaaattttggtcgcgcaaggcgcgggtggctcacttagtctcatattattccttcacgaatctggacttattacattttcgtttataaaaggaacgttaatacccggttcattccagtttacagactcaatcatagttattctaaaccatactctaataaaaaccaaattagtcaaactgacccaaatcagaaacaaaacgaaccataaataaatcgaaatgcacatcactagcaacttttctataaaagtgaaagtgggtggacagacacttgggtagaaaacccaagagatgagtggcttccacgtcatcctttacagtgatcctcgcacgcatgtataacacttatatcagtcaaagtcattattttaatcaatggaccatttccaacttaactttaactttaatgatgccagctttgtgtcacaccacttactaataaacgtagaaatatatccaaaaatgaactaaaacactactctggaaatattaaatatagaaaaccaaagaattggaacagttcatcgggaagggttttgggaccctagagaatccatggctatcactctcactaatttcactgtaagtacactatttctttactttctctatggtttgttgatgatgaaaaatttatcaatctttgtctcagtttctctatatggatgcaaacctgaaacgtttaggcgacatatatccttccttgaacttcatgggtttataggagtttgcgtatgtatatagatacatgaatgctcaattttggattgttgttccttaagaatgattacagttttagggtttggagcaaatgtagttactcttcttctgattctgattctcaccataacgagaagaaatggtagatgtaacagaagggtaagagtaagcctaattttctactttggttttggtaaaaaaaaagaactgattcgtcctcatttgattttctttattagaaaagctacattgagaagtgtttgttgtatgtaacacctgcacttggagcttgtttgtcatgtgtggacttggtgttacttgtgagaacaaaccgtaggagagaagtcattctctgttttgtccccttgtctggtttcgtaatgtgggtaagcttcttgttaccaaacacgaacagaactctgtctttgtctttctcttttgtttctgctttgaaggttttttttaccttgtagattgccgtcatcctctcattgaagtttgcttgttgtgcgtgccacgttttcactagccagattctatgtttctggtggatctttagattcctaacagatgcccttcatcttaacatgattttcacattacaggtaattaagttgtctttatgaatctgtcacattctccatataagtagagttggttaaccgaatttggagcgtgtacaggagatttgcctcatcatgttggacattgcttttggtatctctattaatgtcctcaggataaagcaggcacatcccaaaatcatgtatatgctttaatatggttctcttatttaatatttttttccttttcatttcttgtttaattccttattctccttgtagtcctttggaagatccacttattgaagacgacgatgatcaaaagcgcattgtacgacgtctcttccttgtaactaactagtttaaagagtagttaaagaccaatagatttgttcattctttgaaggagaaaaatggaagctggtgggacttattcacttttgggtacattggttcaataatgaaacatggctcggtgaagcagctagaattggaaaatctacttacactaccacctgaaatggatccttttacatgttgtgagaatttattgagatgttggcaacttcaagagtgtaataattactcaactccatcactaatttggtcaatatatggtgtatatggatggccatattttcgtcttggactgttaaaggtacgttgcttatttgactttcttatataatctttgttaatattgctactacaaaacatgaattttgcaggtgttcaatg

SEQ ID NO: 26085 - DNA, 3003 bp, Unknown
  misc_feature (1)..( 3003): 2750-1469P.txt file - cDNA_ID_2710444; gDNA_ID_2214598; Annot_ID_135505
aacagcacaatacaacgatgcctttaaccttgtccaatacaaaaacggaaataagtcaatgagttctcagattgatatcacgttttcacaatgtcctcaacttgagcctttgcctcgtttagtctttgccttactccgtaatccccttctccggtttcatgaagaaggtgttcatcctgattacagaatctacttgcaatgccttttcaggtaaccatcccaatgaactactaataaccaacctagagtcagcgtgaacaatattgtatatttagtgtattttttcgatcgtggatttatttggaaaaaataccttggtatctcatgtaaacagaccacaagcaaggctttagtctctaaatttcgtgtttgtgttcttctgttttgttttccttaaaactgcagtgtgttggacccgagctctcttcattgcggcatttacccagcactaatgtcatattcaacaccggatacactggcatatccgcgtcattcgttgagccgtgcagcattgataacaagtggtagtccgatatttttcctagatgcatataccactttgatagtcttctactcatcaacagcagacccgtcaatacctttccctccacctcaagactgtaagttttctcaccaaatgaaatccagttcaaccacctttagatctttgagactatgttgattcgaaaacttatatcttacaggtttattgaggcagaccataaataaagtgaagcaagaaaggagcatcacaccaaaactagtgtttatccgaggaggacgagacgatgctactgtctttgagaactatcttatagaagaacaagatgtggacggtaatggttttgctagcgccatgggtttcgtgtctttcctcgatgatatttcgcagcgtgtcactgaatacatgaagtgaaagccaaatgaccctctagtttattatacatccaaactcaaaattttcaactgtgtcagagttttactcttcttgttgtaacatttgctttagactagcatcccaacttttttgctctcttaatcaaaatgaataattaagctaaaattttgttgcaaaacttcattttctaaactttgacttacatatttggtaacactagagccaaagagcaaaaagatatgttagtctattacatgctcatggccacaaccactgcttcaagcttacaagctaatctccaacataaacctgaaaacatgttcttagcaaaaatataaccttgagttcattcatcttcttcatcactctctacctcttcaccacttccacttacgctcccgtcctcgttctcattatcttcaccaaccccgctcccattttcttccatgctatggtcctcattcccgctctcttcgctctcattcccattctcttccatgctgttttcctcatcctccttctcgttctcctcatcattcccattctcttccgtattttcatcgtcgttctcctcatcattcccattctcttctgtattttcatcgtcattctcatcttcctcatcgtttccattctcatcctcctcatcgtttccattctcttcttccgtgttgtcattctcagtctcctcgtcattcctcttagtttcctcatctattttgcttttccttgcacccttttgcgtagatggttcttcctgtttcctcttcttcgtctctttgggcttcgaagcagttccacttgaagatttcaaagcagctccaccagcaggatacgaagcagctgcagcacccgcctttttccccgcattcttcttcttaaaatctgaaaaccagtcatgtggattacactaggattgacatcataagctcaaagtgcacacacctaggccagtgtccataacaagacaaatcacaacctaagccatttctactaacactccatgaaagtaacaacagatagtgacaataggatcttcatccgaacaaaacacttaccttcaagagaagatttaagcggctccaaaaattctgaaaaatccatttcttctaatgccttaaacacatcatcagccttcatagtttgtcttcttgcatctttacaaaaatcatttgccctatatcattcacccccaaattaaactaaatccatcaattcgatcgatcacaattcacaaacactaacattcatcaattgaatcacattaacataaacccaaacttggaacattccaaatcattcactatcatagtgcagaaattcgaaaaaaagttagggtttgtgaagtgtacatacgtggcggagaggtagtggatgaagatcctcgcactctctgagaatgcgagcaaagcttccttgtgaatactgacgtcataatccggcgaacactccgacagcttcttcttcaccacccggcgcacaatagctagcggcagctcgtccaccaccactttctccgactccattcttctctcctctctctcagtcgccgtctttcccgcctttatgttaataatacaacaaaacacatcggcccagtaagctgatcagcctattaaaatatttaaaagcccatattcaagtttataagcactaaagagttatgaccacgccgctcaatattacccgttggattgattgacaaaatcctagccgtcaaatcgtactagcaaatcggcccattattcaaattgataagcactaaagagttatgagcacgttgtcaatctcaccgttggataacctttattaaatcttcaccgtccaatcgtaatactaataaattcgatcaaaacacgaataagaatcggagtcgtcttcaacctctggaatttgagacatcttcgaataaccagattctccgaattcgagccatttctaagaatttcatactctgattaatgtcttactcaaacgcctacgcaccgtcggcaccggagctaccagaatcgttcgttcagcagcagcacgatggtgaaagtagatacacttacgcgtatccatcatatcaaccaactcagcaattcagctcttactccgggatg

SEQ ID NO: 26086 - DNA, 3000 bp, Unknown; identical to SEQ ID NO: 13103
  misc_feature (1)..( 3000): 2750-1469P.txt file - cDNA_ID_2710462; gDNA_ID_2214598; Annot_ID_135507

SEQ ID NO: 26087 - DNA, 3003 bp, Unknown
  misc_feature (1)..( 3003): 2750-1469P.txt file - cDNA_ID_2710477; gDNA_ID_2213645; Annot_ID_132375
tcccaagttcttagacaatctaacaacactttctagtttgttgcaaattagatccaaaacattctccaaagacaacacctttactatctctacttaaccttctgatacaaaaacacaacaacgttctctgcattccgctagcaatcatcaagattcccaagttcttagacaatctaacaacactttctagtttgttgcaaattagatccaaaacattctccaaagacaacacctttactatctctacttaaccttctgatacaaaaacacaacaacgttctctgcattccgctagcaatcatcaagattcccaagttcttagacaatctaacaacactttctagtttgttgcaaattagatcggaaacatttcccaaagacaacacctttactatctctacttaaccttctgatacaaaaacacaacaacgttctctgcattccgctagcaatcatcaagatttttccaagttcttagacaatctaacaacactttctagtttctagcaaattagatccgaaacattccctaaagacaacacctttactatctctacttaaccaatatcgaaccaatatcgaaacacacatgaaaactgaaacaaagttgcagagtaatttagctcaaattcctctattttcttggaaacgataccgggaaaaaaaaagctataaacttgaccacataacacacaaaacccaaatcaatttgacatttttagcctaaaaatcaatcaaaagaaagggatcgaaatgaaataaaacgatcattaaatggcgataatcgaaaccctagaagttgaccacagtatggaaaagctcaccggagatttcagcagctgagaataccgattcgagatccgtcagagatagaacaagtttccggaagaatgtagcagaaatcgaaacaattagggtttggcgagaagaagaatgtaaaattgggagcgatgatttttttttgtttgattgaaaaaaaaattgagaggaaatgttttttttttttttaaaccgtcgttggggttggaagagacggcgaagatgctgacgtggactcagcgactatgtttcgtcagtgcgttgacacgtgttctcatcattgcggatattgtttttgtatgtgttttagattttatggattttcattttaatcgttgggttcaaaactttaaaagcccaaattcataaaatccatagttatatcattttaaactacataaatacaaaacaaatatttacatcttcgtgatatcattttgatcctctacacatctaagatattattatcatcttggttttctacaatttttaccttccttactttgagtctttgattgtatatcatcttcaaaaatatacgccaaattcgttttttggatctttttacaaagatttttttcgtcgactatcacaaactttgactctatgaaacaaattgaagaaaaatgaattccctaaaaatcttggaagaaacaaggaggctaatggtgctttaacaagtaggctagtggtgcactggtgcttttacctttgttgacatcccaccaaatttaagctcgatcaatgtgactctaattggccactaggtaacatgttaaaaataaaaagaaagttccctaaaaacttcaaactttttacttcaacaaagagaaaccaaaaaaaatctagtgttcatgagtttatcattcattttaattttaaacaccggttcttcgattcatctccaaaaaatcccttcaaaatctagaaaccctaagggggtcgtgtgcctccatttcttttctctttcattttgtgaaatccaaaacattatcgtctatcatatgtataaacaaaaatttgttgcattttttactaacaagataggttactttgcatacaatttaaagtgacgacattttgccaatcgataagtctctttctcaagagagaattaaaaatgcaaggcctgcagcctctggcagcaaaaataatacaagggtagtggaccgacaaaataataaatggggcactctataatcagaagacggccacgactcgagctggtaataagatactaattgacattgtaatgcatggcaaatgataattgcctatttaggacaagagcattaaaataattttcaattatttagagtaattacttctaaaatttaaaattttagcctcgactccaggtgtatgaaaacatggtaagtatggtcaaataataaaaaacaatactgaaaaaagaagttgttggcaatgatttaataataaaataatgtttttttaaaaaatcccaaaaaatcatatctacccgatcacatactaagtcaaatgtagttttaaatagattaggtagtctatttttagggtgtattttactgaatacttcttccgtttcacaaaaatgtcattttaatttattttattatacatattctccttcattataagagtttttaaagaaaatcacggatttaggatgctgatgtataagcattatactaataatacactaatttatatagaatattggaatcaatacactaatagtactattgaagtctatatataatgttttgtaaaaaattcttacacaaatcagtctagtaataacattttctttattatcttttggattggaacgaaaacaagtacaaaatacgatacataatctacaaataactcgcaaataaacaagtcaagaaacggtacaaagaatctgcaaacacatttttttttgagagtgtaaacaaataaaatacaaatacaaagttttattgtcccatacaaagtaaatttcctttgccccacctttacttaaggctcattaactcatatgactcattggcccatctctgccaattgtcacacgacttgatggttttctttgttttcgacgaagtgctaaaacatgtggctcaactttgggttccaaaacaaaagattttgaaaataatatatcataacacaaagaaaagaaagaaagatataaagtcagcttaaagctctcgcatg

SEQ ID NO: 26088 - DNA, 3003 bp, Unknown; identical to SEQ ID NO: 26087
  misc_feature (1)..( 3003): 2750-1469P.txt file - cDNA_ID_2710477; gDNA_ID_2213645; Annot_ID_181419

SEQ ID NO: 26089 - DNA, 3003 bp, Unknown; identical to SEQ ID NO: 15517
  misc_feature (1)..( 3003): 2750-1469P.txt file - cDNA_ID_2710489; gDNA_ID_2214599; Annot_ID_135523

SEQ ID NO: 26090 - DNA, 3003 bp, Unknown
  misc_feature (1)..( 3003): 2750-1469P.txt file - cDNA_ID_2710492; gDNA_ID_2214599; Annot_ID_135527
acaatattggcatgccgtattctatctatattattcactagctccaaaaatttgccttcttcttcatgattgggagacttcttatccaacttcctcacagcgaagagctatccaagaaagtaaactaacttatcagttgcggaaattgaatacacataaagaaagaatgaatgtaatgcatatatacctttccacctggaagctctgccctgtagacactcccaagcatgcctgttccaataaggttttcgtgggaaaagctatttgtgtgttgttgtagagatgcgaccgtgaaatgcttcacagctgtcaagggaccatgggatttactggttgtcctttttagagatgcttcagcaggttcagtcgcctttgcgatgacccttttgataggtggaattgatgagggatgcatcaaatccatagcattgccattcatgtctatctcatgactctcctgctttgattcacttcctacgcttctttctgccccaccatgcagcttcgaagcacctcctactctctcttttggtctagcctccttgtcttttgtttgaatttcattgaagaagagaaaacaaacatgtgactttcttgaaatctaaaagtgaagaaatcaagatatgagatttcacctttattgaatgtattggatggaggaagcatagaagcatttgagcgagaaccctcccttgccctcccgtattcactagttaggtgcggtttggatagttgttcactgtcttctctttttctgagacattttctcccacaaagtagacataccaaggccaaaaccacaaatgaaaaagccccaagaatggatatccaaataattcttttactggtaaatgagtcttctttcccttgaggagttggtcgggatgggtgatgatcagaagggggtgatctcacgtgtgcctgaccatgaccagctgatgcattgggagatggtggtccaaaaaatggccgcttaggtgatgttggacttggaggtgtttcaggtgaaggcgatggagcaatagtgacgttaaacagattaccgccttttctgcatcatagtttgtcacatcagcggactgatactttgacaagaaaaagtagcagaatttgtagatgtaaagttggaacgagcaatgaaaactgttgcagcttacatgaaatttggtatactcaacaacttttctggtataggtccattgaagaggttgttctcaacgttcctgtagagttaataagaatgagagtaagcaagtggcaagatatataacagttgacaggaaaagaagatgggatggcaaagaatttgtacaagtccttgaggggaagatcttgaagaacatcaagctctcctgaaagatgattgttctgcaaaagcctgaaaggatgagaaatcagaacaacgaactgaatgagacctactcaacacagactgatatgtatatggaatgcaaaggagaaactcacaaggatgtaagagtcgaaagattctgcatggaaggaggtaatggtccactcagattgttgctagacaaatctctacgcatatgtcgaatgttcggttacacatatatacagaaaacaatcttaacacagctgatttagaaagcagacctacatattgatcataaggccaaggtcttgaaagacatcgggtatcttgccagacaaaaggttattgttcaaggacctgtaagaccaaagaagtcttaaacgcttatcaccggtagagaatgaatgtgatgacagagagagcagagacttacatgacagacaaagattttaaggaggaaagagattctgggatggttcctgtaaagttgttacctgaaagaaacctgtgaaaatgtaaagattgtaatacaagatgttgaataagaaaaaagaggggatttgcgagttggaaaatgggaaacatacaagttctgcaatgaaacaggcaacgtggatgggatacttcctccaatgtgattgttgctaaaatccctgagacaaaacatcaaaaggtaaaaataaggagagaagcagattaaagaagcaaaagtcataaacgcaagagaggataaagtacattgctttaagagaggtaaacatgtttaagccaacaccaagctctcctccaagattggcactgatgagaattctgaaaaagggtgagagtgttgttagaagaatgataaagaaaagtaagaagaagaagatgggaggtgtcgttttttacattgtttctacttgggaagcattacatagaacaccttgccagctctcaccacatgggtcacctccagatgcaacccaaccggggagaagaggagactccagtgcaaggaagagactgttaatagccgcaactaaagcaaacaatcagggtacgattagctatactaacattaccattacacaaaagggaaaaacagagagaattaggggcttaccatcgtcaggattggtaagagcaagtgacaaggagggaagggagataagggcaaaggagagaaaacccaggaagcagatgttgttgtctctcccagatctcatcgatctcattccgaatccagtagacactaagagagatatgtgagtgaacagagtcgttgaaaattcaaaagcaaaacttagcagccaagaatatgattcgacagacgaaggaaaaaggtgagtaagagaactttatgttatcttaagagaaaagggaatgtttttttgcaagtgagtgagagagagcgtcactgtgtgaatgcgattcttcttagttcttacaagcaaatctaaacttgtgttttcaaaatttgacgggcagacgaaacagagaagacgacaaagaagcttttaatgggcctacatttatttatgataaggaatataatgggctttagtttataaacaataggcccaaatgagaccttcttgtagaagaagagggttcatcgtcaccttaaactcattaccgtcaccggtgagattcctccaaaatcgggactttttctcaggacgtttgagatg

SEQ ID NO: 26091 - DNA, 3003 bp, Unknown; identical to SEQ ID NO: 26090
  misc_feature (1)..( 3003): 2750-1469P.txt file - cDNA_ID_2710492; gDNA_ID_2214599; Annot_ID_186988

SEQ ID NO: 26092 - DNA, 3003 bp, Unknown
  misc_feature (1)..( 3003): 2750-1469P.txt file - cDNA_ID_2710500; gDNA_ID_2214599; Annot_ID_135509
gtattggaattaataaaatacatattttatgagaagacaaaattttcttttatgaaaaccaaaagattaatttaagcaaaggttatacaaataaattattattatattttagtttttttaaaaaaaataggaaaattctgttgatgattccttgaaataaccaaagttggctgagttgatgatcatcctagtcaaacattgtgtaggttattcaacaagtgatgtctatgtgcctaccaaagattaatatgagtctctaattgatggcctttttgggcctattgggtcacaaattaaattaaactccatcaatttcttttgtgcatgagatctaaacgcaattttagttagctaacgttatgtacatcatgtcttaactaggggttaatccgtgtcgtacacgggtgtagaaggttaaataaggtgattaaaggatacataaacgtatccgaaaacttacaaaatcaatctgtggtgcgtttgagtgttacagtttaaactgagcaattgtgatcaaagcatgcatagagaaatacataatattttactagcttttaaattataaaattttgtcttataaatcaatcttatgaaattgatatactcgattgtcgaagaatgatctctaatgagcgaaactgttgttgaagaatgctaaatgaacattttgttacctttctggtgttagataatactttagagtcgccaaattcgtccaaaatataaattctctctacttatagaaagagaagtggtgaacgtgaatggtcataagtcataactaaagtcgtgatttgatgaactcctccactttgatcaccttatatgtatgagtaagctgcaaagtggcgcgaaattagtgccatacttttgtaattttaactttaaaataaatcattacatgctcattttcatataattaaaacactgtattagaatgctgataacaaattttacactttgaatattattctccatgaaagccaattatataaaaccgtccacaatgatttctttaatatgggaataatagtcaccgacagtgtttttcttttggtacttcccttagagcatctccaatttgatacaaatatataaaggaaaaaaaaaacccaaatattggcattgattttgtgatattatgaaatattaatttaccaacataagatagatttaacagaaattaacttaagcaaatatataaaatgttagattttatttttgttgttgaaaatgttagattttatagtaagaaagtactattttatgtgggattcacatggttgaacatttgtcaaatctaaagaggaaaataagttaaattactcacatgacttgtgagaatctgagtcctaatgacactcaacatgtggtctatatttttgtagagattgtttaggaaaaactcctagacaaagatttatttttatctttgtctcagttttaaatttgaatgaaccgtgttcaacaacacatacttaatatacaattatacatgcactgacattaatagctatttttaattattgatcttcatatgaaggtattccatgacgcattaagcggtggagcccctcagagggcagggttacacatgttgttggcagcaagtttttttttttctctccaaatcacaataaaattagattagtcagaagattacttatttttcttagcatatcagctatctatacgtagatgtgtaattgctaggatcattgtctaatcgaacatgaacgtctctttactcttcaaaaaatgttttcctagttttacgtccctattggattaaactaaaaaataaaaaaataattgaaaacgtaaacgaaattttttttaaaacaaataacaaaagagaaaaagaaaacatgatggtatactagtttggtggggctaaggacacgttcctttgatcaaataactaataagtacaacttacaataatggaagctcatgttataatcaacttactcgagattgaacaactctctctcttatatgtttgcactctaccgttgtattgtaacatgaccttcaataaattagtcaaggtttcaaatccaacaaacatgtagaacatgacattttattgtgaaaccgaacccaacttttttttttcacttaccctagttcgtcaaaatttattatattttggaattaaattaaaattaattctttgtacatacataaccatacattagttattttgttttggaataaataactacgaaaaaatgtttttgacaacaagtattatttacttttcactgtcttcactcttctcttctgtagtattagtattatggattggattaaataccaaatgagaaatttaagtcccttgtgtggcagatctggtgggttaatgataccaacgttctaccgtaaaagcccatccgaaattaacgcatacttaaccacaacacaacacacacacacacacatcaaagtgcgtgtatcctgattcttacttgctacctttcttcttccttcttcatcattcatcattcatcattcatcattcatcattctcatatctctcttcttttactggggatcacaatatctatctagttgtaaattgtgaatgatagatcctgagccttcttgccgccacctcttgaacttaatgtacttgaaaccagtctccacatagcgatagagagagagatctgttatgtgtgtattcatcaagttctctttttttgggctcaaagtgtaaaaggagacattttcaattctgagttcttttgttttcttataataaaatctgggttttctgagattttcttcacatcgtccgaaacgtggacacattttgatcttttgggtgtcactgtgtcaataaaggttgaaactttgattacatttctctcaaaaggattaatttttatttctctatctgggtgagatttggattaattggtgaggaatcggaagaaactggcgagattacaagcgattgtgaaatatcagaatctaataagaggaagaagaggcatg

SEQ ID NO: 26093 - DNA, 3000 bp, Unknown; identical to SEQ ID NO: 13104
  misc_feature (1)..( 3000): 2750-1469P.txt file - cDNA_ID_2710515; gDNA_ID_2214599; Annot_ID_135513

SEQ ID NO: 26094 - DNA, 3000 bp, Unknown; identical to SEQ ID NO: 13104
  misc_feature (1)..( 3000): 2750-1469P.txt file - cDNA_ID_2710515; gDNA_ID_2214599; Annot_ID_186968

SEQ ID NO: 26095 - DNA, 3000 bp, Unknown; identical to SEQ ID NO: 13105
  misc_feature (1)..( 3000): 2750-1469P.txt file - cDNA_ID_2710527; gDNA_ID_2214599; Annot_ID_135519

SEQ ID NO: 26096 - DNA, 3000 bp, Unknown; identical to SEQ ID NO: 13113
  misc_feature (1)..( 3000): 2750-1469P.txt file - cDNA_ID_2710527; gDNA_ID_2214599; Annot_ID_186976

SEQ ID NO: 26097 - DNA, 3000 bp, Unknown; identical to SEQ ID NO: 13107
  misc_feature (1)..( 3000): 2750-1469P.txt file - cDNA_ID_2710531; gDNA_ID_2214599; Annot_ID_135521

SEQ ID NO: 26098 - DNA, 3000 bp, Unknown; identical to SEQ ID NO: 13107
  misc_feature (1)..( 3000): 2750-1469P.txt file - cDNA_ID_2710531; gDNA_ID_2214599; Annot_ID_186978

SEQ ID NO: 26099 - DNA, 3003 bp, Unknown
  misc_feature (1)..( 3003): 2750-1469P.txt file - cDNA_ID_2710535; gDNA_ID_2214599; Annot_ID_135522
tctgcgtgtaatatacgtttcaatggattcgagtctgaatacaccagtacaccaccaccaccactggacaacaatacataaaaagacacaaaccaaaataattgttagacccacgttacttaaaaaaaacatagatctgagtcgaaaaaggtatgaagcttatagagatggtatgcattatatcatgcatcacagctagggaagaggccaaaagaggacaagcgaaaaattcggacacgtgcataggagtggtcaaaaacatcacaagactaaaaatactaagaaaacagtcaaagcatctataaagagaattggaaacaaaagagttatatagattctacagctaaaagaagaataagaagaagaagaagaagaagaagaagtgtagaatggtgaaggagatctaaaggagaataaggagagacctgaaagtgctgagaagaagaatcttggaagtagaagggtaagccttgaataagctagaagctctctggtaaaagctatggaaactcatgttgatgatttctcaaacctcagatccaaaagaaaacaaagctgagagctttggaagagaggctgcgaatgtgaaagaatatgcaatatggaaactatcaaagctactttagggtacgtgagagagaggtcggcgacacacaaaacaaaatttaaagaaaaaagaaaaaaagaaaagacagtgaggtatttaggaaattggagtaacgcccaagtaaatttaggtatattcttttttttttttttttaaagtaaataaacagcagatttgtttagggtttgactttctctcaaaactcgagactttaagcgacattatgttccgcgttccctggagattttttattattatatatatttggaattcgaacaactgttggattcgattttgattttcatttctgattttatttggaatactgtatatgataaagctaataagaagaatggaataaatacctcattcacttctatacatgcatgttacaattcataaaattcataactaaactttttatgttatatatgcatgaagactatgagattgtgcctttacaaactcttatcgattacaaaaacgatattgaggtaagtgcttttgaagatattaatagtttttaacaagaaaactattagtttgatgtctttaattaaggttcaatttatgaaaatgcttgcgagtttaaagagaaagtatgagaacaatcttgtgaaagccaagaatggtgatgaacatatcagacttcatgatctcagggcttttcaattgtctaagtttgtttggggagatattgaagaatcacctgtgaaatcgaagaaagttatgtctatgaaccttgagcttggtaaaaacaaagatacttttcccaattcttctcttgttagatcactagagcgttttggtgttgatgaacttactcctcaacaaggattgagtagccttgacttagaggataagaagatattcgaggagcagttggaaagctttgcaggttatagaattcgagttctattcgcgaaaaagtggttttcttcatgaagtgttagcaaagatgattgaagcacttcgatcaaaaacttaagagttttaagtctcgaaaaagcttcttacttatgaaaataaaatttgatgattgtgattacgaagcaaatgtcaaaaatagtacaaaatagctccaagattaagcatgaataaaagagctattatgttaaacactaaaaaaggaaaaaatattacatttaatatgttccagggtaggtctgggcgtaatatccgaatccgtagaaccgaactgaacccgacctgaaatatccaaacttgttatacttcggtttcggctaattacccgatcatattctgttttcaaataaatgtgggtatcgggtattatccgaaccgaacccgatacatgtgagtactttttattatttgaacatatatatacatatgaggacatatatgcactaataacttgaatttgtgacttgtttaatgatttgagttatggaacgagctcaaaacaaggtttacttcttgttttatattattttcttaaggaaaaatttgttataattttagatctttggggttttatggatattttaatatatgtttgggtataattggacaatgtttgggtaagtaatactcaaacccaaaataattttggttatgtatgggtttttaaccaatacccgaattacttgtattagaagtgaacccaaaccgaacccaattcaaaattgtacgtataacccaacatatccaaaatttctaaatatggaaagaaaaaaaatccaaaatttctaaacccgaaaaactccaatccgaaaaatttgatccgaacctgacctgaataccgacatgcccagagctactccaaagtggggaaaattggctcggattagtgtggatgaagtttttggctttgttatgtagttttttggcttgaagaccaaaatttatatagttccaaagtccaaactagcttagagaaattgaaagccaaaagagggtagatatgtcttttaacactctcttacaaaaaaaaatagttacttgattctcaaagaagggtgaattcgaggttttttgcagcgaagagaaagaagatggtcggttgagctatttttgcttctcccgacaaaattctcagatccgaatacttccaccatcatcattcatttataagatctgggttttacacagctctgcgagtacagtaactatgagaaggagaggaggggatagtttccggagagctggacggaggaagatctcgaatgtggtatggtgggttctctctggtattgccctcctgctcttctttctcattctctccaaagctggtcatattgaacctagaccctctattcctaaggtatattcaatctcaaagatctcttcttttgttcgatttcaattgctaaattcgaaccctttcttttgtgcagcgacgttaccgtaatgacaaatttgtagagggtatg

SEQ ID NO: 26100 - DNA, 3000 bp, Unknown; identical to SEQ ID NO: 13120
  misc_feature (1)..( 3000): 2750-1469P.txt file - cDNA_ID_2710539; gDNA_ID_2214599; Annot_ID_135526

SEQ ID NO: 26101 - DNA, 3000 bp, Unknown
  misc_feature (1)..( 3000): 2750-1469P.txt file - cDNA_ID_2710543; gDNA_ID_2214599; Annot_ID_135531
gccggtctccttcacaatgaaatcgctgctcagatctatcgccaggctggtttggttaagcgtttagagaagtcacataatcttcttcaggtattgcttttcccgctgataaaatatgactacgcagacgattatatgacatcgtcactcatttgtaactctacgcaaaagctgtacatgtgtaacgctattcttttcagtattgacactaacgtgtatcacctttgtttgtgaatttgcaggaccaggaagatgataactttgccattgtgtttgcagccatgggtgtaaacatggagactgcacagttttttaaacgtgattttgaagagaatggttcgatggagagagtgacacttttccttaacttggcaagtatctcaattaagatgtagatgccttgaaaagatatagcagctctaatgtttccttgacttcaggcaaacgaccccactattgaacgtatcatcactcctcgtattgctctcacaacggctgagtatttggcatatgaatgtggcaagcatgtccttgttattcttacagacatgagctcttatgctgatgctcttcgtgaggtgaaaaaaccgatataggcatttcttctgtttttttcaaggcttaatttagtggttaacgttgataattgcactaggtttctgctgcccgtgaagaagtacccggtaggcgtggatacccaggttacatgtacactgacttggccaccatatacgagagagctggacgaattgaggggagaaaaggttccatcactcagatcccgattttaactatgccaaacgatggtaacttcttcctagtcgtttctctggttgtaggtgtatatatatatatatatatatatgttttgtagtaatcttttgatgtctgagatttctaatatccatccttcttcgttgatcagatatcacacatcccacaccagatcttacaggatacatcacagaaggacaaatctacatcgacaggcaacttcacaatagataggtacaaatgttgcgcggaagataaaattattttcctcgagagagttgtgggctaaatacaccttgtgtttgtattccatagataaacccaccgatcaatgtccttccttctctatctcggctcatgaaggtaaagtaaagtcttgtagattttggactggaggaaggtatctctatttggtagagatcactcaggtgtgctgtgcagagtgccattggtgaggggatgactcgcagagaccactctgatgtttctaatcagctgtatgtgaactatgcaattggaaaggacgtacaagcaatgaaagccgtggttggagaagaagcactctcgtccgaggatctggtctctctatctctgtctttctaaatgccatgttaaataatgaataaactctaagcgtttctttgtcactcacactgacaataaaaacttggggatgcatgcatgcaacagctgtatctggagttcttggacaaattcgagaggaagtttgtggtacaaggagcttatgatacacgtaacatcttccagtcgttagacctggcctggacactcctcaggatcttctcccgtgagttgcttcaccgcataccggcaaaaaccctcgaccagttctatagccgagactccaccaattgatcgatcatcccatgcttcttctccaaattgcatctctttttgttttgctcctttgcgctttggtttgcacctctctgtcctttcccaataaaaggtgactgacccaatcgccggctattcttttgaacattcttgtatcctttatttatcaaataaactaaaattaaaagaaccttggagacttgagctgttgctgatcctcgaatactgcttcaattgcgatgatatatctatctaataataataataataattccagagataagtaattccaagaacatacataacatcgacatgcttattattaaactgatgatagtcaattgtaaagaggacaagataataagaaatgtaaattggtcgtcactgatgactatttgttcttctgaaaaaattgccttcaaaattttctgaatatttttaatttataatatgattttgaatcattatctaaatattttagtcgatttgaaatgttaaacacacattttcgttaattagataatattaggtaatatgtatgttttctaaaatttaaattacaatataaagtaaaagatttttttttttttgttactttatgtattatataattattcaaaacagttttaaaatcaaacaaatatgataagagaatcataattttaaatcttctaataataaatattattaatttattattaaatatagaatattccgtgtatgagtcggaaacaatttgaactgaccttttaaattttctatgaacaataaatacaaacggatggagcatccatagaatccgacagcattttaccccacccgccaaaaaattcttgttataaattcttaattgctctgttttaccatactcacgttttcattggctatctttgaccgccttctctacaagtgctataaaaaatttaacagcctcgtttaaacgtgattaccaatgagacggccataatcttaaaaatcactcaaaatctgccaaccattcatgaccttgatatcaaaatacattcaaatgtatagaaatacaaaattcaatagcacctagtaaatttaaaagtaaagctaaacattcatgaccactataattttggatcaaacaatgcaaacgcagcacatgaccgagtccgcgtcagaaaaaggggccaactgctccgtagccgccaagaatctcgcaggtgtggaactttcctcctttattcgatgaatctctttcttcattcttcttcttcgaattgtacgtttattgaaagacaagtatattttcttatttactatataaagtaatttcactttctcagatcccgattcctcttgatcatcgtcttcttctaccaaaattgttgcgcgacaatg

SEQ ID NO: 26102 - DNA, 380 bp, Unknown; identical to SEQ ID NO: 13116
  misc_feature (1)..( 380): 2750-1469P.txt file - cDNA_ID_2710547; gDNA_ID_2214599; Annot_ID_135533

SEQ ID NO: 26103 - DNA, 3003 bp, Unknown
  misc_feature (1)..( 3003): 2750-1469P.txt file - cDNA_ID_2710549; gDNA_ID_2214603; Annot_ID_135591
atcttttgtaattgcagcatgaacgtggaagagactacagtagagaaagatatgaagctgaaggcaatgtaacttcccggaacagaccttcaagcccatttcatccatcccaaagccgctctccaccgccacacgcaagggttagtggattcaatcattcattctctgatataacgcctttgttaatcattcattctctgatatattggctctacttagttgcagactcagagatacaacaacggaaaagatcatttcgaggggatgtacgaggcagatgccgatatcacaccgcgtaacagccctcccatgagtcctgttcatcaacacacaagctactctccaccaccgccgttctactcatccagtgacgacgaagacgacaacaattccacctatctctttccagaaattgccactggacgtcgttccaggggagtttcaggaagcagcacggttcgtttttttctctcgcgggtctctatttaccaaagtgtgaagaaaatgcttaaattcaaattgctttggtttgtgcagccggttcactacaagtatcagatcacatcggtagagacttacgagcaggagaggcaattcgagccgccggagctgccggacgagtcacagagcttcacgatgcaggagatcgccagaatgcgcggacttcaaagctacggaaaggaagagatacaattagcgatatccgagacttacgtctccgtcgccaattacaaggtacggatgagcatcgccgccacgctcgaagcgatcattgacaaacacggtgacatcgccgcctcgtcgaagttacaatctacctcaacgaggtcgttttatctcgaatccctagccgcagcagtaatggaactgaaatcaacggcgttgagagatctgacgaagacgcgagtggcggaaatcgcggcggtcgtgaaggacatggattcggtgaaaatcgatgtatcgtggctcaaaacagcggtgacggagctagcggaggcggtggagtactacgggaagtacgacacggcgaagattgtgagggaggagtgcgatagggaaatgacggcggggaaaaaagagatggaggagatgagggaggagctgcggcggagagagaaggaaacgaaggaatgtagagagagagtgacggagttggcgggacggctggggcagctggagatgaaggatgtgagagtgaagaagaatctggagctctatgagagcaaggtccttaaattcgacggtcattcggttctcgttgactgaacccgaccttttggaaatttaattaaaccggtttagtggagtaaaccgctttggaaaatgcttatccaagcataatcactcggagaagtctttgtttgttggaaaagagggagggagaaggttcatgctcattttttaaaagtcctcctatctattctaaacgttgtccatgtcaacgtgtgatagttgaattggtaagcataaaatcatccccaacaattatagtccgctgttatcatcgcgtttttgcgttagtttacggaaaaggtatagacgtttgatactgaggttttgtggacgggcctctagttgggtttgttcgtggcaactaggatgagatttcagctccttagagttgtggaaattacgtaaatttctaaatttggcatctcggaatcggtgtttcttcttttatttccgttatatacatatgtttttctcctttgctgttttgtcattgtctgtttttctgtacattttgttatttttttgctactagtactctttgtaacttcaatcgaaatttcgaaaattgtataaatatttcatattttaccaaataaaaaaataaaataaaaattagtatataattcaatatttgtgattctgactctggaaaaccattttgtggtcctctcttgaccgctttcattgaaaaacagttggtaaggtcacttttactactgctttgatttcgattactacctggtttttgtatttgggctgacagaagaaactgggccttcgaaagggcatatgttgtctattcctttctaccgcctatataattagggaaacgcgtcaaacgttcaacaaaagctaaattacgtgagtgatagtagttttttttttgttaaaaagatattcaattttttgttgttaaaaattcccccaagaatttaagaaatgataaaatataaaaataaatgtttttcaattaaactttgtcaactgagattcaaatagagcatttaaatataaccaaaaaaaaaaagaagaagaaaggaggaagcaaatgataatggagtaatgagaacacaatgaagttagagatctcctaaaatctttgattcttttcttctgcttagttagactgaaacctcttcgatccattctaactttgacaaatacataaaatactaaaagaaaagaaaaagaaatagccaattgacgaagtctcggctgaaactataaaatgactcatttttttattgcggtcaaagtcaacccatgttagaacccaataagatattattatatatacacctataagcttcattggctatctctcttatgtacagacaagatgagataaatcattcatctcatttcttcaactggctttgcttctttctttcttcttcctcaattataattttttcacaggtatcatcaatctctattctctcttgacctttttttttatctagcaaaagcttttaattagctgattatgagagtttttgcaatttatcaacatcacaatccgttattgattagtaagaaaaccagtggaagattgtcaagtctctctctttggagaagaaacataattaagcaaagagaaaacatgaatcttttattgtagtttccatatatagaaaccgttgactctcttcttgtgtgatgatatctacttgttttgctgggtcaatggatctgacgcttttttttttctttttggaatggtcaggtttgagatcttatcatagagttttgttttaagtttgtgagatg

SEQ ID NO: 26104 - DNA, 3003 bp, Unknown; identical to SEQ ID NO: 26103
  misc_feature (1)..( 3003): 2750-1469P.txt file - cDNA_ID_2710549; gDNA_ID_2214603; Annot_ID_187118

SEQ ID NO: 26105 - DNA, 3003 bp, Unknown
  misc_feature (1)..( 3003): 2750-1469P.txt file - cDNA_ID_2710569; gDNA_ID_2214603; Annot_ID_135599
gataatgctccgggtgaaactatgtataaccataaatccttataacatccccatataagtgcaggccctaagcttcttgctggattcatagatgctcccgaaattggccttgaaaataaaacattgttagcttatgttttaaccaaagtggtcgagaaaaacttgatttaacaaataactagtggaaaaacatattttgtctgcttatagttatgaatatggtcgaaatcatgaaataaccttataaagatagtatgaggtatttttttacaattgtagatatctttggttcacctgattaaaagggaacttcttagaagaggcaaaggcaatagaaacagcagggttgaaatgtgcaccggagacatgaccaattgagtagatcataaccgttacgactagtccccataccaaagctataccgggaagtgtcaccggtttaccgtacgtctcatttaccacgatggctgagcagccggcaaatatcatagagaatgtccccacgaactcgccaatcaactatagagtttagacaaaaaaaaaaaagtcaacttctatagggaaaacatgaaaacataaactttaataatttttatgaatggtaaaaataaaggatttaatttttgcaaacgtcaacgagtaaaaatattacgtgtttaaatttactgttatagaaacaaacttgtaccaaacggattcgaaatagatgtttgttcggtttgattactatacttcataaactggaaaatcaatcaccaataattagagccaaagtcaagattgagatcgcatatagcaacatcacacggaatataaaatcttgattcgacaaacaaatatttcaagaaaaaattaagaaaccatgtggcaacataaaagatgtgtctcaccttttgaacgaatgatacggacacaagaggaccagataaaaccgacgactgggaatcatcaattgatcgatcgttttcgatgtccgagacaacggtttgagtctgagtagtaatatcagagatctcagccattgatggaactatgatgactctttctccaaacatgtttatggtttgctcatctaaaacctcaaatggtcaactctactttgtattccttataagcaaataataaagttgactttttatattctataccacatgttgatcataaaagaactaacatttgatatttttaaacccccaaagaggagaaagatctagctagaattaaagaatagttaggttcatagttgacttctttatctttgtgtcacaaaaacaagacatggtttacattacttgaaaacgtgtagagcatttaacgataattatacttatatgtaatcagctttgattagagatgatacttcagaacacttgatttatgtataagatgttaagctaattaagatgaacaaaagataagcaaaatgtatatagttgtgttgttatgtgaatgagattaattaattaattaaagattgtggtagagaagctcataatgtttctttttagaggtactgtgtttgtattctctctctgttctgctcccaccatgtcttaacatgcacttccccaaactgttcccggctgttgattaaaccacaaaatcatagattcctgttagtcacggtatgattatcaactttcaaaatgtatatgattagccaatgcttagtttaagatgttttgttatacctgaatctgactcgacgtacatctgataattgtctgatagtaatgtaaacaccgggctagtcctcttcaatccactcagcttgcatttcactagcattgctcatggaaggtggatcatctctggaagaagttgtggttcttgctgcatccatcggtggtcctccatgataacttcctggtccatagttgctagagccgccataaaagtgatgcgggacagatcctggaggtctgaagttgtgtcttggagtccagtctttgctttctcttgctgaatccatctttgagtatgttgaatctctctgtgactgaaaaataaacttgtgttaccttctttggatcaaaggacaagattcacaaggttcttgtctgaagaaagaccaaaggatctaggatatatgtcttttacctgatcgtcggatcttgcaggcgtttggagagcttggcggttaaatctctgtacattgtaaagctcaacgatcttgtcatagttctcaccccaccgccgttgagcttgccacttattgtacatctctcggctttcaaaacaagacacaagtaatggttagtttttatctcatgttccagctttgaatgtcatgaagatatagagattgttttgagtagttaaaatacctgaagcggatgcgtttgagatcatttcctccagtgggaagagaagcgaatgtgatatgactattttccagaattatgcaagtcaacttcaccatctctaaaatcacctgcaatacaatccttacgtgtatcgatgacgtggcactcgataactctattagaaaacataagaatttgtgcaaaaaaaccttcaatgtaattttgtttttgcaagataaacctccatgtcaaataaatatagcataggtcaaaccacaatctgaaaaatctcctacaacataactcttccgtgtatcgatgacgtgacagtcggtaactcatttagagattttataagtctatcgaatatattattttattgcatataatttaattgagttattgatttaagttttaaataaactataagagaagcgttaggtcatcgggggtttctcctgatgtcatgattcaataaataaggtatagatctcaatctaggtgataacatggttaggtttgtttacttcaaaattctcggacatacgaaactctatctgaaagaaatggtgcttgacgaacataaagcattcactttggaactacgtaagactttggacggtggtcaagaacggcagcttgtagggggaagctggaagttgaactcttgtataagtcattcacgaaggaagaaatg

SEQ ID NO: 26106 - DNA, 3003 bp, Unknown
  misc_feature (1)..( 3003): 2750-1469P.txt file - cDNA_ID_2710584; gDNA_ID_2214600; Annot_ID_135541
aggctgagagtcttctatcctctcaggagacgagttgaggttgattctgccactttgactcgaagaaccttcttgatcaaagctaaagaccacacctttttcctttgacagatcatggtgaacaattggaagagattccaatcgcagaactgttttttgagtaaaagggtccttttctgcttcactaactgattgaataactctatccactcttacagatcgttcttcagcatttgcgacccgaaggtattgacgcataccttctaacacttccggagcaattctcggccttcccgtgtttggatccactcccacctggctttctttcaacacaccaaataaagggtctgattccttcagaatcggaggagtagtagcttttggaatgataatgcctttccttctggctgtagctaggtcctgtctagcttttactaggatagggcaaacatctttttcgtgcgtaagccgttgacactcataacacctcttctgaatcctctcataatgaaagttaacagtcgctgaccctccatttctgaaattcacaacttttgatctccttaagggtcttgagacatcaaacagcaccttcactctaacgaactcccgaatttgtttcaattctgggttaaagacgacttctttaacttcaccaatgagatcacccagcttagtgatcgccttggccgtgttgtaattgactgggatattccaaatttgaacccacagtagcatgtaacgaagatagtcatccggaggattttcataccacctatctaccacgattgaccaatcattgaaggtatgaactcctttcgctagcacttcctctaaatcatgttcagagtcgaaaatgaactggaatctctcattattgagagctattcctttgacctttccttctttctgccacttccttggcatatttcttaagagattcttcatcggttgacaagccgggttcaggacccttccaatgagactgaatttgtttctctcactagacagatactcaggaagatctggcatttcaaacggttcttccttttcttccaacgacatctccatcaatgccctatccatggcggatgacatcttcaagctaagaggaaaacagacaccgtagaactaagactatcgagctgaactaactccaccaacttcttcagaaaaaacagagatatggaacccagatctgagaaaacgaaagcagtagagcatggctgagaggatatgataatgaacacgaagggttagaatagttaatttcggctgaaaagaaagatggtttccggtcaaaagctttattttaaacctagtgaaagacactaaaagagaaagagggttctaagcccaaaagatagatttctaaaaaataatcacttgttaggattggatacttcgacgtcaactgctaacgacatgatatacagttattgaaaattggtaattatgaagttaaagaagtctaaacatctcaattgaaaaatctcaaattattcttacggtgacagttgtctttagtatgaagttattaccatagctagagcctaaaggacagcaccaagaccaccactaagacaagtgacgtcctgcaaaatctaacacttaaataaaattgtcagagaagattatttagcaccaaacttttattctattaatttccaaaagaaaaaaaaaaagtcatatctttccaaattttcattacataactaacattttgtcacatgaaatctgtacgtctctgaatcttctcttcttctccctcatccattgcttatgtgcttcttcttctgattaccaaattttcattcctcttcttctttctgataaaaaagtttgcattttttttctttgttgtgataatcgaaaaagagactaaaacctaagaatcgtgcagaggagaggataccacaccacacccagaaattgaaactaccaaaaagtttatgaatttgatttcaatttcaactttttatgagacccatttgattctttagggattttgaaggtaccatttgtctcaatcttataaaaaatttcacctttttttttttttttttgttaccactatgtgtctttaatctgtgttcattgttcagatcgttgtgaaatttggttcgtgattcgttgcattgcaatagctagacggatcgggattgacccactttaggtttctcatctcaaagattgcgaaattttctaatttggcatcggattgtttggatttgattgcttatgtaagtaacttgatttggttggtaacttggtattgcaatcagaaaatgtgctattcagtgttcctttgtgattaggtaattaagtatattagaaccgcatggtctttgttctcaatgctagtttagttgttttggtttcatgaagtagaagaagttttgacaatatttactctctgttgtgttaaaaattagcatagctttatgtaacatgtaccttgttttctctgtactttcatcttttgaatggattctatgttaaagaatccattgatgaagtttacaagtggtagtttgttacttgcttatatgttagttattacactagtttgacaaggttttggtacttacttgctcaattgctacactcacactgtgaaattcatgatttatacttatttcagttatgcaagaaacttttgattacataggaatgatgtttttgatatatgatagataatttgacatttattagtgaaagtttctgatcttgcctttttgtggtatcaattggaaacataatgcagaagctatagttggagcatgagtgtagcctgaagctagattgctggctggtatgtggtgatcgtaatggtaaatagggtgcgcttatttcagttttttaattttccctcattcatggatttcttatgcatatttattttcttgtttgtttctgtttgtgtgactctaggtctcctcaaagttcttttaacttttgttctatttactggagagtccttgtgttctagtttaaggtatg

SEQ ID NO: 26107 - DNA, 3003 bp, Unknown
  misc_feature (1)..( 3003): 2750-1469P.txt file - cDNA_ID_2710584; gDNA_ID_2214600; Annot_ID_187024
gtcttctatcctctcaggagacgagttgaggttgattctgccactttgactcgaagaaccttcttgatcaaagctaaagaccacacctttttcctttgacagatcatggtgaacaattggaagagattccaatcgcagaactgttttttgagtaaaagggtccttttctgcttcactaactgattgaataactctatccactcttacagatcgttcttcagcatttgcgacccgaaggtattgacgcataccttctaacacttccggagcaattctcggccttcccgtgtttggatccactcccacctggctttctttcaacacaccaaataaagggtctgattccttcagaatcggaggagtagtagcttttggaatgataatgcctttccttctggctgtagctaggtcctgtctagcttttactaggatagggcaaacatctttttcgtgcgtaagccgttgacactcataacacctcttctgaatcctctcataatgaaagttaacagtcgctgaccctccatttctgaaattcacaacttttgatctccttaagggtcttgagacatcaaacagcaccttcactctaacgaactcccgaatttgtttcaattctgggttaaagacgacttctttaacttcaccaatgagatcacccagcttagtgatcgccttggccgtgttgtaattgactgggatattccaaatttgaacccacagtagcatgtaacgaagatagtcatccggaggattttcataccacctatctaccacgattgaccaatcattgaaggtatgaactcctttcgctagcacttcctctaaatcatgttcagagtcgaaaatgaactggaatctctcattattgagagctattcctttgacctttccttctttctgccacttccttggcatatttcttaagagattcttcatcggttgacaagccgggttcaggacccttccaatgagactgaatttgtttctctcactagacagatactcaggaagatctggcatttcaaacggttcttccttttcttccaacgacatctccatcaatgccctatccatggcggatgacatcttcaagctaagaggaaaacagacaccgtagaactaagactatcgagctgaactaactccaccaacttcttcagaaaaaacagagatatggaacccagatctgagaaaacgaaagcagtagagcatggctgagaggatatgataatgaacacgaagggttagaatagttaatttcggctgaaaagaaagatggtttccggtcaaaagctttattttaaacctagtgaaagacactaaaagagaaagagggttctaagcccaaaagatagatttctaaaaaataatcacttgttaggattggatacttcgacgtcaactgctaacgacatgatatacagttattgaaaattggtaattatgaagttaaagaagtctaaacatctcaattgaaaaatctcaaattattcttacggtgacagttgtctttagtatgaagttattaccatagctagagcctaaaggacagcaccaagaccaccactaagacaagtgacgtcctgcaaaatctaacacttaaataaaattgtcagagaagattatttagcaccaaacttttattctattaatttccaaaagaaaaaaaaaaagtcatatctttccaaattttcattacataactaacattttgtcacatgaaatctgtacgtctctgaatcttctcttcttctccctcatccattgcttatgtgcttcttcttctgattaccaaattttcattcctcttcttctttctgataaaaaagtttgcattttttttctttgttgtgataatcgaaaaagagactaaaacctaagaatcgtgcagaggagaggataccacaccacacccagaaattgaaactaccaaaaagtttatgaatttgatttcaatttcaactttttatgagacccatttgattctttagggattttgaaggtaccatttgtctcaatcttataaaaaatttcacctttttttttttttttttgttaccactatgtgtctttaatctgtgttcattgttcagatcgttgtgaaatttggttcgtgattcgttgcattgcaatagctagacggatcgggattgacccactttaggtttctcatctcaaagattgcgaaattttctaatttggcatcggattgtttggatttgattgcttatgtaagtaacttgatttggttggtaacttggtattgcaatcagaaaatgtgctattcagtgttcctttgtgattaggtaattaagtatattagaaccgcatggtctttgttctcaatgctagtttagttgttttggtttcatgaagtagaagaagttttgacaatatttactctctgttgtgttaaaaattagcatagctttatgtaacatgtaccttgttttctctgtactttcatcttttgaatggattctatgttaaagaatccattgatgaagtttacaagtggtagtttgttacttgcttatatgttagttattacactagtttgacaaggttttggtacttacttgctcaattgctacactcacactgtgaaattcatgatttatacttatttcagttatgcaagaaacttttgattacataggaatgatgtttttgatatatgatagataatttgacatttattagtgaaagtttctgatcttgcctttttgtggtatcaattggaaacataatgcagaagctatagttggagcatgagtgtagcctgaagctagattgctggctggtatgtggtgatcgtaatggtaaatagggtgcgcttatttcagttttttaattttccctcattcatggatttcttatgcatatttattttcttgtttgtttctgtttgtgtgactctaggtctcctcaaagttcttttaacttttgttctatttactggagagtccttgtgttctagtttaaggtatgaatccaatg

SEQ ID NO: 26108 - DNA, 3003 bp, Unknown
  misc_feature (1)..( 3003): 2750-1469P.txt file - cDNA_ID_2710600; gDNA_ID_2214600; Annot_ID_135537
cagagaagtctctgagagaattcatattttgttcttccccttcatggctcaaggccacatgattccaattttggacatggccaagcttttctcgaggagaggagccaagtcaacccttctcacaaccccaatcaacgctaagatcttcgagaaacctattgaagcattcaaaaatcaaaaccctgatctcgaaatcggaatcaagatcttcaatttcccttgtgtagagcttggattgcctgaaggatgcgagaacgctgactttatcaactcataccaaaaatctgactcaggtgacttgttcttgaagtttcttttctctaccaagtatatgaaacaacagttggagagtttcattgaaacaaccaaaccaagtgctcttgttgccgatatgttcttcccttgggcgacagaatctgctgagaagctcggtgtaccaagacttgtgttccacggtacatctttcttttctttgtgttgttcgtataacatgaggattcataagccacacaagaaagtcgctacgagttctactccttttgtaatccctggtctcccaggagacatagttattacagaagaccaagccaatgttgccaaagaagaaacgccaatgggaaagtttatgaaagaggttagggaatcagagaccaatagctttggtgtattggttaatagcttctacgagctggaatcagcttatgctgatttttatcgtagttttgtggcgaaaagagcttggcatatcggtccgctttcgctatctaacagagagttaggagagaaagccagaagagggaaaaaggctaacattgatgagcaagaatgcctaaaatggctggactctaagacacctggttcagtagtttacttgtcctttgggagcggaactaatttcaccaacgaccagctgttagagatcgcttttggtcttgaaggttctggacaaagtttcatctgggtggttaggaaaaatgaaaaccaaggtaaattgtttctccccagccattattaaccaacatagtaatgttaatatttgtgtatatattcgtattgccaaatatgctctgataccatggcaagtaatagattggctcatgtattttatttgtgatcatgtagaattttcttaacagttatgacttggtgttggtatggttgggacaggtgacaatgaagagtggttgcctgaagggtttaaagagaggacaacagggaaagggctaataatacctggatgggcgccgcaagtgctgatacttgaccataaagcaattggaggatttgtgactcattgcggatggaactcggctatagagggcattgccgcggggctgcctatggtaacatggccaatgggggcagaacagttctacaatgagaagctattgacaaaagtgttgagaataggagtgaacgttggagctaccgagttggtgaaaaaaggaaagttgattagtagagcacaagtggagaaggcagtaagggaagtgattggtggtgagaaggcagaggaaaggcggctatgggctaagaagctgggcgagatggctaaagccgctgtggaagaaggagggtcctcttataatgatgtgaacaagtttatggaagagctgaatggtagaaagtagaggaagagaatatgtttaatgttctgagatagattattgactttgtgttcctctttggagttgttctttatgtcatcttagcttttgctactgtttagtaagagaaagtccattgtgtgtttctatataataaagaatagacctgaagataggcattttcaagtttctgctttaagataccaaatcttcgttgtgcatactttttacttcttgtgatcttactatgtgatttatatggcatggattatataggtcggattttctttgaattttaagtatataaatttgaagtaacaaagtatgtgtagtaatgatgcgatgaaaaattggtaatgaatctagggcctaaactagtatagtttcaggtttattccaccaaactcttagcgtatgtcacttggatccaccaaacttgatccaagcgttttacaaaattgtataccgagctaaaaataaaacattctttgttgtttccacaaaccttattttctaacatagcctacatgtctttctccttaagcactcattcttttggcctctcgactctttgaaaatctctcacattaagacttaatgttacccaaacctaattaaactactcgagaaccccatgttcgtgtccatgagaattctcactcaagtcttccctttagccacttacaaaactacttgtagaactatggctatgaatgatgacataactcgcacccaaaaccgcatcgtaacagtgttgtaatagtatcaaaatctttacatatacatatatatctatgtatttttgttactatttaaaccgcaccgcacttctcccacaccacaaaacgcagtcactattcggacaatatgttttaaaaacgctattttgccattccccataggctcatggctttaaatgcaaagccttcgaaatttatggctcatagcttgcacaatactcatcgctaagtgagaagtcaaagtttgcttctacgagaaacagaacacatgtgctgactcgattcccggtttgtagccaaccaaagatgacgaaccagaatacggcaacacaaaagtaaaatatgacgtatgcaaacacgtaagtgatcttcgttaattaattttttatctgatcttcctccactgtcttcttttaagtgcacacgtgcgtgtatatatctcgatatggccgaaactggaagaaacaattcagacaaagtcccaagctaagaaaagagactctctttgttttgtctggcagaatattttccattcttgttctgttttcttttcatttttcttcttaatcctaaaaccaaacatgaacagagagcaaattcatattttgttcttccccttcatggctcatggccacatgattccactcttagacatg

SEQ ID NO: 26109 - DNA, 3003 bp, Unknown
  misc_feature (1)..( 3003): 2750-1469P.txt file - cDNA_ID_2710604; gDNA_ID_2214600; Annot_ID_135536
gggagagtctcacgttcaaatccaaaacctcaagttaaagaacatatatggaacatcgaagaacaaagtagcaatgaatctgcaatgtagcaaaatctttccatgcaaaaatgtggagctaattgacattaatataaaacagaatggagtcaaagatggttcttccacttcggtgtgcgagaatgttgatggttttgctcgcggtaaaatgtttcctcaacattgtctaaattaattcgacggtccatcaaaacaatgacgatattttgtatatgttatttttatttactaaataattgcttaagtgtatatatggcttatgttttttttttatagccaaaaattccaaaccatatcgtaaatatgtatatatatgctttttgataagtttacatcaatattctacaataaattgcattttctgaatttattagtgtataaacatggattaacaattggatataaagagctaagaaatccaatcccattggtgtacactccgctttgtgttgcattttttggaaaaccgttttttgtgaaaaaaaattatatttatacaaaaaagtagaaataagtataatgcattttttttctttttcttaaatagtctttgtttaaatataatttggcttcatctgttccatataacttgaaccgagttcttgaagtaaaagaactgatttgtgattcttctggtgatcagaacaacaactgaacaaactgtcttattgttttcaaagaaaaaaaatatactaaaaaaggcagtgagttcaatgtaatataatgtggtagcacacactaataaccagaaaaaagattcttgaatgtggtagtgatcgttcagagaagagagaaaagtatattagtttttttttacttgtcaccaattcacaatgattaaagctccagactaaccgattctgtgattttatcattcctttattcaatcatgacaatcattagatcattacacatcttatacactttcttatattcatcacattaaaacacctctactggattcaaaggtacttacatcttctttgtagattatggagagaaagacgattgtcctcgtcaatttctctgtatactgtagggataaacatgcaaacataaaaagtcatggctctaccaaaatcgtaagctttagcttattttctttcaaacataaacagttgctaaatcagctaaacttagatgtcacttgcacatgatgtcagtgaaaagatggaggtgaatccatgcatagatgcaccggcttcctctgatacaacgatagctttcaggaattgccatcacatcttcattcttttaatcaatgttctaacactctgctcgagtttctcggcaagccataataaaaatagctgcagtctcagacctctcatctagccatatatatatatatatatatataatttattaattataatactaatgagaccatatatatataaaaaattatgactttattattttgtcaatatttttttttaaaaatgttatagtgggtcgtcccaagtgggcttaagcctaattcatatacaaatccaccgttacaaaatagaacgaaattaggtcaaattttatgatgtactgattcattttttttttttggtcgtttataagtgttcatttttagttataggctccgattggtaaccacttttgaggtaaatgaatgagtaggaaagtcgtgttcctctttgttcttcagtttttttaccaattgcaaggtatttttgttccattttcagatatgtgggtcctacatttttcctcatcattcctaaaaaaaaaatgataaaacaaaattctttcaccccaaaattgtaaaagaaccaagaggaacaaaaaaataaaattcgtttttatttattaaataaatttaaaatagattttatgataatatttatatttctatatataatattttccatatctttagtatatattgatatataaatttttttttatcaagctttcaatttaatgaatgttataaatttattttaaattagtataaataaatgttttaaagtgaaacttattttaaatttgtaatataatttaattttttattataaaataaataaatgttttgaagagaaatttataatataatttattttaaatttatgcagaactttaattttaaatgaaattaataaacaaaattcaaataaatgattttttactaattattatgttaaatactattaattcacctttttgattactattacaataatcattttgttcaattcctatgttactcttggttcctacttattgttattttcctttttttcttattttcttttattctctttcattcatattcctattgttctttttgttatcaccaatcagagccagttcaaattaattttgtcaaaaccttagaattcacaaaaaaaaattaccaatcagagagaaccgttttgatactttgatttatcaaaatagtagtaagtgggattaattactctattttatttattgtagaaatgctaaagacatatctattaagaaagaaaaaaatcaaggcttagtcgtcatcactaaagtaagaagtcaaagtttggttctacgagacacatcacatatatattcgattcccaatttatagccaaccaaagaagactcggtcctaaacgaaccagaataaggcaacacaaaaagtactaaaacatgacgtgagcaaagacgttagattcgcctccattaattcatctgatcttcttccactgtcttcttcaacgtgcacacgtgtctgtgtatatatatcttgaatgtctgaatctggaagaacaattcaagaccgcgtacaaaactaaatccaatccagacaagaaaccgtcgttgttttgtctgatcacataacacatttcagtttatagatctgcagaatttgttttttgtatttttgttctgttttcttttgattttcttcttcatcctgtaaaacctagaattttgtttcttcaaccaaaaatg

SEQ ID NO: 26110 - DNA, 3003 bp, Unknown; identical to SEQ ID NO: 26109
  misc_feature (1)..( 3003): 2750-1469P.txt file - cDNA_ID_2710604; gDNA_ID_2214600; Annot_ID_187021

SEQ ID NO: 26111 - DNA, 3003 bp, Unknown
  misc_feature (1)..( 3003): 2750-1469P.txt file - cDNA_ID_2710639; gDNA_ID_2214671; Annot_ID_136613
gtctttatttgaagaccaagagtcgacgatcgtcttcaaaccgatcgcttatggaatcctctcgaaggagtttccggttatcatccatgatgttaatctactctcttattactttcatgtttccccttcctttatttttctattttaaactttcaacaagtgagttatgtggcaaagcttcaagttgttataatcgcaagttaacttaatatcagttgtttgacaaaaaaaaaactgtaaaacgataaaaacttggcatcggtaaaactttatctccttttaaaatgtcccagcgaagcaaactaaacaaaatttgctttaaaatctacttaaacattataacatagttctcaattcttaaatatgctaaagtctaaagactatgtatcgtaagctcacaacaatgtgtatgaaatacactagcaaatcacgatctagattaccaaactgtggaagaaaaaattccacactcacaaaaattaacaaaatttttaaaaacaaattccacactcattcatgaacatatatagttctaaactaatcgccagtgactagtaattgcgaccagcgagtgcgatcaacgaattgttctgttattcgtttgacagttgctactttgttagtttggtagtcactatgatttggtcgctccatccaacgactggtcgtttgatagttgttgatcgaagtcacagtcattagtctctaacgtgcctttaatataaggaatcttaaacttaataataaagaacacaaaactggactaatacaagatgccctaaggagcaacattaattgtttcgttaaatccataatttaatttatagtacagtttgttacttataaaaaacttacacgtattagttttgttatagtacaatttattaacttaatttgattcaaagtttccagtatttcccacaattcaatgtcatatggtcaaacatttcagcgacttgggtcaacctcttttccatgttccaagacatgtgtctcgactctcagcgatttcaagatcattgtctcaatcttgttgctattttattttacgtatataggggtataaattatatatgattaagcttttcttttaaatttatgtacatcttttatagagttgtattttaaaacgagcctttatcaagttttagatttgaattagtggttatttatccattggtcacacgagggtgatgattgtgattagaaatgtcatgatggaataatccaacctaatccaatcctagctagtagatcttgctgattggtctcatacagttttataaaatgcaagctcaacgtttgtagtcatgcaagccagttcaattagtgacaagtaacaagacagattttgcagattttacttagtacggtctagttggagcatatctgatcttgatttgttttcaaaacataattgtgagctggtcttgacaacctagttttttttttcttaatatatatagctaaagtatattttgaaccgaaatccaaactaatctcttagacctgtaaaacattgattcatattttgtcatttaaagccttacatgtcaagaaagaactgtaaacggtatttgtaaaaagagtaaaactcgatcattggccttgacccataaaattcaccttaaacaaaccgttggaccacacgttcttagtaaattgactagtacatggagttgaaaccttttaagacgtgataagatcaatgatgccattagcaaatgtgttttgtaacaaactagaaagtgatggtctcatcttcacccattttggtagcacttttaagtaagtaacttaggcgtgtgaatgtccataaagtgagagaaaagagccaagggtttttggcaagttttggcaaatatgatgtgatagtcccaacaactttgtttatacctacctactcgcaaagagaagcacgcataaataatataaccttatgtcaataacttgaacttaaatctttgaaatatttggtctattaaagtcaagaaaattttctatatatataaaaaggaacatcaactattaagctatttcaagggaaaaaaaaaatttatataaaaaaaaaacactttataaaaaatacacaaatttaccaacgtgatgttggtctagtggtaaatctccctggaagtgctgggttcgagacatgttgggaagaaactattctccaaaaaatatgaatttaacctggtatgcatcccacttctaagagatgtaagatttttgggtttgaatttccagatattcaaataaaaaataaaataaaaaacacaaaattaggactcatagttgtgcttgcggatgttaacacaatttgcttcgacaagatatatacacaaattaggtttggttaattcactatccttatgatattcatctagcatctgatcaataggctgtgatcatctcagattaaacatagtataaccgatcgacttctaaaacatcaagacaacttacataaatagtaaaggatttctaacttctaagagattattctatattggttctctctaaaatcttgattaagatgataatttatgggaaacttttcacaaaatgttaatggaaaataatggtagataaagaacgtgggaaataagagaagagagacaaaaaaagacagaaaggcaaagactcgacaaattgggtttgatgaagtgtgatgccaaacttgtgtttgtcccaagacaaacaaccccgagaacgagcctcaatggcgtgaaccccttttctataccttgacataataaattcatatatttttaataaatagtatcttcaaccttttttgaaactctcacttttgtgtttcgtgcacttatctcacatagtcacattaagatattatatacaaatataataggtatatagatagatagatacatatatatgtgttagctccttttagttgatataaaagaagagaagaagaagaaaaagaaagatagcacaaaaaagcttctcatatagctaaaaatcactttgaagaatatg

SEQ ID NO: 26112 - DNA, 3003 bp, Unknown; identical to SEQ ID NO: 26111
  misc_feature (1)..( 3003): 2750-1469P.txt file - cDNA_ID_2710639; gDNA_ID_2214671; Annot_ID_189116

SEQ ID NO: 26113 - DNA, 1307 bp, Unknown; identical to SEQ ID NO: 13918
  misc_feature (1)..( 1307): 2750-1469P.txt file - cDNA_ID_2710647; gDNA_ID_2214671; Annot_ID_136611

SEQ ID NO: 26114 - DNA, 1221 bp, Unknown; identical to SEQ ID NO: 13925
  misc_feature (1)..( 1221): 2750-1469P.txt file - cDNA_ID_2710651; gDNA_ID_2214672; Annot_ID_136619

SEQ ID NO: 26115 - DNA, 1221 bp, Unknown; identical to SEQ ID NO: 13925
  misc_feature (1)..( 1221): 2750-1469P.txt file - cDNA_ID_2710651; gDNA_ID_2214672; Annot_ID_189126

SEQ ID NO: 26116 - DNA, 3000 bp, Unknown; identical to SEQ ID NO: 13936
  misc_feature (1)..( 3000): 2750-1469P.txt file - cDNA_ID_2710655; gDNA_ID_2214673; Annot_ID_136629

SEQ ID NO: 26117 - DNA, 1251 bp, Unknown; identical to SEQ ID NO: 13941
  misc_feature (1)..( 1251): 2750-1469P.txt file - cDNA_ID_2710687; gDNA_ID_2214675; Annot_ID_136634

SEQ ID NO: 26118 - DNA, 3000 bp, Unknown
  misc_feature (1)..( 3000): 2750-1469P.txt file - cDNA_ID_2710691; gDNA_ID_2214676; Annot_ID_136656
tcgacgaattcattgtccagttgtatatgtgagtgaataaggcatatgtttatctattagttttatccttttcctctttgaatcctattatagaaatccaaagttggtctgtgtctacacgatttcaatgatgacatataggggcatgcttgcttctccacatttagttattccatgcatatattatacacgatgtgatgtatttttgaagatattccatgcatcgttcaagttataaataatatatatatatgactgatcgagaaaacaaaaaatcgtttgtaatatgttagcttaacatagccatgacttaatctactgtttagtaaatatgttaagctttaaaattttcatagtagaatacttgtggttgtacttgcctagtagcaaacacgatgttttaaacgccaaaattctatgtaccgtacaaggcatagttcacagtatatttctctacatatattttaagatcttttgttgtgtcgattttggttatagaacatgtcaaaactcatatttgtggctaagcctataggttcaattacttatatgttggagtgcgaatatgttaactacacagaatttgttaaaggagatagcttttatgtacatcttagggacctagtttagaattcattcactacaaaaggccgcaaattgctataggacattcactattcttctctagaattacaatgaatgttattgaaatagtaacaacctcccacaaccaaactaccaatcttgcatcatttttggtggagcgacgccacaccttgtgtacatctctcgagaatacatttaagcttgtaagtcttcatgaaacagttttttgaaatttataaaaattgctcaaccctaaaccttacaattgacaattttcttattccacaccaattggaatttcctattctactaaaaataaatattgacaaatttcttttttgtttatggacaagaaaactttgtcttcacattctcatcttgaatatactattcaagatgtatatccaactcaacagacgcatcttctcttgtctaaatcggccctaaacttctgaagaaaccaaatttagattagaaatttgtctacgaatgaattatcaaattatagaaaagaacatacgaatgatttcaatcatctactacaattttagtattaattaatcataaaataatcactaaaattacttactttagatatatgtcgctgagtgccttaaaattgagaagaaaccaacaaagaaaataatttataaaatttagttaacgaatgaaaaaagtaggtcaatgtactcaatgatgcctcttctttccgtcggttattatttttgtcttaggactgagacatattttttatgagcttttctgtttaattgttttgggctgaaatattattttcgttttaattgagttgggttggacattaggatagggcaattcattttctattctaatggcccaaaatatataatcagtaaatgaattcaatgtgtaattttgtttttcctgaaaaagaatgtcggacacgtgcccaaccccctctagacgtgggtccgcccctacttgcaacttaacaacttttaatgctcataatgtaatcagtaaacattggtaaatttaaacaggaaaaatatactaaaaagaatccatatattttttattggacgtttagtacgccaaatattttagttggaaaaaatatcccatttaaaatatatataattaaaaaaattcatctttgaattatggatagatttgagcctacgacttaatagccattaacaggcattacaaaatcactgaacgatgttaaatgtttacttcatgtgttgatatatatatatatatatatatatatataatctttattcaaaatttacaaatgtattagcgttgtctggtggtaataaatggattatttaaaccttttaatcaccatctatttgttacaaagtttattttaatctttttaatcactactacttctaacttttggttctatttttgctctttcaaacaaaaaaattagttttaaccgtaaaaagttaaaaacatatatctttttccgaccaaacaattttttatttttttttgaatatttgaaggttctgggacaaagcccgtaatcctaccagacctgaaatcataacatataatattagtttcgttccaaacgtcactcgaaccaacgatatctaaactttgcatcgaatattaattgagctaataacacttggtcaaacaactttataaaaaccattaaaccagcaatgtaaccgaaatgacggtaaaatagtcaaacaactcgtgcaactttgcgacatttggataccaaaccccaagatttagtccttttgaattcaagccattttttcaataacaattcttcaaaataccacacttttaaattttgttgtcaggaatactactattaatttaatgttccaaaaatactatcaaaatattttgtttttcaaaaatatcacaacatcaaaaattgatgttcaaagattcaaaatattgtttttaggtttgggttacctattttagatttagagtattttttttaagggttaaaattttgtgtttatagtttaagggccttagttttgaatactgaaagtttaatttagttttgtggtatctttggaaaactaaaatgtaattgatatttttataattattaaactctctaaatattaaactaatagtggtaattttaaaaaccaaaatttaaatccacgatctctctgtatttttaaaaattattgtcatttttaatttatatcttcttaattgattaattccaatcaaggtaccaagtctattgcctttgtttgttcctcttcatgacgccaaactctctgtatataaattgatttatatctacttaattgattaattccaatcaaggtaccaagtcgattcttcttctcttatcatcacaaagtcatctcctttcttatttcttgatctagctagcgacaattgaaaatg

SEQ ID NO: 26119 - DNA, 3000 bp, Unknown; identical to SEQ ID NO: 26118
  misc_feature (1)..( 3000): 2750-1469P.txt file - cDNA_ID_2710691; gDNA_ID_2214676; Annot_ID_189199

SEQ ID NO: 26120 - DNA, 3003 bp, Unknown
  misc_feature (1)..( 3003): 2750-1469P.txt file - cDNA_ID_2710703; gDNA_ID_2214677; Annot_ID_136665
gcacttgcaagtaaatgtgttttacacttcactaaagcttcccttaccactagaccacaaatgattgggcgtgagtcatgtttctgaaacctatatcatgtcttgattgtacaaataacgcatgattaagctgtagattctgaaaatagaatatattgaagctttccacagttagggccggctcattgggggtgaaaggggagcaatatttctggatctaaattattttgggtaaatttaaaggtccaatttttttagtatgaaaaagtgtcattttgaaagatttataagaattttttagcatgaaaataggtccaaatatttttttagtatgaagaaaggccaatttaaaagagttttaagatttattagcataaaaagggcacaattttttcttttagtatgaaaaagaccaatgtttaagatttgtacatggactctgaattcattgagctgccatagtgagtaaaatttggaaacaaaactaaaaaaacataacaaaatatctcgttgaattcaatacaaaaagcatatacaaacacaacaatgtaacaatttcaaaatatttgctcttaagaaataaaaatcttcaaccttgaagagcatatgttagaaccaagctccttctaccaaaactatataaaacaatcgaaatagagaagcatatgtaccaacaatgtggctagcgggtaactactcgtcaatacattaccaatataaaaacaaagtctgtcagaaacacactatattctggttagtatctaacaaactttgatgatgttagaaaatcaaatgatagactccatattacaaagggactacactgttattatggctattcttctttcagaggcccatactatgcaatgaaccatgtgacatattctcttcattcccatacatggctacttaaatgttttaccaatcagaaatttgtcgttctaatcacgtaataacctttattagtattcacccgtttttttaaaactccaacattcgcattctcatccgctgcgtttaagtctgtcgagcctataaccccctaaaaatgccataatcttcttaccaatcacaattgatatcatcattttgaacatttcaaaattctcccgttgggcttagaccttaattaatgggtctaaagtagaccacatatctaactatgagttgttgttgggctttggaaaactacacacgtgtgagacaatatctaccgcacgtgtcagtgcaaggcgccaaagccaccattatccttccgttatcgtctatcttctccaccttcccggaatccaattcaccaattcctaagcattcttcagaaatccgagctgctttttgccacatctattcgcttcgaatctcttttcaccagctcaaaaactgtcgctttcaattccgctcgtttcgtcccaccgctccgtgtattgctgaacttcttcatagcaactcaataccatggatgttactgaagttccatggcgtcgtcttcctcaattttccgtttcttcacgcgcctcgtggctcgtttcttctgggtttccgctttcttcgtaagttctttcattgaggcattttatcatacactttgtctgtgggattctaattcctgttcttatcttctttcgatttttgaatctattgtggaagtgggtttcttaggttctgaacgggattgaaacatttgtttgtactcagtttcttgagttcatatctcacagtgctctcccctgaaactcattttatagaccagggaaaaatatatgcatgaatccaaaggaaatgatactttggactaacttggaatctctgttgttcaacagatatatgttctctcatgttgagcgtggaaagacgtttaggcttaccttgtgctttggggtctctcgtttacgtccaaggtctgctattgtaagtgcacaacaaggtaattgggagtacaaaacttaaaagttttcagagaatatcatggtttaactttcctgtggtgttctcagtttgtcttttcatggaatttcagttgagtcatgcctcaacttgtgaagtttctttgtttgcattttcagccactgagatttttgttatctgtattctcagaacagccacctagtcgtctcaaaggattatgcgaggtcgtttggattgtggaagctgatctggcagccaatgaacatctctacgttactggagatccttctacattaggtagctgggagccagactgcgcaatctcaatgtatcctacggaaaatgataatgaatgggaagctaaagtcaaggtaatctattcttttgtttcacttaagccgtagcgaacataagtagagatgtatcttaatttacataaaacgtttgaacgtttagtcgtagtaacaaaaggaaccaacctcaattcttgaaagtgagttcagatgtcgtgtttgcttttaacttaatatgcttggcagattgcttctggtgtaaatttcaggtataattatctgttaaaagctggatatggatcttcatcggatgtcatctggagaccagggccacaattttcgttatcagttccttcctctgtcaatcaagacagaaaaataattataagggattcatggatgagtatgagtatttcctcaaaatcacaagaatcctacggatgggggtcttggattgatgatgcttacctttttccaaactgtgttaccccagctcaaagcgaaggtaaaatctcggtggttcctccttgttcagtctcttttcatcctttgcaaaatgttttaaaacttaaatgcttccagtggtttggcagatgaatgcacttccgccgatagtgctatagaagtcccgagaacacatctgaatgataagcaagtaggagctgaatctttcttatgtgatgagcttgcagccttttcgtcagagaactcaaacttaagtgcgttattttctgacaactatcagcctatcgaggaaccgtggttgattcaagaatctattaccttacaacatgaaaggaatatg

SEQ ID NO: 26121 - DNA, 3003 bp, Unknown
  misc_feature (1)..( 3003): 2750-1469P.txt file - cDNA_ID_2710725; gDNA_ID_2214682; Annot_ID_136695
caatttgtagtttaacaccttatcggttgctatgctataaaaattttcttcaaatttggaagcgatgtcgttaatcttatattcttcatgtgcatgaaacttttccttgaacttttcaactctacacatacatgagaacaaaatatcagtgactatgaagaatttggttataactgatattcaagaggaagtgataccattttaattgcactaaaaatacaaaacagagaaaataatccgtagttaatattcgaacttacgataatcgtttagcgaacaaacactgaaacaattatacatatgtgccaagcaattgtacatagaagcgagagtaaaacaagattctcctagtgaggaagagcctaaatgcaggtaatgaggttaaaagaatatgcaaaacttaaagtacaaaaggttgaagttaggttttgtcaactatgataaacatttatgcacaactcttatgctttaactgttgcaatctttatcatgcgcaaactacaaatatcacatcgaaagcatgaccaagaaaaccttactctctttcatgaatgttaataatcaaataagaacaatgagtccaacaaaagaaacatgaaactcttgaaagaatggcttacatttttgaaagaaccttttgccgtaattcaggctcatgttgtgatctccaatcaatacgattattcgcagcatcacggtttccgccttgttcattaggcttccagttagtatttccctccattaagttatgcgtcctaacggggagatgtatgtataggctttgaccaagaaccgcctcgctaaaccttaacaaacaaacaaaagaatgattagagaaattactcaacatggtaacacaaaacagataaatatatagtacaagaaaacgacaaaagagtattcaaaaatcaatatgcatatcacgctaacaacctatcgcataatatcacacaacacgtattataatatttgttggtgcaggaattagcacctccgacaatactaatttaaaccgaggaataatgtgaataaaatcgagaattcgattgaaccggggtatcccggttagcctgttaatgggcctaagtcatgagatcgcccgaagacttaagtcgacaatcaagatcgccataaccaacttcttaggtcgtgtaaagggaaaacttccatttaagagaagaggatctcatgaagaatagaagtaatgaagatttaaacctaagataattagaagtttatcatattttggtatattcgacctattgtataaatagaggggtcaaaccccccattgagatcatctttaacctaatacaagagactactattacagagcaaaccctagctttttgtttaagcaacctagttcttttcctttgattatttgtgagctaagagaggagtgaatttgtctaaatcccttagtacaaattcattgtttgattactgaatcaacaatatttaatatataatcctaacattttaacaatcagcacccaatgtctaatcttatacaaatgaaattcagaaatacaaaagtaaaggtgatactatgtttccacagatcctaccctcaccttggcaactcggttggattttaagaaataggactagcaacaatggatccggctcaacaacgatctcaaactacaacaatttagattaatcaatcaagattatattcccttaataatttgttatttaatctaataactaaaccaagtctaataatttaatattagttgcttaacacgtaattgactacgccacatccatttacgtgaccaaatactccccggtttaataattaaaccaacgccacaattcaaatcacgtacatgtcaatgctacttctggtttgacaattaacccaacgctttctaataagccaataactgactatatcgtcttcttcactaacacaacccaactgacgccataaccgatcaactcaaaaggttccttaataatcaagtttcaattcatggccgtaactatacgtaatcccttggtttaggttggttcaataattaaacaacacaacaccttaacatgaatacgagaataaggtttcaccgttatctcactctgcaacgaagaagtagaggattcggtatcacagacccaaacaaagcaccaatgatagatctagattccggtgaagaaggaggacgaagaaggctaatagtggctcagatggtgatgattagggttggatgttacgtgacgataacttcacgtcaccacttaacacgatcgggaccacaaccacaaactacaacgatggtgaactcgatagtggaggatgatggtgacttgagagttgagatcaaatttctatgattttgataaggttaacattgcgtgctcgtaacataagcggcgagaggaagaagacattatatacatacgtacacacttctcacgtttaggtcttgtttttaatgaagatgggcttaatgagaaattgggtcttagctttacctcctttcgccgtctccagtcacgccgagacagctccctttcatgcttcttccgccagaatccatcgccggatacatctcgaagattgaatcagagtattaaggtaattcacgactatgaatcttctggattagcgtcagtgtattgtttatatcgatgtttgcgactatttttggtttaagttactggattggtggtttttgaagaagcatcaatgtttataggtttcagttgtttcaagaaccattggattcattactagtagtctatggtttcatgatcaagtaattgttgaaacatcgtaaatatcaagtttgtagtaattgttcgaactatctatgtgaattgtagttttttctgtgtagtttaccttgagattatccactgctctataccttgaaattgaaataggcttcacactgaagttataaggacttggggtacaagagtcgttggtttgactctccttgtgattggtgctatgagaatcaaagaagcttctgagatcccataaccatg

SEQ ID NO: 26122 - DNA, 3003 bp, Unknown; identical to SEQ ID NO: 26121
  misc_feature (1)..( 3003): 2750-1469P.txt file - cDNA_ID_2710725; gDNA_ID_2214682; Annot_ID_189288

SEQ ID NO: 26123 - DNA, 3000 bp, Unknown; identical to SEQ ID NO: 13984
  misc_feature (1)..( 3000): 2750-1469P.txt file - cDNA_ID_2710776; gDNA_ID_2214687; Annot_ID_136715

SEQ ID NO: 26124 - DNA, 3000 bp, Unknown; identical to SEQ ID NO: 13992
  misc_feature (1)..( 3000): 2750-1469P.txt file - cDNA_ID_2710780; gDNA_ID_2214688; Annot_ID_136721

SEQ ID NO: 26125 - DNA, 3000 bp, Unknown; identical to SEQ ID NO: 13992
  misc_feature (1)..( 3000): 2750-1469P.txt file - cDNA_ID_2710780; gDNA_ID_2214688; Annot_ID_189365

SEQ ID NO: 26126 - DNA, 3000 bp, Unknown
  misc_feature (1)..( 3000): 2750-1469P.txt file - cDNA_ID_2710790; gDNA_ID_2214692; Annot_ID_136738
accatctttgcagagagcatagtcgcgactttttaggtttccaattgcaagttcgccacaagcgtgtactctaacctaccgaaccagacttgacgcccggtacggttttggataccaatcccggttttccttgttttaatatcgctaaaccgaaattccatgatatatgcaatcaatctgaaccattaacgaactaaatttattggtttaattttggtttgagaaaaaaacactcgtgaaacacaaatgttaagattctggatcttacaagacagaacaggaagtaagatgtctttagagaggacttttggagttttggttaaggattcataaagaaaaactcaaatgagttcgtgtgtaaaatacattgcttgttctatgtaatcccaagtttccttttgatagtataccacaagagcatcacatcacattacaaagccaaatagagaagagagcttttgtatatccttcactagtctcctttcaagacaatcataattgtttcttcctcttttccaagtatgaatgatttctttggaagttcaatatagcccagagcagatgcctcaaaccaatctcaggccacagagcagccggagagcagagctgggtattacctgtttgccataagagaaaattgctcagcctcgtctctcctgaactcctgatgagtatatcaggattcggcgccacgctcatctgcatattctcctcaatatccaccaactgtatcttcttctcttggttctccatatctgttccttctatatcactatcgctatcctcgtgtttataattagatgcttcaatattgtctgacttgttaatacaagatttcttgacagcttgtacgatctcatctgtcgagttataggcaatgcaaatgagaagcactacccgactattcttagctgtggctttcatgactttttctgcagcagctctcacttggtcatttagaagcgctaagttaccgataaaatagacccgaatcccatactgatgcacaatactctctttttcaagcaaagactttatcttttccagcatcaaatccattacagactcaacctcctcaggttttcttctaaaattatctatgctaaatgcgtatatcgttacatacttgatacccagctcgtagcagtattgcagcatcgacataagcgcagaaaaccccgctttgtgaccagacccatctaaaagaccacacttctttgcatatctccgatttccatccatgataaaggcaatatgacaaggtataggacccatagatatgacccgaaacaaagatcttctcgaaaacccatatatctgctctagcagttgactcattcgaccgcctatatgtcttatttgaccaggaagttcagccatttgagattccaccttccaaatttccaatatcctcagctctcagctctctacgggaaagcaaaacattcataagtcttgtcagtaaaaggcgaaaacaagatatactaacggcacaaacggcaacctactccaacgtttcacagtgaaatataagttctacacaccttaacagtacttactacttaacaagtagcatcctaaactatccacatgtaacaaagaagcaacaatgatatcaaacaaagctctttgaacaactcatttaacaacaaataatacaagcttcccctttattcattctagtcttacttgctgcaaattctaggtgaaaaaatcagttctacaaatgtagatacgtatcatatcaaacgatccatttctgccaaatcagcatcaatgttcaacatatcagtccaaagttctaaaataaattctctattaggtgaagaaatcgaattcctttaccaagaaactgatgtcacgaaagaaaagacttttggctgttcacaaaaccccaaacttatggagttagttaaaatatccctcaaatagaaaactaaaaaacacacttgaaacataacctagtcagggttttagtttcgatacggaatacggaaatagaattcgcacaaggcaaacaaagaatctgcaaatttgcatgctttttgaatttctaaacaaacattgatggatcaaacgaatcaatcaacagatttcgagaataagaaacaaaaactccaatcttaacaaaaccccagaaacgcaagagcacttgaaaatctaaagcaattatatctagtaaaattgagaaactgttgtatatagctcgatcctacctgagagatagcgagatcaagcgccgagcttgtaaaggaaaacgaattggggaagcaaaaagggagatttcggaatccaagctttctattctttggatcgaaaacagatgatatctcttctcaacaaaaagttgacggcgcgactgagattctccgttcaagagcgctgactgtgaaagagaaaggcagcgagcgatgagagaaaagaggggaggggaatattttacaggggaaaaaaaatgtaaataaccggtaccggttaaatctaattgatctggtcaaacccggttcgagttttcctatctttctctcttctggtcaaacaatatttggggtttattagaaagcaaatgcgtcaattggtgaagaactttatgaatgtaattaagggcgagatctgcaagctcaggtacacgtgtcaaatggacggtcaggatttgaagagcacaatccattattccgtccgttgctcttctttcccatacgtgtcaaattatttcgctccttcacgaaaaaatcccgccacagtgcaaaatttcaagtcgcctttattttaaaaatagatattattttattattataatatcgcatctaaagcccccccaaaaaaaaaatcctattactcactcatacgctctctcgtcaaacaaaaaaaaaaaacctaaaggtaaaaactcgctcctaccgttttccccaaactcagtccgagtcaaacaattctctaacgatcttcttcttcttcttcgtttctttgtcattcttcaattgcagaaacttcgacatg

SEQ ID NO: 26127 - DNA, 3003 bp, Unknown
  misc_feature (1)..( 3003): 2750-1469P.txt file - cDNA_ID_2710792; gDNA_ID_2214692; Annot_ID_136735
tcatcgcccattaaaaaaaatagatattaagaatttgagttttataaaaaaataaaaattcaatgcattggatattactaaaaggaaactatagttggagtcttcttattacgattttaattatatatagttggccatttttcttcgaatctaaattacggacccatgaggaaaatgaccgttgtctccgaacgggcttcgtgggcttattgtttgtaaactcacggcccattgacgtcttcttatttgattcaagaccagaaaccacgttttgtactgtagtcttgaattgctctgttctgctgatagaatagcaaagttctgttctgctgataaattagcaaagtaaatcttgaatgctagtttgtctttttctctcatgttatgtgtaagaagatgatgatgactctgttaggtaagaaagtccaactttgtaatctaatcagatttagtctctaattgtttacttgtgtctacatataaaagttgcaagttgcagatgttaagaactaagaagtggtatctgcagattttgggtattaaggaaagtttccccctttgaataaataaggacatatactaatgtaaaggttcctcctttttcacaaatcaaaatgtgtttctttgtgttctagtgaaatccaatccattgtgtctctgatgctgagaatcttgaagctttcgacatcttctcgatctgtgccattgacaagattatggcttcttcaactgccttgtttctgctcatcttcttcatcatcgtcttctttgctttctgtgcccagcgatgatcatatcgtccgtctcattctagaccagaaatcagcttctggagctttggaaacttttcgatgggcttcgacttttcctgggtttatccattctcgttccacttaccgtgctctgtttcataaactttgtgttttccgacgttttgatactgtctaccaactgctcgacgaaatgcctgactcaattggtttgcctccggatgatgctatttttgtaactatcattagagggtttgggcgtgctcggttgatcaaacgtgtgattagtgttgttgatctagtttcgaaatttgggatcaaaccatctctgaaagttttcaattcgattctggatgttttggttaaagaagacattgacatagctagagagttttttacaaggaagatgatggctagtgggattcatggtgatgtgtatacatatgggattttgatgaaagggctttctttaacgaataggattggtgatggttttaagcttcttcagatcatgaagacaagtggtgtggctccaaacgctgtggtttataacactttgcttcatgctctttgtaagaatgggaaagtcgggagagctaggagtttaatgagtgaaatgaaggaaccaaatgatgtaactttcaacattttgatttctgcgtactgcaatgagcagaagttgattcagtcaatggtgttgttggagaaatgttttagtttgggttttgttccggatgttgtgacggtaactaaggtgatggaggttctctgcaatgaaggccgtgtgtctgaggcactcgaggttttggagagagtggaaagcaaaggaggtaaagtcgatgttgtagcttgtaacactttggttaaagggtattgtgcgctagggaaaatgagagttgctcaacggttctttatagagatggagagaaaaggttacttgcctaatgtggaaacatacaacttgttgatagctgggtattgtgatgttggaatgttggattcagctcttgacactttcaatgatatgaaaacagatgcgattagatggaactttgctacatttaacacgttgatcagagggctttcaataggggggaggacagacgatggtttaaagatattagaaatgatgcaggacagcgataccgttcatggggccagaatcgacccttacaattgtgttatttatggcttttacaaggaaaaccgttgggaggacgccctggaattcctcttaaagatggagaaactttttccgagggcagttgacaggagcttcaagttgataagtttatgcgagaaaggcggtatggatgatttaaagacggcctatgatcagatgattggagaaggaggagttcctagcattatagtatcccattgcttgattcatagatacagccaacatggcaaaatagaagaatcacttgagcttattaacgacatggtgaccagaggctatttgcctcgatcatcaacattcaatgctgtgattatcgggttctgtaagcaagacaaagtcatgaatggtattaagttcgtggaagacatggctgaaagaggttgcgttcctgatacagagagctacaatccattgctcgaagagttgtgcgtgaagggtgatattcagaaggcttggttgcttttctcacgaatggtggagaagagtattgtccctgatccttctatgtggagttcactgatgttttgtctcagccagaaaaccgcaatccacgtaaactcctcattgcaggacataatccaaagttaaaagctagaggcagtgacataaatgatcattgagctcgaacttgaggcctttaataatgcatctgcaacaaatacgaagatggctccaaactagcaagcagagagatcaagatggtacgtttgcttcttttgaaaatctgttaaaagctttgggagaaaaggagaatgcctaaaatcagaagaggcagattttaaacaagaccatgagagaagggcaaaatggagaattggacatcgtcaaaatgggaaaatgtttgaagcacacccatcaataaaaaaaggacaagaggagcaaaaagaggagagagtcttacgtttcgtgctattcctctctctctcttttatctctctttctcgagaaaactaaagaaaagggggctcttttattcaaagatccaaactttgacaattcaaaatccaacatagaacacggatcaagctttcaaattcagacagagatatg

SEQ ID NO: 26128 - DNA, 3003 bp, Unknown
  misc_feature (1)..( 3003): 2750-1469P.txt file - cDNA_ID_2710796; gDNA_ID_2214692; Annot_ID_136734
cctttaaatttaaacctaagccagccaacttgactactaaaattttcaattctatagctccttattcgttcatggttaacgaaacgatgacggttaaaaccggtttagttactttttctctaaccggctcaatctgattaaaccgaagtaaacacagcaatacagctagtaaactcggtattactcttgatggaaaaaggtcaaaaacactctttttattttaaccaaaactaaccaatttttgcaagataatattgcatacctaagatcatttaccttgatctcatagaaatttttttaatgatgcatctccaattataccgatacaatttctagtaaataaatcagtgttcaataaagtgggataggcgtcgtctaggacgcctaggcactaaacgcttttataccgttttgactttttcaaaatcggttctattaatcagtgagatagatttggcagactatgtaaacattaagcggattagactctcattaggtgggttaggctaggcggatctaatcgtctcttaatattttttaaaaatttcaaaaatatattttaaataattttaaggacacctatactttttattattttattttattttactaaaatgttaaattttaaatttatttttaaaaatttgataatttccgttttttataatagtttttgcaacagttcagataatagtatataaatatatatcgttttattctaaaaccgattaaaccggctaaaattgtctaggcctcgactaagcgttctatgcgctaagcggagggtcaccgccagctaagcgcctaacattttcttaaacactgaaataaacacaaaattatatgataagaagtacgattaaaccaaaaataatcgtcacaatttttgccactatgtctaatgtatatgtgattgttttacctttaacaaaagaaaatgtgatttatttacctttaacaatatgaaaatttgttttttttaacacaattagtaattttagtgatattttcactcgaatttgttgatagcaaaaggtgtttagaagaccaaaaagcttaacgcatattggctcggctcggccgaataagttagctggacagtacggtggggcacacgaagatccttaaaccgcagcctcagacaaaccttactcgaagcaaaacagtgtttggttcgttcgtgggggtttaaaaaaaaaaaaaaaacttttgtatttttttccattaaaatatttttttgttaagaagattcaaaaggagaacgcgttagacacactaagggtgggggcaagggaggagaaactcgccggacagagacggagatccctaaaccgcagcctcagactaaagcttcgcatcttatctccgatccatcgttgacttcactcttaggtaaattcgaaaaccctttctcttatcttttatctcccaattcttaaattcgatgattgactcgtcctcctctgttttttcacagctgatcatcatcatcatctctatctctgttcggattctccataattgatccggaccatgccgccgagatgtcctttcctccgccatcttttcttcttactactattactctcaccatggatcatgtctccttgcggcggcgctgccgacgatgtgacgtatccgatcgttccatctagtcccggccgcagatcaattttgcagattcgtcggtgagtttcttccatcctctgcatgtttaaaaatacttagttagtatttgattctggtgacactgttttaggtatcattagcattgtaaacgtgatggactagtgattaggttttggtggtggcaagaattggtttgattacattttgatagatgtttttgattcttctctatgtggttactggttgtgatgttatctgtcttctactcagtgaaccaccaacagagccaaatacgaaacttgttgttgatcgtgatgggaaggtgtttttaaagcagcaaccgaaagaaacaccatactggtccttttcaacaggatcaccaatgcactcgttatatcaggctcctgctaataacaacacagaaaatgctactgagataactcgtcctcacataattgttgaatatctgaacaactcaaaggcggctactactgtcgatggctatcataattgggtatgaagcatctctctctttacttcattattactggactttgtttatcttaactttgtttcggcacatattcactgcagacagttcaggagttttttaggcagaagccacttgtaacagatgatggtgtgactcttggatcagaaacaactagtgcctatttggttgatggtagatcagggaggctgattcatgtttacaaatcaactggagatactaagattactaatgctctcgtgaagcccgctagcactgaagattttgtgaatgaacctcttcttatcaggcgaacagattccaaacttgagcattttagtaaaaccactgggaagcttgtctggaatttgacggtttctcacttcagagctgctttactatgtgatcctgttttcaattctggctatgacctcggtcctaaacttcaaactggaatttatatgccattgttatgtggatcacaaattgacgttcgtggcccagaaattgttatcagggtgctccatgatcagccaatgaatgtgaaaatgctaccctccccttccctaaatcacttcgagagcgaaaacagcatcatgccttttggaaaagccagagagtcaagaaagttacaagagcaacataagcagaaatatacatatttgtttggacaatggtcaccagtaaagttattggcccctttagtgcttctaggtgttgttgtctctgttttcattaaaaagttttcgtcgaggggcagtgatgttagtttgaaagctggaccttccaaaaagaagaagaaccgtaaatccgcgaaggatacaaataggcagtcagttcctcgtggccaggatcagttcgagctcattgaaggaggtcaaatg

SEQ ID NO: 26129 - DNA, 3000 bp, Unknown; identical to SEQ ID NO: 14008
  misc_feature (1)..( 3000): 2750-1469P.txt file - cDNA_ID_2710800; gDNA_ID_2214692; Annot_ID_136733

SEQ ID NO: 26130 - DNA, 3000 bp, Unknown; identical to SEQ ID NO: 14006
  misc_feature (1)..( 3000): 2750-1469P.txt file - cDNA_ID_2710808; gDNA_ID_2214692; Annot_ID_136730

SEQ ID NO: 26131 - DNA, 3000 bp, Unknown; identical to SEQ ID NO: 14034
  misc_feature (1)..( 3000): 2750-1469P.txt file - cDNA_ID_2710832; gDNA_ID_2214693; Annot_ID_136757

SEQ ID NO: 26132 - DNA, 3003 bp, Unknown
  misc_feature (1)..( 3003): 2750-1469P.txt file - cDNA_ID_2710846; gDNA_ID_2214693; Annot_ID_136751
cttgcactggtgtgctttgtgccaggaacacagggagatgaagaatcatctttctgatacagaagcctcatcatcaactactatggatcctcccccagttcaagagatgaacactgaggagagaagagacgcttcatcttcttcgtcctcatccccatcatctgccaaaagccaacacaatgatctcgagatggtccctctataggaaacgttccttattaatctctgctgcttatgctttaagctgttttttctgtgcagagaagttttcgtaccagatgactctattgtccttaggttttaaatatgcaaaagtttgttctaagaacaagttcaatagtactcttaagttttacagaacttaaattcatgacttcattgaatctcttggaagaaggaagaaaactattttgtgattaaacactgcatgattggtaaatttgtttcgtatttcgttattttgttcttttttattataaaacttcaaagtaattacacaagcacccgtggcctaatggataaggcgtttgacttctaatcaagcgattgtgggttcgagtcccaccgggtgtgctattctaattttactgaagctgacgaaaacaaattagaattttacccgactttttgttccctcacattttatctgctaaatttttttctgtcagtagtcatcacatcatgatccaatacaaggttatgagttataaaatgttaatgttactaattttcgcacaaatgactaaactcaaaacactgatgatgttaggaaaccaaagatgaatttacaaagtgttgactgcactaatccaaaacttcttgttttgataccttggacaagttgaccttcttacttgcacctcaggcctcagcttgactattgtcccacgtttggcctctgttctcaggtggtatcccctatcagtactccagggacgccagggccaaaagcttggcatattcagggagtttgcggaccagctttatttccccagaggaaaaaaaatcacacactcccaaatcttcatcctccatcgtggtcaaggcgtttaggctcggaggcggttctccatgaagcgtcgcccaatgtgatagccactcatgggctctcaccatttttttaagaataaatttttcaaattgatgagatgagagattctgttaaattttttttattttgcagtgtccaatagtagtctctctttattgggttttcatgaaaaaaataaattattagttcacacgtttccaacaacattttgctgcttctttagttctcccttgagccctctcttcaagtttgcggatcctagcttgcaatccacagaggtagtcctgttcgaagccattaaaacaacgccaaaagtcagagtagagtgtaaagaactcagattccaatttgatgaatctccaagagcacaagagaagttacaatgcaattatagatatgataggttctgtaagttacaatgcaatttttcttgacagacgctcaatgtaccaaataatgaacactaaagatatagaaaaataaggaagcaaacaagcacacaatgaaataagagagcaaacaagtaagtaattaaaacaagcaacgaatcaaagaagaaaataaggatctttttagacactagaaaaaatcattcaactatgaactcttttcaagatttctgtaactaccaaccttacacgattgtcatggctaattgccatctgtcaaaccttggtccatgtagcttgttgaagctcaaatcactggaaagtggaaactagacacgagttacttacatcatcaaagacccattttacaagctaaagcagatatcaagacaacaatttccatcggttgaacaacaaactctaagcaaaagccactatatccagaagttagaaaattttaaagtgtgtttttgacttacaattttaaagccactataatcaggtaaccattataaagtgtaacccgtcttccttctgccgtaatctcactgcacaacaatgcttaaattagtaacacactctagttcatacatcaaacaagaaaaagatgaatcttttaagtgtgccggatatcaatttcctataaaacacacacctaggagaaaatacgtgcatcaagctagaaaaacttgaagaaacactagttaaatctgcgatagacaatgaatactaacttgaataaacactaattaaatcttcttccaagagatgtacgtgacatgaacatatatgacaaatccagtgagattcaacacaaattaacacaaatccatcatcaattaacacatctactcaaacccatcatcaattaacacaaacctagaacctcaaagggctaggctagaagaacttacaatcgacgtgaccaccgccttcgagaaggatgaatccggcccaaccattgctcttgcgcaaccactgctcatacaacatatcgactgcttaaattcaacccgcaatcgtcggagcaaacgaccggctccgtcgccatcaccagcgttttcattgtcgtttggtttcgagagagtttcgcgaaaaatagaaattgacaaagtattttccttcaggcgttttttttttttcagttttgtcaaacaaaacatccaaaacgtgacacgtacacgtctctcttctctttcaaagtttctctcaagagagacagctctctctgtaaaaacgatttctgatttaatttttcacaattttattctgagaacccactgagagaactctaatatcaagccattggagatgctctaaggtgaagaatcagagattagaagagagaaaaagaaagaagaagaagacaaagataacccatcgggtccaaatgtactccgggtcaaataacccatcgggtccaaatgttaaaccggaagtttatcaaaccgaatctgaaccaaaattgataatacaaacacacacactctcctcaagtctctctcacaaagaaaagactcaaacccattttcctaaaaccctcgtcgtccatacaaagccatg

SEQ ID NO: 26133 - DNA, 3003 bp, Unknown; identical to SEQ ID NO: 26132
  misc_feature (1)..( 3003): 2750-1469P.txt file - cDNA_ID_2710846; gDNA_ID_2214693; Annot_ID_189440

SEQ ID NO: 26134 - DNA, 3000 bp, Unknown; identical to SEQ ID NO: 14023
  misc_feature (1)..( 3000): 2750-1469P.txt file - cDNA_ID_2710854; gDNA_ID_2214693; Annot_ID_136747

SEQ ID NO: 26135 - DNA, 3000 bp, Unknown; identical to SEQ ID NO: 14022
  misc_feature (1)..( 3000): 2750-1469P.txt file - cDNA_ID_2710858; gDNA_ID_2214693; Annot_ID_136746

SEQ ID NO: 26136 - DNA, 3000 bp, Unknown; identical to SEQ ID NO: 14079
  misc_feature (1)..( 3000): 2750-1469P.txt file - cDNA_ID_2710886; gDNA_ID_2214696; Annot_ID_136816

SEQ ID NO: 26137 - DNA, 3000 bp, Unknown; identical to SEQ ID NO: 14079
  misc_feature (1)..( 3000): 2750-1469P.txt file - cDNA_ID_2710886; gDNA_ID_2214696; Annot_ID_189539

SEQ ID NO: 26138 - DNA, 3003 bp, Unknown; identical to SEQ ID NO: 24011
  misc_feature (1)..( 3003): 2750-1469P.txt file - cDNA_ID_2710894; gDNA_ID_2214699; Annot_ID_136824

SEQ ID NO: 26139 - DNA, 304 bp, Unknown
  misc_feature (1)..( 304): 2750-1469P.txt file - cDNA_ID_2710898; gDNA_ID_2214700; Annot_ID_136858
aataaaccacttgttttcgctcgctcgctttctatttctcctccgatctgctgaggcgtgcgttcattacgtgcttcctcaatggcggcacgatccctatggagaacccgtacgaagctcctcgttgttggtaccgccttatgcggtggttccggcgccgccttcattgcttcctccgatgacccatcaacaaccctcaagctttgcacctccatccccgttcgtctctaccgcaataccgttaccgccgcctctattgctttcggtacggaaactaaaccattaaaggataatactttacatg

SEQ ID NO: 26140 - DNA, 3000 bp, Unknown; identical to SEQ ID NO: 14104
  misc_feature (1)..( 3000): 2750-1469P.txt file - cDNA_ID_2710906; gDNA_ID_2214700; Annot_ID_136846

SEQ ID NO: 26141 - DNA, 3000 bp, Unknown; identical to SEQ ID NO: 14103
  misc_feature (1)..( 3000): 2750-1469P.txt file - cDNA_ID_2710910; gDNA_ID_2214700; Annot_ID_136845

SEQ ID NO: 26142 - DNA, 3003 bp, Unknown
  misc_feature (1)..( 3003): 2750-1469P.txt file - cDNA_ID_2710916; gDNA_ID_2214700; Annot_ID_136838
tagcagctcaagataaatttgaggacaacatcattagttccattccatggttgactaaatttatttgcaaacatggatacgcatatcgtacatacgaaatgcatatctctacctactattcgttcgtacaatcatttttctccccatttttatgaagttataaaattaattaaaaaatttataaaagaaggaaaagcacaaaacacctaactgaattaaaatagaaaaacaaacagaatcatgggctcagcttaaaaagcccagtatggactatgggataggaatataaagactgtggagatgggtggctcctaaatgtgaacaacccgtggatatgtagacagatactcgtcttgagagtgctcctcatttactgccagatgcaattaagagtgctcaagtggcctctacatcaatcatatgtcttgagcttgaacatatggttgcgagggagggtcaaacactatttcaacccaatgaaactggcagagaagcggtaaaagaatgttttgaatggactttcaaggactcaatcatacctcacttgcacaacccaaatttttcgaacccaatattttcagatcccataatgacctattacccattcatcctcatgcacatcttgattcaaaactttcttgtgtgcaatttttttattacgttttattacaatgtttgagatgaaaatgattggcatctacatatcatatcaatcaataattgtactcataaaacttttgttagtcaaatttttaccaaattatattcctaccaaaataaagatggtccaaaagatgttttctcctttctctttcttttcggtgttaaaagtaattcaaagtttgcttatagaatattctagactttgttgttgtgaagtgaccttgaaactaattgcgtccacagcagtaagactcctttatggtccattattaaggcacttcacagcatctagggtataaacgagatatacttattcctaagtaatttctcaactatcatatagaaaggaacgtttgttttatgcatgttaatattactaccaagtaccaacatctaaagcggtaactcaactgcacgagtgtatgatcaatacaatatcagtaatattagccaaatcacaatttttgccttaaatgatacaggcttttgtaaccatgtaaaacttttttttggaacttaactcaatctaaaattgtcatgaatatgttcttttttcttcaaaaacaatattcatctagaaccccacttggaacaaaaactactgttaaagaaaaggaaacttcactatagtcgacaactcgatatccacatctaaatacttatttataattattttattgattggtaatctatttgtattatattctctgcaaagaattttgttttgtgtcatggtcagtgagtggcatatgatttcagtaaacacaagtcacttattatgcaatcatgtacagattgattcaaaacatatccgttaattaatttgaacagttggagatgtataaagtctgagttggtacttccaaatggtttaagatttataggaagttgtgtcctttctggcttctgccattaacctcagccaatagactgtaacttgcatggctccgcctccaatcaacttgctctctagaatatgttgtactattaaattaaacaatatatcgataaattcgatgaaaatcccaactgtaattttttctcatagtatcaattttaaactttactgtattttctaaaggcaaaagaactttctattatagataaaaaaaaaatattaaaattgtgtaaaagagaatgtattgaagttttaaatgatcgagagtcaaagacattatcatttgactagagactaaagatgcacattctgtaagatgttaacttaggtataaactttttttttaagtgtgatgtagaagttttccacgcatatcgatcagcttaaccttttatttaaactataaaacaaatcactatcaatagttttacttaacgtgtttccttctccatatcaaacttatataaataatctaagaaaaaccataaaagccaagtacaaacgtatataaatcgggtatttctcaacctagatatattttggtaaagtattaagaaaacaaaactgtatccaaaattggtagcttgagaataacatataactaaattaatatcgtaaagattgagaagatcatcacttacaaacattcaacaaggtagcttcgacaacaacacaaatctaatgtgtttagatggttccatatttttaaataaaaaatcagtttgcaaaacaaacaattagtactaaaatagtttgtttttttctcacttaaaatccatatttccctagttcacgtacattttcatttattattcgtcagcaaaattattatatcttcttgaaatgatgaattcaaataaaataagcaaaacttggcaaagactcaaaatagcacaactagacaaaaataccagctaacagaaagtaataagaaaaaactcaaataaatggaaagacattaataaggcagatatatgtttttttatattataaattgtttttttttatagtataaaaataaaaatatcggcattcttataggatcgatctctcatgcaaaacaacaaattcagacaagaaacctcaacggctcagacccaccaataccaattttttaaagagatttctgtcacaagtaagaaagaagcactaattacaaaaaaaaagaaaaagaatcaatcttttgttcttcgattcgatttctaatcaattagattgtttttgttttgtttaacatcagttgcgaatcgagctggattcttgggctcgctttttctttcaatcaaaagtttcgatattagtgaaggataaaattcgctaaaaaaagagaattttttttgttaaaaaaattataaaagctggctttctcaaaatttctccatgtggtcgacgaagaagacgaagaagacgaagaagaaagagaaagtctcttagcaaacatg

SEQ ID NO: 26143 - DNA, 3003 bp, Unknown; identical to SEQ ID NO: 26142
  misc_feature (1)..( 3003): 2750-1469P.txt file - cDNA_ID_2710916; gDNA_ID_2214700; Annot_ID_189624

SEQ ID NO: 26144 - DNA, 3003 bp, Unknown
  misc_feature (1)..( 3003): 2750-1469P.txt file - cDNA_ID_2710924; gDNA_ID_2214701; Annot_ID_136874
gtacctcccccatcgaccattttacacacttgtctactttagaattgtttgttagattggtaagtaggtaagcttttgtaatctccttttcttgttgttttagctgggttcagcttggaatcttttttaattaatggaaatttaaaatacaaaaaaaaaaagttatacaaatggttctaatttctatttaaaattttatgggcctgctatgtataaaaaatagaaaaaacattttaatgggcctaatgtcaaaaaaacagaaacaattgttttctatgggcctgcttttgggtcttatggttcgaaacaatggtccatgtgaagcgtgcaccgtcaagtaacctacaaaaccacgacatcgtttagtgctattcctgtttccaaacacaccttaagttcgttatcaaccccatcctctttttttctataaataacgaagcaacgagttaacgagaaaaattctggatcggagagagctacgaagcctgggaattttcgttacctccttcgttcttctctgatctcgaattcaataccaaattcttcaatctcccgaatctgattttcttatcactatccctggataacaaaagcccccaaagtaaaaacccaattgcgattccctcgtaaaccaatctagggttttcgcgagttcgtctctgagcttgtttgtttgtgatcgtgtgagaatgtctcggtgttatccgtttccaccacctggttatgtttggaaagaaagtctgatcgaatcgatcaaggttgatttgttgagcaatttaaaagtccatgactttggttcttttttatgttcttggttcatgtgatttttttattgctcagcttcctgcttctttgattttgataatcttttgtcaaagttggaaactttgattatcatggagaagtaatttgccatatagatgggaattcaaatcttacttaaaaagttaactaatttatctcaaagcatgaaattgattcattggactgaatactgacaaatgtggttgaaattgaatagcctcctaaaacttatagaagtagagtaagtcattgacaatttctacattgtttgtgtgtttctactctccttctttgtcctttggaggtttactggataagaaagttatggacacttattgttgtttctttcattggtttggaaatccagggggcaaaggaggaagtgaagaaagatagaaaacacaagaggaatgaaaaagatagaaaggatagggataatgaggcggggaggagcaggaagcatcggcataagagacggcggaaagatgaaggcgccattgctagtggcaaattagtaagcagtgaggtcgagttgttagagaagagctgccagactgtggaacttgagcttcaaacatcgtctcagaattcttgtgatagcactcttcatagcaatgagagaccaaagcaaattcagagtcagccccttgatggtaggcataacataacgactctggtgagcttgtttgcttttacttgttgttgggtctgtttgcttatggtgtcattctttcttggtttaaagaaaccagcatacggactcggttacctgacaaagggcaggaagatcctgaggatggggtgatgatgaccagcaaggatcaaaaacagcgcttttcccgggaaatgttagatgcttctcaagctgctactgctcctaatgagtctgttggtcattcaagggtctgtcaagagaaaagaatagatccaacttttggttcgtcgagagagatcacaacaaaactcaacaaagagaagaagtcagttccttcgaaagataacagaaaagttagtaaagagaagaagatgccatcattatcttcatgtaaccctctggaacaagagaaaccgacctctagtcatcaagaaacccctggaccttccaagctattatgcaggaaatgccctccttccatggctgggcaactcttgaatcttatcgagaactgggctcctgatcgggttgagagcaagctcactgactctgaagatcaagaatggtggttgttcatcaagtttggagccaaaagtccacaagttagcaatcagaaaaccaaccagggaagtagttccatggtgtggccgactgctagatttcttcctgaagccgaagtacacgcattgccattcactgtcccgttctgatttcaacaaagttggtcgagagagagtgagagagagagagagagagtggttaacatgaccaacatatagttttcccaagtattttagagtagccttgaaacttaagaaactcagaattatgtgtgattctttgtagatgtactggtaatatagtaaatcaccaattacgtaaatggtaaatatatgtgctggttagatagtaaattacatgagagtttcgaacttctttggctacttccttatcaatcgtaaatcttatttacgatctttgttttttttttctcataagtgttgcctctcattataaagagtttgccaacggtacaaaagtggaacaatccactttcaaactacagacaacacattaaacagaaaacaacattggaagaccaaacaggtggtatccatgttgcagagaaaactatttataatttgatttggttcgattttaatcaaaatgcaaatcaaaaatataataaaataacaaagtagttacaatattttatattaattgatatgtttattcataatacataaaatataaaattgaaataaattttgtttatccggttcggttgagttccaatatagcagaaacgattgcggttaaaattctggattttattcggtttgatgaaatagaatatggaccgttagatctaaagttaagtagaaacaacgaacggtggatagcgaggaaaacgtacacgtgtgaagcatgacataatttttttcccatccaaagactttcacaaggtcttttttttgaaacctgaaaagtgagaaacccagagatcgagattgagatttagagaagacgaagatcagaagatg

SEQ ID NO: 26145 - DNA, 3000 bp, Unknown; identical to SEQ ID NO: 14122
  misc_feature (1)..( 3000): 2750-1469P.txt file - cDNA_ID_2710928; gDNA_ID_2214701; Annot_ID_136873

SEQ ID NO: 26146 - DNA, 3003 bp, Unknown
  misc_feature (1)..( 3003): 2750-1469P.txt file - cDNA_ID_2710944; gDNA_ID_2214701; Annot_ID_136868
cgtacaacaacatgacgccatacacagaagagaaaaccattcttatcataaatacgtatcctgagtttttaatcattttccttcgctattacctatttatgtaactctgatatgtgtatgggactggcctagtggcatggacccaaatgcctttaggattagatgaaaatatcttcgggccgatatttgttgaaatgtcgtatacatttatgtatatacatcaggattagagtatttattataaggaagccactatgttacatgtattatttaaataatacgtactctagatatttatttattttttgttaaaagagaaataagtgtttcaatactttactttggagatagacagacacatcctttttctgacatcgaattcattagtattagatacgtattaaatgtcatgtgcatagaagatgtgttacaaagctactcggtccattcatgcagtttagagattgtcattgttaagctcgttggcttttataatatattaattaagatcaattgataagtagtgaattaatacgtattacttatgtacttaaaattttaactcattcttttatattctttctgttcctttttatatgattgtttaggaaaacatacatattaatgtagacatatcaagttgattttatatatatattattttttgtgttttataattttctataactttaaatcaataatatttacttatttttattaaaatttacaattcatcaataataactaataaatattgtatagaaaatctaaaaaatcaatctctttgaaacaaattttatttctagaaaattaaacaaaaagagacagagaaaatataaccgaaggaactccaaaccgtattccaactaattctcaagatccatagaaattcaattcttattttcttatcattaaaaacgtctacagatagtcaacctgtagatataagataatttttctcattcgtaacataaattttggttaaattaacttgttcgacctattttaagccgaatccattgtaaaaacggttatggttatggtgcttaattatggttagttaagcaccattaaataattactttttgttttgaatgtccacaaataaaattttaaatgcatttttgttttgttttcctatgttctttgccttttagatatattatttttcactattaaccataagttggatttttaaaaccacgaaggggaaacaaattgagtgaaagttttgtacgtgattagtgtataaattgatatctgcagttctttcgaatacaataatggtttatcaacagtaaactatctcacgaggactggattgtagaaaagccaacaacagtaaaaaatgtttggcaaagtgttcacgttttttatttgctataactgaatgtggagacaaagctcacaagtcacaactcacaactgctcataattatttttgtttgaagtaaacaaagtctgtagttcccgctatatgatgagcaattatagttgcatacttggattaagtggataatttttctgaaagatcaacttaagggtgcttgttaaatcgatatatacatatagaagtgttttttttcttttttttgtcaatttatattaagagtgttgtggtggttaaataagcatatctaaataccatttttgaactagtggaatgagacaagtgaactcaaaccaaattttcactattttttttttagttgatgtgtgtcatccttatcatacaattatctaaaactgttaggtggattattatcacatcatatttattaacacactttatgagaaaatcgcataaccatactgcattcaaggttttcaaaataatatggcaaacttttactatgacgtagagtgcactaaattgattttaaaattaaaccacaatttataataaaaaaacctcgtttagttgagcttctgttagattgaatattcaaattatacattaacttgttacgattcgattcagttgtgaatatatatcgtctagacctaagttgcatggaaattctgtctgatgtccatttcctatttcaaaatcaacatctcttaaaaacagagaaaacttaacgttcctttaatttgcatttttacacgttttgtttcccggtatgttgtatctgtttttgtttctaggcaatataggtctagacgattttgagaccactttattgtttcaaaaactcattgtagacatccgctaaattcgtgtacaaaactcagcaaaagttaaatgctgtctggttgacgtcactgtcttgtgatatatgaagttagaatacttcaaatcgaagttcctaaatgatgtttaacatttttaaaaatctagtattttgcattgttacacgagaaacttatttaaaatcatactattcttaagccgaaattttatatgatcaattttttttttaatattgtaatattttctttataaaggtaattattctaatcgtttaagcacacgactagacgattagcactaatacaaaattaggatcttattcttaacccttttttacttttcaaagcaaagtatattgcaaattgcaatgaattaaacctaagaaataacgtcctctaattggtttacctaaagaaaaaatgttttaattaatttaaaacaaaatagcttttaccaaatgaaaataaaagaaagttctttgccccgtgagctcatctctcttctcttctatctctgactcgtggttttctgaaaacgaaaagtttgaaactttcgtgttattcttcgtcactgattgtgacacatataaaagaacccctaaaagattatccttcttcacctacaacaaattctggccatgaaagcaaactcaccccaagctttaaatgcaaagtagcgaaacatcccatcccatctcctccctctctctcttaaccactaagcaaaaatcccatctttctatataaacctctctcccaactctgctacttcccaccgtaaatcgtttctgggttcttaagaataacatg

SEQ ID NO: 26147 - DNA, 3000 bp, Unknown; identical to SEQ ID NO: 14118
  misc_feature (1)..( 3000): 2750-1469P.txt file - cDNA_ID_2710950; gDNA_ID_2214701; Annot_ID_136865

SEQ ID NO: 26148 - DNA, 2929 bp, Unknown
  misc_feature (1)..( 2929): 2750-1469P.txt file - cDNA_ID_2710966; gDNA_ID_2214701; Annot_ID_136860
cttccagtgaacaaaatcttttattagacaacttattgaggaaatgctgagattagcttatgatgataagcaagagcatacaagaattagcttatgatggtaagaaatttgcatacaaagatctcatgatgtgctgttagtgtgtcctttctctgtatctcctgctgaaagtgatggtcctgttttcaagacacgtaaataggtaattcagattcagatctttcagtaaaactgtaatttcagattcttcatagcagagttcattgtgagtgtgcaagttaccgttagattgtgcccctttgtaaccatcagctacatgtcgaaagaactctttagtagcatctgcatattcgttcaagaacagtcactactaaatcccgagcgagacatatacacagagccagaagtatataagaatctgcaaactcaccgtgtttcattgctagagacgggtcttgctcttccatgaccctgatcagttttgcaggatttccagccaccacacttcgaaaatacaaagagggtttgttaactaaacaaaacagtgccaggtcatgaagatttgtcagatgaattttctcttttatacctatgcgaaggaacgtcttttaacacaagtgaacctgcagctaccattgctccagcacctatgcttatgttaccaagtatagtcacacaagctccaagcaatgcaccttcacctatctttgggtggcgatcgccagtttcctttccggttcctcctaaagtcacaccctgtgacagtgaaaactcaagtagccttgaaaaactgaaaggaaaatcatgatctcggtattgaatttacaggcaatggtttggagaagagacgcttacatgtaagatcgagacaccgttgcctatcacagcggtctcaccaatgaccactccagttccatgatccaacaatattccctccccaattcttgccgctatgcagaaagagaattcaagtaatatgtataaccagcaatcaattcaccggtaaacctgatcaactattacaacagagaagggaaactgagaatgttcaaacagatgagagcagagatatgaagctcaaaactctacctggatgtatgtcaatgccaaaaacctgagagaaaccacagcatagatcagacattgagctcaaaaatgcagctccagcaagactcaaccaaaagacaatgatcaccaactacctcgcttattcggctttgcaatgcaagagctaatagtttcctcccttcattccacagtttatgcgcaaccctatatgcttgtaacgcatgataaccctgaaatgcaagtgggaaaactcttcataagtcactcattccatgtgagaaatgttctgtctctcaacttcgagtaaagaattaccttcagatgtaaaatagcagaactatacgacagacaagcaggatcacgatctttaaatgcctgcaaatcattgagatacataagaaaacaacaaagatcatgtctttttacagtattaggtggaatgttttacctggagatcatggcgaatcgaactctgaatacctttgtcatgcatcataacaccataaaatatatccaagagttgtgttgccaacaaggttgggttttggagacggttggctagaacaaaccctaaagcttgctctaaacaatcatgtgctaagataccagcatacaagaagctactcaaaataggctctttctctgcctgaaacgcacaacaagattcaccattataagattcaacatttcacaaactgtactcaaactttcttgtcctatgtttggttggattaaatatcaaggctttcaaagagagaaacaagactgactaattctaaaccctaatggatactactataacaactgtggattaacatggagacgcaaaaccatgacatttactttatctgaacaagaataagaatcgatgaagcagagaaagtgttagaatttgagggaaacctcaagtttagcttcttctcttatagcatcccaaataggatcagaacgaggatcaagcaaattcgagtcaaactctgacttatgagttcccttagcgtaaacctcgaaaccactctcgaaaggaagctcatcgccattcatatctctccaaggagacgataaagaagaatcacaaactctttttgattggacaaaagagagagagacggagaaagcaaaaaggaggctactttaatggatatgatgagaaactttgagaaacccctttttaatctattttgttttcttagtggattctctcgatggtcgctgttgttgtttggtttctcgttgatcttgtgtttgtgttgtgttccagtgtccaccgctttgaatggttctacttctactaatttcatatcatttcatttgtatatatttttgttggctttggccttatctggtcgcgaccgtaattgagtccaagttcgtaattgtgattagggtctctttaatcagataattgttttttaatcaaagagggatcgaataatattttttataagattactatagttcttaatcgtatacctcgagagggggaatatgaatattgtacaaggaagatagatccaccataaattatgccaacttgtcttatgtttatagcatatttctctatagtatttatattaatgtctcttgtgacttgtcgcgtactaaaactcctatatgaaattgcaagcattcaatttaaaagtatatatatatccgttaaattgaatttgaaacttgtaatgttttccattcagtaaatcacacaccgttcgttaatcacgaggcagcacgactgtcattatctgatgagttcccacaacagagaatcatcaaactcgtcttgataaacttcaacagatacaataaagtttcaattttttttgagaagtcgaacaacagccaaatcaaagtgttaaccatg

SEQ ID NO: 26149 - DNA, 2929 bp, Unknown; identical to SEQ ID NO: 26148
  misc_feature (1)..( 2929): 2750-1469P.txt file - cDNA_ID_2710966; gDNA_ID_2214701; Annot_ID_189660

SEQ ID NO: 26150 - DNA, 3000 bp, Unknown
  misc_feature (1)..( 3000): 2750-1469P.txt file - cDNA_ID_2710970; gDNA_ID_2214701; Annot_ID_136859
aagtaagattgtgctttgaaatcttcctacgaaatggactcgtttcagacacggcggaatattcttttggctacttctttctttttttaatgtcttaaaatctttctgaggcacaaaaataacaaaatcgttggccttccgcgtaacaaatctaattatagccaaatcatatccatggctgatctgtttcttcattttcacgcggtggttttatgattctctgatctttgtttccttacatacacacatgaaccagagactaagcttttttgtttcttacatggcgattacaagctacccatttcatcagctttcttcctcagaagatacttttgtactttccccgtcgaggttttaggtatgtccccgaaaactatagtctttggagccatgtaatgcggcaaatgatctcgacagaacccgataatctcctcgggtttgatggtatcaaatccttctttcagctttacaaaaccgcaaggagtctgtccccagtgatgatctggacgtgctacaacagcagcttcaagaaccgcttgatggctgcacaaaactctctcaacctccactgagcttatgttttctcctcctgagatgatcacatcttttaaccggtcttttatctctatgtacccgtctggatacttaacagcgagatcaccactgtggaaccaatctccctcgaaagcttttcgtgttgcctctatgtccttgaaatatccactcatcacagtgtttcctctgaacataacctcacccatggttaaaccatcatcagggacagtctccattgtcagcggatctttcacatcgagcccttctagacccaaatgctgcactccttgtctagccttcaacttagttctctcctccaacgaaagtgaatcccattcaggtttccacacgcaatgtgtccctggaccgtatgtctctgtcaaaccataaagatgagacacattgaaacctaattcttccatcttagccaggatctgcggtagaggcggtgacccacctgtcatgatctcaaccctgtgaggaagcggtttatgttcagtcacagtatagttcacaatcatattcaacacagttggggctcctcccatgtgagtcactttatgcatagcaatgttcttaaagatcatcttaggagagactttcctgagacagatattagtaccaccttgagctgctactccccaaacaagacaccatccgttacagtgaaacatcggcactgtccataaatacaccggataaacagacatctggtgaagaaagactgtagcaagagaattgagataagctcctctatggctatacactacacccttaggtctcgaagtcgtccctgaagtgtagtttatactaataggatcccattcgcatctcggtttgattatctcaaactcgctatctccggatttaagcagagtttcatattcgtaatcaaaagagtactttgaagcaaaggtagatgagctatcttcatcactatcatcatcatcattagactgagagatcaacacaagcttcagactttttctagttttatctgatttagcaagaagatcaagagctccatgagcaatctcaagtaactgatgatcaacaaagaggattttggcctcggagtgtgctaacaaaaccgacaatgtggaaggatcaagtcgagtattaagcggacaaagaatcaaaccagccataggaacagcgaaatgaagctcatgcatagctggaacattcggagctaaagctgcaacctataaaagtttcctcttttatcactaaacctaaatcgagaaccctaatcagagcagaaaattgaacaatttaaagagactaaccacatcgccacgagagattccgagattggtaagagcagaggcaagacggagacaacgttgataagtttggaaccaagtgtgtttaacggaaccaaacacaagagaggttctgtctctgtaaaccttagcggatcgctccaagaacgtgattggagataaaggagagaaatttgcaggggaacggagaagaccctctatagttctccatgattccggctcggaatcgtcgggaaatccgccggaatttgaggttgaggagaagggagaagaagttaaccacagtctctggaaacgtgggttgaagattctgaatgctcttttggttaacaagaatctcatggttaacactttgatttggctgttgttcgacttctcaaaaaaaattgaaactttattgtatctgttgaagtttatcaagacgagtttgatgattctctgttgtgggaactcatcagataatgacagtcgtgctgcctcgtgattaacgaacggtgtgtgatttactgaatggaaaacattacaagtttcaaattcaatttaacggatatatatatacttttaaattgaatgcttgcaatttcatataggagttttagtacgcgacaagtcacaagagacattaatataaatactatagagaaatatgctataaacataagacaagttggcataatttatggtggatctatcttccttgtacaatattcatattccccctctcgaggtatacgattaagaactatagtaatcttataaaaaatattattcgatccctctttgattaaaaaacaattatctgattaaagagaccctaatcacaattacgaacttggactcaattacggtcgcgaccagataaggccaaagccaacaaaaatatatacaaatgaaatgatatgaaattagtagaagtagaaccattcaaagcggtggacactggaacacaacacaaacacaagatcaacgagaaaccaaacaacaacagcgaccatcgagagaatccactaagaaaacaaaatagattaaaaaggggtttctcaaagtttctcatcatatccattaaagtagcctcctttttgctttctccgtctctctctcttttgtccaatcaaaaagagtttgtgattcttctttatcgtctccttggagagatatg

SEQ ID NO: 26151 - DNA, 3003 bp, Unknown
  misc_feature (1)..( 3003): 2750-1469P.txt file - cDNA_ID_2710974; gDNA_ID_2214702; Annot_ID_136893
aaaccaagatattgatcaactgattctgtgtcagttggcacctgatgaaactggacagcggcgccgactaccttttctgcagcttttttaactatcatgttatgcacgtctttagttagacgaccctcacgccacaacggtttcaacatttctttaatggtttccacaactgcagtccggaatagtctcattactttcattcctgcatctgacctcacttcaccatctatctcatctgatttctttgtctttttatatgaagacccatcacttctatgccaagaatcatgccctgcaggtttgattcttttcaaaacaactctattctctgcagccgtagccgaagaaatctctttgctaggcgttgctgtatcattttgatcaaccactgacgtagccaccccttccactactccatgtgcttccaaactccttgccacggtttcttggtgttgattttgactgcatgaactgcttttatcatcattcttgcaatcccgtgcttggggaccactagcagaatcaccatctttctgctggcaggaacttttccgtgcatgttctcctttacttgacaatgaatcattaagaggtctgtctcctagattctctatatccgtgaaaggatcgtagagggcatcagacgagggaagaatataaggtggaattgtaaaagatgctttaaaaggttcagaaggttcccagtcatctgaagaaactttctttttagtgctagtagtgttggcttctgcgcctttatcagaagaaacagctaccccttgcagcgttggaagtgatccggatccagataaactattcccattttcaaaatcccccaccgtagaagcacgatcattcataggaacagaactggataatgatcctgtccaggctggtccagcagatcccatgtctgtttttaaataggaactgatagaaggtctatgctcatgaacaaagctgcttctcaatgcgaaggaattggcgttattaataactagagacctgttgtcagtgaaatcagcaccatacgtttgcttcaaactctctcttctaatgttttcaaatgaaggcataaagcgcatctcgttattgaacgggaaaactctctgagaacctgggggattcacaaaagacatggaggagaaaactctctgaggattcatgaaagatatatcctctctggtaggcaacgatgtcacaccgttttcgcttaactgggaaactcttacaccttctctgctgtccaaaattcttctttctgaatagacataagcaaaataaattattggttgattcagaaagagtaattaaaccccatagatattcaccggcctctatattgttggaactacctccacatagaatcacaagaataagtattcatggtacaacgtacctagatcagaccggataccaccgtttccagccatactattttccgccagttgttgactagtgcaatttgaattctctttcacatgtagaaacttgcaggacaccccattgaaacaccaccctttagcaaaaaatttgcagggaagagctgcacgtttttgttctggttcattcccaccaccgccagtgaaaaagcttcttggcggtatacccggagcaggaaatctgataaccgaatttgtcagtataaaagcttcaacctcttaacttagtttcagcaaaacttaagcagaaacttttttgccataccttggtaaagtaccattatcttgagcaaaagcttgctcctttatgatttttgattgctcatctaaaggtgttgttacagaatgcctcttcacatctacatgagacaagtttaatcagtacatattagcaaaactgctgttttgaataaacaaaagagattccttacagaaacaagcacaaaactctgagaattgaatttgcttacttggtattaaagccacaatttttacaaaagagcttcagtgaaaatctaattgccaagtctttgaacctctaatcagagctaaatctagtcaatttaacaattctctctttcttctagaacaaaattcatcaattccaaattggaaaaggtgtttccatcaataaaaacacgaacttgacagaattaatcaacaataccatgtaaccaatcacgaatttcaaatactaaccgttgtgggaattggaagcttgaattggtggtttatcaaacaattcagattctcttacaattgtatgtacttgcaccttttgttcgacctcatcatcatcaatgtccatgtcggaatcagacatcttgaagtcttcggcgaggtaaccaacgcagagagtggtaaattgataaaaaaaaatactgcggcgtgatcggggtccgaagctcgctgttgagtcctgatgatctccgagaatacgtttggtatatcgaaaccaccattgttacaaagaccaccgaactattttatatctaatgggcctttcctaaataattaaagctttagtattaaggcccatactaaattccaaattttaccaactatttcctaaattaacacatcgttgcctttttatagtaaccggattaaaccaaaacaaaattaaagagaatcgaatcaaaccgtgaaaatcgtgaagcgtagtggtgctatattgcacgttaactgtctccatcactgccactggtaaaccctaagaatcctccgcaatttcgcaattttgtgaaggagccgccggctaaatttgatggcagaccaaagttcggagatcgtcaatgctctgtcgtcggagatggaagctgtttccgtttcatcaactcaggcatcttcttcgtccgatggattccagtgagttttcttaccaatcatcaatttttttcattttcgcgcttcaattttgatttggattatattatttgattagagtggaagagatgaaaaagctatagcaatttagaagtatggaatttaaaattgaaaagatcttgttatctgcttattggtctggtagatattgaaattttactaattcttcaggatg

SEQ ID NO: 26152 - DNA, 3000 bp, Unknown; identical to SEQ ID NO: 14135
  misc_feature (1)..( 3000): 2750-1469P.txt file - cDNA_ID_2710982; gDNA_ID_2214702; Annot_ID_136888

SEQ ID NO: 26153 - DNA, 3000 bp, Unknown; identical to SEQ ID NO: 14135
  misc_feature (1)..( 3000): 2750-1469P.txt file - cDNA_ID_2710982; gDNA_ID_2214702; Annot_ID_189709

SEQ ID NO: 26154 - DNA, 3000 bp, Unknown; identical to SEQ ID NO: 14178
  misc_feature (1)..( 3000): 2750-1469P.txt file - cDNA_ID_2711040; gDNA_ID_2214704; Annot_ID_136932

SEQ ID NO: 26155 - DNA, 1705 bp, Unknown; identical to SEQ ID NO: 14192
  misc_feature (1)..( 1705): 2750-1469P.txt file - cDNA_ID_2711048; gDNA_ID_2214705; Annot_ID_136960

SEQ ID NO: 26156 - DNA, 3000 bp, Unknown; identical to SEQ ID NO: 8341
  misc_feature (1)..( 3000): 2750-1469P.txt file - cDNA_ID_2711052; gDNA_ID_2214705; Annot_ID_136959

SEQ ID NO: 26157 - DNA, 3003 bp, Unknown; identical to SEQ ID NO: 21947
  misc_feature (1)..( 3003): 2750-1469P.txt file - cDNA_ID_2711066; gDNA_ID_2214705; Annot_ID_136946

SEQ ID NO: 26158 - DNA, 3003 bp, Unknown
  misc_feature (1)..( 3003): 2750-1469P.txt file - cDNA_ID_2711093; gDNA_ID_2214712; Annot_ID_136986
tgcagtttgatttaccagtcggggaacacatcgggagaagcacgtggatgcttttgcgcggatccgaggattcctattcttgagaaaaggttgaagctttggcaacagcaaggcaggagaaacatgtgcagtcattgctactaatgctttttctgctgcttcacaaacaaatcgcttgtcttgggaagatttaaggaggagttgagtaagctgtaagaagggaattcggagttactgttataagaacacacaaatgtccgctatttgaggagaattccaagagtatctgcaaaagatgatttaccaagagatccaattgatcgattgtatggtcattatatgagctgaagatgtcagcagatgtcatacatgcggttttacttacagcacttcttgggttcttcagtgatttcacgataaacaggatcactttctccctgtaagagctgacagcgtgagactagaaaattctctcgacgtgtaactcgctctactaaaactgatcataatcacgagtagaaagaaaatgacttacagcatatgcagcatttcttccttgtggaatatggaaagacgacgaatggtattaagagcatcacagaccaaaacccaatccttggagtctagctcggttacaagtgactggaataataaagaaagcagttccagaatggtattaggtaaacaacttacttccaatgtccaaattctaaacagatgaatataattgcaaatttgcaaggcagcattacaaatgagaattcacagtaaagcataggatactagcaggaaaaaacaattgataccttgagaactgcatcaacttgggttacattgttcaagtctttggattctatatactcaatttctacgataactctctctgcctcaggtttctcaatctcatcgcctttaggatgattgtgatcaaaggggacagagttttgtggtggtttatcttcagctgttccattcattttgccaaccaaaagctttgttttatagtcgatattcctctcagagacaggaagattcttcaaatcttttaaagccttggcagccatgcgtacctgaaaagtaacaaagaagacgccattataagtacaaacaacataagtttagcatctgcgattacaaaaccaaagataagattatagatgaattttcgacctctagcttagtattaagtattcccaatgaaaccctttcaaagtagaaatggtaagataaacacattactatgagagttcaacagcaataacattaaagagcagagatctatctacattcccaaatcttatttcaaacaattacgaaatttactcaaaacaaaagcaaaaaacctcgatcccactcaaggactctaaaaagttcaaacaaatcctcgcagtccgaaatctaactccggcgccgtaaactactgcaaccgcgaaagatcgaaaacgcagaagaatagaaaaagtagcggcgagtcaagcggtatcgatgactactaacttgaagagtaaatagtgaagattatttgactcgcgtacctctataaattcgaaatgccagagaaaattcagggagagaaagagtcgatgaagacgacgaaattgatttccggccaacagttcgcaactcgtagtagagtcgtcgtagtcatactcgtttacaccgacgtcgttttatggatccaacggaggggacccatttgtacggcatatcttgggcgaaattaatgtttttcttttccttctctctgatacactttggttggttattgtaaattcctcaaataccctcggactagatatgcatttttatttttatttagatatggaattggtatatacatattttttaatacgtaaaaacttggattggtgtggaaatattttattttctactaaacgaaataaattgaacgtataaagtacatcacatgttacatgcactgatgcacatgaggagtgcaaatttgaaaatataagataagaaacatgttgcaaagctgccacccaccgtatccaattgctactatttgtatcaatcagttacaaactgaaaaccaaaaatgaaatgactagaacaaataatgttaaaatgcacattgaaatagttaacaaggaaagcatacattgatcgataaaacgaatccaccacgttccaaaatattttgtcgcagatgttgcagacttgtagctaagttgggccggtagatgtaggtgacaagtgtttacaaatctgttaactgtcgctgtgttcctcctacttttgattttgtgttacactattcaaaagttggtcgactcttttaatcggttgattagactagtacttagtaaaatttgttgttaaaacttaaaagggagaagaagaagaagaatactgctttaattcttaattaatttttttttaaaattagtagtatcattaacgtgtttattacaccttcctcgagttactttcctcgtgatgccaatggtttttttaattctttaccttttcttctgacacagagtcacatatttgactacggaggagatctattgcttcctagttcctacttatctttatcgcgttgtaccaacatcaatataaaagcaacatcttactttataaacttccgtaaatttgataacaagtacaatcaagtttaaatttttctaaagttaacataaatttagcatcatacaataattaacattttttttaggttaaacttttggtgcgttacgtgagtagcagcatcttcgaaaatatgtttagtagtagtagtgataggaattaggaaaaggcacacacaaaaaagaaaaaaaaagggtaaaaggattcattcacgtttttttgttttctctctccaaacagaacttcgggaaaagtggacaaaaaaaaagaaaaaaatttaataagaaaacctctttttctcgcaatttggttttgttttcaatcttcttcttcttcttcttcgtcttcaatgcaaacaatgctcgattccattaacctaatcgaataatg

SEQ ID NO: 26159 - DNA, 3003 bp, Unknown; identical to SEQ ID NO: 26158
  misc_feature (1)..( 3003): 2750-1469P.txt file - cDNA_ID_2711093; gDNA_ID_2214712; Annot_ID_189923

SEQ ID NO: 26160 - DNA, 3000 bp, Unknown
  misc_feature (1)..( 3000): 2750-1469P.txt file - cDNA_ID_2711097; gDNA_ID_2214712; Annot_ID_136985
cgagacattaaccctgaagcttcgagactagcatgtcctctaccgagacttgagaagcttgaatgcatcattgcataatcaaaagagtttccaatgcaagagctgctggcgagcatatgctttctggagaagaagaaacaagcaaccacatgatccatcagtgctttacaatttcggctatgtgttttctcagacatactcatgttatataaggccagacaagtccaatcaaataaagtctaaacaactgattgaaaatatatcgtatgtataagtaattcataagagaagatcaaaggccccttaaaaactccaacgaacggtagcacagaacgctcaacttatactgaaacttaaattcaacaacaccaaatcctagtccagcttaatcttcaatagtttatcgctttaaaatcgaacacattactcgcaatacatgtaaagacagcttaaccaagtcttgcaactatgttctcgatctcaacccaaattcaattcttataaaaccctaacgcatcgtcgaataccagaagcaggggaacgtacctcgaatcagacgtctcctcagctccgtatccctcagcatcactgggcggcgaggcgttcatgtccagaatgagcttggacttaacccccaacggccacagtttgctcctctcgccgccagtacgacagtcgctgcacatccaatcggcggaaggagccgcctcaactccatcgttgacacaagacatatgaaagcctcgctcacaggcatcgcagactacaacgagctctatagactcaggtcttccacacgcgccgcacgaagcatcccgatccggttcaggaacctcggcaggggctccaggggctgggtccgggttatcgtgaattgacctaacaacttcaacaggttcatattcgccgtcgtcatcctgaccagcggtgcaaccaccgccgagagtagcgccggtagggatttcgttgagatcgatgccgagaaaggagcgactctcttccttgacagcggcggtcttagtgtctccgagttgctcgttagtagaatcagtgggttccattattcgattaggttaatggaatcgagcattgtttgcattgaagacgaagaagaagaagaagaagattgaaaacaaaaccaaattgcgagaaaaagaggttttcttattaaatttttttctttttttttgtccacttttcccgaagttctgtttggagagagaaaacaaaaaaacgtgaatgaatccttttaccctttttttttcttttttgtgtgtgccttttcctaattcctatcactactactactaaacatattttcgaagatgctgctactcacgtaacgcaccaaaagtttaacctaaaaaaaatgttaattattgtatgatgctaaatttatgttaactttagaaaaatttaaacttgattgtacttgttatcaaatttacggaagtttataaagtaagatgttgcttttatattgatgttggtacaacgcgataaagataagtaggaactaggaagcaatagatctcctccgtagtcaaatatgtgactctgtgtcagaagaaaaggtaaagaattaaaaaaaccattggcatcacgaggaaagtaactcgaggaaggtgtaataaacacgttaatgatactactaattttaaaaaaaaattaattaagaattaaagcagtattcttcttcttcttctcccttttaagttttaacaacaaattttactaagtactagtctaatcaaccgattaaaagagtcgaccaacttttgaatagtgtaacacaaaatcaaaagtaggaggaacacagcgacagttaacagatttgtaaacacttgtcacctacatctaccggcccaacttagctacaagtctgcaacatctgcgacaaaatattttggaacgtggtggattcgttttatcgatcaatgtatgctttccttgttaactatttcaatgtgcattttaacattatttgttctagtcatttcatttttggttttcagtttgtaactgattgatacaaatagtagcaattggatacggtgggtggcagctttgcaacatgtttcttatcttatattttcaaatttgcactcctcatgtgcatcagtgcatgtaacatgtgatgtactttatacgttcaatttatttcgtttagtagaaaataaaatatttccacaccaatccaagtttttacgtattaaaaaatatgtatataccaattccatatctaaataaaaataaaaatgcatatctagtccgagggtatttgaggaatttacaataaccaaccaaagtgtatcagagagaaggaaaagaaaaacattaatttcgcccaagatatgccgtacaaatgggtcccctccgttggatccataaaacgacgtcggtgtaaacgagtatgactacgacgactctactacgagttgcgaactgttggccggaaatcaatttcgtcgtcttcatcgactctttctctccctgaattttctctggcatttcgaatttatagaggtacgcgagtcaaataatcttcactatttactcttcaagttagtagtcatcgataccgcttgactcgccgctactttttctattcttctgcgttttcgatctttcgcggttgcagtagtttacggcgccggagttagatttcggactgcgaggatttgtttgaactttttagagtccttgagtgggatcgaggttttttgcttttgttttgagtaaatttcgtaattgtttgaaataagatttgggaatgtagatagatctctgctctttaatgttattgctgttgaactctcatagtaatgtgtttatcttaccatttctactttgaaagggtttcattgggaatacttaatactaagctagaggtcgaaaattcatctataatcttatctttggttttgtaatcgcagatgctaaacttatgttgtttgtacttataatggcgtcttctttgttacttttcaggtacgcatg

SEQ ID NO: 26161 - DNA, 3003 bp, Unknown
  misc_feature (1)..( 3003): 2750-1469P.txt file - cDNA_ID_2711101; gDNA_ID_2214712; Annot_ID_136984
gacagaataatactcaatagtcaatactaatttataaaaaaatattggaagaagaaacaaaatgccatctcattttggtctcacacacgacaacataaaaagtcgagcgcgtggctttcacttgttatcaatgtcgctatcgaaatcaattgagcatttagtggaaaccggtaaggaaggcgcagcgaatctcatcgagtaatctcggtacgggaactcgtcgtcaaaatgtccggtttgatttccgtcatcgaaatttaacgagtagctcaactgatcgtaccggaatttaccctgatccgatgaccggttaggcattgcaccacctccgcatcctccgctgctgtttccgactctccctcctcctcctccacagcagttgctgcgtccgaaccggcggatatacgtcttccatctaggtccagcgacgagctccgaccactccctcatcctccgccaccctcggatccaccatcgctcgtcgggttcgagtttgtcgacggtcgtgatccgttgccaccacacagatccgccgcgagttgatggctgagatgaggcaaggcagggcatgaggaaacaacaacctcgcttcgcgaacaacgcctcgtgcatatcgtcggtggcatcaacttcagcgatcggcggcgattgatgactcattctcagagagaaacagaaacgaaggaaatatggaatttcgtcctgatctagctactctcttttgtctccttagatcgtcgttcctcttctcatctccaactctaaaccctaattttctccctctacccaagagatttctatcaccttctccaatcaacgcgtctcttgagctgtaactaaaacagaagagcacaaaacggcgtaaccgccaacccggcaatattggttctcattaaccctttttaaccgctttggttttatcacatctaaccgggaatttcagctgttgatgctattaatttattaaaccacatatgaatgaaggggttcatatacgtaattgacgttagcacatttggttccaagtattgatcgatacattaaaccgcaataaaattggtccgtttctctctggcccaaaattggttcgatttctccataagctgaaattgataactcccagtggatgtaatgtatctaatattcttggaacagattcattgcaagtgaatgttctaaccaaaatcacctaatctttttgcaaaatctaatatagtaagtaggataatatcttacttttgcaacaagccactcattcgtaaaaaccggacatactttaatgggataacctacaagtctacaactcatctggaaactatatcacaaccgatggtttagtatagttcttcaagtaacctttttatgaataccaatatcaatcagaagaaggataccggtcagcagtttgtttcagatcttcaagctgcgtgagaacatattcaagcttctggaagcagatctcattggctattctcgcgttgtaatcgcatttctcaaagggacggtactcgcaagcgcttttgatctcttcccttagtgtcacttgtatatcctgcaagtttcacaagaacttcatcttattatggattggcgataacattatagcacatttatgtacagtcaaagatcaacaagttcatgaaccagacaatgaagctgatatcttcaaactttatgattatctctagaaaaaaagcagaatcaaaagctttttacttgttcacagaatgtaatgatccctaatctagacatgtgtcaaatgagagcccaaatgttctttaaacagtgagattccatccaatatgaaaatatcagcatccatcactcataaaccttaagcctaagaataaaggatcaatgtcaaatcctaagaaacaggaaaggaatacaaacctagagattgtgatacatgaacccatatgttaactagtcacagaagaatcacaaaacgagaagcagcggccatcttgaagactaaaaccaaaatcaaaattctaaacaaagcccttaactttgatcaggaaatgtaatgaaccctaatatagacttgtgtcaaattagcccaaacgatcaacactcgagaaaagataccaattccccagagagattgagtcagcaagaacactaatctagctagacttgtgtcaagtgatccccaatgttctttgatcaggtagtttattaatacactaatgcaaaagaaatcagaaaatatttgaagaagagatagagtaagaaaccttcatagattgcataaactctcggcaatggctgttgacgaactctttcttgggaccagaagggctcgcgagttcttccatcactccaccagctagttccaaaaccttaacaactctctgcccggaaaaccaaaaataaaaacacaaaaacacattcacatcaaatcgtccaataaaatctctaaggaaagagtgagttttccaaaatttcacattctcaacattctggagtcgctgcaacgaagtgttctgcgtctgcggatccattggactctccacgatttcttttagaccagagagagagaactccaaactgagatatatcacaataccgtcaaatccactcatacacataccctaaatactcaaatcggagcagtgggagtacctcaatcgaacacggcgacgcgagacagtgaagatggcagagacgatgaaataacacggagaatttcgattggaaacggcgtgcttatgatcagcaacggagggaagattttggggaatcggcgacactcggcaatacagatcggtgaaggaaaaagcaaagaagatacaagttttttttgtcacgtaaaacggcacgaactctactttatcaattcaggaacagcgagtagttaaaatattgaattacgaaaacaccccttggttcagataaaatctttgtgatggccgcttttctcatttataacggataaaaaccgtaaacaatacacaagaacagaggctgacacctaaagcttactctctaactgcaatg

SEQ ID NO: 26162 - DNA, 3003 bp, Unknown; identical to SEQ ID NO: 26161
  misc_feature (1)..( 3003): 2750-1469P.txt file - cDNA_ID_2711101; gDNA_ID_2214712; Annot_ID_189921

SEQ ID NO: 26163 - DNA, 3003 bp, Unknown
  misc_feature (1)..( 3003): 2750-1469P.txt file - cDNA_ID_2711121; gDNA_ID_2214712; Annot_ID_136977
tactcttcactatgtcttgtctcaatcggtttaggcgtcttaaacccttctcttcaagcctttggtgcagaccaactcgaccacgacctcgataagaatttcgatctttcctcgggtgatcaaaaggacgcgaaagctacccgaaagactcagtttttccaattgtggtactttggcgtctgcaccggcagccttatgggtgtcacagtcatggcttatattcaagacacttttggttgggttctcggtttcgccattcctggtatcgtgatattcctgtcgattttggtgttcatgtcgggttgtggaatttatgtttatgctccgggcgcccgtctgaagaagaaaacaactactacaccttttgagaagattcttaaattcattaaagggagagtagtgaagcagagaagcatatatacacttgcagatgagaaagatttggatgctatggagcttgagtaagttcggaaaaaccacgatatctcatgaaactaattagtcttttaagttttttagcgactaatgattacctgtttatgtaggctagaggagaggcctctctgtaaatgtgagaccgaagacattgagactccttcaacaacctccaaaggattggaagatgacgagagctcgaaaacggttttctctggaattgataatgttaagttagtgattcgccttttccccatatggatgatgcttctcatgttcgcggttatcttccagctaccagcaacctttttcaccaaacaaggtgtgactatgaagagaaacattgggtccaacttcaaaatcccacctgcaaccctgcaaagcacgatcacattatcaatcatcctgcttatgccattatatgataagattttgatacctattaccaagagaatcaagaaaaacggtacaggtatctctgtgatggagagaatgggagtcggaatgtttctatccatcattgccattgttattgcggcaatagtcgaaaggaaaagactagccataagccaaaagatgaagactttacctgattatgatccagaaaccgtcccactgagcatcttctggctgctgcctcagtacatcctcttgggaatctcagatatattcacagtcgttgggatgcaagagtttttctacagtgaggttcctgtaagaatgagaacaatgggatttgctctctacacaagtgtttttggtgttggaagctttgtgagcgccgcactgatctcaattgtcgaggcttactcgagctcaacaggtgaccgacaaaactggtttgcagatgatatgtcggaagctcggcttgacaaatactactggcttcttgctcttacaagtacaataagctttgtagtctacatatttctatgcaagtttttcaagagtagcagtgatcaaggcgatgaaaaagaagaagcccctaaatgaaagaagaaaaactttgattcctttgacacagtcgacttagataaccgtttgccataagattccacgaatgatctaactgtagtagtagctttagaactaactagcaaaccaaaagagatagacaactgtaagatttttattcataagaaacagtatcttataatatcaaatgcaaaagattcaacattattattatctcgtgtgtttgattacatatcatcattaatcctcccattgaccaacaacatttctaaaatggacagattcaaaacagacaaaaaaaaaaaagtctgaaactttgatttatacctttaatcatgtgagctgtttccattgagaccaacttctttagctacgttgctctcttctcgaacctcgtcttcttcatcagagtcaagtgtgaaagtacttaaattctccaactcagctccgagaggtcgatatttagaatgatcttgacggagataaccattcttgttagcaatgacagagaacaaaccagtagccacaactaccattagagccaaatgacagttaaattgaagagtagctatagcttttgctcggtgataatcaccgtgtcctttgcacttgatcgtgaaattgcctctgctcttctcgtgaaacgtacagttattagtgatcaaaccggtaaaaaacgatacacccatttgcagaaaccatgttccttgcagaatcagaccgatcccacgacctaatttcgcaaaccgatgcgtgctagagtcggatttgagctcaaaaaccgtggagaagacgcagatggcaatgggcacgagcatgagatcgtaataacgattctcgattccagaaacatctttcttttgcaggtagaacattaagaactcctcaatgaagccaaagagaagcaataaagttgtaatcgaagacggaagtgcaacaaagacagcgtttttggagttgaccagatatgttagaatggcgtaatataggaatagtactgccactgccacgatctgtaactggatcattgacccgacccgatcgcgagatccgattgagctgaagaaggagaaaaacgagttcgcaataaacagagacgaaagcaaagctacggggatggaagatgatccaacagattttggcggcgaagctctgatctgagccataggggaagatgaatcagcagtaccagaagatgaattcggatccaggttcgatgagtccagtgactcccacgcgccgattactgcaaatccaccgccggcgacggcgtaacttaatatacccatgactccaatcttcacaatctctgcgaatcaggttatacttctttcgaggaaatttggatttttccgccattaaagcttaacagaatcgagcttctgatctgataaaccggaaagatccgacccgacccgaataacccaaaatgggataggctagtagcccaataactcaatatgggcctactggggtcttcaaatagttcatgtttaaatattctaaccatcacgtgacaatcatgtgacctctatggatatgctgctgctgcatatagctccgcttgcgtaatccagtttgcttggagaaatg

SEQ ID NO: 26164 - DNA, 3003 bp, Unknown; identical to SEQ ID NO: 26163
  misc_feature (1)..( 3003): 2750-1469P.txt file - cDNA_ID_2711121; gDNA_ID_2214712; Annot_ID_189914

SEQ ID NO: 26165 - DNA, 3000 bp, Unknown; identical to SEQ ID NO: 11674
  misc_feature (1)..( 3000): 2750-1469P.txt file - cDNA_ID_2711138; gDNA_ID_2214509; Annot_ID_133812

SEQ ID NO: 26166 - DNA, 3000 bp, Unknown; identical to SEQ ID NO: 11674
  misc_feature (1)..( 3000): 2750-1469P.txt file - cDNA_ID_2711138; gDNA_ID_2214509; Annot_ID_184205

SEQ ID NO: 26167 - DNA, 3000 bp, Unknown; identical to SEQ ID NO: 11665
  misc_feature (1)..( 3000): 2750-1469P.txt file - cDNA_ID_2711142; gDNA_ID_2214509; Annot_ID_133810

SEQ ID NO: 26168 - DNA, 3000 bp, Unknown; identical to SEQ ID NO: 11665
  misc_feature (1)..( 3000): 2750-1469P.txt file - cDNA_ID_2711142; gDNA_ID_2214509; Annot_ID_184203

SEQ ID NO: 26169 - DNA, 3000 bp, Unknown; identical to SEQ ID NO: 11686
  misc_feature (1)..( 3000): 2750-1469P.txt file - cDNA_ID_2711149; gDNA_ID_2214510; Annot_ID_133817

SEQ ID NO: 26170 - DNA, 3000 bp, Unknown; identical to SEQ ID NO: 11686
  misc_feature (1)..( 3000): 2750-1469P.txt file - cDNA_ID_2711149; gDNA_ID_2214510; Annot_ID_184220

SEQ ID NO: 26171 - DNA, 3003 bp, Unknown
  misc_feature (1)..( 3003): 2750-1469P.txt file - cDNA_ID_2711175; gDNA_ID_2214512; Annot_ID_133872
agattatagcaatacgtcagaaaggtcaagtacaaatacgagtcgagcataacagagataatggaatcaatttcacagttgcaaacctgggattcacactgtcaagcccaagaaccagtggaaccaaaaggataatcggtgtccactcagactgtccttttgagaattctagacaagatttggtagcatcttctatacagagaattggagccccacctctctctccatcttcgctgccagaaacgatatgaacagccataggaagcgtctggtttttagaatcagtttgttttctcttcttgcacgctaatgactcccacgctcgacaaatggcatacggtcctacccatgacccagcagcgagaccataggacgctccagctattataagattgtggatggagaaagctgaaggctcggaatcaccaaaaggttccaaggtctctaagtattcctgttcaggaagctgcatttttaaatcaaacaagcatgaggtttccactatctcaatgcaagaaaccgggtttctgttcctagtgttgctacattgagcttacctcagatttcttagtccaagccctccccagcctatggaaaagcaacgcctgataatatttggtttgtcagaatatgttataaacttcaaaatctcatgccaaaagaaatactcttcctcacacctgagcaaaaagcatctggctacttcgaatcatgcaaccccagttcacatcgctggtataagttgtgtctctaaagggttcaaaacctgtaaaatacaattcgtaaatggtaaattttatgtaaaaaactttattttggctttaatctgtagttgagtttacaaacctttacgatatgtcatcagtattttggatgaaaaatctagttgcaatgcagccaatacagtgccagtatcggtttcccctgagttctcatccgcagatattttatagcagacacccaagagccatacgtcactagttgtgctcggaagaccggtcctattaggccctaaaacacgctcctggaatctcctaattgctccactagccatagagactctttttacaaatgctgtccaaccattacgagtggtgcaaacttgcttatgcccagaagttgaagactccctatacggttgagaaactgaggaagaagacgtaaacacgtttgaccataaggtaaacttggacttattatcactaggtccagaatctgaaactaaaggggatttatcatgcgtatcactcttgcttgatgaagaacattgttgaggaacaaatctatcacataaagccttcattacctagacatgaagcaccaactgcaacgtgtccttctcatagaagcaacctaaatcctgagaaccttatctgaaataataagcacaaaagacactgaattaacatccaacatacttttaagtagtatcagaaagccaagattgactaaaaacttccacaattaacttcaaacactacacaagattgggtgtgtgtgacttcaaggttcagaaaagtttaatcaattaactctctgagaccataactatagttttgtgaccactgaagttcagcttaacaccccaaaaacaagtaagcatgtaacacaataacgattctacaattacaaacactaagcagattttgatgagaaaataaacccaatccatagcttcttgacctcttgaaacatcacaacatagaattttccgcatgatattaggaaggtttagggagtcaacagagaaatataaaccaaaattttagagatcaaagcatttggattccacatgcatattctcttaattgaagaatgtttctagcaaatgacaaaatcaagaaacagacttgagcttgacgaaatttcaactcacggatctacagtaatcgaaaatgatcaattaatcaacttaaattttgacaactcctcttcgtgtagcagaatttcatcatccaatttagcccaggaattctcacaactccgaatttttctagcagagagaaaacaataggaaaagaaacagaaggatcacctgagagatcgatcaaatggtttcagcagacgacggagatggaaaacgcaagggggagatcgatttcgtgtcgtatcttgctcgcttcaacgtcccgtcgaagatacctcagagcaaagacaaacgtgtgtttcctttggaggttttgggacaatctcaatggcgattcttctttttaccttcttcaaatctttcgctttcaactaatgacaatctatatcgtttaattattaattaaacttcacataatcagggttatgaattatgattacacttgtttaccatttttttacgtggaaaaaaataaatactctccgatttacctgtttacttcggataaaacgttcgaatattatattaacaatgacattgatagtattttactttacttttctccaggttcctaatttttttgttaacacatccatcaacatgttaacagtacacaaaattaaaatgttgctgctgcttgctattaatgtgattagtgattacggctaaaaggctatgacatataaacgacataaagcaacaatattagtttgggttaattaagctcagctaatttgggctagttaaaaaaattggatcggataaaaaagcccatattgacactgggccaacatatcatatcgagtcaagttacggttttaccctgaagccatttatttctgaagcgtaattatcaaagagaaaaaaagattaaaaaaaaagcaactgccgctctttcttctttcttactgtctcagatccgccattgttacttcttcagttcttcttcttcaacaacaacaagaagtaataattagggttgagaaacttcgaattccgaaacaacagagagacgtactagttttagccatcttcttttcttagtttcatcgaacttggtgttacctcaataggtcgacgctcaaatcttgcttattctctggtttttagagcttcttttagattctttcgacatg

SEQ ID NO: 26172 - DNA, 3000 bp, Unknown; identical to SEQ ID NO: 11710
  misc_feature (1)..( 3000): 2750-1469P.txt file - cDNA_ID_2711179; gDNA_ID_2214512; Annot_ID_133871

SEQ ID NO: 26173 - DNA, 3000 bp, Unknown; identical to SEQ ID NO: 11706
  misc_feature (1)..( 3000): 2750-1469P.txt file - cDNA_ID_2711183; gDNA_ID_2214512; Annot_ID_133866

SEQ ID NO: 26174 - DNA, 3000 bp, Unknown; identical to SEQ ID NO: 11706
  misc_feature (1)..( 3000): 2750-1469P.txt file - cDNA_ID_2711183; gDNA_ID_2214512; Annot_ID_184295

SEQ ID NO: 26175 - DNA, 3000 bp, Unknown
  misc_feature (1)..( 3000): 2750-1469P.txt file - cDNA_ID_2711187; gDNA_ID_2214512; Annot_ID_133861
aaaagcttagagtatcaaagaatagacaaaacttcaagcattcaacgccgagagtagattcatcaatcacagcaggacaatggttgtaaaagtcaaacaaagtgtaatcacagtttttagtagttgtaagaggctataatcaccaaaacaaagtttctcaccaaagaccatagagaactcgcatcacattagatatcatcaactaggatcctagtggaatatcccaaaccaaagaacatacaatgcatctctgtactaagagacaatgatcatatcacgtgaatcaagaggattcgtgggaaatacagatccgaatgttcgatctacacatgatagcactagatcaacctaaatgtcaaacagatcggagaaacaaaaagctcgatctaattacaccacctttttccatgtattccgatcaaatcatgaaggatcaacgcaagaacaacaatgaagagaaataaaacttagtggatttgatttttacctggattggatgaatgtgagtcacagagacaaagagaagagagtgctccaagagtcacaaaatgattatagattgtggaattggttgatccgttgaactttatattaactattatcaatgtgacgcgtaatcttcgctcgccgacaaaattttcgtcgtgtaagatccttattggcttttaaaattgacatccatttcgacacctcaatttcaagatattacaacaaagaagatcacatttttgattagtacagaaagacccccaaaattcggaggaattattattatcatacgattcaaaaaaaaaaaacaaggccagaagcttacaaaagcgtttaaatgattttgtaaccaagggtaaaacattttgacaatctttgaggtacaaacaatttcagagactggattgtaaccaaatgggacaacatcaagaggttctcatacgtgatcatgttcatccatcgaacgagccgagctatttcaggtggtgctcaaacaacgacgccatttcgagctgaaaaacaagaggaagaaatattcaaagactttaccaaaaagacataagaacccgaatggttataacatgaccagttgctcaatggaatgatcaggaatttctacatcttattctaacaataaaggattgaatcataatgatacttaccgccgtcaaagcagtttcagctcccttattgccggctttgccaccagatcgattcagagcctagagtttcagttaaccacaatattaacaaattcagtgttcatccattatgatgaataagctatatatcatcaactcttgcataacacaacttaaacctgatccatgtcctcgcaagtcagtacaccaaatatgcatggaacgcctgcaaattggattttttataagctttaattactagagtcaatagtgcgtaaacacaaaatttgaagaagtaattcatgatgagggaatttaaacatccaaaatccaaagaaaagcaaaaatgaactacccgctcttttaggttcggaagtatacaaaatcaatctttcagtgtttccaaaacaatgtcaaataaaaatgtctaaagatgtatatccagcaaataagtatcgaggtaaacctgaatttatgctagcagaaagtactccagacgcagcagagttggcaacagcatcataatgtgtggtatctcctcttatctaaaccacaacaaggacaacagtaatatcaaaatccaactctttaagtatatgttatcaacataaagcaactactttctgaagccatatgaggagaaaaacaaatggaatagcctgagattctttcaaaacaagaatcataccacagcgccgatacataaaacagcatgaaattttcccgatttcccaagattttgtgcaacaacaccaatttcaaagctgccaggaacccaaataacctgaataaaaacagtgtcattagctttgtgaaagctcataactttttattctgttctacaagcaaaagacttttacttcaatgtcttcttctctgactgaatacttcttgaaagtctcaatcgctccttccaaaagcaacttagtcacaacctcattgaaacgagctaccaccttgagaaagaaaaatgaatcagaaccaagtcaacactgcaattgagctcaaagttttcaaatttcactgtaaatcagaaccaagtcactaaatctaagcagcgcacaaagtaagaaagcgattctgagaactcacgatggcgaatctaagaccttcgcctctgataagagaccccgtaacatggcgaacagcagccgtctgtacgaatgaagagcgtaattccttctctacagctagtggtgacgcaaatcctaacaccaaatgttaacatctcaatcacgaaattgcgaaaaaacgatttgagttattataagagaagtgagagaaagcaagcttaccggatgtggatgaggagaatgagagattattggatttgttcacagaagagccaccgtgtatataacaggcggaggaagattgacgcgaattgagctgacggtgtgccgtcggtatcaggcggagacacggcggcgaagctaatgacttcatttttcgttcgtcggagttttagagacggttcttcgttcttcaggttaagagtgagactgtgaggtccattagcttatcaaatcggttcaaggcttccggtttattattttcattaaaattacggtttcattgaatctattagtttggttagagatttccggtttgatgaaaagggataagctaaaccctacatccccaatcactctcaccggccggaaattttcagacaaaagtgaaagatttaaacttttgactccgtcgtaacaaagaacaaaacttccgtatcctggagagtaaattcctttatggctacgaatgggtacgtttcgaaacctacgaatttcacgttttgattgacggagatgagctttaaactctttaagaggattctattgaatttaaacgatttgatcacaggttaatg

SEQ ID NO: 26176 - DNA, 3000 bp, Unknown; identical to SEQ ID NO: 11704
  misc_feature (1)..( 3000): 2750-1469P.txt file - cDNA_ID_2711203; gDNA_ID_2214512; Annot_ID_133854

SEQ ID NO: 26177 - DNA, 3000 bp, Unknown; identical to SEQ ID NO: 11703
  misc_feature (1)..( 3000): 2750-1469P.txt file - cDNA_ID_2711210; gDNA_ID_2214512; Annot_ID_133851

SEQ ID NO: 26178 - DNA, 3000 bp, Unknown; identical to SEQ ID NO: 11644
  misc_feature (1)..( 3000): 2750-1469P.txt file - cDNA_ID_2711224; gDNA_ID_2214506; Annot_ID_133771

SEQ ID NO: 26179 - DNA, 3003 bp, Unknown
  misc_feature (1)..( 3003): 2750-1469P.txt file - cDNA_ID_2711232; gDNA_ID_2214506; Annot_ID_133767
gtcaaccaacacacttgaaactccatacgagtaaaggcccattggggatgaggatatttgggccaatccttcttaccgtttttcgtttgttaacaattaccgaattaaaagcttgatcgccacgtctttttcttaatagaatatattgattttatttatcttttatttttagaccaagctcaggctatcatctctccgttaattagggttttcttctctatctcgatttcaataccattgttgatccgctgagctagggttgttcgatcccgataattgtgtcgcttagctctgatctctgttcatcgaatttggttaatttgttttgattggttaagatacattggaaagcgatgccaccgaaggttgtgaagaggggaggcgccgcgagaagaggtgggaggcttacgagatcggcgctcaaggcgcagaatcctcacgtggaatcttcccatgacgaatctgttaatatcggtgagctctcaggctccgatgcactggaagccaaggaggtgactccggaggttgataaaactgttgaggaagagaatccattagatgtgccgaagtcatcggattcaattgatgattctgaagctgcagcgaatccgcatgttgatgttccgtcgaaaagtaagattcttttagcctggttattaattttgtttcgtttttgggattctctacgttttcgttgttttgatggatctaagtttcgctttgacgaaagtttgtgacttagagttccaacatatctgaccatagagattaaatgaatgtctgaccattgaatgtatgaatctaatttggaggatggatgtttagctgtttttaattctgtggaagatagacgtatcttctgagattgttatctctgaacaaactttaggctacctggaatagtgtagatgttttactcgcttttactcgcagaggagactgaggtagaggaatctgtggatgattttggaaaagatgaaagattggatttagatgacaatgaacctgagtatgaggctgaggaatatggcggggaggagtttgaagagagggaattgggacaggaggaccatgagttggtaaatgaggagggggaagaactggaggaagagattgaggtcgaggaggaagctggtgagtttgcagacgagattggagatggtgcggaggaccttgatagtgaggatgatgatgatgatcatgctattgaagaggtcaagcatggagaaactgttgatgtggaagaagaagagcatcatgatgttctccatgagaggcgtaagcgtaaggagttcgaaatatttgttgggagtttggacaaaggtgcttcggaggaggacttaaagaaagtgtttggtcatgtgggcgaggtgactgaagttaggattttgaagaatcctcagacaaagaagagcaagggttctgctttcttgcgttttgcaactgtggaacaggcaaaacgagctgttaaagagcttaaaagcccaatggtaattgtctacactttagtatttgatggagagtttgtgtagctttacattttgtatcatgctcttggtcattgggactgcagataaatggtaaaaagtgtggtgtaactgcaagccaagataatgataccctcttcgttggtaacatatgcaagatatggaccccagaagctgtaagtatttgggtgtccgtagatatgtcaattaaacccaactccacagttcgtggtgatcctgacaatcaggtatttgttgttgttccagttgagggagaagcttaaacactatggagttgagaatatggatgatataacgttggtagaggacagcaacaatgtcaacatgaatcgagggtatgcctttttggaattctcatctcgctcagatgccatggatgctcacaagcgtctcgtcaagaaagatgtgatgtttggagttgagaagcctgcaaaggtctcttttactgattctttcttagacctggaagatgagataatggcgcaggtactcacattgcaggatcaattatttctagcaactttcatcctaccatgtcttctttagagcgttggaggagtttataggggcatgtgtgggtgccacctattctgtatggtgacttagaatacttgctaaacccatcatgaaaacagagtcagaatacatattccttttggccctctaacaacatgctagatactgaattattgattgttggtgaatctattatatctaacttatctatcttgctcatagtaattagttttatgatatttctggtgttacaggttaagacaatcttcattgacggtctgttaccttcatggaatgaagaacgtgttagagaccttctgaaaccatatggtaaacttgaaaaagttgagcttgctcgcaatatgccatcagcaaggaggaaagattttggctttgtaacttttgatactcatgaagctgctgtgagttgtgccaaattcatcaacaactcagagctaggcgaaggggaggacaaggtatgcataatttaaatgcattatccttatccacgaagtattttcttgctttctaattctctttttttttccaggcaaaagtgagagcacgcctgtctagaccacttcagaaagcaggtaaaggccgacaatctagtcgctcagaccagcggtctaggcatggggctggacggtctggaaggagttcatttgctcgtcttccacctcgtagccttgcttcctctcggagtgctagaggcgctggatctcgggccccatcttctagtgcaaagagagcttctggatcaagaggaagacgtcctcgcccacctctacctccgcctgcaagagctaggcccttgcctccacctgcaagagccaggcccatgccaccacctgcaagagccaggcccttgccaccacctgctaggtcatatgatagaagacctccaggtaccactggaattattacatgtttagttatcttttttagttgaatctcttttgtgttcatgtatctaatg

SEQ ID NO: 26180 - DNA, 3000 bp, Unknown; identical to SEQ ID NO: 11623
  misc_feature (1)..( 3000): 2750-1469P.txt file - cDNA_ID_2711238; gDNA_ID_2214506; Annot_ID_133761

SEQ ID NO: 26181 - DNA, 3003 bp, Unknown
  misc_feature (1)..( 3003): 2750-1469P.txt file - cDNA_ID_2711244; gDNA_ID_2214513; Annot_ID_133896
ccatggggtccgacccgatcttttgactcagttggagcaagaagccatcaacttctttgctttgcatcactctctcaaagacaaagcgggtccacctgacccgtttggttacggtactaaaaggattggacccaatggtgaccttggctggcttgagtacattctccttaatgctaatctttgccttgagtctcacaaaaccaccgccattttccggcacacccctgcaattttcaggtataacaaccatatcaacctaaaaactaaaacgtttctttcgtcttttacaagttcttttaaacaaaaacagagcaatgatcttgaccattctcttcaccttcttcatgataaatatactcgaaaactattgttttatacgtcaatcatttccggaaaaaaacccatgaaatcagagttgccatgtttaacggcgagaaacaggggttattctgttttattctccgatgaataaggcttaaatctatccaaattttttacaaagatttcttacttgaaaatttgtcctttaaccccaaaaaaaaaaaaaaaaaaacagagatcctctgttctgttctttaacatacatttttggattgcaacagagaggcagtggaagagtacattaaagagatgaagagaatgtcgagcaaatttctggaaatggtagaggaagagctaaagatagagccaaaggagaagctgagccgtttggtgaaagtgaaagaaagtgattcgtgcctgagaatgaaccattacccggagaaggaagagactccggtcaaggaagagattgggttcggtgagcacactgatccacagttgatatcactgctcagatcaaacgacacagagggtttgcaaatctgtgtcaaagatggaacatgggttgatgttacacctgatcactcctctttcttcgttcttgtcggagatactcttcaggtactctttctgttgctacttctttttattttaattatatatctatcactactaatttacattatgagtttattatattttgtgctatttgggtgatattttaaattttatagaaacttatatattcttagatttattgcagttttagactttatgtataggaactaatacaaaaggagtatttggtggcttttgaaaattaatgcaggtgatgacaaacggaagattcaagagtgtgaaacatagagtggtgacaaatacaaagaggtcaaggatatcgatgatctacttcgcaggtcctcctttgagcgagaagattgcaccattatcatgccttgtgccaaagcaagatgattgcctttataatgagtttacttggtctcaatacaagttatctgcttacaaaactaagcttggtgactataggcttggtctctttgagaaacgacctccattttctctatccaatgtttgagctattattattttttgcttcttgtaatcaggcccatataggacatcttttagggggggtttcaaaatatatgtttatgggtcgaatattaatttggaagccttcaaattctgttattaagccaagtccattaccgaggacgaacaagtcgtaatcaggaaactgagataagaagattggtaaaaatatctggatttttaagttgttgatttcagttttcacatccggaagagtaacagcaaaaaaagaagaagcaagtagcaagcacgtctaaagtgtgcccgggttctatggttatggcgtaactgaatcttatagctggtcgtattatttaaagcaagcatgtaatcgttgtgatttatgttaacgaaaattttgactgcttatgaatcttttttgttttgatttgtgtttaaatcacacttaactttatttttcacaaactagctagtagtagaatgaatatacctcgccttgttaagaaaaacaataaagcggcgatactagtaattttgtttttcggaaattcaatgtcacgtcagcaagagtgccatgatgttattgatttgtcaaaaatatttgtggaaaacaataaattgaataacctttaataaaaaaatatatatatatttgtgtggtaggctgtacagtaatgtagtgctatgaaaagaaaaaaacaattgtcggctaattgttgagttttattattgttggaaaaaagttgggttttaacatgtgacatcatgagatcacgaacacttttagtaattagtactttgaatttaaaaagaaatcagaaaacgttattcttaaaaaaaaaaaaaaacacggattatcgatgctttcccgtattcctaaaactaaaatatactaacccctatatctggtagaattgttgtttaacaaaactgcagcagaaaattagccttaaaaaatagtattataagaaagttaacctaacactccatcattttcttcaaacgctcgtccattctattatgggtattattttctcttttgcaattttttttttctaatattgaaatacctaatactattctttatccaaaaaaaaaaaactatattgattcttaatttcatagtacactgtcattttatacaatataaaaatatataaatgcccccatactattttgtagtattagttgagaaaataatatttactaaacttgtgattttttaaaaatgttattctcgtaggtaatataattttgtttgtttaactacatattatcatgtaaatttttttatataaaatatagaaaaattacaaaattaaatttaaaaaaaaacgagacatttttcatgtgaatccatacaaaaaacaagaatccatggatctgatttggaaatgtgtttcctagcaattagaaataataataataattacagatttgtttcttgattaacaaatagttgtccaactgtgtagcacgtgcctgttggttgatgtatgtaagcgagagagctgttgttgttcaactctcgccatccatcagacatctctctgcttctcttcttcttcttcttcttcagctttgagatctattctatcttcaaagatg

SEQ ID NO: 26182 - DNA, 3003 bp, Unknown
  misc_feature (1)..( 3003): 2750-1469P.txt file - cDNA_ID_2711248; gDNA_ID_2214513; Annot_ID_133895
aatggatactattaattttttttgttgtatttatacaaattaatatgttttgtattggtacaactaagtacaacccgcacaactaaggtctattcacttggctagttttcagaatattataaaatatgaaatttaaacaaaactaagaaaacttaaataatgcatacacaatggtaatgaaattacataattagtttttgacaaaaatcatattttctaaattaatgaaactcttatcacaaaatctaacattcatacactaacaaccttatactttcatggttactttgtatattttaacaaaacaaattaaaaaatttaaatacttgtaattagataaatataaatacaccgatacaaagtaatggtattttgataggggaataccatatgttccacccataaaaattagttttgagttgataacaactagatttattatattctcgatattgtacaactatgagcaaaaatgtgcaaccgagtacaactgtacaactatgggcaatatatttttcagatatttatagatattttttagatatttgtagatattttataataaaaattagctttatttttttgtgataaaaatatttagtttattttttgtcatcaaaatacttaattttatagttaaataaactattttttttcctttcaaacttttttttccttttcaaaacactgttgtttaataaaataaaatattaacattcataattttttgtgttttgttttggatcaaaatacgttaatgtgtagattcatatttattttggagtttttttttgacaaaaaatcttagattcatacataaacttagatacatagttgtacatgagcgtaccagttgtatctaaacgcttagatctattatcttaaaacaaaaagacagccgaacaattgtatctaaacccaaaaacccaacataattatatctaaaaatttagccacaattatacctaaaaccaaaaacacaacactatctaaagactcaaacaagaagccttcttcttctctttgtcattctccttctcaatttctttctccttcttcccttttcttctagtttttatcacaaactatctctaaggaacaaaattcaaattcattcgaatcccaattgtaatcctaaaaactaagtcataatggctattagaagatgcttttaagggacaatttcgattttaaatcgataattaattcaaatttgaattgtaatcataaaattccaaattataatcgaaattttatccaaaatccatcattttcaaacaaaatcaaagaaaaaaaagatcaaactatcaaatctaataaaaaataaaactctaattaaacacaacaccatcaatcatcatatatagaatagagatggatttttggattgatagaaacaaatgaaaaggtaaaaaagatagatctttggattgatagaaagaaagaaaaggtaaaaaggagacgaaaaattaaatatggaatagagagaagagagtaaagagaagaagaagaagaaacaaatcaaaaattttgtttttgttgaattgaaagaaaaataaattgaagatgaaaaaaatttgatctgagaaattagatttttttttttttgagaagaaaagatccaaaattgttatggatgtagatccaacatagaggttgggttgtaaataagtgaaaaactctagttttacttgtcttttactattattctgaattgaaataaataaataaacatatatttttttataaggaggctaacttgagaatgtttgaagctgagggggtggactagattaaaatccctaatctagcctaatgatttatgtttatgctttgaatggtgaccaactaaaaaaaagaaggaggaggtgtattcgtcttcatttctcaaaagttacacttaaaaaaaataacatttgctacttaatgatggatcccacagaattcatttccatcgttttggggattatagaacaaaagtattcctatcaaatatggggagaaacgataaagaacatacaattaacacattttaattaaataataaggatatggtttcaataatatttttcaagaaaactaaatgagtattatattgacaattaccttttggtaaataactgtaataagaaactaagaagaattatgtttgaaacaattttagattcaaataaatattataatattatttagattagtattgatgactagttaattttcttaaagatacacatgatatcaaattttcaaattttaattcagatataaatattgctattatgtatttaaattaaacttaatattgaaaagtgatgatctatataacttcattaaaataatttttaatatccaattagtatgatataattacttagatttttactccatttctctatattatatttcccctttccttaaatatttatttaattttttctcctctttttattgtttatgtagtggtgatcatcatctcttgaagttttagaatcattgatgcatcaccactcgaattcaaatccgcataagacaatattatcagattatgatatccaaattatttatgatttccaaataaaaacttaataatgtatggagtaacataaaataaaaaaaatgatagaatcataactaatcaaagaatatatttgttttccgcagcccctagatttgttaagtaaataaaaaggaaattagaaaatatatactaaactctgtttgtccaaaaaatagaaagcaaatatataatataccaaacaaataaaaagaaatcccattacatttccagtatataggcatttaccatatagaaaaaataattagaataaccaaaaacagaattaaaaaaaaatgtgataatatatcctcttccatacaatacaacacagaacaagcgactataaattagtgctaagaaaacacccttttcaccaaattcactctcttttcaacaatctttatttttcaaagttcttgtttaaaagaccaaaagagtagaccatg

SEQ ID NO: 26183 - DNA, 3003 bp, Unknown; identical to SEQ ID NO: 26182
  misc_feature (1)..( 3003): 2750-1469P.txt file - cDNA_ID_2711248; gDNA_ID_2214513; Annot_ID_184345

SEQ ID NO: 26184 - DNA, 3003 bp, Unknown
  misc_feature (1)..( 3003): 2750-1469P.txt file - cDNA_ID_2711267; gDNA_ID_2214513; Annot_ID_133881
gaggaaggatttgaaccagatgagaggacgttggtgagtatgttgggtgcttgctcacatttgggtgatttgagaactggtagattgctggaggagatggccatcaccaagaagatcgggttaagcacgtttctggggtctaagttgatcagtatgtatggaaaatgtggtgatttggattctgccagaagggttttcaatcaaatgattaagaaggatcgtgttgcttggactgctatgatcactgtgtaagtcattgttcgacactgtattcagataaaagtatgattcttaaacccgttaatgaagctaaatttggactgttttggttgttctttatcagatactcacaaaatgggaagtcaagtgaggcttttaaactgttttttgagatggaaaaaaccggagtttcaccagacgcgggcacattgtctacagttctgtctgcttgtggttcagttggagctcttgaattaggcaaacaaattgagacccatgcatcagaactttccttgcaacataatatctatgtggccacaggactagtcgacatgtatggaaagtgcggacgggtagaggaagctctgagagtatttgaagctatgccagtgaaaaacgaagccacttggaacgctatgataaccgcttatgcgcatcaaggacacgctaaagaagctcttttgctgtttgatcgaatgtcagttcctccaagtgatataacattcataggagtgctctctgcttgtgtgcacgcgggtttggtccatcagggctgtcgatatttccatgagatgagttctatgttcgggttggtcccaaaaatcgagcattacacaaacataatcgatctcctgtctcgtgcggggatgttagacgaggcttgggagttcatggagaggtttcctgggaagcctgatgagatcatgttagcagcgatccttggagcatgtcataagagaaaagatgttgcgatcagagagaaggcgatgaggatgttgatggagatgaaagaggcgaagaacgcaggaaactatgtaatctcttctaatgttttagctgatatgaagatgtgggatgagtctgcgaagatgagggcgttgatgagagacagaggcgtcgttaagacaccaggatgcagctggattgagatcgagggtgagctaatggaatttcttgccggaagcgattatttacagtgtggcagggaagattccggttcgttatttgatttgttggtggaggagatgaagagggaaaggtatgaatttggttacattcacctgtgactttctcggagagtgcaagtctagtaaaatttgttgtaaaataaatttgaagttttattttgaatgtatatgaaacttaacactaacaattaaaattactttgaatctataatagttacgtctctctctagttattatttaatcattcagtaatcaatttttttctgttggtattgtaatcaccgattcttaaaattagtagagaaaggcaaaaaaaccgaacggaccagaaaagagaacattcgccaaaccaaccaacaaccgtttgggtgagcttgacgagaacgacgtcgcacccgccattttctccatccttgaagcaacaccttcttcacttcagatctcttcttcttcttcttcttcttcttcttcttcttctttgctcgcaccttccgtgctattgtatttctagggtttcggatcctgtgccttaccttagatccgacggtggagtagaaatcactctccctgtctcttcccttcttttttgtttccagtttttgattgaagatcccttcgtggatccactataatggcggattctcagccaatcacgcctggtcaggtacggtatctcctaactttgtttttttttgaagcttcagcgtcttcttaaatttcatttttttgctacggtttcaaggatttgaaatgaatagtttctgttgaacgagatttctactataatcgataggttgtggagtaattgaatttacaatttggattagtttactagagggatcaaattttgctagtgtcttcaaatgtagtagctttcaactttgaattttgaaaatgtttctcaccagagatttggtttggatgacctttcatatttctttaatgcaggtttcgtttctactcggagtcattcctgtcttcatagcatggatttactcagagtttctagagtataagaggtcttcattgcactctaaagtgtatgtatcaggactctaatttaaatggctctcttgttatatgtatctaacctcttagtaacctatacttcttacttgcagtcattcagataataatttggttgaacttggtgaggtaaaaaacaaggaagatgaaggagtagttttacttgaaggaggtcttccaagatcagtctctacaaagttttataactcacctatcaaaacaaacttgattaggtagttttactgatttcttcctttgtgtttttttgtttcttagagtggagtgttctttcaacaaacataaaccatttacgtttgtctacttgtagatttctgacgctggaagactctttcttgattgaaaatcgagcaaccttgagagcgatgtaagttccttaattttatcagaatggattcatactgttcttcattccctctcatgaccgtattacttcctttcagggctgagtttggggctattcttttttacttttatattagtgatcgaacaagcttgcttggagagtctaaaaaggtgcctcctttaaatctatgtgatggattcttttctcagtttcaactggtcatcaaaattctaaaaccatttatgtgttatatatagtgttatagcacagatgtcgttaatagtttagagatagaaatctaacatctgagtctaaaaatggttctgcaatttgtgacacttttttcgtatactttccattttgcagaattacaacagagatcttttcctctttctctactgtcttctcatcatagtttcagccatg

SEQ ID NO: 26185 - DNA, 3003 bp, Unknown
  misc_feature (1)..( 3003): 2750-1469P.txt file - cDNA_ID_2711279; gDNA_ID_2214514; Annot_ID_133921
actgataaagaagtcaacttaatcatccaaccaaggccagccaagtcggtatcgctaccactacttttcattatttctatatactataaaaaaaaattaatctggtggcgtcacgattaattgcaacatttttgtttgacttttacattttcgattaatctggtggcgtcacgattaaggattggccccattagctaggtggatactaattgcttagttcattcgaagtctaccattttccagtttcctttatatatgttattgaactaattaaatttaattaaatattcgagcttatgaatgaaattcttatgagaaacgatttttttttaaactagagattagaaacgttttggaaacgtatacaaatatatatatatatatatataacattaacataaaattagattgaagaaaaaatggtttaaaccatacaaatctaaactatcaatattaaataagttaactaaaactctaaagataaagattaaaaggtttaagttcaaatatttaatttagaccaacatttttattcttattttcattactttcatcaaagataatttaaatctctcttcaaatctggtttatcaaaagaaatatcttaaaactgagagtcttccaaaattagttatatgtattaataattttaagatttctattttttttgtttttgtaatccgaaaattaattagggctcaaacgagccaaacctgagaaatgttgtttacaaatttaatataaagcggttgggtacgaactcatatttccagttttagttattaaattttttaagtcaataaaaaatatttgtcgtatgtctattttagaaatataagtttctattttggaaacttgagtttctatcgtgtttccaaaaataaatttttaaaaaatatgttttcgtgacgattttcgtatttccgaaaagtttctgtttccgaaatgtttcgaaatataaaacagatctaagagcgaattttcatgcaacctagatatacactgcccttttaatttgctaagttgtaaatttcctcaaccgatatatggaacaaaattaaaattagatttctgttattttaggtataatctccgggtatacgtgatgagttagtacttttacgcagtagtgatatacaacaaagatctctgataccgaacgtgaaaagtaaaagtccttttacatcatcgttttatatcttgaattaatataacacacaatgactattttttttttagaaacacaaaaagactgttgagaaaattaaataactaaagtctatcaaccatcttagctgtacttaatcgtatatatgaaagttggccaactctcttcatatggatgacacatcatcacacaagaaaatgacatgtgtcctttaacattaattaaattaaaaatcagcaaaattaattgagagaaaatcaaaagtttcatattctgttaaatcgtccattaattcatttctttaactattttttcaaaataaaaataaaattataaaattatttatttaaataaatcaattactacttttattttacttttattatttctatttttttttaaattaatggtcaatggtcatcactctataatgactaaatagttatttgtgttgtagtttagttgtttgctaccttatattagtttagttattttaccttgatttttttatttttacgttatggttcatatcttatcatatgaaattctgtcttttcatttttgtatctttaggtaagttcgtaacattgacattcaacattttcaagtaatagacttttgagacttttggtaagtttataaattcaccttagttgtatatcaggctactatagttaattaattatgtaccacattaagatgattagtttgtttccgtctttattgtacattgtgatttgtgaagatagcatttaatcatttagttagctagctaacccataagttatttatttgccactgaagctatatgccccaattaacaatcacgattagatcatttcataaaattattacagaacatgaattatatataatgtcctatgacacatattttatttattaaagaacttaatcatctatgtgtaacactacctttcattgtttcaagtaaaacttttggtgtatattttcgtttttctttggcaatgttaattgaaacatttgcgattaatcgggtggcgtcacgaaatccgattgtgaaccgggtaatagccggataagacgttaatttggtgacgctatcacacgtaaaaagccaacaaacagtcgaattttaaccggtccaactagttctacttgattagatcatttgaagtccaccttttgcaagattttcttcgtgtaatttacttatctttaaatcgaacatatatatatatatatatatattatatatttttgagtactaatatattgcctttataatttgataaatatacttgtatgtaattaaatcttcctcctcactatataaattcatgacttttaaaactgtttctgtttatatatatatatatactaggatttaacccgtggtataccacgggacaaatattttatttatatataataatattaaattttacggttttaaatttagtattaaaattatataattttatattaatattgtaaataaaaaaattggtgatgataaaataataaataaggatttaactcgtgttatatcaatcaaatccgtcccgctatacaactcgtctcatgatagttttaatatttttttataaggataaatattaataaattgtaggtatgtaacctagctgtaggtatgtaaagagttagtttaatgaatttgtacgttaagattagactatttattaaagaaatttaaaaacacaaattgcaaagaaagctggaaaaattaaaacgtcatctctgtgaacgtgtatatatcggaaagaaggagaagaccagtatcaatcctaaaccaaccaaaaaaaaacaccaaaatctccgattgagcagtcatg

SEQ ID NO: 26186 - DNA, 3000 bp, Unknown; identical to SEQ ID NO: 11794
  misc_feature (1)..( 3000): 2750-1469P.txt file - cDNA_ID_2711293; gDNA_ID_2214517; Annot_ID_133971

SEQ ID NO: 26187 - DNA, 3003 bp, Unknown
  misc_feature (1)..( 3003): 2750-1469P.txt file - cDNA_ID_2711297; gDNA_ID_2214517; Annot_ID_133968
tatgtttctatataacatttagtaatcaaaaatgattagtttatcaaaaatctgtgtaagaaactgatcaatatgcttgatttaatttttgtacattttgctatatacgactaattaaggttagagaaaatcctttatgctcgaaaggacgaccacgcttgaaaactgcgtatgagctcttaaggatcagcaacgacttggagaagagacttcaagaggtaaattataagtgattacatatatatatatatatccaagatttccataaatgcatatgatattcagattggactcaaatagtggtaattaagattctaacgttagattttttttgtctctgtaaaatataaatcatccgatcgagaactaatgcacataatgatgataataggtttcattgccgtttttggtattacacggagatgatgataaagtaacagataaagcagtgagccaagaactgtacaaggttgcgttgagcgctgacaagaccttaaagttgtaccctgggatgtggcacggtttgctcaccggcgagacaccagagaacatcgaaattgtctttgccgacgtcatcagttggttggaaaaaagaagtgattatggaaatgataggtttgagtcagagcttaaacagcgtaatgatcgtttaaatttcaagaaatagtcgtttgacttattttttacacataaaagtgttttaatgaaattctggtgttttgcattttgatgtttaacgttgctattgtgaattgtactatatattttaagaaaacttatactatagtccaataatatttcctaaatagtccaacaaaataaagaaaaagttttcatcatctagtatgattttaaaatgagatttgatataacatagccaataagactccagaggaaactctctgattcggcttggtttggctaatgtttttagacgcaacgatttacttagatctagaaccatcagattaacaacataaaacaactttaagctttcgagaaacggaaaaccacaaagattcttagcaaagaattcatcaatgtaaagaacattgtctaaaatattttggtatagaggtgaaaactcataatcttgggaagcttgtatcgagctagggttttgtttatcgtatcagccttcagtcccctatacaaagttcctggtccatcaaagtatatgtaaggtgtgtcagaccatacatgcctccatcgtgtggacaagactgaagttctgatagctaaattggtcggaagagaggagaggatttgttggaggatcacatcaggaagcgagctgattgagtctatattttcacttgcatctcttgctagtttgacatctctgtagtgatgatgagcgtagcagtcaccggcggtggcaccgtctccgtttccgccgtcgtctgcctctgccattacgttatcaaccaccgattgtaaacctagatatttgtttgcaatgacatagctttttgagtttttgggtttatcacaaagcccagctatatatatccaaaatattttaaaaagcccattactaaacacgcacaacttttttcttgtccggaactcaaaatatgtatgtacttaacaacttaatctgtgaaaaaaaaaaaaaaaaaatgtactaccaacttagtcatgttgatgtgatcatcttcttcttggattgatattactagttgcagaaagtgacaatttgatctattagaaaataattgcttatactacacatttgttttctttcgtaacagattggtgggatctttaagaatgtatcgtcatgattctgattttatagaagaacaactttatttaagatgtgcttacatattctgcgaaaaaaccggcatgttgaatggttttagtctctctgaaccgacaacaagttttgtaatttttaattttatcttacagtcgtcacttgaatcttgatcgccaatttttacatacttgagaagaaaaatatttaaaaagccaaccgatttattcgtcaaagcctcaaaggctacagatttttttagccaacgagcaaatgatatgcacacgcggatatgggggatccaaaaattaaaatatttgttggtgtaactttgaagcattgacttaaaaaatagtggttttatcatatgaaattaaacacttaaaaatttttgtggaagttgatacgggatcacaattttacaaaaacaaatagttagtcaacggagtataacttagttttacgtctaatattgttagagttgacattttataacatgttaagtagtagaaattgtagatttgactttctagattcttcatttgatggttcttatgatcgttcgtttataaatttgtactacagaaacgattaatctaacattattttacgatgaagaactaaaatttgaacatatagtgtcactaggaaaaaagattgattttcaccttaacatctccaaacgtagtaagtagatgtgagtttgatttgctaaatcctaaatgaaaaaaaactaacaaaacacagtcaaacgtgaaagaatttttgagggggtgtttctgataaatttacgacttaaggtactagtttaatgttattttgaaagtttagggggtggttttgaaacgtcgccaaacttgaattgccacttgtcagggaatattttatcattttaaaaagaagtaacaaaaaaaacgtgttgccgtgtagaggggtgcgaggagaatctgttaaatcgtcgctatcaaacaagaaacggtgtcgcattatcgtatagtcctcttcctcaaaatcctacccaatataaacagagccgtacaacaaaaaactcgatatcttatcaaaaactcgctctccatccaacaaaacccgaagaaagagagattcagactcaaatctctcagtaggaatggttagttacgttaagatcaaatactctctggtttatatctctgtcagaccatatctgaaaatgttttaaatttgttcttcttatgtaacgaattggggtatttggtatg

SEQ ID NO: 26188 - DNA, 3003 bp, Unknown
  misc_feature (1)..( 3003): 2750-1469P.txt file - cDNA_ID_2711312; gDNA_ID_2214519; Annot_ID_134020
attccgattctctctgtgactcacatcgacatcgtactggtttgttgattttgattggtaatcggaagtaaattacgacgttgaagctccctcagtctaaaggattcggaggttgacgctgaactaaataatgggagaagagctgcaatatcagcagaatggttcatctgtgacatctaattatggttatggaagttcgcttgcttacgatcaatctcaagacattgaatctgccgcaaacactgctcttctccgagaacaagtacacttttttttgtcttcttcttcttcaatataagcttctaaattccattcccggactttgccaatggttaccatgttgatttggttttgtgtgttttcaggaaatagaaacgcagaagattatacaaggtcaaaggttctgtctttctcttggtttgttctttatatccatctgttatatatgcttaatgcttgtattgatcatcttgctgtttctcattcttgggcaatgagaaatttcgtgtgtttaggtgctttgtctaacaatttgtgtttaattggaaacgttctcctattttcagagaagctgggacttcagtagccggagactctaagcataacactgatattcttcgagatcgtgctgaccccaatgctctaaaggttctgattcactattttttttgtttatcatcaagcggctattggcttaataagtcctataatcacatgaagttttgatacatattatctttatgcaggaacatttgctaaagttcactgcaaatcatagagcagaagcagcggcaaagcgtggtgggagtgtgagtacatgcggagaaggttagtcataatagcttacgagctcagtcatttaggaaaattcaggaaactgatccaattatcgactttattccgttctaggtaatgtggatgttggaaacggttatggtataccgggtggagttgcatacgcgggtcactccgagctcagtgggaagcctgaacctaccaatgcttcaaacaatttgcctgaatatctcaaacaaaaattaaaggccaggggaattctcagagatggtgcaggggctgttacatccaacccagaagatgtaattattcatccctcagactgtaatccagggtgacatatgtctgcaatgacttgtccatatttcagcccctttgtttcagtttatcttattaatatttgttaaccttttgacgtttttgtttgcttgtgtttcttctcttttccagacatcagcggttagttggaatagacaggcaactttaccttttcaggctaatgcaagcaccttaccattaggatgggtatgaatgagatacacttaaaagtcttttcttcttcatttttgtctttgctttactatctggtgcagcaatattttctgctgtgaaagtgcggtaatcgtttgagattctccaaatgcatgtgataatgtggtcatacacaaatagtctttagatctcaatccttaaggatgaccacttatggttctgatgatgtgtttatagttgttataccacttaaatttgttctgtttcattcaggtagatgcaaaagatcctgccagtggtgctacctattactataaccagcacactggaacatgccagtgggaaaggcctgttgagctttcttatgccacttcaagtgcaccacctgtactttctaaagaagagtggattgaaacatttgatgaagcatctggtatgattttcacacatttagtcatcataatgactagctcgttgctacaatattcatatcaaagattataaaagtatgatatctttctccttttcttattgtggtattatgctgttagcaaaatgaatttaatagcttatgatctttttcatcttggaaagaaacttacatcatcacatgttagaaataagaatgaggaaatccttgtgttttctgctggaagtttttgcctcttattgaccagcttcttctgatttctgttgtactgtacacgcaatgcttgcttaatctttggatctgttggttgcatctttgaactctgaaccttttgattcctatgcacaggccataagtatttctacaatacaaggacacatgtgtctcagtgggaacctccagcttctttacagaagcccgctgccacaaactctaacaacgctgttacccaaagtacggctaatgggaagggggagcatcctccatctcagctgccaagatgcagcggatgtgggggctggggagtgggccttgtccagagatggggttattgtgttcattgtaccaggtaggaacccttccatttcttgttatgctttttgagttagattgctgcatagagactgcttcggttgaagactgttaataatgtatatacctctagtcctctaccatgactccctttttattactggctcagatttgtgttataggaagcatttattagtgtgcatcaagaccttaaatacactttgtttacttgcatattttgaggcttaagcccctctgcctttggttaacgggactcatattatatgggattcagggttttcaatctcccagaaaagcaattcttgccagcacatttaaaccatttcacaaatgcaggcgattctggccaaaaggatccgaatcagaggtacgcatctctcaaaatcttagatttagaaaaaatattcttctatgcccgtcatctttctaaaatacatagtgttccataagagagctattggtggactctggtcatcttcttaacatctgttaccagatatttagacaacccatttggatacaaatgttgcccctcttttcggagggacataatttctgttaaaaagcattccatttatcagcagtaaaatgaagatggaacacattacatgtagtagtgaaccaggaggttcccattgactatgtttacattgtacttactcttgtggtatattctttacacatgatggaaaaatgaaaatggttgaaacaggtccagttcaaaacctcccatg

SEQ ID NO: 26189 - DNA, 3003 bp, Unknown
  misc_feature (1)..( 3003): 2750-1469P.txt file - cDNA_ID_2711317; gDNA_ID_2214520; Annot_ID_134042
atataattatttttcaaacgacaaccgaaaacaagagaattttttcaaactgaaccaaacccgaatggaactacaaatggtttttttttttttttggatatagtttctgtaaaaacataaaacctaatggatcataccgaaaccaaaattgtaatctgaggttttatacaacttgtctgatttatggtgaacagtggtgatcacgacatcgcggtcccttttcttgcaactcaagcctggataagatctctcaattactcccccattcataactggaggccatggatgataaacaatcaaatcgctgggtaatatatatctatttttcctgttttatatatgtctctcttgtttattcatatttgtagtcatatcacaaacttatgaactcacgtaaaaatcattttttttttacagatacacgagagcttattccaataagatgacatttgctactatcaaagcaagtgttattatttcagtttaaacatttttttgtgtcactacattacaatgaaagtgtgtttattaatttttttttttttactgtttggattatagggaggtggacacacggcagagtatagaccaaacgagacctttatcatgttccaaaggtggatcagtggccaacccctgtaacaaaaggcttatgaccttcacctataattatctaccaactaatatccacgttaagcgcagttgtttgtgttgaaatgtttttgttgtttgctttgttgcattcttttgtgctttatgttacaattttatgtgttttatgtactacagttcattattgtgcgttgtgcaattccttttacatttaactagggactaacccgggctagccccggtatatttcctaactatacgtgcaagaaaatgatgttctatttaacatttcagtttaacttatatggtacaagtaattgtttaattttatctatccaaatatttttcattgtaaatttttttttcaatacatctttttaattattaatgtgtatagtattttctcaattatacttctctcgtaatttgttttacgatgttaattgaacatcgttctataataacgaatttgccacactttttttggtattgacaaaatttcctcaaatagcttggtattgacatttgccccacatcttttataatttacgaatatgccccacgtcttttcatattaacgattttgctacatatctgttggtcttaacgattttgccccacatttattggtattaatgaatttccctcacagcttttggtatttgcaaatttgttcccatcttttcgtatttgcaaatatgtcccacacttttcgaatttacaaagttacccaacatctgctggtattttgcaaatgctttcgtcatttccagttatcgaattaggctattgatgttgattcattctatctgaaattgagtttaaaatattcttctttttcacctaaattaaaaaaaaaaaaaaaaaaaaacttatagcaggttgaacctagagatttgatgttatgaaaccaccaattcttaaattaaatatagagatctttttccatagttgaacttgccctaccaaaaaagaggaagaagattttgaattgtttatcctttatagaatcaatgtttgaactcgaaaaaattgaatgatatgtcaagttcttgtctgacattaactacaacactctcattgtgttgactaaagcttgaagatagcttgagtaacaagctaaaggatttgtatttaggaagtttgcctaaatgcttttatgtgtattttcctaataggtttaggaagttttcttgttattctcttatataaggagataccaatgtgtggtataacttatgagtttgagaaagagagattgagaactttagggggtgttatgggtttattgatttgtaaggaattggaaatccaaacaaaaatcatttgttattcaatgattgattttaaaattcgaattaaaatcatgtgttattgattcgatgatttataaatactagttaaaatcctttgttattcgtttagtcatttgtttttggatttgagaatacaaattatgttttaaatagaattaaatggatttgaaagagaaaaatagaaggattcaaatccatgggtaaacacatgttatttcaaaatccatatatcttgatttcataattaatagagattatcaaattctatatagatttacaaatcaataaaccaataacacccttagttttcagttattttttaaagctagtaataaagagagttattctttgttaatcttgtgttcttaatcttagcttagtcaatacattgcacctccattgttaatggtcttaagaaataatgaagccactttatttaactaaattaaaatgaccagttatataactgattgtttcgttaatttaatttcgacgcaaattcagatgcatttttttatggagtagatgaatttcaaagatttattatgggagcaaaaatctaggtttaaagtggaagtatataaaccactttgaacgttttaatcatattttccttttttacaacctcaacaaatcgtcttgtcaaaagaatgcagaataaattagttttttttttttttgtttgggcagcggaaaactttggaccgaatgagggttaacaacaaaagaaaaacgagagcgttagcttgtccatgattgatcaatggtgttggtgattcgctctaattttagccacaaaagcaatgtccctacattactaaatttgtggcaagtgtaatgatagatatatcatataaaattataaaccaatgtaaaaacaaacgattaaatacttgatgtgatggttgctgcaccaaccacgtgactccccgaaatggttgttccacacaagcaaatttgaagagagcctactcaacgttaagcgacttgtaaaaataacaaaagggcagtctaactttccttttctaatgattataaatatcctttttccgtaaaaagaaattaaaagaaaatg

SEQ ID NO: 26190 - DNA, 3000 bp, Unknown; identical to SEQ ID NO: 11910
  misc_feature (1)..( 3000): 2750-1469P.txt file - cDNA_ID_2711325; gDNA_ID_2214521; Annot_ID_134077

SEQ ID NO: 26191 - DNA, 3003 bp, Unknown
  misc_feature (1)..( 3003): 2750-1469P.txt file - cDNA_ID_2711331; gDNA_ID_2214521; Annot_ID_134061
cttaaacgtagtttccgccaaacctttactgttgtgtctattcaagaaagaaggatcatcaacgatatcgtttcgaaaagacccagtgagtgtctcagaatcaatagtgcttgaatcaatggtgaacctctccgagttagacggagtaatatcaggagactcaaagatgcttggcctaacgtagcaaaaggaatggcctaaaccttcatctaaaggttccagaaactccaaatcaacaccgtttttgtcattagacggcacgaaacaaccaacaacacgggaagtcccgtttcccatcactcaggcaatactacaaacaccttggaggcacaatctcatcataaacctctaaagagtttccgcaatttccagcaccacaacacttaacaagaggcgaaattcttataaagcctacaaagattcgacgcgttatgcagaatccaagcatcatctgaagctcaatctctgaacattaaaacgcaaacaagcacctgatagtatcaaattcggatttttttaaaaatcagctgaatgcccacaaaagctttggattctgaggtcttgaaatggaaacagaaacagtgatctgacctgttgaagaaggagatggatcatcaagcagaaactggaaacagatctaaaggagcggcaaagagaagacagtgttgtattgaacacatcggaagcaaaatagagacagtaaacaaggggaaaaaacacccctttagatttcttctatgggaatctgacaaaaagtacccatttttaaaaactaattatacaaaaacaaaaaaaaacaattatacccattttttaaaaaagaaaaaaaaaaaggaagaagacccagattgagattgaaccatgcagagacgaccagctgttaaagatccaagcttttcaggggaaaaaaaagaagctaaaacccagaaacccctctttcagatatgttacggagaaaccaagattcaaaatcgaaaattagtagagtcacaatccaaatagagctgaagaagaggggaaaaagaagaagcttgaagctgctgcaacaggtttgattttgatttaagcaggtcaagaattatgtatgatttcacctttttcttttaatttccttaagctcataggtgagagtgagcagagaagaaaagagttgtctcgggcttttcaaatggtttcggagggtaatcaaaaaaaaaaaaaaaaaaacagagtaaaaagtctaaaaactgcgttgaaaaatgtaaaagcgaaagatcgtctttttagagtttttatttttattttcctcttacatctgatttattggatattttttacaagaattgatacattaaaagtacttttttttttacgtacattcttagagagtaaatacataaccgatcattaaaaagaagagatgaagaagtgaatttccacaatgttttaaaccttcagaatttatattaatggggtttgcaaatgattggaggtatacaattacaggtgattcacgtcattattgttctcatcgatggaccctttgcatggtttcaattttttctatgcgggtcccgttttttattcacacccattttatcaatgttttttttttgttatggtcttcaattttttatatttggttgcattgaatcttgctcctcataatcggaagatttgaccagtgttaatgatattatatagtttgaacgttaaagtatgttaacatgttagtcttcttttttaatgttatcatattctgtttaccaagtaggtttattttaaatctcaatgctctatatactatcttattaaacgaggtaaacttaacatttttcatgtctagtaataccgtaagattctttctatgtaacgaatgagatttatatatatatatatatatatataaggaaatttgtaatgatgcctaacatgcaaaagaggccaactccacgagcacatagagagagtcacgctttaaaccaaacaaaacaaatttgttgacttaaaccaaatccactctctcattttttttgcctttgagtttctgactactgacaaactctttcaacgccctagaaaattatgcttttggtttcacattgtttgttttttgttgtattcttttatttattagtaattgcgtccacagatccaaaaccaaagccattatcatcaattcatccactaacttaactatttatattatactatattttatttcaaaaccccagaataaaacaaaagttgtatattggagtgggcaggcacctccacaaaaatgaaaacttcccgttaaaattcaccgttctgttttacggtttttatttatttacatgacttagtatcatagattcatttagtagtaatataagactgcgtaagagtgtctgcagaattttcacaatcagtttcaatgtttcatccaaaattgtatcatacagttggatcatacggtccttgaaagagctaatagtgaggtgggcttgtgatgattaaataggcccagtgattataaaaggcctcgttacagaccattactaacacgtgtgatgcgcggatgcggcataagatactgttaaacagagccgatgccgacaaaaatgaaataaactatttaagctttttaattaatgatttaattaattggttttggcagtaattgaggaggaacattcaaaagacagacactttttgtcatgttaataacagtaaaaatcctctaataattatgtctcaaataagataaattaaaattgcaagaaaattagtactgtatcttgtatttttagaaccatattaatttcaagaaaatcaattaattattcaaagatttggttcgtgacgtaaatcaatttattaccataatgatgaaagcgtgaaagaatttaaccagaaaaagccataaagacttctctcgctatcaatcacacacatgcaacagtacaagatttgtcagagtccacagaaatcgatcttttcgagtcaagattttcagctctgttcaggactccggcggagatg

SEQ ID NO: 26192 - DNA, 3003 bp, Unknown; identical to SEQ ID NO: 26191
  misc_feature (1)..( 3003): 2750-1469P.txt file - cDNA_ID_2711331; gDNA_ID_2214521; Annot_ID_184612

SEQ ID NO: 26193 - DNA, 690 bp, Unknown; identical to SEQ ID NO: 11872
  misc_feature (1)..( 690): 2750-1469P.txt file - cDNA_ID_2711335; gDNA_ID_2214521; Annot_ID_134053

SEQ ID NO: 26194 - DNA, 690 bp, Unknown; identical to SEQ ID NO: 11872
  misc_feature (1)..( 690): 2750-1469P.txt file - cDNA_ID_2711335; gDNA_ID_2214521; Annot_ID_184601

SEQ ID NO: 26195 - DNA, 3003 bp, Unknown
  misc_feature (1)..( 3003): 2750-1469P.txt file - cDNA_ID_2711345; gDNA_ID_2214523; Annot_ID_134120
ttgtgaatgaaaactagtatgtaatctagtaacatttgctctttcagatttttaattatcaacggagtatgtgataagttcgaatcttctacacaattaaaaatatgataacttcgttaaatagtttaagaaagctaagatgaattaacttatgggaagttggaaacaacactttttgtgtgttttactgggaaaggaatctaaacgtctgcgggtacagacacatcagggcattgctttcggcccacgcgtactattttctatatatatggtgctgtgttttaacgttagcggccggtagcagagtacaaaataaattcattttattaaacatagaaacaaaaaaaataattagtagttctaacttttagtaatatttgaaaaaggtgctttttagttattttcaactcattttgataattagattttcgttctttttaattatagaggttcaattatgaaattttacaatgtttaagactttacaatgtttaaattttagtactttttatacgaaatagtattttgagatcaaactacaagataacaccacaattattttgcaaaaccaagtgcttaagacagtttaataaagacaaaaataattagtaattaagaacacctaatgatgaaagaaccatgaaagattgattcaccataaacacaaaaattcatctaaacaaggttaacaattgtctccttatagcgcttagatttcacaatttatgatgattgatgactcaattactaaaatttctattttgttttcctaagcttatttttcaaccgatatataaggaagaaaaaaacacttgaaactacagacgctaataagtactaaagtgaatgacatctcttttatttgtttctcctttttttcgttgattaacaagaaatcaacaaaataatctttggctcggcatttagacttttaggatctgaaaaatgaaaattggcggagtctacgcaggccctacttttcagatctatcttgaaatgcgaatattatatactctggaagatttaaattatctggtggagtaatcatttcagtgagaaatagtaataaattaatactactatagtacattagtagtactatacctgaatatgcattggaatttgtggtagaagactagaagtagtaagcttcttttgtttttaatcaaacaggtagtaagcctcataaattatgtgataaaaactgataagaattttcttttgcaccaaaaaataaaattaaaaaaatgagaaaaaaaaaactgataagggttccgattttgggaatagcaatagatgagagctaaactgaaattgttataggagtttagatattgtttagttatacttatatttgtatgtcgataaaatataaactgtgaagtcatggtgttgtgctggctacggaacaaaccacgtaaacgggtttatcctgattattcgttgcttacagttttggtttaattcaacacgtacgcaaataccacatgcaaatctaattaagtaacacaaaaatctggatttagtttggcaagtaaatggccttcgccaatggataatgttttccttaagattcttaaaccttgtctttttaacttttaagcaacgtatgcttggataatatccaataggcatctcttgcaaatatgataattaagaactcgtacaatttatatcgattgtcttctaatgtacgtaatttcattagtttactccttgtttatattcgtgtttatgagtttgagtttatattttagtacattaccgtaaacaatcctttatacgtgatatactgtttttgtttgttaacagggaaatatataccattttcgaactaccctacatatatatggtagcctaatgatatcgtcgattgtataactatgtttggataactaacaaaatgcttaatccaatattataattttatagtcattttgagaagatttgttctaagacaaaatatatatagataagaaacataattgcatttaattttaatagaaattgaatgtaatttttttgaaattaaaagttagagaggtattcaccatttcacctagtgatttgaaatttagcaacaaaaaggaataaatcttatgttattcaccattttacctagtgatttgaaatgctactttaaaattcactgctattggaaactttttaaatattggatttttagtgacatcaagggtttatagaggattttttagttaaaaatacaaaatctaaatctcctagtttcaactttttaagtgaaatttgaggagattttacaacaaatcataataacttcccaaaattcacctaaaatcatctaaaacttaaaatcatttaataggattgaataaggttcattttactacttggcagttggcacataatataaaaagatggttagttaagttattgtcttaagttatatgattgtgcattgctgttgaaagatttgctgatctacgttgttgtcatcgattcgtcaagattatacgaaccagctacatcctacatgtctggtttttataatcacattgaataaaatgaataaatatattttattgaaaacgtcacgtttaaattcatatacatttgattgattatataatgtagtccaattaattaatctctcctctatacagctgtttctatagattattaattaatggacttcctcgtttcacatggtagacatttcagatttagctttgtgtttacccagatctggattcaggtatctcggtttaggaattgtaaagtttcgtgtagttttatggggttgtgttatcggttaaatttggtttagtctagttggaactcggtttgcttgtcccgtttgttttaattatccggttatatttggtctaacgaggccaattaatgcccacgattatacaaacttttcaatttaaagttgacttttactttcattttaagacaatggatactcattttgatcgatgtagatagacatagagaacaagagaaaaagagagaaagatg

SEQ ID NO: 26196 - DNA, 3000 bp, Unknown; identical to SEQ ID NO: 11940
  misc_feature (1)..( 3000): 2750-1469P.txt file - cDNA_ID_2711353; gDNA_ID_2214523; Annot_ID_134115

SEQ ID NO: 26197 - DNA, 3000 bp, Unknown; identical to SEQ ID NO: 11940
  misc_feature (1)..( 3000): 2750-1469P.txt file - cDNA_ID_2711353; gDNA_ID_2214523; Annot_ID_184682

SEQ ID NO: 26198 - DNA, 3000 bp, Unknown; identical to SEQ ID NO: 11968
  misc_feature (1)..( 3000): 2750-1469P.txt file - cDNA_ID_2711378; gDNA_ID_2214525; Annot_ID_134140

SEQ ID NO: 26199 - DNA, 3000 bp, Unknown; identical to SEQ ID NO: 11968
  misc_feature (1)..( 3000): 2750-1469P.txt file - cDNA_ID_2711378; gDNA_ID_2214525; Annot_ID_184723

SEQ ID NO: 26200 - DNA, 3003 bp, Unknown
  misc_feature (1)..( 3003): 2750-1469P.txt file - cDNA_ID_2711382; gDNA_ID_2214526; Annot_ID_134162
atgtccgttgactttgtttcttccatgattaaaatttaagaagtaaggaagagaaacaaatttgaaccattgattttgttactcttaactaaataatcatttattcaataactaaaggtcggttggtcttcaggtacgaacgttcttctatactaacttgtaaattgtaaacgtaacagattgtgcagtagagattgcggttacaaatgtttgacaacgatcacaaaaattgtttaacaccgcgtattcttccgccaacgtttgcggcagcgggtggttaaaaattacactatttttaagttttaaattcaaataaatttaataacttttttgactcttggagtcatgctctgaacacaaatgattcattttccggagaacataagtgcattgtatccgtctaatcgtcccaacatacttcactataaatgtaatttaatactaacaattaaattgaagtgttgttcgtcgcatgcatgtatgtacgtacaataattatatagtttcattatcatagaactgtcggggaaattgtgaatcatcaccagccgccacatgaacttatttgccgttgttctggtttaaggctggtaagatttattcggcggctgtaggcctgtagcccttgaaatatggtagacaagatcgtccatataattaagattttgtttttcacttctaaattaattaatgggtgacttgggcgattttgtattgttgtttagtggctagaaagaaaacttttaacgataaatttacttatgcaaaaattatattagtttagtttagcaactttatatgtacttaattagtaaaataatacatttaaatgtaaactatttgtacatattaatgttgtccaaacaatatgcactttttgaatttttttactgtattctccacctagtttttctaattcatccaagcattttgatgaatttgcatgtctccatagatgaattagtatctactatctctaaaaactcaatctccaccgaagatattgcttaaccaatgtgctcctagaccaaatccaaaaccttagccgcttcatacttaacatccacttttgtagcatcctcaaactgttttacaaccttttcaaccgggacacaatcgccttgtcttagtagtgaagcgtaggttaatcatggatgatgatttttgttctttgacaacatctggtaaggtttttggtttatggctcaccctttttactttttcggtctttcttatatagtgttttggtgggttttttctcgttcatttttcacgaccttcttatcctattactagggtcattaaattgttcgttaggttaaagagatttacaatatgaaaccgattatgtccattaaaacgtgaataagacagaaaagagcaccaagaaaatgaaaaataatttaatgtatgttcaggaaatcctatgaaaacataatgattgatcgggtttattggttttgtagctggtggtttaagtggttagggaagctatgtatttataatttattgattcaatatggttttgcatctgaaatatatttaagcccaaccaataaatataccatcactcgccaagaccgtttctcagtggaaacattttgtgagaagttcaagtcgatgttaatgattgtaaggatttaacggatgtgatgtttttgtaggttgaagatttaaagtactatatgatatgttgtgtttttatcgattttgaatctttattttctttcctaaatcaaaactgcaatatatttcctaagctagcaaaacccattctagatataagtagagtccagcttgtaatgcaactgcaaagcaaaaatcaagatatttcgatacaaggacttgatgtcataaaattccaaatttgttttgtcttgccacacttagtaattctcttccaataatggttaacttaatagtatataaaataaaaatgcatataggttccgtaattaatcttctttatcgtcacgagaggcacatcttttttcaacatttgaccactctctctctctctctctcaggacctttcggcgtaatttcgtcttcccctttgcttaacattttctttctttctttttgaccaaatattaaaaatatatccatttttattttatttttaattaaattcataatttgcattttatgtatttataataaaaaggagagaataaatccaaaagagtgaagcaaaaacattaaagcggaaagaaagtggtaaaacaataatagaaacaggagaagcagaagtactacttcttcttcttctgctctcttctcagaccttgttttgtactttcttcttcttcttcttcttcttgtttgcgaactccgatatcttcttcactacctttgactccatttctttttcttcttcaggtgaattctactttacttttcttcttaccccaaatttactcttttgggttttatgaaagttttgttttttattactcagatcttgtcctagttctcctccttgttctgttgtttttctgtttcgtttcgaattggttttgtttttcaagtttagggttttgtagatcagttcgtcgttactgtagattggaaatgaaaattatgattctttggatctgattatagcagttcaagtgtgaactctatctattacttgatttgctatctcacagtttttgaatttcttaatggtgttagctactcgacttttagagctcattttcttaactactgaacttgtttcatttgagaggtactaatccagtatatattataaagtttaatgctttttcttacttgcattctttgaacatgtttgctattttggtgagtgaaactttatgtatatttatgaattttgagctaaagtattgattgtttcataagtaggtgtaggcattgtcttgttatgagaagcaactgtagctggaagctcaagtatttgtttttagctgtggagcttgaatcttgatagttttcgacttctatgttattacctgtggggatatagaaacaatcatg

SEQ ID NO: 26201 - DNA, 3003 bp, Unknown; identical to SEQ ID NO: 26200
  misc_feature (1)..( 3003): 2750-1469P.txt file - cDNA_ID_2711382; gDNA_ID_2214526; Annot_ID_184765

SEQ ID NO: 26202 - DNA, 3003 bp, Unknown
  misc_feature (1)..( 3003): 2750-1469P.txt file - cDNA_ID_2711390; gDNA_ID_2214527; Annot_ID_134180
aaaaaatgaaactagtaaaagaagtgttttcaaatagaattagcatcatatttaattatttttctacagaaactatagggaagccaaaaacagaacagaacagacatgccgacaaattaaaactttcacacacacagacacatttgcgaccaaattaaagacatatatatggctcacgctatctgtttagatattctaactatatgatgtttgtataatattatagtttagatttatcgtcagttgattaatcacaaatcataaacacattattttattccgactgtaaattaaaaattaaactaaaatgtactagtgtaaaataatagtgatacacacataaaactttatttaaatcaagttgttgttgtgtgtcatggaggcaggtccatagctgtttcgttatacaccttctttgttatttcaatattcaagtttgttgttaatttaatgttattgactaaccaacaatccaatatatttataattatctatatataaataacccgccgcagtattattccacggcatacgaattattttggttcaaattacagatatctaaaaaaggatcaaatcttttctcaatcgtttatagtttcttcaatggagattactcaatatcaaagttttcatgaaggttcgagttctagggtttccatgaacaggaattcacaagtaatatccaagatcaaacccaagattcgcataatccatatatttgcaccggaggtcatcaagaccgacgtcaagaactttcgttcactcgtccagagtctaaccgggaaaccggcaccgggagaagccaaaaccggtaaaaagagagccaaatcaagaattacgactccccaagaaccggtttgcgatgatcatcagccggtcaacaggctttcgggtttcaccggtttactagcaaacggaggaaaccaccaggtgaaagaagagtggggatcaggtgatcagagtacttcgaacacaaacacgtactttgatctagaaggtttaattcaagatgtcggagaagattacttctcttcgtttcccatgagatcctcttcttcttcacaagtcgaaggtttcatcttcaacaacaacaacaacaacaacaacaacaacaacaacaacaacaacaacaacaccaacttcgatacaaaggctcataattcgtcttaattaataacagattaatttctagggttttcaatcttattgattctgcaaatcgcatttggtgagatgagatctaatcgcaacgataaggtcatattttgtgggagaaaaaaggcatagaagttgtatatagatataacaaatgggtatgatgagagacataaacttttggcgggactgactttgccaaggttgagagttgtgatgaagagagtttaatctacgtgcagcccttctaggagaagtggctgtatctaattaagatgtggtcggtcaaaaaagccctagttttattatgtaacttcattgatgtgctattattggatgtgtattaattctttggtgtgcagataaatgtgatgattgctgtactttaattttggggaaaaagtttgtatggaattagaacaaggatcgacttgttttcgatatagatactctgattgattgtgtatattgaatatcgatacttacataacggttattcggttaaagtacagttacactaattaaattaaactgtaagttaacaagaatattctggctcaagctaaattattttttttattattattgtttactaatcttttgttacaaatgttgaaaatgatatttattatacatgtagtacttcaactaaaataaataacgtgttttcatatttgatgtacgtgtataatatatcattttcaacagtgagtaatattaacccttttatcaaaataaagtaaaacaaaatgatataacctatcaacaaaatgcaaagaaaattgatccgaaccgaatatagccgtaacggtacaccaaaattgttttgagattttagtgtccgttgaccttttcatataaagccaaattattcggtctggtttccaaaagaacgaaaaggtatatgattacggtttactcccttgcttctgtgttttggtttagtttggtttaccttctcaaagttctcgaacgtcaacatttattttatcttattttgtaaggttctgcacatgttatacttattaattagtctactttttcaggcattgggattatttgttttagtctaaatcggttttggttgcataatattggatgaaaacattgtaaaggacaatttcaaacctgacttttctagatttggaaacgttccggctgcttgaaaagctcacataaatattagtatgatttcttaaaccaaaaataaatgatgattatcaacaataccgtaaataaggcaaaggaaataaatgatgattatcaacaattgccgaaaataaccacaccggtacaccgaaattgtttttgagattcataaaaccggaataatacgcctaaaggttattttctccaataccggtttagtttggtttgccttctcaaagtactcgaaggtcaaaattggaatttagtaataaacctgctccagctatatacaaatgtcatttgctcacctttcgccgattgattttgtacatcacacgcagacgcagcttttagtatttttttcaacaatcgcttttttttttctcgatctccgtgaagctctcgaatctctggtatgtttcttcgcttcttcatagtgtttctcatttccttttggtcttccataattttcggagaatctagtcctgtttttctcttcttctggaatctgaattcgccggtgaattccgctgatcgaatctctgagttttgttgaattatttgattcggcgataaaactttttttgtttgtttctgattttggtgagtgttgattgcttgagttttttcacggatcgatttgttttgagaattgggtggatactgtctgtcacaggttttgagttttggagaatg

SEQ ID NO: 26203 - DNA, 3000 bp, Unknown; identical to SEQ ID NO: 12049
  misc_feature (1)..( 3000): 2750-1469P.txt file - cDNA_ID_2711397; gDNA_ID_2214528; Annot_ID_134234

SEQ ID NO: 26204 - DNA, 3000 bp, Unknown; identical to SEQ ID NO: 12049
  misc_feature (1)..( 3000): 2750-1469P.txt file - cDNA_ID_2711397; gDNA_ID_2214528; Annot_ID_184851

SEQ ID NO: 26205 - DNA, 3000 bp, Unknown; identical to SEQ ID NO: 12038
  misc_feature (1)..( 3000): 2750-1469P.txt file - cDNA_ID_2711401; gDNA_ID_2214528; Annot_ID_134232

SEQ ID NO: 26206 - DNA, 3000 bp, Unknown; identical to SEQ ID NO: 12029
  misc_feature (1)..( 3000): 2750-1469P.txt file - cDNA_ID_2711408; gDNA_ID_2214528; Annot_ID_134219

SEQ ID NO: 26207 - DNA, 3000 bp, Unknown; identical to SEQ ID NO: 12029
  misc_feature (1)..( 3000): 2750-1469P.txt file - cDNA_ID_2711408; gDNA_ID_2214528; Annot_ID_184835

SEQ ID NO: 26208 - DNA, 3003 bp, Unknown
  misc_feature (1)..( 3003): 2750-1469P.txt file - cDNA_ID_2711412; gDNA_ID_2214528; Annot_ID_134216
attttcgtactacgtctacccctctcacggatatgtgtggtcgagcagtcattatcataatgtggaattttgaattgagcgaggtttcaaagttcaaaactatcacaactagtcttgatcaattctatataagatctgtgatcttggttgaagaaaagaatcgtcgtaggttgatatttaacaaggaatggcaaaggaagggggcttgggagagaactcaagatggagtcttggaggcatgaccgctcttgtcactggtggctctaaaggcatcgggtcagtccccattgtgaatcttgactcccattttctatgctcttttattgtattgtcatgtttagttatggaagaactaactctgtttgtgtgtgtcatgaatagggaagctgtggtggaggaactagccatgttgggagcaaaagtccacacgtgtgccagagacgaaactcagcttcaagaacgcttacgtgaatggcaagcaaaagggtttcaggtcaccacttctgtctgcgacgtctcttctcgtgaccaacgagtgaaactcatggaaactgtttcctctctctaccaaggaaaactcaacatcctcgtaagtatacatatataagcttcgtcctcctcggtattgggatccacaagaacccaattatgttgtgttttttgttgtggatctatacatatgtaggtcaacaatgtgggaacgtcaatattcaagccgaccacagagtatacagcagaagatttctcttttgtaatggctacaaatctcgagtcagctttccatctctcacagcttgcccacccattgttaaaagcctctggctcagggagcatcgtgctcatatcctctgctgctggagtcgtgcatgtcaatgttggatccatctatggagcaaccaaaggtaccgtatataagtacatccttaacacaatatgttcccatgggttatgatgcttacacatatattaactcgttttaggagccatgaatcagctggctagaaacttagcttgcgaatgggcgagcgacaacataaggacgaactctgtttgtccttggtatatcacaactcctttaagtaacgatgtaaggccaaagtttatatttctccttcgtactatgaaaaacaaaaaaaatacgtaaatatgacttcgggctttaatttatgtgtgaaaatctcttagtttttcgatgaagagtttaagaaagaagcggtgcgtacgacaccaatggggcgtgttggagaagcaaatgaagtctcaccgcttgtggcatttctttgtcttccttcagcttcttatattactggtcagaccatttgcgttgacggcggtgccactgttaacggtttttccttcaagactatgccataaaacacatatgcatgtgtttggatcatattttcaataatttaaacttacgggttatatacatcgtcaatatgtaataaatgtaatttagatgtgtccacatgttctgtttctaagagattcttagatatttatgcttgcgtggtgaacaagagttcactctccggatggaccgcatccataatctatgaatttgggaattatattaccaatttgacggcagactagttggccaaacttaactcttggttctttccggttatatatgtttgcagtgtctaatatttctcaataaaactttcaaagatgacgacaaaaagtgtctttctatgattctctccacatgcgtataatactattcgtcacacatcgtgacttaaaaacttgtcgactagtatataagtgtatggaaattctccacttttgaactaacttttcgtgtgagttaggcccacacttagttaattcaagacttacctcttccttccatgcctttggttagcaccggtgggttgtgttattggcatgcttggttgggacacataatggatattttcagttttctaaactaacatcaagcgcaaactggtataattctagggcttcagtcaagagtaatccttccatttcttatgagatagttgtaaaggtttcatcaaacgaaacttgtttcacacccaagaaatgaaaccaaaattaattacatgagacgaaacaaaaataaatccagaataaactactattatgaataacttttttgattatttaaacagatctgtttgattgaatccaaacctgttatgttatttatttttgtttttatgaataccaaaaagttttggctcagagcccgaatatcctcggcccgaaaccattatgtaatattacttactagattttcattaactttaaaaagattcatcataatatatagctaaaccccttttgttttaaattggaagacgcatcataagttacgtcattaactcatcatgatcactttcccaattaaatatgttaacctaaactaattcagtcttatcattactttgagatctctaatttgtctcagccacaaagtcattaattacgatatatatcattccacaacttctttgaagattctcttaacctcgtatcatttattctaacccattttcccattatcatttgtcatcaaactagaagtcaagaacagaaacatccagaacaatggctaaagtagaacagagcagatggattcttcaaggcatgaccgctcttgtcaccggcggaacgaaagacattgggtttgtcttccatcatcactttccaagtcatctttcttgcgttccaagcaaccaaagaaaataaacccaactttgcttacacatttatattcttgatgaatctctcacctatgcaactaaaattcaggaaacctacattgctctcaaacaatgaacatgtctcgatctcatgtagttgggcctaacccttaatcgaggcccatttgtttgattaacctaacaaatacatgaaaaggcctttcttacactgtcattatcattcattcattatggatttttctctaccagacattcagatctccaagaaaagatctttgggttctgtggttcataatcagaaatg

SEQ ID NO: 26209 - DNA, 3003 bp, Unknown
  misc_feature (1)..( 3003): 2750-1469P.txt file - cDNA_ID_2711416; gDNA_ID_2214528; Annot_ID_134210
tcttcttgttattctctatgttttgtttcctgaaatatttatgcttgtggtgaacgagagttcaatatctgaattcattatctactttggccaacgcctaatggtatcatttggtgtctcaacatgtgatggagtgtctaatttggtttgaaatcccaaaattcaatatccatgggtattctctagtaatttataaaagaactttggtccaaatcctacaagtggtcatatactgacataccacatagtggaagaactagctagctgggtttgaaataaactcaagataagacaagtggtcagaattgatgttgagagatttttttcctcagcatgggtgtcaaatgagggtccatcaaagtatgcagatgtcactaagggtttccatttagagtaatgagacatgaaatagtgggttttgggttttgagtatttgggttttgagtaagtattccaatataatatatgttcggataattttgatagctaaaatcattgtccacggtcccaaacgcccactagtttaggtaagatggacagccctagatgtaactatcaggagttgcccaatgtctatcatgtaattgtatcttttcttatttacaaagttgttagtaatctatctttatatacaatttaaagaagctcttgttagttatgtgatagataaagatggataacagccgatggagtcttcaaggtatgactgctcttctgaccggtggagcgggaggaattgggtttgtcttcttaccccatttttctacttctatttgatatccaaaatggtcaagaattcaaggagtttatgtttgtggaatgttttaggcatgccatagtagaggagctagctggttttgggccaaagtccatgtatccgacatatctgaaacactgctcaatcaaagtttaagcgaatgggaaaagaaaggatttcaagtgagtggtacaatctgtgatgtatcctctcgtccggagagagaaacactctgcaaactgtctcctcgttgtttgagggcaagctcaacattcttgtaagacgtttgtgagtgaagttaatggaaatgacaatgagcaagttttgctcaaatattttgactataaaatgtcaattttggttaggaccactatcttagatttttttcatcttcactcgtaaggctacgtattatttccaccacacatacaaagataatcactagattcatacttatccgttccacattcattgtatatacaaaatctgtggcatttctggtcacttcaagtaagatacaagaaaaaatggataaaagatggagtcttcaaggtatgaatgctcttgtgaccggtggcactaaaggcatcgggtcagtctccattttagatgctcttttattgcattgtgatatttagttatggaagaactgactatgtttgtgtgtgtgtgcgtgtcatgaacagggaagctgttgtggaggaactgtcaattttgggagcaagagtccacacatgtgctagagacgagactcagcttcaagaacgtttacgtgaatggcaagaaaaagggtttcaggtcaccacttctatctgcgacgtttctttgcgtgagcaacgagagaaactcatggaaaccgtttcctctctcttccaaggaaaactcaacatcctcgtaagtgtatacatattagcttctcctccccgggcttgggatttacaagaaccaaaccatgttgtgtttttaattactttttttttttttgtaaagatgtttttagttgttggtctatacatatcttatatataggtgaacaatgtgggaacgttaatgctcaagccgaccacagagtatacagcagaagaattctcgtttcttatggctacaaatctcgactcagctttccatatttcacagcttgcgcaccctttgttgaaagcctctggctcagggagcattgtgctcatgtcctctattgccggagtcgtgcatgtcggtgttggatccatctatggagcaacaaaaggtactgtatatactctttaaaacaatatttctttacattatgatttatatgcaagtgtatataaaagcattttttttcaggagccatgaatcagttggctagaaacttagcttgcgaatgggcaagcgacaacataaggactaacgctatttgtccatggttaatcacaactcctttgattagtgatgtaaggacaatttccttagaacaacggcgaaaaaaaaataaaaaataacttttgattctaactttttaacttatttgaaaatccctcagcttctcagtgttgaggagatgaaaaaagaagcagaggaaaggacacccatggggcgtgtgggagaggcaaatgaagtctcaccgcttgtggcatttctttgtcttcctgcagcttcttatattactggtcaagtcatttgtgttgatggaggtctcactgttaatggcttctcctatcagccacatgcttgagctaggtctgtgttgtgtgtattgtccaatgaaaacagtaaaccaaacaataacatcggaaaatgaatgatttgaatatttaggttaagccttaaaactaaattcattttggtatgttgacatattgtaaaacgtaatgaacaagaaaccttaacagaagatgtttcttttaagagtacacgagccttgcagaaacagaacacaagttgaactcaaatgagaagatgggcttcgacactcatcaacttacaatgctcagttgatcaagcacaaagacagaatcatgcaatgatgactcaaaaggacagatggcttcactgttgaagattttgactatatgtcattttttgcttgggacacttcgatattttagtcatgttttctaacatacgactacatagtttctcaacatgccacgtacaaacaagacaacaaactcattaattcatacttatctggattctgatccacatttactgtatacataatttgtggcatttctggtcactgctagtaacaagcaagaaaaatg

SEQ ID NO: 26210 - DNA, 3003 bp, Unknown
  misc_feature (1)..( 3003): 2750-1469P.txt file - cDNA_ID_2711424; gDNA_ID_2214528; Annot_ID_134200
aaattttgatctatttgagcgtttagatcattccctcctccttgttcttctttttctttgaatgccgcatacacttcttctctagattttttccaacgaattggaaaacttctatccatcatcttgatgtccaagatcttctttccttttaagtcttgaatcacacacttgttgtcttcaaagatgactcgatatccgttggatatcatttgagagacactaagcaaatttcttgctagttcgggtacataaagtacatctttgatgacatgatctcctttgtttgtggatactcttatatctcctctgccttcagacacgacctttcgaccattaccaatccttatggtaattttcttgttgcggtccaaagtgatgaagtgtctaacatctttagacatgtgattggtacatccgctatctaccaaccacgtttcttctccaattgttgagatctctttttcttcaacagcactaaagagaatatgacactcatcttcttcttcatcttctgattcttcactacttagatgtgctctttcaccttttttaagtttccaatctctggctatgtgtcctggcttgtcgcacacatagcatcttctttcatagcttccacctctttgtgaaatgctttcactcttctttctgaaacagtctacctcattgtgattgttcctcttacacacgctgcaccacatgttggtcttcccatggcgatttttgtttgcttgttttctgctcttgagccaagcttttctccataaaacgcaccctcattgatacgttcttctcggagactcaagcgcttctcatgcgcattcaaagtacctatcatctctgtcatagagaaagttgatagatcctttgtttgttcaaggaccgcaacgatgctatcaaactgttgcggtaaggagataagaaccttttgaaccaattggtaatcggttttctcttcaccatgaactcttagttgattactcatattaatcaacttggttgtgaaatcatttatgttttcactctcctccatcttcagattctcatattctcttctcaaggtctgaagattaatcatctttacttgtgaacttccttggaactccatctattctcttgcgcttgatgccggagcgattctcggaaatattgaatcagaaactgcactttgaagaatctgaagagccatcatatccttcatcacttgatcatcacgctctctagttaacgccggtgagttttcagacgacgaactcaacgtaattccattttcgataacatcccacaacttccttgttttcaagatggttatcatcttgattttccaaaagccatacgattcaccattgaagattggaataacttgctgcattgttgtctccatagctctgataccatgtagaactttgaactctcaaagttgttaaggatcggacaacacagattttactctgttttgtcttactctatatttcactctgtttttataaaacgaaaaccacacacttttattacatatacaaactgtatttataggtttacatgacacactttgactaagggacacgtctctagaagacaacctaatgtagagacacatacacacatgtaactgttttgtagttaacaattatatttgtatctcttcgatgtgtgatacgaatatatataaaccagttacttcactatataatatatctcttctaaaataagatgatgacttgatcacttccaacaaatacacaacaaaaaaatcacttgatcttgctcaaaaccttatgcattatgctcttatacataaacttacaaggatgttgagttttccttggaagatagaggcaacgttttccatgagtttctctcgttggtcacgagaagaaacgtcgcatacagaagtggtgacctcaaaccctttagcttgccattcacgtacgcattcttgaagctgagtttcgtttctagcacatgtgtggactcttgctcctaacatggctagttcctccaccacagcttccctattcataacacagttgtatacatattgacacgtgcaaatatgtaatatgacatattaatgtattcaatattggattagtagggggactgacccgaggcctttggagccaccggtaacgagagcggtcatgcctccaaggctccatctacatttgtctctcaagttttcttctgctttagccatttctggatactattttcttcaatgaaggtcacatatttaaggccaagaggtggaagactagtcgtgagggtggccaaagatacttttacgtgaattgtttaactttgtcctttgaaacccctgtctgaatgtcttagccacctctgattatgagccacagacccaaagatattttcttggagatctgaatttatggttgagaaaaattcataatgaatgaatgaatgataataatgagtaatgacgttcgtacacagtaaggccttttgatgtttttcttaggttactcaaaataatgggcctcgattaagggttaagccccaactacatgggatcgactcatgtttcattgtttgagaaaaactaaagaccccatgtaacatgggttgagctctgttctgctctagccattgttgtgtaatgatgtattttgatgagaaatgataatgaaaaatggctatttatgatgaattaatgatacgaggctatgagattgtttgaagaaattgaggaaagctaacgtatctcttgacgttgtgactgttgtggtgggtagaaaaattagagatcaaagtaaacaatcttaagactgtagtttagtgatgatggcgtaactaatgatgcataatcaaaaactaatagaaatataaggcccacgaaaataatatattgggcttttcttggcccatcaataatctgttctcaatctcaagaaaacatgaaccgttggatgtaaccaaacagaagtgggttatgtccagaatctgaagagatcagagagtgtgggagtggacggaaagatg

SEQ ID NO: 26211 - DNA, 3003 bp, Unknown; identical to SEQ ID NO: 26210
  misc_feature (1)..( 3003): 2750-1469P.txt file - cDNA_ID_2711424; gDNA_ID_2214528; Annot_ID_184821

SEQ ID NO: 26212 - DNA, 3003 bp, Unknown
  misc_feature (1)..( 3003): 2750-1469P.txt file - cDNA_ID_2711439; gDNA_ID_2214530; Annot_ID_134270
aatattatagtatactgatattataggtaattattataggctaaacaatcagaaagtgcctattctgaggaattgaagcgaaggaaagatacggagatagcagtagcgaaagagaaagagagatttataacaataaaaaacgagcaagaggtgatcatggaagaacttcaaagtgcaatggctcagaaagcgatgcttgagagccagatagcaaaatctgatggtacaatggaaaagctaaaccagaagcttgatatagctgtgaagttgttgcaaaagttgagggatgaacgagaggagttgcagacagaacgtgacagagcactcagagaagctgaggagttaaggagtcacgcagaaacctcaaccctacagttgcctcagtacttcacggatttctcattctccgagattgaggaagcaactaatcactttgattcgaccctgaagattggggaaggtggatatggaagcatctacgttggtttactgcgtcatactcaggtggctataaaaatgttgaatcctaacagttcgcaaggccctgtagaatatcaacaggaggtattttcttgacatattattagtgaaatttcttgtttagtttcatcatcattgtttactggtttattgtgcacaaactgctgcctctacgaaaaaggggactttgaaacacagttctactgtagttttgattttatagtgttcgctgtggaggagctttgacttattcttgcggcattgcaggttgatgtcctaagtaaaatgaggcatccaaatatcattacgctaattggagcatgtccagaggggtggagtcttgtctatgagtatcttccgggtggaagccttgaagacaggcttacttgcaaagacaactctccacccttgtcgtggcaaaatcgtgtgcgcattgccactgagatatgtgcagcacttgtctttcttcattctaataaagctcatagcttagtacatggtgatttgaagccggcaaatatcctactcgattccaatctcgttagcaagttaagtgactttgggacctgctcactacttcatcctaacggaagcaaaagtgtgagaactgacgttacaggcacagttgcctatttggatccagaagcttccagtagtggagagctaactcctaagtcagatgtttactcgtttgggattatcttattgcgcttgttgaccgggagacctgccttacggatatcaaatgaagtgaaatatgccctcgataatggaacattgaacgacctcttggaccctttagcaggggactggccctttgttcaggctgagcagcttgctcgcttagcattgagatgctgcgagactgtcagcgagaatcgtccagatcttggaactgaagtgtggagggtacttgaacctatgagggcttctagtggaggatcttcatctttccatcttggccgtaacgagcaccggatagcccctccatacttcatttgccccattttccaggtaactaatctgtatatttgagtatggatttccagtattattatcaatctgagaagacttcgatcacaaagtcattaaaatttgcttatctgaggtctcaaaccgttatgttgcagtctaatggtactcaacccgttcttcctctgctttgttttcaaatatttcaggaagtcatgcaggatccacacgtggctgcagacggtttcacatacgaagcagaggctataagagcgtggctggacagtgagcatgatacttcaccaatgaccaatgtcaagctttctcacaccagcctaatagctaaccatgctcttcgttctgcgattcaagagtggcttcaacatcatttgtgaaaataaaatccttcaaaccctcaatccctgttctcttatgaaaaaacgtttttgccttttctgcgggaggcaacagagtaagtgagtaagattagtgttttcagtcttccttatacatatacatacgatctaatcatggatagcagcatatttgtttactttttcaagcatagtgtaagtcctccatatcagtcatatatgaaaagaagaagctggtgagatttgtatgtggatatgtatatatatatatatatatatatatatatatatatgttctgtatgaaaaaaaaagttatatgcttattcggtttgtgtgagaagaactgccactattttgttcttccattatgttcggctctcttaagaacaaagattagcctctaattattggacatgatctcactgatgatgcctttgcttagctaaaattaggatgagtcttacatttttagtcaagactatcgtgtaagacttgttttccacctggaagaagttaccttggattgcctatagtgatttttaatgaactcttaaaattcttgtgattaatcttacttaattagcagtggggtcaggtcgttttggcggctagtggcataactgtataaaaattcaggattgcactgaggtaagccaacctaacgcagcctttaaagacaccaacctggaaaatgctgagagtattcttcaggattttctcaaaagtcttgtgaaattcgtgtatttgtgtcaatatgtcgacatttctcttcatacacagatactgtcgcttttgattcctggtttggcttgttgaaagtcaaaaagccttcattattttaatacatgattcagcttctgcgttaaggctaggtttcgtcattggtaccgtggttgacttcgtgtgcatgttataacataagaaaatgttcttgcttgttgattgctccctctgttagataagtcatctcttttctcgtattgcaaattttaagtttgttcttgtttattctcttgagtgaattagaggtatgttttgagtgttctcatatggagtgtgttggagataggagcttcgatccaagcaaaggggaaaagtgttggcttcatgaggcttcgatgcagccttaaacgctaaaatccaggccaagcaagatggagatagagagagatgatg

SEQ ID NO: 26213 - DNA, 3003 bp, Unknown
  misc_feature (1)..( 3003): 2750-1469P.txt file - cDNA_ID_2711443; gDNA_ID_2214530; Annot_ID_134269
attactatatcattttattcctaattaactgtacttctatttctaattaagattagtattcaaaaattcggcttaaagagattaagatacctttaagtagctgtatagacagacaacccctaattagaaagcagctactcttttttttttttatatagtagtaccaagataaacgacaaaagcaattaacaaatgttcgcaatgtcgacctcatcaaaaacaaaattaagaaaccgacaacgtttcttgtatttttactcagcatataacaacaagagaaacgacgacatagtggagaatacgaagcatatagtttcttaggattcttctatcacaggtcactgccttttttgtctacgtatcttgtcctaatttgcatgtgaagatttgatgggctttttgtgcatcgctttcagcattcggaacccgatcatattcgttttatccgactccgacccgagggttatatgcaagcaattaatatttcgttgttcttgttcgttcctgaggaccatcgccgaattctaagacttgtgattacttaaactggaatttaaaagattagaaagctaacaaaagtatatggtaacgtcatgtgtaattaaatgcatgattagtttttgacttttaaatatcatatagtttttgtttttgtatgttatacagaattctttcattatgttctacctaacagaaaagagatataaatttagtgtaatcttataaaataagcatggctgcggttgccatattacaactctgtctaatcaccacaatcattttagttaagggttttggtaacatataattatcatggaaattaaagacggtgatagcgtaaactaattaagaaaatcacatcacatacttgatactcctaaaagaaaacattaaagtagaaagaaagaaactaaaagccaaaaatgcgtgtgtaatcgtatgagtgatatttggtgtactacaaagcctgcaatttgaaaatgttgacacgtacgtccttaaaacatttgagactattggattcagacttttgaaaagcaaaactttggattcggaaaccaggcaggcttatatggataccattaaggcccgtgaatcatatattgcccatttaaggaggtatttatttttgatatattttatttttaatttattataagttcatcattatcccggttatcgtgaagactagtcatatccaattaacgttattgctctaacggaaacgtgcacaaacaaattcaaattgcagtttacggtgaagcttttgacgaatgaataaagagatgctacatccccaaatcgtatatcctaagttgaaatattccatgataattaaactcagttatatatataacttggttagttaacaaactggtgtggatgtgcttagcctgtcttcatatcctgagacaactttttctttatttttaaaacctgtcaattacaaaattaacgtaatattcaataacaaataaaattctatttcgaccccggaaacatatatatatatatatatatataattcaaatgaaaatgacaagggaataagcatttcggagaatatgcctattaatttacattatataacatagtacaaccacacacgccacattaacaattcaactagctagtttttaatttatcagaaaatgaacttgaaaatatgttataatctacactaaatgttaatagaagactttttctcatctattttcaggaaaaaaaaaataacaaatttcttgaaccaactaacaaaattagcaaattaacgtacaatgatccattttttaacaatcattagagtgatatagtagtaatccgataccagatcctcaaaatatatggagacatagtcattcaactgctggtttttgcataatccatgtgtattagcctaatactattaggtttgatgcatccagtctttctaaaacacgtcattataactcacgcgtttagtttgatagacatataatgatgcacttaatactttcatattcgttgtcatctatgtgtagcagcatagtgcacttgttcgtctcagactttatagaattttagattcgtgagtagaaaatggcttttcgcttaacttttcataaatcttatgtcacacttaattaaaaattgactagcaccttaaaattaacatatatgtgtaacatgaagaatattgatatcttgcatgatactaactcttttggggtcttctgaaaaatagattgcatgcatatctgatcaaatgcaaatagattatgttataaaaaaaagtcatttattctactgattggaatggaaataagttttcaccggcgggaacaaaaaaggtgaacacgtcggcagaaatagagaattaagaaagactgcgagttggtgtaccaaatctcatccgtgcttctcataatcaggtacacgtgtcattaatcggttaaggtggaccaccccatagataagtactactgtgtgtgtgtccacagcagataaataaacctcttctttcatgttctcgaccacgtcagattttttagcagcaaagcacacaaatccccaagaagcttcgttttggtatgttaaagtaaaatcgaataaattttgcacacaaatctcaattttaattgtctttccctcttctcgtgaaattttccgacaaaatatcagtttcttcttgccgtgagttttggttggtctgaccaagagtccttttatttggtcaatacgtttcgaaatttgataatcaaactctttcttcctcttcttcttcttccttatccgtagactctagggtttcaatacgattcgagtgtgtctgtttgctctctagtcaaaaatttcactctggttagaaactttcccttttggattgtgaaactgctattttaaatcactgcttattgattcgtgttccggagtgatcttggtgaatattcttaatttgtttcgttgttttgtggttttagatatcaaacgatctggtttgtcggatttgatattggagcaatg

SEQ ID NO: 26214 - DNA, 3000 bp, Unknown; identical to SEQ ID NO: 12087
  misc_feature (1)..( 3000): 2750-1469P.txt file - cDNA_ID_2711451; gDNA_ID_2214530; Annot_ID_134266

SEQ ID NO: 26215 - DNA, 3003 bp, Unknown
  misc_feature (1)..( 3003): 2750-1469P.txt file - cDNA_ID_2711455; gDNA_ID_2214530; Annot_ID_134265
aatcctggttcttgattcaatatataatggagctttcttttttcaagattgcaagtttcagagatagatagttaattaccaacggaagccattctctgtttcttgccggagcccggaggtcgaccacggccgcgtttgttagagttgttgggagtaatggtcgaaacagaggaagacgacagagccaaagaaacagagccgtcttgaccgtattttctaggccgtcctctctttcgtttcatcggagtttcactgggaggtggaggaggagcaatcatattaacgccgatatgatgaggaagagctccggctcctccggctgctgttgccagagaaggatcaccgtgtaaagaaggagatccgaaaccagtggagcctgacccgaatggagagttttgattaggtaagtgacgaagaccttgctgttgctgtggtgatccatgaaacgttggaggacccgacccggataatcctctatggatatagtaagaacctgacccggataatcccattgcatctcttcgatccatttcgcatttacaatagttgaagaagaaagactcttttcaactttttaagtgaacttgtgaaaccctaaaaagattgtggctagaattatgaggagagagagaaaaagaaagaggataaatggataagaggaaaaaacagaatcaaaggttgagagactttacgatgaagatataaacttggagagaaaggaacatgcaaagctctaaacactttctctgcttcttacttctcctcctctctctctttcattctttcaccataagcaacaagaaaagaaaagctttctcttctatcaacaatggttaggacttggttttgaggctatctctctctctctctcttcttgaatttgtttgctttttagttttctgggtgacagaaggaaacagaaacaaacaaaaaacctctaacagactctctctcaagcaaaagcatttactgtgaggataacaacaatgggatcttttaattcttttttttctgaaaatgtatttggaaattcaaaatcctaatgaataaactgactttgactgtagctctatatagcaactaggcatctgtatggcacatgactcttatggccacactctttattcaggcgcgtgcaccaacatgtcactcttctttcttctcaaccagaaatcttggtgaacagattcctccttttcaagctgatgctacttcttactagtctctctactgtttctatagactgattgatctcttcggaatttgatctgagacggaagaatctgtagagacagtggaggccacgcgccggagagtgagaaaagatttgggcctgtctggtcagagacttgcccactggcttccactttgagaactattttgacgagagagagaggctgatcagaagaaatctataaaatatctcgcaaggacccattgatgggatgatataacctctcaaagcctttgagattttttcctattaggattcaactttaaatgtaccatgtaatgtgtgacactgtttgtataagacttttgattatgacaaacataatttgactttctaaaagacagtttttttcttcaaaatatgtttagtggaatactggaatgtactaataaactagaaaagatcttgggtctgactaatgcaccatgaaagtcttatgccaattataaacatacttgtgtctttgttttgtttacctaaaagttgactttttctcagagaaatcagaatctatgctgaatttgaactttagaagcaattaggaaccatacacatttcacttcatcaatagctacattccacaatgatcccgatccggttagatagcaaaatcttgcattcaaaagagagagtgatacataagagtttaacctataagaagaagctagcttcaacatgatttctccaaagtaaagacgaagatcaatgaagaacaattttacatacaagtgaaaaaaaacgaagttccttgtcaattgtctagctccattgcctgagcagctttagctttagcagttggagtcagttttgtctttaatttcttcttgccaacagaaaatccacctttcttcttcttcccacttccatcaacctagacaacaaaatcaaccaactcacagatatcataaactactctagacttcatttaaatgatttggaaaactcaaacttattcgtcagatgttctactaagaagattcaatattattatttttaccccacataagcttctgactaacactatcgaaatcaaattgaatccaagcgaattcaatcatttcaccattggtaaccaactagagtaatatatagctagaaaagaccattctctgcaacagaatcggtttgctacttaacgaacaccaatgtatatgaactaaatatcagaattaagagataagagagacagaaaaggtccttactttcatcttattcttgttggcatgaagcttcttgatcttcttgtcctgtaactctttctcttctgcaaatcgaaaaaattccaagttttgttgagaaacacatgcgtattgaattgaaagcgtttaaagagatttaaagaaacctactttggagattgtactcgtgctgcttctttctcttggctaaattgttcttcttcgacattttttccgttccaatttcacctctccaaccagataggcgttctctataaaccctaaatttcaactgacctcaaagggtacggaactttaatgggctgagataagacataagcccatttagaagatagaatagaagtttcagtataagcccatttaagcccagataaaagcttagaaaccgaaacgttgtcgagcgcacaactgttcgttccaactacctttctccaagtcacacttgtctctctttacttatgcactctgcaatttttgcatgtgtctttattgttgtctctgcttcttcttcttcatcgtcgtctccaccaaaatccctaaccctaaacctcgattttcccgcccaaaatg

SEQ ID NO: 26216 - DNA, 3000 bp, Unknown; identical to SEQ ID NO: 12103
  misc_feature (1)..( 3000): 2750-1469P.txt file - cDNA_ID_2711491; gDNA_ID_2214531; Annot_ID_134279

SEQ ID NO: 26217 - DNA, 3000 bp, Unknown; identical to SEQ ID NO: 12102
  misc_feature (1)..( 3000): 2750-1469P.txt file - cDNA_ID_2711495; gDNA_ID_2214531; Annot_ID_134278

SEQ ID NO: 26218 - DNA, 3003 bp, Unknown
  misc_feature (1)..( 3003): 2750-1469P.txt file - cDNA_ID_2711511; gDNA_ID_2214532; Annot_ID_134320
tttatcaagtaatttgcggagacatgtctgatattgttatctttatttacttttgtcagataattcgtgacttgtaatctatgtatttgcagttgtactatttttgggtgcatgcacaaaacctccacgcttatccatgatcacggagtacatggagctgggatcgttgtattatttgatccacatgagtggtcagaagaagaaacttagctggcacagaaggctcaggatgcttagagacatctgcaggtatttaagctaccctgcatagctcccttgattatatgttttaagctacatatgcttatctcatgctgttttgtatttcttatgggatgcataaggggtttgatgtgcatacaccggatgaagatagtccaccgcgacctaaagagtgccaactgtctagtggacaaacattggacagtcaagatctgtgattttgggctgtcaagaataatgactgatgaaaacatgaaggacacttcatctgctgggacaccagagtggatggctccagagctcattcgcaacaggccttttacagagaaatgtgatatctttagtcttggggtcataatgtgggaactttcaactttacgtaaaccatgggaaggagttccacctgagaaggtataatatgctgtgccatgatttctctagagatgtgatatctttagtcttgtgattacacttaatgaaatttgcttcttaggttgtctttgctgttgcacatgaagggtcacgtttggagattcctgatggtccactcagcaaactaattgcaggtttagtgttgttgaataccatgtttcttgaacttttttgtttattctcttatatttctcaactgcttcagtctgagttaaagttaaccacaatttctgtgcagattgttgggcagagcctgaagaacgcccaaattgtgaagagatacttagaggcttactcgattgtgagtacacactgtgctaacaacacttctctttcggggggatatgagccggaagatgttttagctcagaaaacatcccagcttcttttaaatctcggctcttaaattatcaacctgagtggcataattttttaagatcatgagaacttagaggctataatgagacaagttcatagttcagttttgatagctgtggaacaggcagagacaccaaatgtaggatacaaacaagcatgtctattaagctgccactggtgtgattcatgttctcacaggcaatacttcttttgttggctattgaagagcattttggtctatcttaagaaaatatataatacacactattctttgttgggagaataaatagctcttcgatttctcttgtcttcatgacttcatccattattctcttgtgtctagccactttctttcttcttttctttcgtgtcaagcattcgataatccgactttatttatagactcatatcatatcccaattaaattttatgaagaagagtttttttttttctttttctgtcatataactttataaacttataaacgtatatgtggattataaactaaaaacaaaatatttttattacaaattatctgcatcatgttaagaaatttgaatcaaaatttattttgttgttatgcattagaaaaatctgagatgatcgggtcaaactatctaagactatactataatgtaaacgagattggtcggcaatcagctctagtctgtagtagtgtcggaagacgtgaacccaagtcaaaagaatatttataactatttagaccaattaagaggaaaaattagcctttattttaaaattataattttgtgtccaatgtttttttttttaaattatatctatacgtgaaattacttatcttaaaaaggtgattacaactaatcttcaattttctagtgcaacagtatttttaaattttggaaaaatctttggcagcggagaaacagatcgtgactttttatttttaataataaaaccattttatgccttttcatattccgcttcaaaacttttcttttgttatttttttttccaggaaagatttagatttgtccatatggtttcagtcaaacgaataataaaaaatagattagaatagaggacccatttaatttgtagaatagatataaaaatgaaatcaaatcttagagggctccacgttaatttgattgatagttaaattccaatgcactcatacttaatcattagggggctaatgggggtgtaaaagcacagtttggttttatataatatactctatattatacttaaatctcttgggttagataaggacttacggtcatacatatataatttcttttacttggatgattggatccattaattccctatacttttatcaaaaaaattataccaaaccaaatttcaaatcactcaagtgaaaatgttttgtacattttaaaacgaatgtagtaatgtacaatgtgtcccacatttcccattggaaccctgaagcggtaaagcctataaatattcgtgataaaaagtaattatattctcaactaaaattactatatattgtaatattcatatgggcatttttattcgtcatgtaaatctttgtgctttgtttattcgcattttacatagttgtttctgattacatcatgataagcactttatataataaggccttacagttgttacataaatacaacgaaatgataacttttttaatattggataaatataaagtctctcataagataccgttgaccataattaaagtccttaatgatagagacaaaatttataaattcaaacttggcttctctccggtgaagtcctcctctctgtttctatccaacttcttctctctttctctataaacttcctcatccgccgcaactgtaaccgtaaccgccatcatccgccgcaatttcctacaacatttccatgtgctctttcttgttgtagaagattgttcttcacatgcatcctttctgttgtgtctccgatcactccccttccacgccgtcgttctccatg

SEQ ID NO: 26219 - DNA, 3003 bp, Unknown; identical to SEQ ID NO: 26218
  misc_feature (1)..( 3003): 2750-1469P.txt file - cDNA_ID_2711511; gDNA_ID_2214532; Annot_ID_184982

SEQ ID NO: 26220 - DNA, 3003 bp, Unknown
  misc_feature (1)..( 3003): 2750-1469P.txt file - cDNA_ID_2711515; gDNA_ID_2214532; Annot_ID_134319
gaatcaagccctacacaccagggatcagaacttgcggaaagggtgaagttgctttcttttgaatctcaaggtgaagctttgagtaaggactcccctagaagtgttgaacaggattgctctccaggtcaaagagcatcacagcatctttgggatactggaatactctctgaacctattcctaatggtttctactcagttgttccggtgagcttttcagattttttttatttctttgtcatttggttagtaggaagatgcagtttctgaaatttgaaatcttgctccaggataagagagtaaaggagctatataatagactacctactccgagtgagcttcatgctttgggagaggaaggtgtcagaattgaagttattcttgttgattttcaaaaagataagaagctcgcaatgcttaaacagttgatcactacacttgtcagcggcagcggcacaaatcctgctttggtgattaagaaaatagcaggaacggtaggatttctgtaatgactcttccctctttgtcacagttccgcattgcatattctcctagctcgacatttatttctttaaccgcgtccattgttatgttctattgcactctctgccagtgacttactctattacctcaatttcggttcttaaaaaaaagaaacgggagttgatgtcctcatgcaatcttttcagcactgacttgtcctatactcacaaaattcattctcctcaaacaggtctctgacttttacaaacgtccaacactagaaagcccttcaaaacttgctctagaggaaaatgcgttcttgtttgaaaaccatggtgctcagttgcttggccagattaagcgtggttgctgtcgagctcgggcaattttgttcaaagttctagctgatactgtaggacttgaaagtcggctggtggtggtaagcctcagtttctcatatttcaatttttttctttacctacatttatgatctagatgattggatcttatgctatttgtctcttacaaatcaacttggtttcccttttgattcacatgtgcagggtttgcctagtgatgggactgtgaattgcatggactctaacaaacacatgtctgttatagttgtgctgaattccgttgaactactagtcgatcttattcggtttcctggtcagttggtaccgcgatcagccaaggcaattttcatgtcacacatctcgcctgctggagagagtgattctgcagaaaacgactcttgtgactcacctttggagccaaatagtcctttatatgagagaagagatcctgagaggtcggcttccgttgtgtgatttttctttctaaagcatattacagtaagatcattctaaaacaactcttgtgataagcgtcccctagagtgatatcgtttcctctgctacagtacagaaaaagatgaaaatcttcaattttatcggaagttagaaggatatccaaatgcatctggttcatcactgcgtagtttgatgctcagaccttctacagctattgaaaggaaattgaggtaaatattacatatatatttctgacaagttgtataatggaatcagtacaatgattggtataatagaaatgtgcttttcttccttcagcaacacctcgcatagtgaaccaaatgttgctactgtattctggaggcgtagccgcagaaaagtaattgctgaacagagaacagctagctcaaggtttttccgtaccctttctggcttgtattatagttaatgaaaaagaaaataatacattggcacgacctcttgttgtctttagatacagtaatgagatggaacatataaaattatgtttctcttctttttgctgattctatatttaaatctcttgattagcgattctgttatctgaagtgtgcctttcaagagctaccctttttttctctatacctaactgatgatagttggccatttgttacatttgcagcccagaacacccatctatgcgacgtggacgatcaatgttgagcactggtaggaattcttttagggattacactggtgaagcatcatctccttcaaggtaactcatttttacattagtgcatgcgaaaattttcagtatgccgctcctatcatatacattccagtattagttaagttgcttatacaagtctgcatgtatatatttgattggctgtgcaagcaattttttaatattctctagctttcaaacagttcatccacatcagaaattcgtaaaactagacggcgaagttttaggatcacaccagaaattggcgatgacattgcaaggttggtattctcatccatgtgcattgtttctactttcatcgtttagcagtttttttctatcattttcaccttgcatttaaagagctctatattggagtttattctgtaaatctagttggtaaggtatttttaaaatctacaatcatctgagcagctgctagatcacatgaaagtatggcatgagtcatctcgaatgcaaaactgctatctccaaacttctagatgcttaggttaggtgtctgtaagatggttatatgataaacatggaactatatatttactttgatagtcatagaagctgtaagccatttgatggtactccttttaattttgtaataatgatactgagattcgtgagaactaattaagaacagtgattttgtgatttgcttgtgtattgactctgatgttacaaattattgaagcgctgtacgagaaatgtatgagaaatcaaagcaaaaccgtctcttgcagggtcgagaggatgaaaacagctcagttatcgataacaacgtaagttttggctctgttagtaagagtgattgttttgttgtgttagttcctttctcattgtataaccagtctaaaagttctgagtttcttctgaagttcactgctctattagctcttacctctaaatttcttgtgatttttgtttgtgctttctcaggtgtctggtctccatcttgatgatgagttaaattctaagaagacaatg

SEQ ID NO: 26221 - DNA, 3003 bp, Unknown
  misc_feature (1)..( 3003): 2750-1469P.txt file - cDNA_ID_2711538; gDNA_ID_2214532; Annot_ID_134304
tttcaagtggttaggattcagccctaaagcttctgataaaagctcaaagattagttcccctagtttcatcactcgtttcgcatattccaacatgatttccctaaaacattcacacaactagataagtcttctttctttctttctttcttctatagactaagaaataaaggaaatttgtatttcgtacccacaaatatctggtaagtcctctgtttctggaacatcaggagccataaagcaactcaaggtatctctccagttcgctgaaggagagctataaagatcaaaattactgttatacttaactgttttggtgacgtcacgagtataaaactttttcctaacgtctgagtcttgctcatgaaacccacgaatcccatctttcatcttctccataacatcattactaatcccatggttaatcacctggaaaaacccgaatctctcaaccgcgtctctgatcatcgcgatgacgctctctcgcgtgactgtgtactcgtcgaacacgcctcctttaagatcgattgttggtataaccatcgttgtagaggaaagaagtagatttgagtcggttaaattaagatgtggatgatggaagatacgtgggatctgagtaactccggcgtctaggagaccttttacgccgatcttcaactcgtcaaaagcttttacctcactagcacgatcgtatgttgcttccatcttcttcttcctttgtgtcaagaaacagaacaaagagaaaacgttttctaagacaataggtatctgcctactactgttgaaatttggtacctctgtgtatattataatagaaaatgaggtaatcgaataaaagtcaatggaattaaatttttctgattagccaatagatgagaaaaggcaaaaagattcttcgctcaagtctatatggctctgttcactgtcggaaaatgagtgaatttgaaacggcagctgtttcttttcatccaagtagctgccgggaaaagaaaagaaaaaagctcaggtaacttgtgggtcttgcttgagactcacggagttttcacctatctttcaatagttgactttttcactaaataacaaaactgttttaaaatagtaactaagtggagatgcggggtatcgatccccgtacctctcgcatgctaagcgagcgctctaccatttgagctacatccccacgatgactatttattaaaatattacaatatttaatactttcaacgtgtaactgatgcaaaatacgagcggtgtgtgttgaaaagggactaatgattgagagaattggagataatgactaacgatattaatagagaaatcagaaactaaagtcggatactatctaatcagtaaagtagagatgtgtgtgattgactaaattttagaatagttatgttggaaagagaataaagaaaagttaggaggatctagggtaaaattttcagtttgtattaagtaaaataagtttttactcttactatctcaattggagggatttttttttctttctttcagctgattagtgtagtatacatcaagctaaaacaaaagtaatttgtttttcaatccactattgttacgtcaatagacattaatagttacactctacatgtcatgaatttttgtcatttcatgtatagcttccatttatatattaaaaaaaaaaaacatattagaagaagtaaatacctaatagataatctttactttgtttattatttatgattggtgtattcagcttataaaataattaatatgcatcatatttgtttttacaaaaagtacattgaatatcatatgatttttagttttttttttttttttcatttaccctcgatcttacaacaaataataagtccagtcatacgcacctaccaaaagaaccaattgaggcatgtggttcagtggttagctaaacggatgggctcattctctcacgttttattttggctccacctacccacttcaaaccactaaccatctttgtttcattctctacgtctttccttcatttgattttccttttctcataaaaaaaacaaagcatcatcaatcaattttatttttattatgggatccctttttattatattcaacgaaacctagttctttttcttaaacgtcaaaaacaatgagttcttttactaattgactgtttgagtttagaatctagttttgaacccaaaaaatgatacttatataacttcatggaaaactttgattctaaatattgtatgtagaagtatcctcaatatacaaagtagatttgcattgttcgacttcaatgaaatgacatatacttctaattgagtgagatagaaatatctaaatgttttattttcatcggttgaccagatattacgacgttcttacaagagttttgaacccaaagatgggttagggtgggtgacatggatagatattgacctgtgggctctggccaatcaactccgacaagatagaaatatctaagttattattatttggtaacaaaattgtatattatccacacaagagtagcaaataatttgtgttctacaaaatggtgacaatattcattttcaaagtaacaactaacaagtgttcagttcacatttttaaaaatcaacattcaaaaaaataaaattcaacagattgagattttgatttcatacaacattaaaattcttaatatagaaaataaaaattatatgcaaagaggataagtaatattaatgttggaaaatcagttttcaataccagtaatattttatgtaattagttttccgaaatagttatatctgataaattttgtcataatttttttgattgtatggatttgataataacacacgtttccaccaatcaacaacggaaacgcaacgccacgttccgccacgagtcgcgattctctctcactctctctcccatctttctctataaaacttgtgtcgtggacactcttaaaacttcactcaacaaagcttaaccataaactgtgagtaaaaaagagaagaaagaaaaatg

SEQ ID NO: 26222 - DNA, 3003 bp, Unknown; identical to SEQ ID NO: 26221
  misc_feature (1)..( 3003): 2750-1469P.txt file - cDNA_ID_2711538; gDNA_ID_2214532; Annot_ID_184964

SEQ ID NO: 26223 - DNA, 3000 bp, Unknown; identical to SEQ ID NO: 12153
  misc_feature (1)..( 3000): 2750-1469P.txt file - cDNA_ID_2711553; gDNA_ID_2214534; Annot_ID_134348

SEQ ID NO: 26224 - DNA, 3000 bp, Unknown; identical to SEQ ID NO: 12151
  misc_feature (1)..( 3000): 2750-1469P.txt file - cDNA_ID_2711567; gDNA_ID_2214534; Annot_ID_134339

SEQ ID NO: 26225 - DNA, 3003 bp, Unknown
  misc_feature (1)..( 3003): 2750-1469P.txt file - cDNA_ID_2711582; gDNA_ID_2214536; Annot_ID_134396
gagttacgtatgtttcttttcttctgcatctagttttttttttgcatattcatcaccttctctcagttttcttctttcaatagaattatccagaaaacttttaagagatggcagctccgattcgattctttgaactgaacactggtgccaagttaccttgcgtcggtctaggaacctacgcaatggtcgcgacagcgatcgaacaggcgattaaggtatcaccttcggatcaaacttcgaccttattattatgccattggatataaaatttaactttgacacttttcttgtcgattattttagattggttacaggcatatcgactgtgcttcgatttacggaaacgagaaagaggtaaatttgctatctacaatatattttaatttatctctctttaaccatagatgtcatttgactggtcatcaaatgtattctctacaagagtgtatatttattatagtttttgagggtcatggtggaacaagaatctcacagtaagtgtagcctctatgcttctaatgaaagagttttttttttggtatgatgcttctaatgaaaaaggtatatgaatgtttagtttgtgggaactaaatgtgttctgctttcttcctattttcgttgttctcacactatgattgatttccatttattagattggtggtgtgttgaagaagctgataggtgatggttttgtgaagcgtgaggagttatttatcacttccaaactctggttggtgttctgtttctaccaagattctctctggtctgcactgcacacacacacacatgttcatgttttttgttttgttctgtaggagcaatgatcatttacctgaagatgtgcctaaggcactggaaaaaacgttacaggacttacagattgactatgttgatttatatctggtacataacttatagcaaatgaatcttgtttacgtgtaattttttccattttgatgtgtttttgcttttgttgaagatacattggcctgcgagcttgaagaaggaatcactaatgccaacacctgagatgctcacaaaacctgatataactagcacatggaaagcaatggaagctctctatgactctggaaaagctcgagcaatcggtgtaagcaatttctcgtcgaagaagcttacagatcttcttaacgtggcacgtgtaaccccggctgttaaccaagttgaatgtcacccagtttggcagcaacaaggtcttcatgagttatgcaaatccaaaggagttcacttatctgtgagtatacttacaaattccaaaatttactctgtttttgcaagtatgaattaacgaagatgccttttcatctgttttggattgatgatagggttactctcctttgggttcccaaagtaagggagaagtcaggctaaaggttcttcaaaacccgattgttaccgaggttgctgagaaacttggaaagaccaccgcccaagtggctctccgttggggactccaaactggtcatagtgttctaccaaagagctcgagcggggctcggctcaaggagaatcttgatgtttttgactggtccataccggaagatctgtttaccaagttctctaacattccccaggcaagttctttcatctttctttttttttctcgatgaatcaaacgacaatttcggtttggtttcttgtcattattgatcttccctcctcttcaccatcttgttttcctcgaccccatcatgttgattatagatcgtcaaataatggattttaccaatccctataaatcttgcaggagaagttttgccgagctactgagtttgcgcatgagacacacggcttctataagaccattgaggaattgtgggacggtgaaatttgagataatgtccctcctttctacttgtttaaccataaaccattaaggacattgaaataaatatgttatctttttatatttaatctttctatgagaaaacactaaacacatgcttgggatttcatgatgtttggcaaatgttgttattctgcattcttcaaacaataaaatgttttcaactagttacaacttcaacatgacatagtcgatagaacctaagactatttccttagttcgcgtcgggaattttctacataccgcaaaaaaatacgtgtatgataaaaagtaaaattcaaaccttatttcaagactagggaattgccttcttctttttgattctataacctacttactgaatccaaggatcttgatcaaattagttatttctcatgaaaacttacattaacatttccttaaataaataaaaacttacattaacaatttaaaacatccattgtgaagggccggaatgaagcattatagtaagtgttcccaattattctccaattttttctcttcaaaatgaattactacaagctctcaaccgtcgattctgcatttcgctcggcgcaatatatatgcgttcacccaaaaacgtgttacttggacgttcacactcgagataatctaaatgaactcatatacactcgagatgttatataaactcatctacaattttgttgttgttgtaaaaccacataatttttcttatcacaaagatttttgaaaaaccaatcacaatgtataatattctactattgctacattatttatgaaatatataaaacttttttcataatatgaaatgaattataaatcatgtacgaattgtcttggttgtttgagagttctgtcttctgtgatacgtgtgaattgtggacacaaaaaagtgtcagtcacactcgagattagcaaagaggaaatctaaatgaacgaatttaactcagatacgtccaccgtccattggtccatgtaatgatcaatatctgacgtgacaatatactaactaagaaagtactagtattacagaaagaagaaatcaatttggccacgaatctcccgcctctgtcgctctctcacttcttctcaccctttaatagctagtgccgagtgcagtgtgcgttgaacaaccaccaccacatctgataatg

SEQ ID NO: 26226 - DNA, 3003 bp, Unknown
  misc_feature (1)..( 3003): 2750-1469P.txt file - cDNA_ID_2711585; gDNA_ID_2214536; Annot_ID_134395
tggctacccgcaaatgaacgtaatatttttccttgaatatacagtaatttatagtattgtaattaatgtagtacatatatctgttttaatttttttttgaaaccaattataaatatcctcacggtaaaatggattatatatatatatatatatatatatttgctaaatgaaatatcatttcaagaatttagtttattagaaatattttattaaatgaaatataatagtttattattaaactaaattgtttcatttaaccaaaatattttctatgatgctatttcatccctgatttttgtgattatggatatattgttaactttataacaaaacaagagaattcaagggactgaaacgttttatgacttttaaatggatgactatatacaatggctgatccaaaaaaacaattttgggtaaggcatattcagtgagctctaggcttagcgccatatatgttacatcaaaatttattttgtagagtaaaaagctttttagaacaaaaaaacaacaccttaatttatgtctattttcgttgtaaatgtgtaatatataatacatttaatgaattacaacaaatggtaaaactcatgctgataaaatactgcaaactagttcataatcgaactcaatagaaaatagaaaaaagaatttatacttttgtaaaaaaaaaatgctactttgtttttctgttgtatcggtaaagatgagaacaacactgaccaagcgaggttttgggctttaaccatacaaggcccacatgaatacaaagtatagagtttagttgtccactaaaaacctagttctataaggagattattgccttgagaacaaaatgattttattcccaatgaacaagcaaacaagaagttcaatattttcttgtcgaactttttgtcttcatacctttacaataaagtgattaactcattacaaataaattgtgaggaatactagaaacttggatttattgacatatgtttattgttttagacattttatcttcatttgtaacatcgtgataatgacacatgttctagtttttttttttttttttttttggacaaacagatgttctagttttatctatcaaatttgaggagaaaatattttagtgttacaaaaatatatagaaaggtcttttgtttttcaatgttactgttaaccttaaagtcaagtttcaatcagataaagaactatatgatataatcacagtcatcatacaggcagatgaagataaccattaaatcaagacgatagtcaatcatactcaattggcttcttcaataccaacggattaattaattcctcaatagctaatatatatctttttaatattttgactatacccaaatagtttagtgggcacaatttcgtaaccttctcttatttttttacacctcaaacagtcaaacgtcatcatatatataacaaatcttttgacatcatacgttattttctataataatccaaacacatcccccacctttataaatatattatgatacacttcccattattcaaagattttatagcacaattttgttttttaaaagcaattaattaactactatagtatactttactaacaacatttgaaaaaatatacaaaaattaaaattttatcattatcaaagcagtccagctgcataccattatcaaaattggatgtggataaacttaatttgataaatttctgtataacttaacaaatattaaatatgtgttaatagttatgtcaacttatgttgaagataaatccattggaccggccgtggtttttatattagtttgaatgtagctttcagattcttcctatacccaaatttcacattcaaaggttgcttatctttttaacattcaaactcatttaatatttaaatacactaactaatgacgtgagaaaacttatggatgcagcaacaaatcataagacgccacgtgacaatcttgatcgctctataaaaaaccaaacctgctcttctttggtcgctacagcaaaaataacaataaacaagataaatggagggtctaattccgttagtatacaaagccgtcatgcaaatccgttacggtaacgagtcgcagcaactttcttcttcttactacgttcgtcttcccggtgattcgggtcggtttgtaagatccgatttagatgtatcgggtcctggatctaattcctccaatagggcgtcgtcgtcgacaagcacaactacgtttgctgtttacgcgggagtccagtcacctgtttctcgtcaggttgtcacgtgattcacacgcgctttttgaaggaacctgaagttgcgtgtgagggaagggttcgtgacttttgttttgtgcgttttttttttgtaagttaggcttggaccggtttaataaacctgatgtaataattcggtttggaaaattgatttctctaagcgtagactttaacccaaaagggtggtctcgtggcttttgatttgtcaattgtgtgttttcttttaattgtataaagtttctatgaatatatttagtttattcgagaacaattgtatgaaatgtttagttaatgttttcatggtatataggttgtaaaacaggttaattacgttacaatttcctagttttggtattaatatgcaaaaatgacataatatcaaacttttaagtaaattgatatttttcactaatgttaataatgaaaccaactaacaaaaaaaaaaaagaacaaaccaatttctatttgtttaagactttgacagtacatcacttttagaaataaatgccataattatgttatgtgcacactgcaaaagaaaatgaatacgcacaattgactataaagaaaacgcctttagtggccatacgatttttagcattttatgcggaagaaacaaagtgctatttctccgagttacgtatgtttcttttcttctgcatctagttttttttttgcatattcatcaccttctctcagttttcttctttcaatagaattatccagaaaacttttaagagatg

SEQ ID NO: 26227 - DNA, 3003 bp, Unknown
  misc_feature (1)..( 3003): 2750-1469P.txt file - cDNA_ID_2711609; gDNA_ID_2214536; Annot_ID_134377
aacttttatgattccatgtgtgagagtgttcctccaggagactttaacgctgttcaaatccacaaaaggaaggctgattatgatcaagtagccttcttcgtcctcatagatcgtttttgcagcagtaacaggtccataaacgtttttcatggccccagtaaactcgtttgaccaagtaggtagctcattctggtgagcttcgataacaggaggttgtgggtttacagttaagcaacactcctcctcatgaatcccatttgagaacaagtccttcctcttcttgtggctcgaaggagataaatcggttgcttcaccattagaatggttggatggttgagtcgagagattgagccccgagccattgagtagtttcttagagtggtttgcagtaggattcttcaaagaaggtgtaggcctctcaagctcaaagtcagtgttgggaaggtttctccaagaaccaaagtcactagcttcaggtggaatggtgaaattcaaatcacgacccgtaagctccatccaccttttcctctcttcttcatctagacacgtgaggtttggcaaaggaacaagctcaatcccatgaacgcactgcggattcgacaaacctctgtagtgtttcctctgcattctgtgagacctaacaaaccctttctcaacactaaatggaaacaaacgatccccttgtctagaatgaccattcatgtaactcctcaactgcatcttccctagtgcattctcaggtctttccttaaacacccacatatacatattctccatatcatgctgaactaaaaacacatcaagcttcaaatccgacttgtcaaaaccagatatcccattactatcccggacgattttcgcctttgatttctcgtttaacgcaggcttgaagtagaaactgaagaaaaaccaagcaccccagatactatcaacacgtttagcacatttcctcccaaccttaggtacaacactcatgtaattctcagtctcataagcttgtgaacctaacccaacatccaaaatatcacaagcatctaaattccacggcggaggaggaggacttctctcagctgagagaggtaaattgatatcaggagggccagagagcagagattgcctgttgttattcatctccaaatcaagctcctcatgagaagaagcacttgaatccatagacaatagagtagaaggatgatgattctccatagccaagacgttaaaacaaagtatctaccaccatctcagctcacaccagagacaagtctcatagccaataaccataacaacacttgtaattctcatcttcctctcccaaagttaaacacttgctaagaagaaccaaaccacttacagatatatctaacccctattttcccaattccaaattctccaattgttaacttctagattctaataaacaccaaaaaaaaacgaaactttgaagaagatatgaaaaaaggagcactctttttttgccttaagcacagataaacccagaaagaggagaaagctaagatgagcacgatgcagatggtatcgtcatcatcattagcaaacaaaatcgaatcgattactcagtctctgtggcttcgccaacacaacaaatcttgatttttcttcttcttcctctttttttttctgtagagagagagagaagaagatacggacccgacggagaaaacgcctgccctggatggaaccgtggagacttcctccgttacttaacggtgacgatgtttttttttttttttaataagaaacgatgattgtatattggtcgcttctcttgcttcgtataacagttttttctattaattatgaaatatgttaaatttttggtgataagaaagcatataaaagattgatttttcagccaacgttgtttggatttgtggtaaataaagaacaacaacatatttgtgtctacatcattactctaaagtgtctttatctttgtggtgaattgtatgtttcttatcacattttcttccatcaaacaacacttcatgaaatttgattattctggatttcttttttagaacatgtaattcatgtgactatttatgtggttagagtctctactatattttggagtatcccttaggtcttagctgtacatgactacatcatgttaccttggatagagatagctagagttttagatataaacattgtataatctttttatatgattctgataccgatcataaaccaattatgagaagtagcaaaaaaataaaattatctagtgattatatccatcattttaaaatttaaatcttcatttatgatcaaattagggcaaagatcttcactctcttttttttgtcaataaagatcttcaccctctttagtttcaaaactctcatgtaaaaccaaaatttagatatgagaatcgtgtaccgctaaaatccatcgttagtctccaatatacctcaaagctgaaaaaatcactggcccattgagtttacgacccaaaccaagagtcccaggtaaataaataaccaaggtggaataaagaataaaaatcatttttggtgacaccgacaaagcaccaaatttccaaccactacttccatgtacccatcataacaaaacaccaaagaagatcctacttcatatctcactcattcatttattaataccaaaattaattatacatgatattttgattacgaagacatgctgaatgaaagaaatatactatattgttttacaaaaagaaagaaaaaagactttaaaaagagttatgtaataccgaaagtgattgttgcatttgagattatcaaattatacactgaatactacttaattatcgttacaaataacatttggaagacctattggccggttttatttttgaatattccactcagtttaacaaatatataattttgacctttcgccggagaaaaaacaaaccaaacttacttagtaagaagcactttccattattattatctctgttcccccaccacatttcatattcacataataataatg

SEQ ID NO: 26228 - DNA, 3000 bp, Unknown; identical to SEQ ID NO: 12216
  misc_feature (1)..( 3000): 2750-1469P.txt file - cDNA_ID_2711616; gDNA_ID_2214537; Annot_ID_134413

SEQ ID NO: 26229 - DNA, 3000 bp, Unknown; identical to SEQ ID NO: 12212
  misc_feature (1)..( 3000): 2750-1469P.txt file - cDNA_ID_2711624; gDNA_ID_2214537; Annot_ID_134408

SEQ ID NO: 26230 - DNA, 3000 bp, Unknown; identical to SEQ ID NO: 12208
  misc_feature (1)..( 3000): 2750-1469P.txt file - cDNA_ID_2711636; gDNA_ID_2214537; Annot_ID_134403

SEQ ID NO: 26231 - DNA, 3003 bp, Unknown
  misc_feature (1)..( 3003): 2750-1469P.txt file - cDNA_ID_2711640; gDNA_ID_2214537; Annot_ID_134402
aggaaaggaaaaaaggctggtgtcgtgcaaattagagtacgggcaaaaggatttaatagttgactttgcatttaatcatatgttcgaatagctagcacatgcctttctccacgtgatattagcttaaacagtgccgttaattaaaatattcgtcatagcatttacttgttgtcaacattcgataatattagctataaccagtgtttttacgcccgaccggttaacctgtgacccgaacacttttccggtttgggtttagtgctaaaacccaacaagttcaaaatcgaaaaaacccacaaaaactcgcaattaacccgtgacccggtgaaccggttgaaccggccgggtgtgggttttaaaaagttctcttgattttacaataaaatatgggattttagactttattcaattatttttaaaagttttttcagttcttaaattcatttgatattttagattttggtgaagactttacaataccgccttaaaattgaatcgaatggtgagagagacaaccgagattagttgtttgaattcacgatgttttattaatttatttctgtcattgatgatctcttaatatatttgttacggtgttagacatttagttggatttcaaatttttaaccactttattattattgtttgattttttctatatatttgggtataaataattttatattttattaaacataatataattttatatttgattaaatatgatatgattatttttgttttatatttataaatactaaattttttttatataaaatactctaaaatttctattaatattaaatttattaaataaattttaactaattaatccgtggtccaacccggttgacccgatgacccggtgacccagaatgtagtccggttcatcgtccgggtcgggtttcaaaacatgttgtttcgattttgtaggattggattcaattgtttataaggtagttccaagggaccaaacactaaatcaaatctttgatgttatatgatttgcctaaattacatgaagttatacatggagtaagtgattcgcctaaactactttacatatgatgttaaaattaaatgattcaagttggatgacaatatttagtcgaaacagtagttatcactggtattttctctgttccaagttatttgatgttttgagttttgttatttgtttgatgttttggaaaactatcattatttttttgtaaccaatagtgaaaggagagaagtaaaattaatattattaaattaagccaaatattaatcatcataaattcaaaggtgactaattaggtagactcctttctgtttttaccctcttgattttattttttatttttttgttaagagaggatgagctcaactttctaaagcatatattgtaaaaaaaaaaaatcatgatggaaagactcgaattcttattcttcaattcttatcttcaacttaaccactagctaatagatcacggtaaattaataaattgattgtttttttttttgggtcaaatgtaatttgattgttcatttttaacactttatgcattaaaaataaattactgataagagaaaccaaaacattactagtgcgcaatataaaacctgaatactactcaacatattcataaatttccaataaccacattatgatagtagtcaacatttctcaaattgctcgcctaagtgcgtttacccatactttcattgaaaaaatggtttgttcagtcatcagtgtatgtataaagtacagatatcaaacacgagtttgtgaataatgttggtgcgttccgaatttaccgtgaaacgaacgcaccaaacgtggtcatatatattgttgatagtcgaattaaaaacttatttaacgtcaagtctccgattatgtgcttaattaaggttacgatctgtacattaaacgccaacgagaaactacgtaatagcatgtgagcattgaattaagaattaaacaaaatcaagtgtttaaagataataatataagaaaatcacacacaggatcacacaagatttagggcaagcttaaagagagaacaatgtttggaagggagagaacatcggcttgtgttaagtgggtcaagtagatactgtcttctctgtcttttactccaactcatattcatacatgatacatgcataaaattatttataatacatttatacaaaccacttgtcttttttttttttgatatgtaattgagttacaggttgttcttacatatttttgatttaatatatatatatcaataagacaaataaaattctcgattattaggaaataatataatgaacatttgatttaatttcacacataggtgggttgtgtccggtcgtcacgggacgagttagaagaatcgtaggttttgtaggctaaacatgccgcagattgcagactgtagaagtcattgtttcatacaaaattgcagaccagaccagaccgtgaaccttttgtatttgataataattgaagtacagatgttaaataatatattgtctatgctatatttaacttctataaagcgataaacaatgtaagacatatatatgtttatcaatataaaggtgataaaatatattattcggtttgatatgtttgtgaatgtccaacatatatcataatcatactattaatcaaagcgtatacgttttatgatttggtttagttggaatggttagggtttactatggtttggttacatattactcttttaattgttttgtttggtttagaaattgggccgataggcccgatactgccatattcttactgctttgacccatttatatatgagtgtcaaaattttcaaccttatcgcgacgactctttgaagcttccgttgctgacgtggatcactcctctccgccacaaaaacaaaacagaaaaacaaactcagacatgagcaagagctagccgtcactctcactctctgatgtctcacgaattccgatttcaattctaacttaaaccatatttctccgatcaaacatg

SEQ ID NO: 26232 - DNA, 1864 bp, Unknown; identical to SEQ ID NO: 12229
  misc_feature (1)..( 1864): 2750-1469P.txt file - cDNA_ID_2711648; gDNA_ID_2214537; Annot_ID_134397

SEQ ID NO: 26233 - DNA, 3000 bp, Unknown; identical to SEQ ID NO: 12237
  misc_feature (1)..( 3000): 2750-1469P.txt file - cDNA_ID_2711656; gDNA_ID_2214538; Annot_ID_134427

SEQ ID NO: 26234 - DNA, 3003 bp, Unknown
  misc_feature (1)..( 3003): 2750-1469P.txt file - cDNA_ID_2711660; gDNA_ID_2214538; Annot_ID_134425
atatatttatataaatatatccatattaattcctattttatttgtaatcatattttgtcgtgcgtgcaaggatcgtctctagtacaagaattatctcgaaaagtttgcaatcaggagtataaagacaatatcatatttggcaaccccaattctcctcttatgatcaacaaaaaagtttctctaaagatgtctaaatttaaacaattactatgctttaaggaaaataggaagagactaatattaactttccgtggcaaagtagaaaaatatataatagagaacctaaaggaaatttttgaagaagtcacatgtaatacaaatataacaatttggctctactgtatgatggaaagagatggttgacatataattttttattttattttattaacaattattgaaaggtgaatgttttaaaggctcaaaattttaaacttgaattttgttttaatagcaaaaaaaaaatatgaaaactgaatcattttattctgtataaaaaaatattattcttttttacatagattactagattctgacccgcacgttcgtgcgagatttcatattttaagaaatgtgttgtataaaatttatattcaatatagttttttttgtttttgtcatatatattgtagtatatatattataatatatatatatatataaacaaaattatcgattgttatttatgtttgtttatgacataatagctaatattgtgaactataagtcaaattctggagtttaaactgaaaagtagattagaaatatcttagatggaaaattatgctaggttataatgatgtcaagtatttttatataaaaaattatggttagagaattgcaatagaaatttgtgttatcgatggtgaaacacaagttaattttgataatgttgatttttcaaaattttaatggtatgtgtgaactaagaatttgtgttagcatgttaaaatatttaaataccgatgcattttttgtatatgtgttttgggctatatttaattggctgcttgtaaatccgtgttttgccaaagtaacttaaacaaataatggcaaagagaaaactctaatatcagtaaacatattatctatagttggtccatgtagaatttgtaaattgttttgtaagtatggattcgagtgcaaagctgagctaagtcctgttttctatcattgtatgttgaatttgttttatgcatatgtatagttagaattctctgatttaaatgattcttgttatgtcaattaacaaatccgcataatatgcttcattttgaaggatagcaatctttaaattttaattaaaatagaaatatttgaattaatgctagaattattttctagatatttaaaaatctaaaatccaaaaagtatttgttgaatatgctatattttaaatttaaatgatggtagtttagattatatatgataaatataataaatgttttttcatatttggaaaatcaagaaatcgttttttcaatgtgtaccaatcaaaattaatcagtttagttttattatggaaatttttaaaaatctaaactaaatgttatttgttattaaattgtattgttgttttcaaaaatatctaataaattattaccaaaataaataagtttacgtatatacgatttcgaattaagtagtttgatttgttatggaaactttattaaacgatttacaaaaagtattgggtagttttttttttttgtcgatattgggtagttattcatttattgatttaatttcggatttgttttttttttttttaattccaagatccgcttgtttatccgaatcactacatttggtattttattcccatatatttatagaaatgtattggaataaattcatattttttcctttaaatataattttggatttgtgttttttttactaataatttaacgtttatataatatattaaaggaaaaaacaaataagatcgtgtatctctaaacatattacgatttgatcaaaaacaaaatattggatagaatgtatgtcttttggttatgtacttaatttgatatagttggtaaataagaaaatatcagaatattctaatatatttataacattaatattattgttaaaatatatttaacattattctaatatatttatagattttattgttaaaatatttggtatttttcaattaatggtatttgatttatgttgaatttttttgtttaatctctaacaaattgaaaaatacaaaatatttcgatttatattcaaaataaatatattgatcctgaatattcagttatcatttaatatttaatgttatttcctttttttatttttgtagacaaatcataccaaaaatattgacgaaacaaatctgagaatatattagattatttaatctcgttatttgttttttcaaaaaaaaataaaagaaggatccgaatcaaagatattcatttaattgatatatttgttaatttattaaattatccatgcaaaaaatcatttagttagtattaaaagaaattttcacaaaagtggacgaaaaaagatttgtactcaccgtttgtcaaagtgagaactggtttttacgttttgtcttttcattcaatttcggacaaaattaccctggaaaaacttaataatggcacaaaccaaaccgtgcagcagttcgtatcggttaagttgacggcgtaaaccaaaccctacagcagtttgtttcggtttagttgatgcggttcagttttgaaaaagacaaaaaaaaaaaactgaaacgaagaaaccgagaaaacgaaaaagagaataacggagagatttgagagagaatcaaaaagcgaaacgaaattcagtatccattgcttcaaaattcgacataacttcgaattgttgggtagttgaattgagccactgaactcccacatccggtgaagtgaaagttactgtttttcccggcgaagccaagagaaagttactgttttttccggcgaaatttgaacctccggcgagatagcatctttagctatg

SEQ ID NO: 26235 - DNA, 3000 bp, Unknown; identical to SEQ ID NO: 12251
  misc_feature (1)..( 3000): 2750-1469P.txt file - cDNA_ID_2711674; gDNA_ID_2214539; Annot_ID_134446

SEQ ID NO: 26236 - DNA, 3000 bp, Unknown; identical to SEQ ID NO: 12263
  misc_feature (1)..( 3000): 2750-1469P.txt file - cDNA_ID_2711678; gDNA_ID_2214539; Annot_ID_134445

SEQ ID NO: 26237 - DNA, 3000 bp, Unknown; identical to SEQ ID NO: 12252
  misc_feature (1)..( 3000): 2750-1469P.txt file - cDNA_ID_2711678; gDNA_ID_2214539; Annot_ID_185192

SEQ ID NO: 26238 - DNA, 3003 bp, Unknown
  misc_feature (1)..( 3003): 2750-1469P.txt file - cDNA_ID_2711682; gDNA_ID_2214539; Annot_ID_134444
ctaaattatttcaacattaaccaaaaaacaacattcatcaagaaattatgcaataaacaaattcataagaaaaccaaatagaaaatagttggatacttggatgattagaaaatcaaaattgaactatacgtatcaaaacgtttgtttatttgtcaatcctcttattaatgagcttagactcaaattccagaccaacgacgagtacataaagtaagtaattgatggcaaagatttctgaacaggcctactctctatacgataaacatgacggcccaatcatcgccaaggcctaaacctctcaaaccttagaatgaacgaaaataaatcaaattttttatttaatatatgagaacaaaagggtattcaacaaaattgcaagaatttgggtccgttacaaaactatattggttcatgtaactgtagtactgtattggtcacccgttaacaatattatcccccaaatttcaacagatcagtgagatatcaatatgagaaatcagaagaagaaaaaaaaacacacaaccataattaagattaacgaaatggagaaatatatataccttggctgaagacgtttagaggaaaatgaaaacgatggagtttggtatcaaacagtgaagattgaaattttgattctgaatgcacgtttatgtgatttctatggctttttataagctactactcttagaatatgtctaatctcatttgaccaaaatatccctctcttttgtattcaacgtttttcacttttcttagtaaagaaaacatcattgtctttcttaaaaaaattagatcattttccttagtgctgcaagtcaaatttaacaaggaaatataattcaataacattcaaaaagtaaggaaatcacaattttcttgtgacttaactttttaaagtttaaagtaaaaaatctaataataatatttatcaagaataaaaaatctaaaaataataagaaaacatttaacataaactagacatatactttagatctaaagaaaatatacaaatatcacttttgattacatttacatgtattaaggaaatagaaccattaattttgctcttaactattatttttaaatattcacatatagattttgtttttccttaattcagataatacagcgcggacaacagtcaaaagtattagtaaataacttactaatgacacataacttttgtttaacttaaatttttaaaatatgatgatatcactagtcaaaattgagataatttactactaaatacgcaaaagaaattacttaatttatagggatttagtacctagtaagtcattactagtcaaaataaagataataaattactgaaaatctttgttctaaaacatggccatggagaccgaggtctctagacgtcggaaagcatgagatggtttgaagccgccgcgatgtaacataacttattattttttgtttgttacatgttagaaactcacttttctatatggatcaacaatatttgagtgcaaaaaatcaaagaatatgaaaataaatattacaaaaaattcgtagcgaccataaattaggtttggaggattagtattcataagaagaagatggatactaaatgaccaatataccattcttcgaagataaattgaaaaaatttcaaactgttgattgttgaatttgagattcgaacctgtcacctctgacatgatatattaaacaaaccactacagcaaacaaaagtatcttgaatctacagtaaaacctctataaattaatacacgataaattaataacctctacaaattaataaattcttccggtcccgagttgggatcagtgtaaaaattgatacaaatcgataaattaataagataatattttttttgaaaatcctatgtaaatatatggtcccatcaatattataaattaataattgtataaattatgaatatatatatatatatatatatttatatttatgaatatatcatgtaaaacttagtaaaatatgactttagtattgtttttctttaatttatattaattctttgtaaaatttaattctaataattttactacgtataaaaaagttttttttcttaaatctaataatggttttctacttgtaattgatttttagaaaaattattgattgtatagagaaactaccttttagatcaaatttttgtaaaaaattacaaaatttgtaaaatatctccataaattaataattattaatttatcgataaattaatattttctctaaattaataaattttcttggtctcgacattattaatttatagaggttttactgtatatattattatatttctaacctaatcccagattgatgtttagcggtatttaaaatcaggctaaaaacacatattttttactagaatataaaatagataatattgtgctgatgctaatcaaaattaaaaggtaacaaattattaaagacatatatttaacttaatttaaatgtacatctgcggtgctagcactagtttatataataagaacaaaaaacctaatgatttaatttgaaaaataaatttaagaatatgaccttcgagttctaagaaaattagcttgttaatattttttttattagaaatgaaaatttatcttagaataaaaatctcctcaatatctattttcaacctctttcaaagatttgaaaatattttttttttaatattagtaaataaaactaattaaataaaattagaaatcaaattgattttacttaaaaacactttaaagtttaaacctctaatctagcttttatttttgtaccgccattaaaaaataacgaacccaaaccgaactcaaacccagacccaaacccatgcccatacacaaatcacgaatgcctaggcttacttgtgaccgaaaccgaattgaatcatatatagtttcaggtcacctgttgcacaatctctgctcagccctaaaagcttactcctttcaactttctggaggccttctcgtagcctagcgtcatagatggatttgatg

SEQ ID NO: 26239 - DNA, 3000 bp, Unknown; identical to SEQ ID NO: 12253
  misc_feature (1)..( 3000): 2750-1469P.txt file - cDNA_ID_2711691; gDNA_ID_2214539; Annot_ID_134441

SEQ ID NO: 26240 - DNA, 3003 bp, Unknown
  misc_feature (1)..( 3003): 2750-1469P.txt file - cDNA_ID_2711695; gDNA_ID_2214539; Annot_ID_134440
atacatctgtaccacctcccctggaggataaggcttgtaagtggaatgcacttcatcgtcacatagttggggcaaagatatccagggaataaacgcattgagtaagttttggtccatgtctcttcttgtgtatcaatgtccatatggctaatttccaatcagaaagttcagcactgccactaaccatggctagaagatcttcaaggttgactagcggccaggtgtaggtaatgcgcgcggtcttgggacacatcatggaactgttcagtgtgaagatccaaagatagaatcttgtaaccattaagtacttcgaaccagtagatggaaccattcacaaagaccgaatgatgtctggcttcgacatagtaaggaggcggactcggcattgtccgccattcaccaatgtttaaatcgagaagttgtgcttgatctcggtttagttggatgagccacgaatgctaggcaatgcgtagggcattgaatatcatttggagtgaaggttttgaatccctcaggcagcttgtgaaagagcttccgtttagcgaagttatataaccaagacattcatgttgcttttcctttatgggctatgtatatcacggtttttccagtttcccggtttttcaaaatcgttatcattgcatctcgacaccgataagattcatagcttaaagttttgtcgatgcactgaagtttgagttgtttttgctttcatgtttactttggacctttaaaactggttttgcaatctgtaaaatctgtaaacgtacactgattaatgatatttacattcttagaaaagaaaaatgaatcatcagcccatgtgaacatatcgaacaatgtagcactttctcaaagccaacacaaccgcccgcttagcttacattagatagatcaggcagcctttcatatgtaaagataagtggcggagaaaccagccatcaactattgattagtcaacatcttatcttctatcattagctatttacgatttaatatctacttgacatgtaaaagactaactcttcaccagttcactataaatagaggttgatattgtgcttatatcttcacactacacacaaatacatacaaacatacattaattggaaactgaaagtaatataatcatggctaagtctgctgccatcatcactttcctcttcgctgctcttgttctctttgctgcttttggtgagtaatgatcttataatattatatgcatgaaaaaataaattctgaattttcctctttagatttattggtaattaacaagatatttatatatgaatgcagaagcaccgataatggtggaagcacagaagttgtgcgagaagccaagtggtacttggtcaggagtttgcggaaacagcaatgcgtgcaagaatcagtgcattaaccttgagggggcaaaacatggatcttgcaactatgtcttcccagctcacaagtgtatctgttacttcccatgttaagctaccaatgactaccaattatacttggtgcttcatggtgtgtattttacataaaataagtctttgtcattctatgagtgactttattatgacatgcatgtttatgttttagtgtttcgtttgctttgttgttgttttctttttttcgtttgctttggttttataataaaaataaaagaattatgtacgaagttttttcttcttctatcaatatttgtcacgttagatcattaggtgaaactaaaccccaatttattgtttgatcagactaccaaattcaagcttgacaaatgaaatattaattgagactttgaattatatatacggtaagaaactagagatttaaattacctttttatagcatatgttctaatattgtcttgctagcaagtaacaataatagcaaacataaaatgcatataaaaacatgattgggaatttgggatgaagcaagaaaaatatataaaaagattgaataaaaatgataaagataagagaattaaatctcaaacggaagtgacgagaatgttatatatgggacaatgggacgagcattacatacatcaggcatcgataacagtttgtttcatgtctccgaatagtatttatactacatacgactgtttcatcggatccatatttgtttgaatttccataactaagaactactcacaatatatatatatatatatatatatatatatatatatagcattttgcctatgtaccctaaattcatagccacgaccaacaatggtttgtttatacatagcaacttagctagtttgaaaatttaccaccggcgcaagagattgatgaatcatccaattttcgattataggtgtttcctggtaaaatgtaaatgggaaacttcgacagcatgcagtttcttattctgaaaacttggttgaacgatgctgctcttgagatcaaccaaaccatgtcgatagtcccttatgttgtatgtctaggggtgatgctcaaatcggaaaattttgaccgcttagttttatcttgttcatatatatagttttcacctttcaaaaattttgcacaaattatgaaatagcttacactattactatcaaggtatttattcgacgaaggtcagactaccaactacacttttcctaactgtgaaaatctctgaatttaatatacttgtgtaactattggcttggttaagatcttatttcttgcatcttgtccaagtcagattaaccagccgcccatgcaaagccaaagcagccgcttaggttacattagatattgagagagaaaaatatgtggtagataaacaagccatcaactattaataagccaagatcttatcttttaatattagctcgagaaggcgtacgtggtgtgtttaatttgtggggtacaattagctcgttattgtaccatgcacaagtagaaaataaactcaccatcatttcattataaataaaggttgatctcttaagcttatttcttcacacaacacatacatacatacattgaaaacaaagtagtaataatcatcatg

SEQ ID NO: 26241 - DNA, 3003 bp, Unknown; identical to SEQ ID NO: 26240
  misc_feature (1)..( 3003): 2750-1469P.txt file - cDNA_ID_2711695; gDNA_ID_2214539; Annot_ID_185187

SEQ ID NO: 26242 - DNA, 3003 bp, Unknown
  misc_feature (1)..( 3003): 2750-1469P.txt file - cDNA_ID_2711699; gDNA_ID_2214539; Annot_ID_134438
aaaaaaaaagagttcaggtagttctatatttaacatgcttaccgtttgtgtgaaacctttacccgagacaccatgaattggtccaacaactgtttgtccagctttgacatactcaaacttgatgaattggattccttcaagaccacctcgtacatgtatctttgttacattttcatggtcggctccatcatcccattgattccctccctttccgccttttgcctccaacctttgggccatcgagaactgattcaaatcattattcaataaaagagattttattttgttccttagtcattgtataatttctttatatccattatacccacttgagaaaatatatatgcaaaatcattttcagttcttgggtgaaaaaggaagactttaaacatttaagatatttctcacgttctacaattttaagtaagttacaatacgttttacaaaaggttgtttcaaactattgagagattacctcttatgcttggagtagagagatggagagagctggtgaacaatgtagagaaatgatgtataatatataagtaggtagagaaggtgtccttttatatacacgattggtcagtttacaaattaatatggtcattttttaacttatactatgtgtgtgcatgaataaaaaagaaccagatttttttctttttcttaagtagtatattgatttgtgagttttatattagtcttgatcttaatgtacatgatagacatgcagttagacacgagtataggacgatattttaacattattagtgtcagtttactaataatggctaatactgaaccatgttctcgccattactatacaaacttcacctatataggctatatatatatagatagcttttttagtccaaaacatgtatataaattgtagaagatatgaaagtcaatgagaggttcttcagatcttgtagagatctcatctcggacgaatcacttaattaagaaggcacgtctctcaacacacctctcataaatttttctcatcgagagtcgttcgttgacgatcttaactgatttttttttccaaattagtatattgatttgtgttttggtattagtcttgattttaatgtttatgatagacacgagtatagaacaactatacaaacaataatccaaaacaaacgtttagcagtgacaataaaagctaaacgtttagcagagatgagaccgcaagttaatggccggttcgcaaagagagaaattgaaaccgaggaccaagggttcaacacgatgctaatgtacaacacatgatatcgagttgttccttctttctgatactcctatggctaaaaaatataactagaatgcaagcttacttttagtttggaactttggatgattgattatttcgtatttccgttggaccaagtttcttcagaaaaatggtgcaattgtgctatttatttggttacaaattatcttgttatagttaatgtttgtaatttaggaagtttgtaatttatgaacattgttttgtgattatatttttccgtcatatatatatatatatatatatattattttatataagttttaaaaaaattaacagagtttagatgaatatatagaaaattttagatgaacatgtatgaaaatcaatacatataaataccccaaaaaaaaacaaaaaaaaactcaagtataaaagttccggtatccacaggcccagtatctatcgtttttttttttcaggtctacctactattaaatccgatacacatcagttttttttttaatttgggcttctggtgggcgggctcaattcagattcgggctgggctgggtttttttaccaactcaacatcttcaactaaacaattacacatcggttttcttctcttctctctcacacgtcgattttgttctctctcggcgacgaagctctctctcgactcctacttctggtaagttctattagaataggaatccgttgattagaataagttctctctgaaattttcgttcatgtgatagtctcgtcgattttgttctctcagtgttgatgcaacttcatcgctttgttctttgctattcttttaattgtgattctgcatatgcttcctttgatttcagcttgtgggtttgtccaaatttcacttgtttgctattttctctctcccttcctttgatgccaaccatgtgtttgatgaaatgcctcacagaatatgtagagtttgtttttggtagagcttgtaattacttgtgtctgtttatttttggatatatgctgcttggtgtttatgtatggagctaagtgtgtgttctctaatgtttataaacgttaattcaagagatacaatctaatcgggagcattacagatacaagctaataattattgatactggattttagatactctctgtactacttgttgattccgtgtctgtgttggttatgaaagctctcacttgtgatgagatattagagatcaagtttctgttttcttgtgaatcttagatgaatttgtttattacttgtgtcttgatactttgtttgtcgaattatctctgttcaaaaaagctttgcttcgtttagcagcattattaagctcagaattcaagctttggttgctttagtttaatttgcttctaaataaactcgagatacttattgtctgtctcttgctagaaataggtttgttgtattttatatgaattaaaatacgaaataaggtgatatcttgatagaaacaggttcgttgtgttttatatgaattgaaaatcaaataagggttttgggtatgcgtaggtttgatgatctgtttggttgaattcaaattttgctgcttgagcattgtttctttgttagagggaacattgttttttatagatgttcttcattatgtactaaattctctgctgtattactttccatcctcattaactgattcgtcttattatttcatgtgcagtggatcacatcttttgttttctggagaaaaaaggctcgtcgaagcaagtaagtgaacagtcatg

SEQ ID NO: 26243 - DNA, 3003 bp, Unknown; identical to SEQ ID NO: 26242
  misc_feature (1)..( 3003): 2750-1469P.txt file - cDNA_ID_2711699; gDNA_ID_2214539; Annot_ID_185185

SEQ ID NO: 26244 - DNA, 3000 bp, Unknown; identical to SEQ ID NO: 12247
  misc_feature (1)..( 3000): 2750-1469P.txt file - cDNA_ID_2711703; gDNA_ID_2214539; Annot_ID_134436

SEQ ID NO: 26245 - DNA, 3003 bp, Unknown
  misc_feature (1)..( 3003): 2750-1469P.txt file - cDNA_ID_2711729; gDNA_ID_2214541; Annot_ID_134479
atcatgtatttgaacttatttacaaggtcatgacactaacattaattatttaggaattaaagatttaaatcttttaaatccttgcttttagagttattatatcattatctaaaaggctcaaaatataaaaaatttaaatattattatttatatatttaaactttataaaacattattaatatttaaacttataaaaggtttaatatatcatactttttaacatcattatataatatatggagtttaaaaaaatctcaattcttccgtcatattttgtgactcaaaattttaaaaatgaacatgtattaaccaattggcgaaaaatgtgtgagtttaacgtcccacatcgactaaaatatttagacaatgattcataaacatatcataaataagattaacatgaggaaaaaaaaaagattaacattaataaaataatggtatttttacgggacgggtttggcgggacgggtttgacaggatgttacttaataactattgtaaactataaaataaaaataatttatagatagatacagcttgcaaaattttatatatactaactttaaaatataaattgtccccgcggtgtaccgcgggttaaaatctagttattttcttatatgtattaataatttaacacatattaatttttatttgcgcttacaagaatttttaatttcatcacaacaatttcttttaaattagtaaagttaaatgattttattttttattttatttttatttttgataaaggaagatcaaagctattttttacttttcgtgattaatcacaatgattttctttgattcattatgattggggctatcaatttgaaagcgagagttaattagtgatttggaattgagataaagatatttgaagctagagagcaaaaatgcatgtatcgattcagagtgatattgatgaagccctatataattgagagatgacctatattattatttggaaactacatagtagaaagtaatcttgcctttgtaaataattacattagaaaaaaaattaagagtaaattaattcacctcatacttggtaattatgaacaccaggatagtagcaccctttgtgatgtataaacgttttgcactgagcatcttttttggctcgggaagttggtctttgttttctcagttcgtggcacatgcttcgttggcttatgcctctttcccagcaactccattttctctttgtggacgacgaaatccgaggcccgatataaggcgtcctgaatttcaagggtttggataagttataaacaagccaaatactaattttgcaatctaattaatttaaataaattattaaaaatgaaaatacatttttcttaaagaatgattgatcaaaataaacatatgaattttattttataaattatgtttacaagccaatgctttcataaatctagattcgtgatccaagcaattctatttcttaaaacataaactatacaataaaaattattttttgataagacaactcaagttttcatattgagtacatttatagacgactttatgttttttctcctatttttttttgttggacttaacatcatattaatttttttctatttttttatttcctcctattagagttttgaaggctgttctataagtctgtagagtgtcatcgagtttggtggaccagtatattcttgaagttccaaccattctattcaagatagtttttatctgtttgttgctgacttcaccttgaccactagtctagagatggtaggctgtcgcaaccttatgctgcactccatacttctttagcaagttctcaaacatcttgttcatgaagtgagatcctccataaccactcttggtataccgaagatggggaatatgatactcttgaatagtttcaaaactaccttagaatcattggttggacttgcaactatttcaatccacttggagacataggctacgacgaccaagatatacttatttccctaagaagatgggttaaaagttccatgaagtcaatcccccagacatcaaacatctcaaactcgagtataggattctttggcatctcattttttctggtgatatttcttatccttcggctataaacttatgaacattcttgaacatggttggccattagagcccaacttgcagtatcttctgaacagttttgaaggttgcaaaatgtccttcataagcagagccatgtcaatgttctaggactccttggactttttcttcaactatgcatcttctgaataaaccatatacgcctttcttgtatatagaaggctcatcccataaataatggttaatatccctaaataatttctttttctgataaacatcaaggctttaaacaaatcaaatactaatttatgcaatataattaatttttaaaagttataaacaaaaatatattattaattttttaaaaatgaccgatccaaatgaacatatgaattttagtatataaattgtgtttacaagccaatgctttgataattctagattcgtaatccaagaaattctatttcttaaaacataaactctacaaaaaaacatattttttttatgggacaactcaggttttcatattaactacatttatagactaaattttatttttctcctatattctttggacaacattaattaatattttctctattttttcaagctaatggttgacaaaaaaaaagaatatttaggagacaaatgaaatttacaaaaacaagaagaagttactattttgcaaactctctcttttaattaacagctttaaaagaaaatagataaactcataaaaagcccataagagaaaacttgaacagaacaaaaaacccaacaaaacccaacttagtagcgtctctccattctcttcttcttcgtcgtcgtccctgtcttttccaaacttttttgctgtgcgtttttttttgtccaaagaatcatattcttttgccctctcacacgagtcatatttacctttttgccacaacaatcatg

SEQ ID NO: 26246 - DNA, 3000 bp, Unknown; identical to SEQ ID NO: 12283
  misc_feature (1)..( 3000): 2750-1469P.txt file - cDNA_ID_2711733; gDNA_ID_2214541; Annot_ID_134478

SEQ ID NO: 26247 - DNA, 3003 bp, Unknown
  misc_feature (1)..( 3003): 2750-1469P.txt file - cDNA_ID_2711737; gDNA_ID_2214541; Annot_ID_134477
cttcgtcatcatcatcatcttcttcctcatcactaatatcactatcagagtcagaatcaccagctacttcgctgacaacaccaacactaccggtctttttgtttttgacaatatcttgtcgataaatattaggatgctctgaatcacatatagagagacttgccattgaatcatcaactgacgagtcaacccctacatttgttgatgtaccagggtcatcttgctcatgctccatctagaaaaaaaaatgccaaagcaaaagttttgatgagagagtagtgcaaaaataatgaaaataacctacaagagagtaaggatctaaaactatgatgcaacaacaacaacaacaacatcctccaagctaacacagattaataaagaaacaattctcaaagcgaagacattccatgccaatagaacattacattccgattaattcatcatcgaaggaaaaaactaacaagatcatcaaaaactattacagagattctacgcgaatatataatgacattgagctggcaacgaacagatttgtgagtaccgaattggaaccttggagaagaagtggtgatcggaggaagatttcaatcgattacgttttttgatcgtctatgaattgctttttctttatcagaagaagaagaagaatcgaggagaaagattgaacaaggcaagaggaaggaggaggagctcagcggcgtcaagggtatagtcgtcattattgtctctaattgtttctttttttttatgacatcccaccaggccactcaccgaatctcagccgttggatctgcttaccaagtcgccggattcaggttctttttttttttttgtatctatctgattattataaaaaccaaaattgcataaggtaataagaattatattcgttaaaatattttgtaatcaatttcgaataattgaaaacattgattgatagcactcttctgttcaactacgaatgtgacaaagatagttaactttctcttgatttctaggctaaataattaaaaaatgttactacattcttatgaaatctaacagatattgagtcttatcaatcacgcacaatatcgagaattaaaaatacaagaagctggttaaaagcataaacatataacaattggcatctgcggttgaaaaatgtgggcctgtgttccaaacgtggcccaaaataaaataatcccagcccaaactaatatggacgtggcaatttcgcgtttaattacctgacgctgttagcaattttggggtagtgatttttgtggtaaacatattttattaccaaattaactccaaaatttgattttaaaaataaataaaaaactgtagcctcgttttatttttcttaaagatcaaatccaaatccaaacaagattttcagaaataaaccaacaagaaacactgattcttttaaaaaaaaaaagaatctctatagaggagtattttggagtaatctcatctcataaaaactagtgacttgatcagcaacaggcaacagcccacataatggcttgtcctggtggaatcctcattagcattggaaacaatcctctccataaggccaataatccttcctctgcataaatccttctaatggcatcacccatccctttatatctcaccccactttcacagtctcaggttggtttgagccatcaacctcgttttgaccacatcaaatggttcgagcaaaatgtatggctcaactttgaatttgataatatattaaattaaacaaaaaattcaaatcagaattttaaattgaataatttatatataccataaatctatatatacatttttgcagccattttgtgaaataaatcatgtagttggacttatttacaatggctgccactggattttgatgtttgtttttgataattagaaagaaaatcttcgaattaaatatttgacatttaacaatctttccaaaatctctccacattaactacacgattattttctaaaataaaacttccaacatttaatatcatttaattactacaaaattatcatttttgatattgcttttctccatgactataacaattgagttataataatcaaagcagaaatataatttgatagcatttaattactacaaaattacaaaatatttagacaataattcataaacatatcataaataagatcaacattaataaaataaatggttttgttttacgggacgggttgacggaacgagtttaataggacgttacttaataataattgtaaactataaaataaaaatattttatagttagatacaatttgtaaacttttatatactaacattaaaaaataaattgtttccgcggtataccgcgggttaaaatctagtatatttacattatttacaatattattaatataattaattaattaattaattaaatatattgggttatcgaaaaccgaaccgaacctacctatttgggttgagaaaaaatacaaccgaatggtttggtttggttcggttcggctctcttttctccaaacgctttttctttctctctcacttgaaaaatctcccggagacctctctccttctctcgcagccgacgatcccatccaaaaaccaaaactcgctctccggtgatcgtctttcggtcagattcttataagcgtgcttgattttcaaatcaagtttgtttctttatctccagagtttatcatctcttatgtgactgtgttgtatagcttcttctctataactcctttgtgctccttctctgggaaatttctctatttagagtgctttaggattcgatttcgtgtggatctgctttcaattcgtttattcgttgcgttccactgaattgagtttgtatagagtattaattctacttgaatgcttaatgtttgaattgatctctgttgcttgcagaaaatgaatttcttaaactcagctgcatccatttgcagaagagttagtctgagggaactcatcactgaggttcctgcttatactggcagcagcatttccggtatatg

SEQ ID NO: 26248 - DNA, 3000 bp, Unknown; identical to SEQ ID NO: 12287
  misc_feature (1)..( 3000): 2750-1469P.txt file - cDNA_ID_2711743; gDNA_ID_2214541; Annot_ID_134474

SEQ ID NO: 26249 - DNA, 3000 bp, Unknown; identical to SEQ ID NO: 12296
  misc_feature (1)..( 3000): 2750-1469P.txt file - cDNA_ID_2711755; gDNA_ID_2214542; Annot_ID_134491

SEQ ID NO: 26250 - DNA, 3000 bp, Unknown; identical to SEQ ID NO: 12296
  misc_feature (1)..( 3000): 2750-1469P.txt file - cDNA_ID_2711755; gDNA_ID_2214542; Annot_ID_185271

SEQ ID NO: 26251 - DNA, 3000 bp, Unknown; identical to SEQ ID NO: 12297
  misc_feature (1)..( 3000): 2750-1469P.txt file - cDNA_ID_2711763; gDNA_ID_2214542; Annot_ID_134489

SEQ ID NO: 26252 - DNA, 3000 bp, Unknown; identical to SEQ ID NO: 12298
  misc_feature (1)..( 3000): 2750-1469P.txt file - cDNA_ID_2711767; gDNA_ID_2214542; Annot_ID_134488

SEQ ID NO: 26253 - DNA, 3000 bp, Unknown; identical to SEQ ID NO: 12303
  misc_feature (1)..( 3000): 2750-1469P.txt file - cDNA_ID_2711775; gDNA_ID_2214542; Annot_ID_134485

SEQ ID NO: 26254 - DNA, 3000 bp, Unknown; identical to SEQ ID NO: 12320
  misc_feature (1)..( 3000): 2750-1469P.txt file - cDNA_ID_2711791; gDNA_ID_2214543; Annot_ID_134526

SEQ ID NO: 26255 - DNA, 3000 bp, Unknown; identical to SEQ ID NO: 12354
  misc_feature (1)..( 3000): 2750-1469P.txt file - cDNA_ID_2711842; gDNA_ID_2214544; Annot_ID_134543

SEQ ID NO: 26256 - DNA, 3003 bp, Unknown
  misc_feature (1)..( 3003): 2750-1469P.txt file - cDNA_ID_2711846; gDNA_ID_2214544; Annot_ID_134542
aatgatttttttcattttatgaatattgtttatatatatatatatacatatatacatattgtatcgtgattggattatttttaatgcatacgtaggaatataatcttgtatatagttgtgagtaaaaaaaattagatagcttctttgaatggttcttgtatggatttttcttcgaacgtgtacacaaatgatcacgtaagaattatttttctttatataaattttataaaattagatacagctacttggaaggttatttattcaatctaacagtacagttgacaatttgatatggaacctcacatttcgtataagtattaactaaagttaacttattctaatttaagaacacaattattggataatatatgtccagctaatagctagagcgaagggaggcaaagtagcgagagcaaggaaaggaccagagctttgccttggaaacataaccatcgtgaaagaggcagtgatgccggaaaattacttcggcgaagaagttccagcgaatctgaggatcataaaatgtcatcaggatgaagttttggagcttccggaaaatgcaaaactgttagcatattcaagcatgtacgaggtagagatgtattcaatcaaagataacttcctttgcattcagggacatcctgagtataaccgtgacatcttgttcgatatcattgatcgtgttcttgccggaggccacattaaggtttttttctaactctccctttgtagaatatccatttatttataatttgtatcctaaaacaattgctacttacctaattaacttaatgtgcagcaaaactttgccgaaacgtcaaaggcaacaatggaaaagaatgaagcagacaggaagttttggcagaaaatttgcaaaaacttcctcaaacgtcaaccctccttattagtttgactcacaaatcttcatcacacttgtttaatatatattccaactccatgtatcaacgttacaatattatttgtaatgtatgacatattgatgtgttgtatccataatataattaaataaaagctttaccctcactaacccagaagcttctttatgctccaataagttttactaatgccttgatagaaatgagcctcctttgcgccattaattagtgggagtaatcgtatgttcggattctggtattttgttatgtttcatgggcttttaactcaaaattagtaatttgttccatttccattaattatattcaagtcctttttcatcttactcaaaattaattggtcattagtcaaatgctccattcccattatattcaagtcctttctcatttttccaatgtaaaatatttcttcacattcaattgtcttagttatttggagtaagttattaagttttcatataaactaaatgtgaatatatatatatatatataaacaagtttgaatgtgtaccgttttcaacattccatattttataaacaatatttattataaaattatgaaaatattagaaaacaagtaagtaatgcactaacaccttatgctccgattaatcgacataggcgttaaacccttatcatatgcctagttacggcctaagagcacgtccaacgtgggtctctttatacaggctcattcacttaaaaataacaaaaatatttaaaaagtaaaagagggatgaaagagagtctctgaaagtcctcatttaagggacgttcccacaaacatatttgcacgtgtaatcttatcaatggtcaatttatattaaaaaactaaaatataattaaaataataaaatattattactttttacttttttagggattttgatagtcccaaccatggtacatgctctaagagcatccttatcaatgagttcttaagaacatgaaattttttcttaaaatattatataaaacaaaataagaattaaagatataagaaagggttcttaagagaggaaaatggtttttagataagagatatttggtacactttttcttcttgttaagagcctactaatatttagttattattttatatatcaaaatgttaagaattttgtctaagaacccaccaataaggatggtctaacgatttttttcttcaaacaattgatttaaaacagtgtattaaaacccaatccaggatcactacgagtctacaagtcaattgaataatagattttcaattaaataaaaaataatccatattagttattttttttgagcgacataatgaaatatttattaaaaaattacaacaaacataatttatacaatatattatataaatttaaagaaaattttaaatttcaattcatattttaaacacgaatagtttaaccaataatattatatcatatattttgatattgaatccgaacttgattagtaggattatgaggcttatcgtatcagctgtgatttgcggtcggatctgaatacattgatttaaaaaggtgggaccgtaatttttatagtcagtttatttttatttatcttatgtgaattttgtgtgaaactgtattttaatttatgctgatatttgtttttccttttttgcgaaatttaaatacattagctgtattattatttttgtttctaattctgcaactatccctatgtggctagcttgcctataaaacttttgttgatttctataaaaactttgactggaatttatcattaagccataaaattatttgtgctctttatgtcattaaattctcatagtcaaatctattgtggtcaaatagtaaaaactctaaaaatacaagtaaataataaaatataggaaaaatctgtcttttctttatctattatcttatcaaaatatccaataatattagagaatataataatcgaattaaaacaagaaaaaaatccacctagttaatttgttacttacaaatcacaacagatacgcaacaaagactctccagttggcttctgttacgatctctggccgtctttaaaacacacaaaaccttttcatgtaaaaacaacaacaacaacaacaacaaaaatg

SEQ ID NO: 26257 - DNA, 3000 bp, Unknown; identical to SEQ ID NO: 12352
  misc_feature (1)..( 3000): 2750-1469P.txt file - cDNA_ID_2711853; gDNA_ID_2214544; Annot_ID_134540

SEQ ID NO: 26258 - DNA, 3003 bp, Unknown
  misc_feature (1)..( 3003): 2750-1469P.txt file - cDNA_ID_2711861; gDNA_ID_2214544; Annot_ID_134534
gaaagacgattccgaattgcgagccaagcacaaaaggagaattttggcgttgcgtgagcgaaccaaactcctttatgccacgccctctgatttgatgaagttcggatatggttccatgtgtcttttgtggagaatctagccttaaagacgtcctctttccccctccagaggatggcatcctctagctctatgttccgatgctggtatttctgaagcagaatctcctcaaactcatttagaatctcaactcgatgtctcttccgtcttcttcgactccatgcttcagctagtgtcatatggcgagaaattcccatgtcaatcgctcctcgggctccagtcaggtttattaagggacctttctccgaccagttatcaaaccaaaaagatgtgttgactccattgttcacttctatcttgcagaaactttttgcaacttctctgtgttttagcaaccttctccaaatccaagaccctaacgttgagtgcgtaccaatggaccagaatgattctttcttgagtaggttcatcctagtccatttcacccacaaagaatcttgacaagatagcaaacgccaaatcagtttcagactactaaccttattcgcttctcgcaatgattgtaacccaaggcctccttccttctttggtttacaaatctcatcccaagagactttcgctttctttggatttagctccggtccagaccacaaaagagctgagctgattctattaatttcattaatacactctctgggcagcctaaaagcattcatccaaaagtttgtgatactccacaaaacagaatttattaaactcaaacgacctgcaaaagaaaggtaacgtgaagtccacattcctatccgccgacgaatttggtctattaagggagaataatctgatgttgtaagccgttttgtaactagaggtaggccaagatatcggaccgggagctttcctaccccaaaagagtacctacttgacatcaactgacgtgaatgatcggagacaccagccaaatacaatgttgtcttttccatgcaaatttttaaccctaattttgctgcaaactggttcagcaccttgactataccatcaaccgagcgaattttaccatcggtaagaatcatgagatcatctgcaaaacataaatgagttaatccaagagttttgcaccgggggtggtatccaaattctctcgcccctgctgccttatcaagcattctcgacaggacatccatacttataacaaacaaatatggagagagggagcatccttgtcgaagacctcgagcgcttcggaaatatcctgctaactccccattaacttgaatggagaaggatgccgtggacatacagagagagatccaatgaataaattccccggggaagttcattgcagccaaaacgtgagtaagaaaagaccattggagagaatcaaatgcttttgatatgtcaatcttcatagcgcatcgtgtagagatgctatctttgtggtagtcttttactagctctgttgctaataacacattttctatgagtaatctatctttaacaaaagctgattggttccccacaatgaacttaggaagaatcctcttgagtctgttcgccaaaatctttgaaatcgccttgtataagacattgcaacaggatatgggtctataatcctttatttcccgtgcttccttcttcttggggattagagctaagatagttgagtttacaccctttggcaaaaaaccctttgcaaaaaaagactgaattgctatgataacctcatcaccaataatctcccatgaagctttatagaactcacttgtataaccgtccggtcccggggatttgtcctttggcattgagaatatgacttttttaatttcttcccctgttaccacccttgtaagcaacctatgatcatcctctgaacaacgaaaaggtagcaaattttctagctcctctacacacatcccttcataatctgcagggattgtttgtaaaaaatcctgaaaatagttcactgcctccgtttggatatcttgttgactagttacaaccaacccgtcacgtgtaactatttctcttatggaattcactgcctctcgagtagttattgctcgatgaaatgttttattgtttctgtccccaacatctaaccagtgtagtttagacctctgcttcaaaaatttctcctcgattttcaaattttaattcaactagtgttctgctcatgaaattttcgattagcatgtaactatgttgacacaaattgatagacaaatccattttacatatccactgttttacacgatgtgacgcaacacctgtttgacacttgagtgagaatttcttgttgggagaatctccttgcaaagccaatactctatccacgaaatccatgaatctctgtcgatttcctttccttttcggtttattcgcagagtcatcaatctcgatacaagagacaaaagcaatgagatatcgccacctcttggagagaatcgaagtcagagcagcctcctttgtgttaaggaaggacaatatttgataaagaagctcgtctggtagactgctaacaagatccatcgtctctgaacgaaagaatagaaacaggtattaaaggttgggacttgggagggaagcaaagaaggcgaaaagtagatttagggtttgccaaagtgaagagaggaggaagtcacagagaaaaggttttagttttcctttacgtgccctacataacaaatgaaacgcagcgttttataaagtgatgcgttaaaacaaaacttgtttcattgggcccagaattaagattacaaagctacatagcccataaggcccaatactaaaaaagtcatccgaaatattttgtttcccggatttatctccgtcgacgataaaccctaaccgccattatctatttcaatgacgtcatcatcttcttcatcaaaatccaaattctcaagtccactctcagaaaaaagctgactttctccaccaatcactatg

SEQ ID NO: 26259 - DNA, 3000 bp, Unknown; identical to SEQ ID NO: 12395
  misc_feature (1)..( 3000): 2750-1469P.txt file - cDNA_ID_2711892; gDNA_ID_2214546; Annot_ID_134597

SEQ ID NO: 26260 - DNA, 3000 bp, Unknown; identical to SEQ ID NO: 12371
  misc_feature (1)..( 3000): 2750-1469P.txt file - cDNA_ID_2711904; gDNA_ID_2214546; Annot_ID_134572

SEQ ID NO: 26261 - DNA, 3000 bp, Unknown; identical to SEQ ID NO: 12400
  misc_feature (1)..( 3000): 2750-1469P.txt file - cDNA_ID_2711926; gDNA_ID_2214547; Annot_ID_134606

SEQ ID NO: 26262 - DNA, 3000 bp, Unknown; identical to SEQ ID NO: 12399
  misc_feature (1)..( 3000): 2750-1469P.txt file - cDNA_ID_2711930; gDNA_ID_2214547; Annot_ID_134605

SEQ ID NO: 26263 - DNA, 3000 bp, Unknown; identical to SEQ ID NO: 12398
  misc_feature (1)..( 3000): 2750-1469P.txt file - cDNA_ID_2711934; gDNA_ID_2214547; Annot_ID_134604

SEQ ID NO: 26264 - DNA, 3000 bp, Unknown; identical to SEQ ID NO: 12398
  misc_feature (1)..( 3000): 2750-1469P.txt file - cDNA_ID_2711934; gDNA_ID_2214547; Annot_ID_185463

SEQ ID NO: 26265 - DNA, 3000 bp, Unknown; identical to SEQ ID NO: 12412
  misc_feature (1)..( 3000): 2750-1469P.txt file - cDNA_ID_2711942; gDNA_ID_2214548; Annot_ID_134624

SEQ ID NO: 26266 - DNA, 3003 bp, Unknown
  misc_feature (1)..( 3003): 2750-1469P.txt file - cDNA_ID_2711993; gDNA_ID_2214549; Annot_ID_134643
tgttgatttctaatcagtcatcaggctatcaacaatggttttttcattcaacaccctccacgtcatcttcttttttccacatcatttcttctctcttccacataataattcaatacccacttaaattttatactctactatggtttgcttaataaaattcaacactctacccactatttttatttcatttttctttcttttatgttttaaatggataattagtaaaaatagatgtatttttttgtatccaaatcaaataaaacaagtctttatttatagagtttgaaatatggtgaattttaatataaaaaaaaattaaaacaaatatatattttataagataattgatctataataactcagaggaaaagtaaatatcagaaatttcagtaacaaataaaagaataacacatgtcctatctatatttaactcttctctcacaatttctgtctccaattatttaatgacaaatagcagtaaggggttcatttttaacaattcaaaattgttgaatccgttcaacaccgttgaatccacataagattcatttctttatttaatattccactgtaagcattcaattattgaattaattttttcaatagcccattgtatatagtcttaaaaaggggtgagtgaatgtgaatgaatggattgtattttcttaaaataatgtgtaagtcatacgtgacaatttcacaacaaaaatatttatatggacaaaagaaatttggtagacatatttgatattcccattaaaaaattgcatgagaaaaagaatatatatgaaatggtttggtttcctttctaaacaagaaaaaaaaaagtaatctccgaagaagaacaaattccttgctgaatcatggttaatttcgaatctctttctatctaattttataaatgtgatgataacagatcatcgtctccactcagtttccgtttgatagtcttatgttaccgatttttatcaggcgaagttgaagctctactcttactggagaagctcatgtgctcatcgcgtccgtatcgccctcactttaaaaggtaccagccaatgattttattcttttcttgtgagcaattctttgatctgaatttggttcttgttcgattttcattagggcttgattatgaatatataccggttaatttgctcaaaggggatcaatccgattcaggtgcgtagtttctaggttatattgaactttatttgaagtaacattgtaaagataagaatggtaagtaactgagatttcttatgttagacttagaagtttattcgttttggttctctagatttcaagaagatcaatccaatgggcactgtaccagcgcttgttgatggtgatgttgtgattaatgactctttcgcaataataatggtcagtagtaacacatccatttagtttgtttggttttgttgatgaaaaggaacattcgtttattcgtcttgttgtttttcaaatggacagtacctggatgataagtatccggagccaccgctgttaccaagtgactaccataaacgggcggtaaattaccaggtatcttcgatcctttgtcttcagatgatgatgtgttgccatcatctgcaaaaccatgtagttaagtccaaatgtagtgaacattatcagctttagattgcgagtgtgatcgttgttcttattttgtatatttcaggcgacgagtattgtcatgtctggtatacagcctcatcaaaatatggctctttttgtgagaagatgagattaatgtaatggattctactaatggaggttctataacaaagcaaacatagttacattttgtcattttttttaacagaggtatctcgaggacaagataaatgctgaggagaaaactgcttggattactaatgctatcacaaaaggattcacaggtatgatatctctaatctacctatacgtaatcaagaaccaagacatatgttcaaaatgtgattttgttgatattgtggttgtacaggtttataacgacctgtctgataatgtctcatatgtccttcagctctcgagaaactgttggtgagttgcgctggaaaatacgcgactggtgatgaagtttacttggtatgtctctaaatctccctggataatctctatggtactactctcttctttattacaatgaagcattgttttgcaggctgatcttttcctagcaccacagatccacgcagcattcaacagattccatattaacatggtacttttcctcagctaatctcttctcctggtacctagatattgcattgtatatccccccaaattccatggaatccttgatcagagttttaaggtagcatgaaccaaatgttatctctgtctcacactttcacattcacagagtaacatagacgtaatactcagtttcataactttttttcctcgcatcacttggttttcatctctacaattttgttgtataggaaccattcccgactcttgcaaggttttacgagtcatacaacgaactgcctgcatttcaaaatgcagtcccggagaagcaaccagatactccttccaccatctgattctgtgaaccgtaagcttctctcagtctcagctcaataaaatctcttaggaaacaacaacaacaccttgaacttaaatgtatcatatgaaccagtttacaaataatatttcattccaaacataaacatgttgtattcatcagagagattcagtgaaagcttacataaaccgaaaatctcggtttgatcgggtcggtttgatcggtttccaccgaaatcaacagggctctcagatagactcttttgactgaaaagaaaacaaaaatatttgcatctgatttacgttgaccgtaaaagacaaaaaataaaaataaaaaaagtctagtgtcgtcgtcgtcgtcttcgaattcgccacttcttgtatatacaaaacaaagtaatcgcgaaaacacacaacaatcgctggactctgctactgcgaagaacaacaaattccttgtttatcatg

SEQ ID NO: 26267 - DNA, 3003 bp, Unknown
  misc_feature (1)..( 3003): 2750-1469P.txt file - cDNA_ID_2711997; gDNA_ID_2214549; Annot_ID_134641
ttgaaagaacacggttggaacttaacttttgttgttcaccacataaaacctaacataaccaatcaatacaataaacaaccgaatatacttttatgaatttgaatttacctcttcggtcttcactccaccaataataccaatagatgagccgataatcgggttgttccgccgcattacttcagaggattttagcaggtcggatttcaattccttgaatgatcaagccacacttccgattgagctgcttagtctctaaagcactcatctcaatttcatcattatccattattcctccatcattgaagaactccccaagctcaatctccatccacccatcttctctctgcttaggtttcacaacgttcctccttcccctccttatagcttcactaaagcatattaatcttctagaaggctcctgtcccaccactcctaccgcagcttctatggccacattctgaaagccataacatttatccactcccttgaacacaatataagccgagtaacgagttcttggagataatacacgagtattcgttctgccacgaatctcgaaccaacatacatcgcgaagtttcgctactttttcaaaccttcataacacagggcaacaattgtccatcatcatcccaacgagtcattacaaccaaactaacgcaaagataatgaaaattagagtacctagattcaggaattggaatccattgccaatactgaggattatctccccatatgattgagaggttcatcgcagataacatcagacacctcttcccactcgctttctctaaccatacgctctttgatttccaaaataatcaaaatgattcaatagcagcaaacttcaaaattacaccaaaatagagatacaaattgcaactttaaggcgatgagatgagacagatcattcattattcataaattttgctacctttttgtcatcgtcgaatagaacaggatcgttacagagagagaaatagagctccttcttcgatgagaaaactcgcgatggaggaatcagagattcataatccgccggaagaaacttctcccatataatatctgacttcaccgtcgattcaaacgttttcgaaaccgtagcagcgacgcacgcatcgcgtggatttgtaaaagagattatgtaggagatgcaatcttccggaaatgaatcgaacggagacgactccgatttaactctgcgttttctccccatcgatcgacgcttgtatcttcgtcttcgtcttccacggaagctagtgtaaaatctcaagtcgttctattaatttacgaaagtacccctaaggattacgaaaatttcaagtcgttctacatattgacgaaaatagccctgatttgtgaacaatccacgcgtctacttcacgctccattgtttttttttggtcattattgtggattcgttggttaaggatttggttttgaaaatatccaaattccaaactaacaaaccaattaaaaaaaggtcaagtcaggtatgcattatggatcaacggtgggaatattatttgttttgaatttttataatatagtctgactcgttattccagaaaagtaaagcttaagctaacgaatacgaaagaaaaaattgataaaaaatgaaattaagtaaaagcaaacaatctatttttcatttgaattaaagaaaaaaaacaaacacaaaacacgcttctcttgttgagaagctagcaaaacaacactaaacctgaaacaaacgtaaatccgccgcaacaacccagttttttccgacggcgtacaagcttcctccgccgtaacgccgtcgtttaataccaagaagcttgattaggtttccgtagtgtgtgatttgtgagattcgttaaaccctagctctactactttataattcctgtgatgatctttagctagattgagagatcgaagtgatttgattactctagtgatgtatttgatcgtttgattttgggtttgaattttcccctttttagacgtaatcggaaatttctatgttcggagagttttgattctttctgtaattaactttactttttcgttatcgtttacttgtatgtaatctctttgtgtgtctttcaagttgctgaagttttttcaatactttgatttttaagctaagcatctttatcatctctctgtttatctattgatatagctatgttctagggtttgtttccattatccttgatcggttttggttggtttaatgtatagaacagtgattttttcctgttttgatggcttacaaatagtgattttatgtctctgatattgaattttggcttcagttttaaggttctgaacactgatgtcaaacccattgaaagagtcaagagaggatattgcaaattctactcctcacatgagggataatgagtatgttcggctagttgtggctcatgaagcctccccagctgaaaccgtgttgtctctatcgcaatcagaggtgcagagtaagaaatttatgtggtggttaaaagctttgggaatatgtgcagttgctctcttgcttacgcttgttttcggaaaatggggagttccgtttgtgtttcaaaaggtaatttctttactcaaatctcaagtttctgatgattatttccttgtgatgatccatgtcacatactctgctctttggattgtaatagtttgtttctattgaaggttcttattccaattttgcaatgggaagcaactgcgtttggccgtcctatgctcgcgattgtccttgttgtttccttggctttgtttcctgtgttcttgataccttctggtccttccatgtggttagctgggatgatttttggttatggtctcggttttgttattatcatggttggaaccaccattggcatggttctcccttacttaatcgggcttatgttccgtgatcgcctccatgtaagaacccttcacttctctttttctcatgtcatatgatcattttttacaagctcactgacttgtagatatgatttgttttttaacaaaatg

SEQ ID NO: 26268 - DNA, 3003 bp, Unknown
  misc_feature (1)..( 3003): 2750-1469P.txt file - cDNA_ID_2712007; gDNA_ID_2214550; Annot_ID_134654
gaaatataattaagaagaagaaggcaaacagtaagaaatgacatgttgtgctcatgccctttctatgatttgcagagggaaaactgatttactatgcacagaagaataaaaaaagaataggtgaaagtatagaaaatgaggacagaagaagagcttcggatctgcatgcttgtaagtaggacgcataagaccccttgtgtacatcttctgtacctagtagaatatatgcttttgttcaattacaagtatcataatagtgtatacatgatatatggaagttgtatgtgatcttttgggtatctcaaagctgttgtgtcggtcttgttattgaggcagagatgaaaactaaagttatttcagatcatacaaaaagaagtttagtattcatttcagaatcatgttgactatgcgtctatagtctatacgattcagtgggtagggaaaaagagttggtaacaacgctataacacgacctgaagctgcataatgagatggggtctagttttctacagtcagagtcaggaagttggaagtgcacgcaggtaacgactaaatttgttgacccattgtgtcatagtccatagtccagaacttcaaattgtaactttattttagatgtttaaagcaactctttgttttggtggtatatacttctatcattttagggtgcacatctgctgcggctacctgtaaacggtatgaactaaagcacaataagatgttggagttttctcgcaaggccggaatgaggaggagactgatctttagttgcaggattatgcagttgagaaaaaatgtaaataagttgaatacagaaatcacaagacttgcacatgggggttactgaaagtgttgttagagatatatacgagcatataagaaaagtgagctaccgatgaaattgaaggtccctatttctgtatttttgttaagatatgatatgtttttccttctttacccatgaatcttgtaaaatctatgcagactcaagaaaggagcttagtgtataacgagactgtggttgaccttttaaatcgtgatactgagcccgttggactattaaatgatctagaggtatttaaagggttggaagctttaagccaattgctgaaatagacatacactatctcggctacttggagaatgttgtctattttgcagaaaggaaccattttgccattgaggagaatctgatggaggaagtggttgaaagcagacagcatttacatcatttaattggcatttgtgaaggttatacttcctatcgcttgttaatatactttttatgcatttgatggtgatggtattctaggtgcatacgtttggcaaagcctcaaagtgtgttgatgacattttgaagatatgactcattgtctctttaatgagacacatggtaatcatcttttccatccatgtatgtgattttccatttgcttttatagctcaaaggcaactagaaaactgctttgaacgacaaaagttcaagatcacatacaggatctagaatgaaggaattctagaaactaagcattctacgaaagttttacctgtaaagatgtagtgatatcaaattcgctctcctattaacattactcctattgcttcaaacttgtctgtgtttgatgatgtgcttattagaaaaacaaaaatggttttggttgttcttggtaaaaaaagacactcttctgatggtcttcattttaggggtttgattttagctgattttttgttttaggttgtctcagacaaaaaacatctgcagcaaaagtagcgaaactcgagtcagagtaaaggagcctggagtccagttcatctacctccttgaagtcgcttttaactgagaatgagatgaaaatccaacagctatgacttcaagcaggttgacgaactggactcttaactctgactacaagcaggattcacatcttgagtgatctcttctgaaaatatttaaaatgtggacctcacttgacagactacaagcactgttgaattcagttttattaacaaaaacaacatggagattgatttatcacttgcaattattcattcatgttaaactaatggcagaacagcttaggagaaatgataatgtgatgtgaggcagttagtctttaacttagctggtgcctattgtgctactccactgatgctatacctctgttgatagaatcatacaaagaagagtaatggatcttgacattatatttttggacaaaaccacaagcctcgagtaaagtttccaattttttttttgatatttagacaaatatatcaaaaatggtgatttactaaatcttatactaactataaaaaattcattaccatctaaattttttaatgctagattttcattttttttttcattttttttcttcacaaatgtaacattatattaaacattcgatacaatacataaccaaaacaaaggcccttaaagagatacagaaagtggaggctcaaactagcctataacgggccaaatttgttttgaaaatataaaagaacgggcctataacgaacttataaaaaggctaatatataagcccattaaaagataatgcatgcgtgtcctctaacttgaacccttactactaacaaacatatcgttctctttactttctcttcttcacagcaaactaatcctcaaaccattctctcaagctcgtcttcttcctctatctgtgatttctagggttttgttttttccctttttaatctctcaattgcttagtctcttcctcttctctcaacacgtaagacacgcaaagaagaaacaatttttcaatcttcttgtaggtaaagtccgtcaatttaatttaattttactcgcttgatcgaatcatgtatgtgaattcgaaattgtagtttagggacgtgaaaatttcggttgattcatgttgtttttttgataaatctttgttattgttcgttcttcgtattatctctcaaagaatgtactaactaaaattacaaaattgaaaccagatgcatagagatatg

SEQ ID NO: 26269 - DNA, 3003 bp, Unknown
  misc_feature (1)..( 3003): 2750-1469P.txt file - cDNA_ID_2712033; gDNA_ID_2214551; Annot_ID_134680
actgcgtcaacaagattaaaaagtggaaggtaattaaccgaacaagccaatgattatttgacacgtacaagtgaatgagagaggagcgtcacgataatgattgtggactaaagtgacagtcgtcattatgacagaccgcgtggcatcatttatctcaccaaatgtcctttttcattattttcctgatcaaattaatcacaagtggagcaccctaattaacacgttgatatgacgaaccggacacattaacacttgccattacgttttagatttgattccttcagcttctttaagttttagttcagcaattatttgatcgatttggatatatattgaacctatgatgataatttagtagtagtgtaatgtaattttttagaaaataatgtatgaaattcatcagtttcatttttggataaattccggtttaacaagtatggtttggtaccaattaattaattgattaaaagtttcaaattcaataaaaataatacatgtggctgattatcgaatttgattcataaatagaggaatatttaaaaacgattattgaatagaggagattggtcactttaactcctcatagtagtaataattttctgatttcactgaatccaagtaaatgcctagaggaacaacaacgacgattctttccagctggaatattaatccgaagcacgaggcactgtaacggtccaaaaattccagctggattgcataactactcttaaaggcgcactctaacctactcctacttcactctactgttaacctacgcctctgtcagcgtactctagcatgacagttataatttcatcggcggcgaggttttattcgattttatctgcctttcgatcagttataacagaaacgcgactcgcaatattttaattggaagtaaacaaatcgacatgcgatgcgacgaataaaaattaagattgcgattgctagaagtcggcggttttccggtgagaagtccggcgacggggaagtgatttcgtcgtgaagctttccgtctcttgtaggtttcgtacactactacggatggatagagtatcggctctgataaatccagaaatttcgtcgccattttcgtcggatgattctagtggagatcaaaacaatcaaatcaggaactcaaattcaatgtgttaccaacagaaataaaattcgaaatgggaatcgaatctgcaatgtacctagatgtttcgaaggacgcatgaatccattaaactgagccaaatctgagaaaaattcaaaatcgaaaaaccgatcaaaatcaataaacacgagaagatcaatcaatcaatcaaaaacaggtggatcgtcggattttgaataggagaagccaacctgattgagacggagcgtaagaagtgaggtaaaggatgataaagcagatgagagtgagaatcggaatgaagtgaacaagcttctcttgtttctgattcgtcgtaacaaaaggagattgcaacgatgataaccgtcgcggcttaaagtctttgagctcgtgatcgtcgtaatctactgcggatgacgacgaagaaggagaagaggaagctggtttcaagtcatcaatatcgtaggtatcgtcctttcgtcctccatagctatggagcttcgaagctgatgagtctaacgatatcctctgcatcgccgacagagagagaaagatgagggaggctagagaaagaaaacttagtgaaggttatggttcgtatcaaataaatattggtgagtatcccataagtaaataaaaagtaaatatgcacacacatgagtttatcatatttaaataggaaataattattacgcgattattatatatctctgtctaataacgagagttgtcgtattcgctactcatttactttggaatctagtaaaaaaattcacaaaaaaagagagatgtatataaatatttaaaagaaagaggttgggatctatagagagtgtagaataactgtaacaccaacggaattgattcggattaatctgattgctgaagtttattctatttttagagcgaatatatatataaatcttatcgtttcaagcaaacaaattattattgcttcacacaaaaataataattattgctaaaaaaaaagaaaaaaaaacattgcataccaaaaattatgattggtgaacaaaaacctaaattatccataaaaagtttgtccgtctcgtctatatgggcatatttcaaggctacaaaagcccagcccattaaaacatttaaaataaaatcttgacgaacaagtaaaatggacggtcaagattgtatcgcagatcaagcaacctggtgctttaaactagaaacggaggatctgtgattccgatgggagtgagattgaaatttctggcggctctttcaaaggaaaattgtagattgtattcaaatacgttgaggaagaaagaaggtgacaaagaggaagacgaagaagaaagttgtagaaagtaatggtgttgtgggagttagctctaggaacagcttacttcttggggattaggcggacttaccggctcgcattgaagacccagcgtcggcttgttagccctaagcatccaaggattcgagattttatgcatcggtgaagtttctttcatctttacgcttttctttttgtggattttgcgatttggttgtttctgatttaggtttgactggaaatacgtttctttgtatatgaattggcctcttcaattgatgaaactgctttgttattgatgtatcgttctgattgtttattgtgtttaggttgatttcgattttctactgtccagttagttttgttctgactcccgtatcgctataaaaatgtgatttaagcaatgcaatgcaatgcaagtggttggatttaagtaaaatcaagaggtaggctagtcctatttccacggttttgattcgttgaacttacttatgtgatttcgtaattctatacattgctcttgaaccattcgatgtgagattcaagagtagagtgacacgaagctatgatg

SEQ ID NO: 26270 - DNA, 3003 bp, Unknown; identical to SEQ ID NO: 26269
  misc_feature (1)..( 3003): 2750-1469P.txt file - cDNA_ID_2712033; gDNA_ID_2214551; Annot_ID_185568

SEQ ID NO: 26271 - DNA, 3003 bp, Unknown
  misc_feature (1)..( 3003): 2750-1469P.txt file - cDNA_ID_2712052; gDNA_ID_2214551; Annot_ID_134666
acggatttgagacagttggaggagtattcacttgcgggtatggtttatttgttgcaacaagttaaacctaatttgagtaaaggtgatgcaatgtggtgtttgctaatgagtgagcttcatgttgggaggccgagtactatggatataccgagttctggaaaaggggatagtagtaatgtaggggttggtggtgctagtagtactgtaaatggggttggtggtgctattgctccggcattgtgtagattccatggaggttggggttttggtaatgggaaaggacccaagttttctggtaatgggttttctttgcacagtgaagagttaacgttgcagagagagattgattgtccaaggagatttaatctctcaccttcgatgaagtctttgttgagagagaatgttgcagcctttgctgctgggtatcgtgctagtatggagcaaaagaagcaggtgcaaatgcagtctgaaactagtggtactagcttgtcttgcacggctgctgctacacattcagagaagtgtgagcagccacatgtcttcggaagtgaagaatgtttcagttcagtgctggagaaattccgggatctgaaccttgatgacaatgttgattcggcacctgaggagctgaaggatgatgctttaataggactacttcagcaggttcaggatctcaaaaagcaattgaaggagaggaaagactgggctcagaagaaggcaatgcaagctgcccaaaaggtcagcgatgaactgtccgagcttaaatcgttgaggagtgagagagaggaaattcagcgggtgaaaaaggggaaacaaactcgtgaggactcaaccttgaaaaaattatcagagatggaaaatgctcttagaaaagctagcggtcaagttgacaaggcaaatgcggtagtaagggcacttgagaacgaaagtgcagaaatccgggcggaaatggaagcttccaaattaagtgcatcagaatcgctcacggcatgcatggaggcctcgaagaaagagaaaaaatgcttaaagaaactactggcgtgggagaagcagaaaatgaagttgcaggacgagattacagctgagaaagagaagattaaggcactcaatagagctttagctcagatcactcaggaagaaaaagaatatgaggtaccaagtaatgcattatcttcgtttacacaccgagatttttctggttcttcacaatttttgacactataacctgtggaagtccatttagttagaacataagataatgaacccttctctttgaaagcgcatctaattatctgttccaaggaattattattcctgtaaatacttttcatgggccaagtctttctctctatgctgctagatggatcatatttgcatagagaggttgtctttttcaggcaacttttcatcttgttaatatgtatttgcaggcgaaatggaggcaggagcagaaagctaaggagcaagttttggctcaagtggaagaagaacagcgctcgaaggaagcaattgaggctagcaacaagagaaaggtggaaagcctgcggttaaagatcgaaatagacttccagagacacaaagatgatctccaaagactggaacaagagctgtctcggctcaacaaagcctcttcaactgactcaagcctccaatccaataacacctctcacacaaaggtgaaatcagacaagtcgaagggagaaacaatgtctaagctgcttgaagagctgaataggcttgatggatcatatgagaaggaagcaaactatgaccgggaatgtctgatctgcatgaaagatgaggtttcggttgtgtttctcccttgtgctcaccaagtggtctgtgcgagctgcagcgatagcttcatgggcagtggcaaagcgacctgtccttgttgcagagctccggttcagcagagaatccgtgtctttggagcgagttcttagtaacaaagataattatctggggtccaaagattaatcacagcacaacttcttttgtcaggtgtaatacttttttgtttgtttgtttgtttgtttatggctccgtctctctacttcctattgtctcttatcttcaatctgagggggtttggactattcgcatcttttacattgttttgagttgttcaaagaagatgttgcctggtttatgatcttcccaggattcacaatgtaagtaaataaaaattctaccacctctacccaaccctgaaacgtcgtctcacaatttctgatacacatgaatcacttgatatgtttttcttaccatgaacctatcacaaaaatttcatttttagcttctaacttgtggctaaaacaagttaagcttcaatttctaatattagcccattgttcttctgtaacaagtttcatttgttatcacaaaagctaatttttcttttcacttaattttgtctagtaaaatttttggaaagaactctattgacatttcaacaacctcggaccaaaccggtctacaccgttacagaccaatcaaaatacggaaattcaaatctatgtattaaaaaaaatcactacagaattacgtacgtacgtataaatagaggttagtacattaatcggcgaaaaaacattcgacgtagaatccgccttcggagacttgagtcgccaccggtgagtacttcttcgatacattccgccgttcgtttcctcttacttggcgtcttggggtaagcttcttcataacctatcatcatcctccttctccagctcttcgagtttcagaaaacctagatctctaagtttttatccctaatcttttagggtttctaccttgttcgatcattctgaaattatttgtcttctctcggaattcaattcctggggactttctcctttttggttagagaagtttatgtatactctctaactctactgttgtatctctgaaacaagtgatttgaaatttatagctcttctgataatcgaaatctgtgttgatttcgtggtgttggtttatgattgtagtgcagtgagaatg

SEQ ID NO: 26272 - DNA, 3000 bp, Unknown; identical to SEQ ID NO: 12453
  misc_feature (1)..( 3000): 2750-1469P.txt file - cDNA_ID_2712064; gDNA_ID_2214552; Annot_ID_134710

SEQ ID NO: 26273 - DNA, 3000 bp, Unknown; identical to SEQ ID NO: 12462
  misc_feature (1)..( 3000): 2750-1469P.txt file - cDNA_ID_2712068; gDNA_ID_2214552; Annot_ID_134709

SEQ ID NO: 26274 - DNA, 3000 bp, Unknown; identical to SEQ ID NO: 12454
  misc_feature (1)..( 3000): 2750-1469P.txt file - cDNA_ID_2712076; gDNA_ID_2214552; Annot_ID_134707

SEQ ID NO: 26275 - DNA, 3000 bp, Unknown; identical to SEQ ID NO: 12454
  misc_feature (1)..( 3000): 2750-1469P.txt file - cDNA_ID_2712076; gDNA_ID_2214552; Annot_ID_185607

SEQ ID NO: 26276 - DNA, 3003 bp, Unknown
  misc_feature (1)..( 3003): 2750-1469P.txt file - cDNA_ID_2712094; gDNA_ID_2214552; Annot_ID_134697
cagcggtggaagagttgaccttggagttctaacgagtttcaagtagcacaacccggagctacatttgtgaggtgataggttatatttggtatctgattgtaacatcgtaggactatatgctgactgaataatatcttcttccaattcaatgtcgaattctctagtctcattgcccctcaaagcttggatttcggcaaagtgaaagtacacgttaaccttgtcactgtcgtcatctagagacacgtaaaatctcaatggcaagctggcattttcgggcgtgattcccatcctacttacagcttctggtacttgaaagggactcgaggatctcacgttgagggtggtgttcacatccgtttcaaattcattatatcggtcccatttgcgatcaaaaatatcatcaggatacctaaaaccatttttggagtagccatgcaaaagtaaatgaatcatgttagattgtttttttttataaaagagttgctaaagttgagtttacataccgtataaaaccggtagaattgctactataggcccgccggtagatgaggtctaagggaccgaattgagtcaaatatgaatcatttcttagtggccgtagttccaaggttgatatcattggtatagttgatcctgttttgacaagacaaatctgcaataagttcgacgttgtcatgtaaatgatctcacgatcttttccgaattccaaatcaaccgcaatccacatgttaggcccaacatgtaaatcaaatttgggatatacattaagaccatcataatttccatatccgaaccctgctcttatcaaatagttgatgccttgctctactttcagattatagcagtttcgtattccatcgggaaaatatctcaaatccttgtactgcctgtagatatatgtgttatcatccccagcttcaccacgtaaaccacttaaaataaaatcagcatcagatgagaatgttaatccggttcgtgggtcggtataaggagactcattaacgggtaaaccgcaatccaaactgatgaatcctggcaagatacaaaatgtattattagtgaaaaataatgttttccttttgttagaccatgaagcttataaggaagacaatcaaaagttttggaaaacagagaatcctttattttctttaaccaaatctcttatatctgtaatcgttaatattattttcatggtggctatgcgtacaacaaagtagaaatcggttagtgatctcgaccagtcgagcaagaacactcaactacttggctaatccttaagtctttatgtgtcaaaaactgaacatgaagcaattattaaaaaaaggtatatagagaaacctcgttgatcaggcggctgagcttgaacaagatgtgtaatggccaaagccccaaagatgaacaccagtaaacgttgacgacgaccttccattttcaagttaagttaacatacaaatttttgaaaccaaagacaatctgaaatatatgatacaatatattgattttctagtacaaatgatagaaatactttagatgaagatcaattaaaatccaaaacacatgttggcgtggaatactctccaattatagattcatatccaagcacgactgaagaatggtctaacaaagatatatacatttatattccactttgtggaaaaaagagagcaatttaatcataaatcaaagcacctgatgtaatctttgtttaaacaatgtaaaacctgccaagttgatctaatgtcaaagctttataaactatatgataattctgctaacgacttgtacttaacaacaacttggtggatttaatacattttgttgactttcactcaattataatcgcaatacctctgcaataatgtaaaattcttggtcttcaaaaataaactaagattagtcttttcttgacaaaccctaatattcgttttgtttgcctgtatatgcattatctatctatggcttactcatagacgttaagagatagctggcctcttatagttatagctcatattctcagtattactatacattgtcaaccaagaaattctacatcaacctttgttaatatcccttgttaggtgggatttagtgggaaaagagatcaaaccttattttggaaagatcatttccaaacgctactggaccattatccacttggttcacaatttgcttttttaatggagctttgacaatcggaaactgtatgtgttaactatataaaaatattaattatgtgataattcttattttttattgttgcttttttaacaagtttgtaatagttaaagtgtggttgtaaatatatttttaaaatttagtactggctaccttgatgcacattatttgtataaatacctgagtttgtaagaagcaaatcattgaatcaaacaaaatgatctttatctttattttttcctgtccatgttgtaatatacgaattctctcttttacataattattctacaacaagttacataagttacgtctataattattgtggatcagacgtaatgtttctttatgtgaatcagacgtaatgtttcaaataggttgtaatatgtaattgtttttcatatgtagtaaatccttttttgtaacgaccgggttcaaactaattacttaaatcaaaccttgttatatccttgtgctccaagtctaacgatcaatcgaagatttattatgtttggtcaagggtttaaagaagacatatacaaaccttaatacaaggaaattcctatacatgtcggagtcttatgatcataacctattattttaaacacaagttggggttggaacatgtcaaagaaattcacacaataaaccaaaaataaagcaattctcgcaattattcaatcttcatgtctggcttaagttgactttctttaatgtattattccttccaatctgtgtatgtgaggtatttctcatttacgtagctccttgttttcactaagcaagtcttttttatgttcttgatttccatattagctttccaagaagatg

SEQ ID NO: 26277 - DNA, 3000 bp, Unknown; identical to SEQ ID NO: 12473
  misc_feature (1)..( 3000): 2750-1469P.txt file - cDNA_ID_2712102; gDNA_ID_2214553; Annot_ID_134726

SEQ ID NO: 26278 - DNA, 3003 bp, Unknown
  misc_feature (1)..( 3003): 2750-1469P.txt file - cDNA_ID_2712104; gDNA_ID_2214553; Annot_ID_134725
atcgaattcaacagaatatgttttattggtcatctgattttggaggtaaaaatcttcaaacccggtcccaactgtgttgacatgcgaatgcgacccaaggatttttccggttcgatcgttgatccggtttaaaaagcaatgaatttcatgatttccccttctttcttatcccccagcccccaattcatttttctcatatggtcctggtaaaaatgttgaccatccggtttatgataaaaatcattttcggtttagattttaataatctcggttcgatttagtatttgtatctccccaccctttaagccagaagtgcagagacgcctccttctctcgcctccgtgtctctccaatgctctctcgtgtctgcccaaccctccgctataatcgtatctggtctgctcatgcgcgtgaaatgccacgcgccaccctccttctcctccaacccaacttcttccactcttcccccaaaactgctcttgtgaatcgtctcgatgttacttcatcggagttttcttccatgttccgtcggagcttccacgctttacgcagcaccgtaggagactggagaaagcttccgaaaccgccgggtcaggtttttgcggagaggagagaatacaggaagattagaaggagagctccgaagaagaaacaggaattggagcttagtgttagtatctgcatcgaagaacagcttcctgatgatctcgagattcaggtttgagtattctttgataatcgaatttggaatcaattagccatttctagttgtgttgttttagattcttatcaaattccaatcaatgtagaatattgcagaaatgcttcgtctcaatgtacctatggcaatgacattggctttcaatggtttgaaagattcaaagtataaaacaagagagactgatatagaagatcttggtgggtatgaaactgttgaattatcggtgatgctttgtaatgatgattttatttgtaaactcaacaaagagtggagaggtgaagatcatgctactgatgtgctttccatgtcacaacatgtccctgaactgaagcttccagtagtaagtgtttgtttttgatttactggtttttaacaggatggttccaatggttactcattatggtcgttcttcttgtagcttatgatgggagatctcgtcatttctgttgagacagctgcaaggcaagctgcagagagagggcatactcttcttgatgaaatacgcattcttgtggtaagattaatagttgtggagtttgtatccgttactgacttactgtgaaccaaaacattgaagtataatgtgaagtttctaggcgggtttttaggattcttgttgtttcaataaccatgtaagaaatcagtactgtgtttccataatgtttagaaagatattagaagggtaggagccaatttttgtttttttattcaggtggtttcatatggtttgtgtagtagtctctatttgctgataccttaaatgttttttcaaagattcatgggttgctacatctactgggatttgatcatgaaatcagcgacgaggctgagcaagaaatggaagaggaagaggagttgttgctaaaaaaccttgggtggaaaggaaaaggactcattcagagtgcatatgacattcaaaaaacaactacagttcagccggagaaatcagatggtatttttcctgtgtatactaaattgcaactgtgtaacgatcatttacactccccctattatcttcttgttcttgctaagataaacttacagactactgttattagacaggaaggaaggggatggcctaagattgtacaaaccaaagttctcctatatattctgtgatatggatggtaaggttacttatttaataatgtgtagttgtttgtttcggttttcttcgctttctcatgggattttgatgtgaactctattaggtacactgcttaacagtaaaagtcagatttcggaggcaaatgcaaaagctttaaaagaagcccttctgaggggacttaaagtagtcatagctacggggaaggtgagaagacagcagttttacaatgacttcatgtttggactattctttgatctgtccaacaatatctttccttattttttaatatttgcttgtctttgaaatgttttggagataggatatgttcctaaatttatttatttatcacagtcccgcccaggtgcgatcagaatcttgaagacggctgatctaactggatccgatggcattatctcagagtcctctccaggcgttttcgttcaggtttacttgctctaacatcagggaactagtgaggtgcaccaatatcaatgtagtctcactaaatatctgtttaattacagggattacttgtctatggtagacaagggaaagaagtgtatcgaggaaacttagaccgagatgtctgcagagaggtaagtccacttaggatttagactacaacgactcacagaattaattctcacatcctcggcttagttcacaaaccatgcattagaattctggaacccagtctctttgcatcatgtaattctctaccatgttaagcagcaaaaagctacctaagtacctatgatagtgctcaacttattatccctgtgtatcgtgattgaataactgagttctaggaatcctatcttatacttactaaaatgttgatttgttatatacagacctgtctttattctttggagcatcgaattcctctcattgcattcagccaggatcgctgcttgacattgtttgaccaccctcttgtcgactctcttcacacaatctacaatgagccaaaggtaggttaatgaaactgcacgctctctccccatctagttatgatttttgacagcttcttgctaatctctccatgatttttaacaggccgaaattatatcatcggttgatcaactgatagctgaagctgacattcaggtaattcccggagtcagaacttatatcttactttcttacatatgtataagccaaagtactgatg

SEQ ID NO: 26279 - DNA, 3003 bp, Unknown
  misc_feature (1)..( 3003): 2750-1469P.txt file - cDNA_ID_2712108; gDNA_ID_2214553; Annot_ID_134724
catgggtatgcaggagttattattggcataagatgatagcggtcacgatgattttttcgtgggtcccaaacaggaaagctaaggtcatcttcttctattgcacaaagcatgactggattcggccagcgccattgtgtatatactctaaaaaatcgagaaaccaacatactaggaatagcatttggataaaactggcaaaggcgtgcaaccagaagtgcccagtttacaccaccaagaaatccagtaacctgctcaatataacagagattacaagagctttaacctaagaatattgtcaacagatgtaatattcagaaagacaccaccttacatttgaatagaccccacgcttcttagcccagtacttcaggcatcttaatgttgtccggaagtgctacatttgcacatcacatcagagatggcttacatgattccttagtttataacataaacaactggcactcaacgactttacctcggaatttggaacaagtttaagaatctgatcagcaaccctacaaccattaagactgcggacagtttgttcatccacgtcacacagcacagaagagttggagatatccagatcctgttaataaattgattccagaaaaaaaggggatctgcctcagcaagaacttataaactttgtcgagaactcatctcagtactcatatataaatcaagcctgatggtgctaacacggcagttcaacatctccatgttcactaaggctaacaatttcttataagaagtttctttgacacctcaacccttggaggaagtgtataataatactatgtgaccatcaacacgcaatcaatacacgcaccaaacccaccaaatgaaatccaagataaacatacaggtatcatgaaccaccccctaactttcaacagaaactgaaaaaggctatattgatgttacctgtgggataactagaagcgatatgctagcatacagaagatcaattgatattccttggaacttaaatttcatgactgggacatgggcatcagtaacaggttgaagttcagtcacttcttccatttcagccaatatatcacggaagaaaatgaagaaatcctcctgtaaaaataacctgttagcaactaaactaacccaccagacctttacatcagtaagacgaaactcaatagttacctctcggttaacataagatgggccaacacacaaagtatcaatatcagccataggtccgtgaacctgcaaaccaacaaaataaaaatttcaccctcaactagtaatgtagagacgaatacaatgctacttctcttcatttcagtgataattcaagatactcacaaggctcaatagaaaatatatgatccaagtaaaacctttccccaaactgattagatgcagttgatcttttaactttaaacttaaaaagaacttactccaaggcggtaagatccaaaagtgaaaatgacagcatttgcatcctccaccatctgatcagtatagcccctctgacgagttaactgtttcacccagtgttttacaatctatacaagaagtttaaggaagaagatgtgttagattagatagttagtactgtaaacaaaacttgaccattatgcatttcagtaaacaccactgtgagcctctttgacatcgaagagaaagcagctaacccaaaatctacatttcagtaaagcagagtaaactatcaaacaaatgattagcgcctataagtcacttgtgttcacatggcaaatgagccaataggattaatagaaggactagactacatattgctacaatcatcttataattacggcatagaaatcgttggtctacaacactataaaaagaaaatgtgagaaccagtctaagcattatcatcatgagaaagcaataaaccagacgctcttaatcacctgatcaatgcgaaccacaacttcctctctccgcatagtttcttccttgctctcgtagagcccctcatcaaccagaaacttcacaataaatcagccaaaacgcaagtcaatatcacattgttcctgaaagcaatttttcattggaacaaaaaaacaaacaaacacaacgctaaccttctctagttccaaattacgcttaacatcagcagcagaaggtccagcaatagacagtggctccgtgatcccatagctcttaagagaagcttttaccggttgagaagagtcatcgtccgtgcgttgttgagtactcaccatgacaagacgcgtaaacactagaaaatcctaggcgattcaagcacaaaatatagatatctcgatctgattaagcacccagatcatgataattcggaatctaacaggaattggagactttagagtcatgggagagagattgaagaaggagaaaagagccaaaggaggaaagaaaaagtgagagaagagcgagaaaagctcgaaaacgaaatcggaaaccctaaatcgatggatagggaaagctctcgactggaattttcaaagggaagtcaaagaaagcggaaaatatcatacggattaaaatcaattttgacttgttcaaagaagggagagaaggagaagcaaaggacaatagtttttattggttaaatcgaattcaacagaatatgttttattggtcatctgattttggaggtaaaaatcttcaaacccggtcccaactgtgttgacatgcgaatgcgacccaaggatttttccggttcgatcgttgatccggtttaaaaagcaatgaatttcatgatttccccttctttcttatcccccagcccccaattcatttttctcatatggtcctggtaaaaatgttgaccatccggtttatgataaaaatcattttcggtttagattttaataatctcggttcgatttagtatttgtatctccccaccctttaagccagaagtgcagagacgcctccttctctcgcctccgtgtctctccaatgctctctcgtgtctgcccaaccctccgctataatcgtatctggtctgctcatgcgcgtgaaatg

SEQ ID NO: 26280 - DNA, 3000 bp, Unknown; identical to SEQ ID NO: 12471
  misc_feature (1)..( 3000): 2750-1469P.txt file - cDNA_ID_2712112; gDNA_ID_2214553; Annot_ID_134723

SEQ ID NO: 26281 - DNA, 3003 bp, Unknown
  misc_feature (1)..( 3003): 2750-1469P.txt file - cDNA_ID_2712116; gDNA_ID_2214553; Annot_ID_134722
ttcctgtaatgtatattcttttcatttttggtcgatataaacagcatcaacatcatcaagttctagtagtttctgcattagctctttgttcaattccatggcctcatcatccacctgcaacaaccaacaacaatcccaagtgattacattttccaagtgaatcgttgatgaatactgataagggtgtgactcttatttgggcggaacaagaagttaaaattaacgaacgaagaacacaaacaaattttctataagtttattgccatttccaattatgcttatgtagcatatgcaatttacaatgtatttaacacgttaagagaagataaactacatgttgacgataaaaatagaatcaataagttaatattagacagggcacagaggttacagaacagagcgggagatttgatacctcaactgtagtcagagggagcagttcagagccattgtcaggctcgaagttcactccttcatcacgtagctttgataatattgttgagtagttctcattagaagttacaattttgtagtacctgaacagatatagagacaagaagctgatgaaacaaaaaaagagcataatagttatgagtcacctaggtatcatctcgtcttagattggcaagatggatttcttatttcaaatcgtttggtgtgaaacttttattgcaatttagctgtttatgagaagaaaatacactaggtctaccttcagtcgcttgattactttttcaattcaatcttgaaagaaatttctaacgcatttgaataagtgagtcgactatctctatcttccctaacttaggattcaccagcaacagaaaataataaatgtaatactgacaagaagaaaagaaatgcggaaagacattatattggttatatacctctcttccctgtcttcatcagtatcatcttcataagttgggggttcaataacatcctctgctccagcatctaaagcaataataaggagctgatctttgtcagcttcggtgacctttatattcactaccctaactcttttaaacttgaacatgacagatcctgaatcagccatttttcccccataatccttaacaaccgatctaatagctgccactgatcgattaattttgtctgttaagacctcgactaccatactaacaccaccgtagccatatacctaaagcattgaaaacaagtttattttagagtcatcaaatcttataattggacccaaagaaatgataacgaggaactggatttatggtcctgtaaattgaacaaggtgctgaggtagtgaagttatattagctacagtaaccacatacttggcctgatagagtgatgaactaaaacagattcataggttttaaattaccaggccatttccccaccttactaggatgattcaccataacggccccacttacaaacataaaactagaattgaagctcatgacctcacctcgtaaatcttctctataaaagcttcttgccccttctcagaagccctcttaatattacgctccacaatgtctttcggtacatccagttctttagctttgtcaagaatagtagctagagtcgtatttgaaactgggtttggaccccctttcttgacactgcatgatgataaacccacagatgatactttttctagtaagcatatgtccataacaaagtaagaagttgaatccaacaaactaaacaccatctatatctacaactaatgtgcaaaatttcatctcaaaaaaaaaagatgcaacattgtgaaaaaaatgttgaagacttacgcagatacaacctccttgccaattctacagtatagcttcgccttctttgaatcttgagcgccctgtaattcaccagaaacttcaatctcaaaagttcttaaatacaatcttcgtcttggaaaaagagttttatctttctgctctgctgtaatatgtaattctcatttacaaaaacaaaccacaactttcaagaggaagattgttattcacattctgaaattcatactacacgagcaagagaaacttccactataggcttcacaattcaaacatggtgaattagctaatagctttcaagagtgacataacactgaaagctagactctttacaataacacaattaattgatataaacccataatcaaaacaactctctctatctgaggcatttcatcaaacaggtgtttggcataaacaattacgagctctagactcatcaaaacctataaattttatatttttaaaacctagtaatagcaccaacgcacttctaatctatatgaacccacaaactcagaagcttaacgaacctttcgaccagcgattttggaagaacgacgacccatacaaagaggagttgaaatcgaaatctttctgagttgaagcttgcggaagcagttctggtcatctgattgttgtgacgcagccgtgaaatgcgaagtagtagtgtggggagagattgaggaaagagacgagagagtgttggtcatggtaagactaagaagacgatggttagtggagttgagaatggatctggaagagacgccattggagaatctgaggaggattactctcatggagcaatgggaggccatatagtctttggtgtggattgagaatagagggaatgaggtaatcaatcgatttctcaatgttatattggtttaaggtaagaaactaggataagcgagtaaaaaacttctttttgcttggaaaaagttgcgattgtgattttgacttgaaatctgttgttgagccgcgtgaccctcacggactcaaaaaccaatccttcctttgcttataaaccccaatcttcttcttcgagagagagagtgaaagagaagaaaacgacaatgggacacgccacgagtctctctcacttcctcatcctctcttcctccaggttctctcgtctcgggtctctcactagattactctccaaacccacctctctctccggctctttttcttccatttcggtcaccggacaagggttccgatg

SEQ ID NO: 26282 - DNA, 3000 bp, Unknown; identical to SEQ ID NO: 12469
  misc_feature (1)..( 3000): 2750-1469P.txt file - cDNA_ID_2712120; gDNA_ID_2214553; Annot_ID_134721

SEQ ID NO: 26283 - DNA, 3000 bp, Unknown; identical to SEQ ID NO: 12468
  misc_feature (1)..( 3000): 2750-1469P.txt file - cDNA_ID_2712132; gDNA_ID_2214553; Annot_ID_134718

SEQ ID NO: 26284 - DNA, 3003 bp, Unknown
  misc_feature (1)..( 3003): 2750-1469P.txt file - cDNA_ID_2712136; gDNA_ID_2214553; Annot_ID_134717
attgttcttagggttctagaaacgtaaaaaaaatatgaagccaacagtttttccaaatggttctgatcccatttataaccgttctggtcttcatttaaaactaatttaatttggaggtcttggactgagacccataaatatttttaagcctcagttagttttttttttgctttctttggtgtagctttggagaaaacaaattattcaaggttcatgatcttacataaaaaaaattccatatatcttttgtattctttcgaggactggttcttatatgctttagcttatgttatcacatgtttatggagttgttcttttctctacatgaaattgcctatttatatgataagggatatatgttacccttatatggatattcttagtttatcagtctatttagggaggaagttggaattatttcattaaattaagggaagaaaacaaaaggaagagaacaagcgtggggtgggagaaagtgggcgtgtgggggaattgcaaaaccctagaaaatggaattaagcaaagcatgcccttccatgacaatgaccactctctgtatattctctccataaaattcattctttttgttttatggacccatttttcctttgcaattagttctcgatgtgcgttttggtggtacaactctattcataaactatacaatttcgatacgataactcaaaacgtttattttcttaccttccgggtggtacactcatagttttctcatcagaaataaaagcaattaaaatccattggaatttggttagaaatgctcttgttttatatatatatcatcaaaacaagagctataccagtgaaactaaactatataacgttggggtttaaatgtaagatgactcgttaaacagttatatatgttcagaaaacataatatatgttaatagaaaacattaggacgctctatgtttaagaaagatgatttggttaagcttgatgagagataaggtaactacgtagataagtcgtttaaaaaaagacatatgggttagaccacagaccactacatataccacataaattggaattaactcatcaagtttatgtgtgaagacatagtttatgtaaagtaggtgaaacatgattgggattgatatatagcatgacttagtctatgctaatatttggtctaagcttaggttatttaagccaagctgattagacaagaaccaagtggttatttttttatcaagtggaaaatatatagtagtatgagagctaattgaataaattagacatgaattgattatgtatttacctaggtagacgagattattatactcactaagcttaatagatcagaatcctgtttaattattaagacggctagtgagcgagaccaaagattcaataaagaaggacaatgaggataggtagtcaccgaatatagcacaatgttgtagcctaagaccattgcaaacattgtatttaaaaacaatggttaataaggaatgatttatcaataaagttctaaatttgagacttatatagtgcaaaattaaatttaagtacaacatgaatttaaacaaagaattggactcgaagtgaatctacatgaattactctataatacagtgattgacataggttatcacatttttacgtacatatatttatattcgtacaaattgttttgtagccaggatttgaatttctatttatataaatttatacttaaaaataacagaaatactatagagaaggtcaaattaactaggaaagatttaagtacaaaaaaatgattaagtgcgtagagtgggaaaatgcttttcaacgttcacataagatgtttagtcacaagaaaaagtgttttgattttcttcagtcaaaagaacatttcgatagtaagccgacaaacatctcagaggctttttgacgacatcaatcccatcctcatctgtccgtgttcaaatgtccgattacaaaagtgattgagaaagaaaagtaacagtgatatttctatgattactcgcattagttcttaccataacaattataatctgattagcttcccataacaactaatttatgatgcaagtgtttttaagcatgctatttttaagatttcttagctctctaatataaaattttattagcgtttttaacgtacaaaaaataaaatacgatgtcgaatataattatcctaaaacaaattaataagccacagaatgtttcttttttcctaaattaggtcttaatattaaatttactctaacatgcactaagttgaatacaattaacctaaaacaaattaataagccacaaagtgttttttttttctttctaaaatttggttttagtttttactgttgaagtaacactaagttgtgatagagtaggagtaccagccggtgattcaactaattcaattcggaaaagagaaaattatataacaacgtaaacaacattcttactttgtgttttgagggtaaacaaattagtttttgttctagttcataatctaaagaacgatttttgtttaacaaatgcttaattcaatattatttttctttatatttttactgaataatatctatattaaataaatcagccataatttaaggtgccaaagtgctcgacaccttttttgtttctttctattttaaaatttaaactttggtaatattcccctttttgtagcccatcctagcactttttatcccttttccatctagtacaaagaatagtgcacactgcctttcttatgaaactctctaagattttatacatgaaggaaaaaaaaattaaaagtctaatttgaaaaaaaaaaaaaaaagacaaagaagactattataatctttctaatcaaaggtcatcattgatccccctttaatttttttctttcttctgttttacagctaaggttcaaagcaaatcacagtccttaagagcaacacattcaacacaagagcatatatatacatatcaaataacctcatgtaataatagagcaaagccaaagaaacaaaagcaaacatg

SEQ ID NO: 26285 - DNA, 3003 bp, Unknown; identical to SEQ ID NO: 26284
  misc_feature (1)..( 3003): 2750-1469P.txt file - cDNA_ID_2712136; gDNA_ID_2214553; Annot_ID_185624

SEQ ID NO: 26286 - DNA, 3000 bp, Unknown; identical to SEQ ID NO: 12465
  misc_feature (1)..( 3000): 2750-1469P.txt file - cDNA_ID_2712145; gDNA_ID_2214553; Annot_ID_134714

SEQ ID NO: 26287 - DNA, 3000 bp, Unknown
  misc_feature (1)..( 3000): 2750-1469P.txt file - cDNA_ID_2712149; gDNA_ID_2214553; Annot_ID_134713
atggtgataatgatgaggacaaaattgtaaataatatatattacacacaaaatataatgaaagttttttttttaggttagtttcttaatttataaatttttgttggttatacacccatatttccctaactaaatactcttttaaaccggcgatttaccattctattgatgaatcgattcacgtcaaattttgaataaattctacccaaatcttcttcaatattgaacctggttttgaaaatttaacatttctcctttacaagataatgaaagaaagccaagatatatcatttctctttttaaccgaccaacattcacatcgggcttttggaaagccttaagaaagaaaaacattccaacaagaaacttgtttacaagcccccttcaagtcacacagagttggtccattaacaattttaagtattgtagatttgattaatctatgttaatcatgtccaatgtccatattgttagataaaagaaagaaaaaaaatcattaaaaacccatagattgtgtgaagaaaccaaaaaaaaaacatcccataaataagaagatcccttaacagaaggttaaaaaaaaaagatcagagtcctttggattcttcaattgcttagtctcataaatccccaaaatctctccacccagttggatttgcagctctctcagattcatcagtttcttgatctctttgttatattcaatttcacgaagattgtatccagagcagatgggtctggaagcttctttctttctcagtgatttcgatcgttccatggaccagacgtacgatgcctgagctgcgtagcaacgcacgcagagatcgggataagaagaacccgaagcagaacccaattgctttgaaacaatcacctgttaggagaaatccgaggcggcagctgaagaagaaagtggtggtgaaggaagcgatcgttgcagctgaaaagacgacgcctttggtgaaagaggaagaagaacagattagggtttcgagtgaagataagaagatggatgagaacgacagtggtggtcaagcagctccagtgcctgatgatgaaggaaacgctcctccacttcctgaaaaggtgtcaactttattgttggttttgttgtttttatgaggttttagttcatcggaattgtctcttgcattgtgtgttgtgttttttgattaggagaaagctctcaaacttaggcatgccacttaaagttaaaactttctcttgtaggatgatttgattattgactccttggtttttacaggttcaggttggtaattcacccatgtacaagttagatagaaagctaggcaaaggtggttttggacaagtttatgttggtcgaaagatgggcacgagtacttctaatgctagatttggcccgggagctttggaggtatgctgtttgtgtttgcaagtttacttgctttcttttggttttctgtgatctgtaatgtgattttgatgtgtccacttttgtaggtggctttgaagtttgagcatagaaccagcaaaggatgtaactatgggccaccgtatgagtggcaagtttacaagtgagcgttatggtctcttgtctttggctctaggattcatcttctgcttgttcaaatagtttgtttataaaaggatgagataactaatgatgctttatcatctgttcgtccagtgcacttggtggcagtcatggtgtgccacgagttcattttaagggtcggcagggcgatttttacgtgatggtatgtggaatttagtcaggtctgaacaagagcacttgcagtatgagtaattactgtttttaatctttcatacaggttatggatatccttgggcctagcttatgggatgtttggaatagtaccacccaggcgtaaacattcactctgagaaacatttactttattttgtagcatctgaagattttgttatatgaaccattgataaacataatttttcctgagatgagcccttcaatattggtggcactcaccatatgatttgtgtgttttatacattccaggatgtcaacagagatggttgcatgcattgcaattgaggcaatatccatattagaaaagatgcattctagagggtaattttctaatatttctgctactgtaactctctttcttcaagtggtttttatttgctaagaagcagtgctcctgtttctacagatatgtgcatggcgatgtaaaaccagagaattttctgcttgggcctcctggaactcctgaagagaaaaaacttttccttgtagacctcggcttaggtacactttatttttgttataagagtgagcgtactttattgtctttctgctgcttatccaatctgttgatcttgcagcatccaaatggcgagatactgcaactggactacatgttgaatatgaccagcgtcctgatgtttttaggtaagttgattcagctaggcataaagcctgtgagattgattcttatcagggacttcaactttagggtacttattaacgtgttggctttttcattttcagaggaacagtacgttatgctagtgtacatgctcatcttggcagaacttgcagtcggagggatgacctggaatctcttgcttacactcttgttttccttcttcgaggccggcttccatggcaagggtaccaggttggggacactaaagttatttgttttatttcctggcaactttccttgtcaatcattaacttggtctatttgttagggagagaacaaaggtttccttgtttgcaagaagaagatggccacttccccagaaactctttgctgcttctgtccccaaccttttcgtcagtttgtcgagtatgtggtcaatttgaagtttgatgaggagcctgattatgctaaatatgtctccctttttgatggaatagtcggcccaaacccagacattaggccaataaatactgagggtgcacagaaggtgatttggtgatcttctttatgaaacatatattgaggtttactatttagctccggtctgaatg

SEQ ID NO: 26288 - DNA, 1208 bp, Unknown; identical to SEQ ID NO: 12487
  misc_feature (1)..( 1208): 2750-1469P.txt file - cDNA_ID_2712157; gDNA_ID_2214554; Annot_ID_134741

SEQ ID NO: 26289 - DNA, 1208 bp, Unknown; identical to SEQ ID NO: 12487
  misc_feature (1)..( 1208): 2750-1469P.txt file - cDNA_ID_2712157; gDNA_ID_2214554; Annot_ID_185663

SEQ ID NO: 26290 - DNA, 3003 bp, Unknown
  misc_feature (1)..( 3003): 2750-1469P.txt file - cDNA_ID_2712165; gDNA_ID_2214554; Annot_ID_134738
aaagaaagtaaagaatggtcaaatctttttaacaatatactattagaagacactgaatgcgatcataccagcactaatgcaccggatctcatcagaactccgcagttaagcgtatcaagtgtcgttaaagactctaggcgaagcttagaggtcgccggttcgagtgacgcttgagacgaaactaatattacatgctgtagtttcgggcctggagggattacgggattcggcccaaaacctcctagtattcagaaaaaaaaaactattagaagacactatctcaacattaagactccatgtgatcgtagtcgtaggtgaggaagtgttgatgtttacaatatactagatccgtacgtgcgggattttatatttttaattcaatgtagattattttcttattttgtgatatatattatagtacaatgtattagatatctgaactcgcatatacgtacaaaatataattttttaatagattattaaaatatataatattttgttataagtaaactttgtaatagtatagatattataaagttaagagtaataatcaaaattcaattgtgttcctgtatagttatattttaagatccggactcacacagagaaataacccaaactaaaatcaaatttatatcctattttacactagtaattaaactgttataatgttttgattagtttagaaaataaaaacgtatacttgacttatatttcttggaatggaaaacctgtgatgtatctatcataaattcttcgtcacataacccgtctgtatatgtgaaataaaaatactaccaacctgtaaccatcacaaatagaatttgtgtcacaaaatacgtacatgcagggttatgtgtgtaaacaaatttattttatatagtgctcataacccaaactcataccagttagatatttaatttgatgtccagttggatttcaaattattttatatagtacttccgtttcttttcatgtcgtttgtgtctcataattcctattttcatttcgttccattaaaaatacgttccagaattcttatttgcttcctttaaataccaatgtatatatgactgagttttgcggattaacatataggatgttaaagtttacaaatatatcataaataaaaacacacaaatatattttcttgattttttttccttcttcaaactcaaaaatatgaatagcattataacatataattttgtaaaaaaaatatattttaacaaatgtaataatgtttatttccttagctacattttagatattcttctttcccttgtttaatcataattaattggagttttggaatataattaaaattttgaaatacacctataaaagcaatttattttgctggataattttttttgaatgaaaaatgtataattagtttacattatttctcaagtttgtttaataatatattatggatttatttaaaaaaagatctggttgaaaaaaataaaaaataaaacccaaaatatttggaaattagtatgtacaatttattgcttagatatttctaaatgtaaggcataatgataattacttgaaattaattatttttgttttatttatagtaaatataaatctttgtaacatataatctcgtttttagaaattttgaaataaattttcgttttatatttcaaaatacttaacccaaaattctaaaattaaatttatttatctatcacaaattatgattttttattcatggtatcaagcaagtgttatgatttaaaaaaattttaaaataaaaattaacttccaaaatgttagtttaataatatagtataatttgatatgaaatcttagtttttcaatttttattggttaagaaattttaagaaataaattttaatttttcgtccataattaataggaaatagaaagtgagtttaattttggaaaactaataattgcttaaaagaatattaccattttttatatttaaatctattaattttgtgattactattgtatctttaatgaatttatttaaaaacacttaaagtcaatagcattctatgtaatattttacccttcataaggttgtttattttcaatgattccgaattaatagtatagatacaatggactagatatatgtatacttgtctatacaatatttattcgtgacatgattggttgatatttgttagaaagttcaaatatcatgttataaaatacagtacgaaagccttcaaatattaagtctttgtttttcattttgggctaaaatccaataattgcaattttttaattttttttctgctggtgtacagtataaataaagactttgcggttgcaatatatcaaaatatatgaagcaaagcaaaacaaaacaacaacaaaaaaatgatagatgagaaagatattccaaagaacttgagggaagaagaagttagagacgataatgtagaatctttgaaaatagtggggcatgtagaaaatcaattatcgagtctaaaatttttcaaaaaatttggatgcatatcgagaagacgccactagaaatttttgatgcaataagaaaaattagagatgaatttcaacgagattcgagctttaagaaaagacaaacaatactatagttatattatattatattagcgtagaatgtatgcttaaaaattataattattaatttatgatattattgagatcatatttttatataagaatttcaaaaaaattataatcttattattttaacaatttcggttaatttttacattgaccccagcttgaaaccgataagatttattaatttatcatgtttattaatttatcgactattaatttatagagttgctacggtagtacgaaagcttcatatcttaagtctttgtttttcattttgggctaaaattaataattccaattttttttttttttttttgctggtgtgcagtatatataaagacattgcggttgcaatatatcaaaacatatgaagcaaagcaaaagaaaacaacaacaacaaaaataatg

SEQ ID NO: 26291 - DNA, 3003 bp, Unknown
  misc_feature (1)..( 3003): 2750-1469P.txt file - cDNA_ID_2712184; gDNA_ID_2214555; Annot_ID_134768
atctggagtgttccatctcttaggtacgagaaacagggagtcggggaagtatcaaacatagcatttcttcttagacaactcttgccaagagattgatgatatacattgaaactcatgcaggtgatgatgaaaacatagcaaacaagaagcctttggctggttctcaggtctcaggtgttcctgctgcatccactgcccataaggtaaaaaaatttagaacacatgaaactaatctttcatgaatcgggcagttcatgtagaaaaatgcaactggattagtaagctgtgtatttgtaatcatggttttgatgagacaagtttgtgattcaacaggatttggaggttccgaaacttctaactgcacacaggtcacttgataacaacccgcgacgagagatcattcaagctcctgtccggacaaagagtgttctttctgcgttctttgttaaacagaaaactccaaagctcaaagctggctatgtctcgtgaaaacaccaactctttgtactgagaaggaaatttcaatctcataccacgtttcttttaccttatataataacatgttgattttcatgtaattatcttaatcaccacatcaacgtacgaagtccagtaagacatgattttggtctatcattaacaaaactgtgtaatagattaagaatgtgtttttagaatgtaaaagcttaataaagatttctgttgagttattaattaacattgtatcaaattaacaacagagaaaccaacatagagaacaaaatggctcacaacatagccattccaactcagttgattcagcgcgtaaaccgataccaactcaggcttgaggcttcagggcttcatggaattcataaggtctctaataaattatcagtaccttggagctgcaccaaaaaaaaacagccaaaggttacaaaagcgaattcacatagtctaataccatagtagcagtagattcagatgtctcagccggaagatacatacctccaccaagtgtagcttcaggcaacttctctattgagtacttgcgattagtcacatacatgatgggcacaccaggaatctgcaaacaaacatagaaaaaagttgataatatccaaagacttcagccatggatataaacaagagcactgatacaacaaactatctttacctttcgaatccttcgctttaagtctctatcacatgtagccactatgaagcatttatgctgtatattatgagaaatgaatattacagaaacatacaaaagataaaatgtatacaccaagaaccatgggaccagagcatcggtatatcatttcagagtcttgaatacaaagttcaacaagccgggaacgatgtattacctgagtaactctgtcaacgagacagtcatcagcatatgtccctttgtgtatacaaggtagtctttcgaagtgaggatctttcgcaatcctaccaaatattatagtaaaccaattacgaatccacgaaacaaaaccataaacagaaaagccttgttcaaaaagtctaaaagatttaccttagagctacacgatacttctgacctaacttctctaactcagccatgacacaatccgtgatacaaggagtgccttcaaaccagaaacaattacaggtggttaacaagagagagaacctatatagacctatcaaaatctttaagtaactcacaatttgcgtacagacagtctctcattcccttctcaagatcgatctattagatacaccagagcaaaataagtcaaaaaggatttcaaacaatgagagattccaatcaggttcaccaagactataaactctacaaagatcgatacacattctgattatagctctgtgatagagaaatgcaattgaagatgaaccgaccttattctggatagagaagttgatgaagttagtatccaccaaaacacggtaaggaggaaccaatgtagagttgtaagaaaagaaaagccctgcaggaacactcggtctgatccaaaaacaaatcaaacgaaacccaaataattacaacttggcaacgaaagctaacagtggtaggaagcttacacgtttctcggaagttccgtgaggtccttcttgtttggattcagaacctcttccttgtaactatataaataaaaacaaaactaagaatctctttaaaaaaggatcaaatttgaaggaagacgaatcgtttactcactgcttcaaagctttgtggctaatcatcttcttcacgacagcaaacttttgaggtttctttgcctttcccatcttcgaagcaaagagtaacaaaaaccctagaacgacgcagagagaaagactgggaagctgaatatgcgaggtctgaatcggcggaggctgagaagtggttttcgaattgggtatcagagacggagactaacgctcaatatacagcctaattataagcccaataataaaataaatgggcctaatttatatggcccataagcgaagcgagtttcttaaatcacgtgttagtaaaggttaagaaacgaagagaaaattccagatttttcaaagtgatgcgagaatgatctggagagcagaagaaatatcttttccctctgaacgttgttgttcgtctttctataaatcaagaaatgtctttggattgttcactacccatagaaaaagctgcaatcatctgaatcagaaagtaattcgaagaagaaatctgctttttttaattggtggagagagtgagagagcttcgcaggaactgagtcatcggaatttacggatcgtttctgtttcgtgtaagctccgtcattttcccttcttagtttaatgaatagctttgagaatcttgagttcattgctcttagtttaatgaagatgcgattgatttagtttggcagattttggtgattgtggtaacgaaataattctgaatgaaccaaattcacattgtatttttctaatgatatatggatttgggtatttgctgcagttttactggaattggttaagtgatcttgattaaagatg

SEQ ID NO: 26292 - DNA, 3003 bp, Unknown; identical to SEQ ID NO: 26291
  misc_feature (1)..( 3003): 2750-1469P.txt file - cDNA_ID_2712184; gDNA_ID_2214555; Annot_ID_185698

SEQ ID NO: 26293 - DNA, 3003 bp, Unknown
  misc_feature (1)..( 3003): 2750-1469P.txt file - cDNA_ID_2712188; gDNA_ID_2214555; Annot_ID_134766
ccctcttaccagaaaaccccaaaatccagcgatttcagttccacaacctaatgtgagactcagcaacgaaaacaaaaaatatggatatatggaagttagcttatagattaaaaaatcactaccaacatggaagttgataatcgtgagactaactgagacttacagatagataatttctacggaggagactttgccgagatccgacgccggcaaaagcaaaacagagcgcgcgaggttgagaagatgcttatgaaataattgggctttaaatttatacactttggcccattaggaaaaatataagcccatttaaaaggttttgtatccgccactaaagttcattgaatcacaaaaataggatgctaatttttaaagtttagaactaacagtacttttccactttttcctgcttttgtgattttattctgttattgacaactttaaagttgctcttgaggatactctagtttttctgagtcaaccactaaaagaaattgatagacccacccaaactaatgacaaattgacatattaacatgtaagacaaccttgtcaaatgtcactggagttttcctctaatcaacaattccatttatagagttaaaaggtaattaaaaccagtggattttttattgcttaaccatttaaaacggttctaaaaataaaacacaagtgtcaaagattcgaacatcgattccaaaacagtaaacaaacaaaaaacacacacacaaatataaggaagagaaggcgtagaatcgattcagaatctgtgaattacgaatccatagagagaaaggttttgcatttgcaacctttctcaaattgggttctgtgcatttccttgcactttggataataggaactaaatctctttctctggttcatcaatggcggatcaaacgaagaagagatacgttacaagcgaggatttgaaaaaacacaacaaacctggagatttatggatttcgattcaaggtaaagtttacgacgtttccgattgggttaaatctcatcccggaggcgaagcagcgattctcaatctcgccggccaagacgtcaccgacgcgttcatcgcttaccatcccggaaccgcatggcaccacttagaaaagcttcacaatggctatcacgtgagagaccaccacgtgtcagacgtctcacgtgactaccgtcgtttagccgccgagttctccaaacgcggcctcttcgacaaaaaaggtcacgtgactctttacacactcacgtgcgtcggcgtcatgctcgcggcggttctctacggcgttttggcgtgtaccagcatctgggctcacctcatctccgccgttttactcggtctcctctggatccaaagcgcttacgtcggccacgattccggtcactacacggtgacgtcaaccaaaccgtgtaacaaactaatccagcttctctccggtaactgtctcaccggcatctcaatcgcgtggtggaaatggacgcacaacgctcaccacatcgcttgtaacagccttgaccacgatccggatctacaacacatcccgatcttcgccgtctctacaaaattcttcaattcgatgacgtcacgtttctatggcaggaaattaacattcgatcctctagctcgattcttaatcagctaccaacactggacattttacccagtaatgtgcgtcggaagaatcaacctcttcatccaaacattcctattgctattctcgaaacgccacgtcccagatcgggccttgaacatcgccggaattttagttttctggacatggttccctctcttagtctcgttccttccgaattggcaagagagattcatcttcgtcttcgtgagcttcgccgtcacggcgattcaacatgttcagttctgtttaaaccatttcgcagcagatgtgtataccggtccaccaaacggaaacgattggtttgagaaacaaaccgccggtacgcttgatatatcgtgtagatcgtttatggattggttctttggtggattgcagtttcagttagagcatcatttgtttcctcggcttcctcgttgtcatctccggacagtatcgccggtggttaaggagctttgtaagaagcataatctaccgtataggagtctttcgtggtgggaagctaatgtgtggacgattaggactttgaagaacgcggcgattcaagctagagatgcgactaatcctgtgttgaagaacttgctttgggaagctgtgaacacgcatggctaaaaaggtgtttcgtttgtcgagtactttttaattagattgaactgttttaggtgtaactctaccgtgataaaaaactacatatttattttgattttctgctgagtttataattttctaatcgctaagcctaagaatctatttttgataaacaaatttgtcagacatgcgtgcttgttctacgtttaagacggatcgtgcgggtctaatatacatgacaaagtactccaccgaaaaacccgagcttttgaaccaaattgtttgagttcacgtcaatgtaaagttttatctggaagggttcatgcttattatacaacaaatgaaagaacattttgccaaatgaatttggagtttaggaagaaaacaaaaaactagttgggcctctttgaaaccgtttcatacacacagatataagtgaggcttcctataattatttttgtaatcaaattataataatgaatgggctttacttaaaggtacgtgaagccctaaccataaatggaccgtcatataatttcaattttgggataatcatcagaaccttcaacgagtcattgtcgttgaagaattgaagatgacaagtccgagaatcgttatccatgcggacttgaaaaattatccttaggagatttttcctgacctatcctcgcgtcgcgccttcttgtcttctctctcaatccagcatattcctacgcaaatcccttatcgttttcatgtttgtcctggtttaaatcttcaatctcctacccggtcttttcatcctccgatg

SEQ ID NO: 26294 - DNA, 3003 bp, Unknown
  misc_feature (1)..( 3003): 2750-1469P.txt file - cDNA_ID_2712213; gDNA_ID_2214555; Annot_ID_134755
gagaagatttaatcgaaaattaattttgacgattcattattatttttggtagtactttgctttttaaaaaattgtaaaatcctcatcaaaaaaatttcagcaactgtgaatattttttaaaaggcataacaactttatttgttttacgtaacgaattccttggatttgcgtaaaacatgggcctcaaagcccaaatgacagctgtcaaggaacaaatcggtcgacaaaagtatggaccccacttttaatttacatccggacaaagactaaagagctgtctttatctcaatcgtttttcttgtttctttaagcccattaggtatagctacctcaatttatgggccatcaggtccaaagggcatttttcccaaaagattcctaatcgaattacgtcgatattgaataccttattgactttgagacaactccaccattgtgctagataaaataggcctttttaaaactttgaagataaaaaacggcccataaacgttgtgaaaaagcctctcgctgaaacagaaggtctctgtaagtgtctaatcgcgcgatgaacttgataacggcgatgaccggagctaaattgcggccatacaatgctacgatccacttgctgcactccactttgccctttcacggcgaaacaaccttctttccttaggaaacagcaacgtattacctctgatcgcttcacctttcgcggtggtggtggtggcgatgccgccgccgtcgtctcctcctccggcctccgtgatctcgttttcgtcgtaaaccctcaaggtgtgtttgcccttttactcactggatgaaaaaaaactgagattcgaaattcattggatttaaaaatgatgtttttaatatgagaatcaatctcgatgtggaattgaggtttagtattatcgtctcttgattcttttcaatgtcttttatatgagtctaggtgctaatggtagaacagctaaagaatggaagaagttgcttcctcaccttcgatctcgtcttggtaaagactgtaatgtgagtttttgattcacttgcctttttgtgcccctgtgttagtgatgccatctcctttcgctttcttcagttccttcaactgagtttacgtgtcttcttgtttgtttctccaggtaagtgaattattaacatcgggtccttctcatgccattgacattacaagagaggtaaggagtagtgaaagtaatatactactttgctgggtacagtattctctgtcttgtcgatttggttttatgatgatcctctgttgcttctaattatcctctcaggctataagggatggtgcagatgctgtcattgcggttggaggtgatggaacacttcatgaggtaggaattgccatttttggttgctagaactgcgctctggagattcttagctccactcattctgtcctttttttttttatctacaggttgttaatggtttcttttgggaggggaaacctgtcggttatctcagtggggaagctagtcgatcgactgcacttggtgtgagtagcttgagttgactttttgacttgtttttgtgtatatctcttgtggagttacaacatacaatcttagtccatcctttttattttgcagctgattcccttaggtactggctcagattttgctagaacatttggttggttagtttttgcaacttctgtttgttgtgtttttttgaaacttatgttgagccatatgttaagtgtatcctgcattctttaggaacaatgatccttgtgaagcagtggagcgcattgctagaggtatgtcactgaattcatttgaggagttaggacttagttactactgaactgtctatctatgtctcatatatcacataaccagcattttctcagggatgcgatcacggattgatgttggtgttatcgacaaggaaggaaaggatttgcattacttcatcaatgtagctgatgttcatttgtaagcatatcgtggaaattttcatctgtgattgatccctaatgatgcaaggttgtaaatctgtccttttgttgctcattacttgcaggagcgcaaaggcaggattttacgcttcaaaatacaagaaatttggaaacttgtgctacgtaattggtgccctacaagcgttcatgggccatcataaccaagatatgagaatcagagtaagcaaatttttttctgcgaaatcccttctgcaccgtagcaagtaacttaaaagcattctgttattttctcaggtcaatggaggcgaatgggaaatatatccccaggtcactgctctctgcgttggaaacgcaaaatactttggtggtggaatgaaaatcacacccaacgccatccctggaaatggaaatcttgaggtgcaactattcgttttcttcaatctcaaatcctatgttgggaatatggtagctcttgagtcttgacttcttccctgtaggttgtggttcttcaaaacttcaaatggtatgatttcgtacttaaacttcataagctgtacaacgggactcatctttcggttaacaatgtgacttcaagaaggtaatatttttctttggcttcttctcattttgtcctttaaacgaccttagcactagaaaagtcaccacctttatgctacctctcttgtagtgtacaaagcatcgaagttgaagagattacagacagtggaagtatctatgtgcagtcagatggagaacatcttggattcctacctagaaagtttcaggtgttacccggtgccatagacataatcagctgatcaaaaccgcagatttcttaggataaacttgtcaagtaaagtgtagaatacttcaactttatattcttcctgtaatatgattcattgtttagcgaatcagatttatgctcgtgttacttgtgtaactcgttactatcactatttattgtgtggtctctgttaaccacaaatagatactttaaaacattttaaagcaaaaagtcgcatctcctaaatcaatcaatcacacaaaattgaatcctaaaaatg

SEQ ID NO: 26295 - DNA, 3003 bp, Unknown
  misc_feature (1)..( 3003): 2750-1469P.txt file - cDNA_ID_2712215; gDNA_ID_2214555; Annot_ID_134754
ccgtgaatctaaagatcatgaaagattacatacgtgtatggtaacaagaagcagagtcactcgatattagctcaatattgcatttttcatttgttactactaattgcacttaactatagatcaaagcctctgatttgttcctttgattgaaacaggtttagaaagattggatcactacaaagagagcagtgattttttcaagccaaacagatgtattctatatttatattttattgcagaattgatttcatacagtcacacatacaagaccaacacacctaaacggaagagacaagctcgacagatggactcaaaacaaagaaaaaagagaaaacactatttatagaacctaaagctgccttttgtaagggttaaacttgtttgtttacctcactattttagtctacatcttctccaactgcattgccagagattgagtcacttgacctaagattacagagcaacacatcgcgccctctcaaagtcagtttaaagaaactatcaacttcctccagtaactgatccaacccttgagacaatttctcagcttgtgtccccaattccataacattatctttgaagaattcaacttcgacaggatcaacgccatcttggatcatcgggtatagcttctcgacactagcatcaacgctctccagctctttgagaatcgtggttctaccggaagacaacatgtctctgatctcagcatttacaacactctgcatatcagtaaagacctttgcccataatggtttttcagagacaggtaaatcgaaaagatccttggtggaatcagaccaggctgcggtaaatacactgcagatataaactgtttgaaccttcacaccataaaaagctcgcatcagaacctttcctttaggcgagttcttgactttaggcagactcagagatttaacaagactgtctagaaccgcacggcagttttcaattctagggttgtttgtattaacatgttgcctccagctatcaagcgaagatcgagcctggagatacttctccccagaatccgattgtaaattgtgcagaacacacttgaggaagagatctccctggttgagacgtgtgagctcagagctaaaggcattacagagatctagtaacctaacgcttatgttgaggtaaacatcaacccatttctcttcccaatcagagacaggaagctggagatcagtaatgagagtgttaatgttcttatgagtctcgcagagtgactccatagctagcttcatccaggataaagtgaggatgtcatctttgttcttaggcataagtttcttcagtctctcttccaaacgtagctcaaagccgttcaatagagaaagtagccatggcgataaatctgatccctttgatgataacatccgaaagggatttccaaatgggaagaaacctcggggtggatcttgtggtcggctcattttgctagacacctgaaaatgaaaagagaaatattgttagaataatgataatgattaatcatacaaaccgatttgctgtgaactcaatgtatcttctgtgttgttgccacacatagaaggactaatcgaggaacaatacaatcccaagtcccaaccttaagagtcccaaaaagctgacaacttttgagatcttgaaaaaaaagaagttaccacctttattgaaatgatgtaaaatcaaaatttgaagatgaaaacaaacacataatcaattgttctaagccataatctacacttgaagatgtccagaaccaaggaattaggataaaagtttcaatctttccaaaattagaagaaccctaggagttaattatctacacggaagttttgaacacagaagttcggtacaaactcttcatcgaacagtaaaatctatcttagaactaaacacacaaacttcgatttacagaagaacacacacaataaaaggagaattatagataacaaaaaaaaactcaatttccacgaaacttaccgttttaagtcgccggaaatgaagaaatcacagggaaaatcgtgtggaaatgattcttctaatgcttcattgaattttctgagtcgatcggctgagaaaaatgtctggcggaggtcgagtttgataaagctacggcccgtcacataaaaactagttacaaccttacaagtataccattagtgaatggctgttacgttttaattggtcacagccttgtgtgtagttaaattcttagcggaaagtggacggctataaaataattaaaagttttatcgaagggccaaaaatgagacgatttcgtgggattataaaataagtcattggtcgattggcgtagtctttgtttattttaattattataaccaaatctaacggctaactaatacataccacgtcctacagactcctgttattacttttaaaaataaaaactgagaagatttaatcgaaaattaattttgacgattcattattatttttggtagtactttgctttttaaaaaattgtaaaatcctcatcaaaaaaatttcagcaactgtgaatattttttaaaaggcataacaactttatttgttttacgtaacgaattccttggatttgcgtaaaacatgggcctcaaagcccaaatgacagctgtcaaggaacaaatcggtcgacaaaagtatggaccccacttttaatttacatccggacaaagactaaagagctgtctttatctcaatcgtttttcttgtttctttaagcccattaggtatagctacctcaatttatgggccatcaggtccaaagggcatttttcccaaaagattcctaatcgaattacgtcgatattgaataccttattgactttgagacaactccaccattgtgctagataaaataggcctttttaaaactttgaagataaaaaacggcccataaacgttgtgaaaaagcctctcgctgaaacagaaggtctctgtaagtgtctaatcgcgcgatgaacttgataacggcgatgaccggagctaaattgcggccatacaatg

SEQ ID NO: 26296 - DNA, 3003 bp, Unknown; identical to SEQ ID NO: 26295
  misc_feature (1)..( 3003): 2750-1469P.txt file - cDNA_ID_2712215; gDNA_ID_2214555; Annot_ID_185681

SEQ ID NO: 26297 - DNA, 3003 bp, Unknown
  misc_feature (1)..( 3003): 2750-1469P.txt file - cDNA_ID_2712230; gDNA_ID_2214555; Annot_ID_134747
agggttcttctacccaagagggccagcaaaattttaatccaatgcagcaagcgtatattcagtttgctatgcaggctcagcatcaaaaagcacagcagcaagctaggatgggaatggtgggttcatcaagtgtgggaaaggatcaagatgcacgaatgggaatgttgaatatgcaagacttgaatccgtctagtcagccccaggcctcatcatcgaagccatcgggcgatcagtttgctcgcggtgaaaggcagactgaatcaagttctcagcaaaggaacgaaacaaaatctcatcctcagcagcaggtgggtaccggacaactaatgcctggaaatatgataaggccaatgcaagcaccacaggctcagcagcttgtcaataacatgggaaacaaccaactcgcatttgcacaacagtggcaggcaatgcaggcatgggcgcgtgagcgtaatatcgatctctcacatcctgccaacgccagccaaatggcacacatccttcaggcaagaatggctgctcaacagaaagctggtgaaggcaatgtggcctcacagtcaccatctattccaatctctagccagccggcttcatcttcggttgttccaggtgagaattcaccacatgccaactctgctagtgatatctctgggcagtcaggatcagcgaaggccagacatgcattatctactggctcatttgcctcgacttccagtcccagaatggtcaatcctgctatgaatcccttctccggccaagggagagagaatccaatgtatcctcgacatttagttcagcctacaaatgggatgccctcaggaaatcccctgcagacttctgcaaatgagactcctgttttggatcagaatgcatctacaaaaaaaagtttaggtcctgctgaacatttgcaaatgcagcagcctaggcaactgaatacaccgactccaaatttagtagcgccatctgatactggtccactcagtaactcgtcccttcagagtggacaggggacccaacaagcacagcagcgatcaggatttaccaaacagcaactccatgttctcaaagcccagatactggcatttaggcgtttgaaggttttcagctctgactttttccttatgtcttcatttttattgtatgttttgctggagatgtatgcctataaataacgtgtctgcaagccaggttgaatgtttttaattgcttttttttgacagaaaggggaaggttctttgcctccggagcttcttcaagctatttctccaccaccgcttgaactacagacgcagaggcaaatatctcctgccatagggaaagttcaggatagatcttcagacaaaactggagaagaccaagcaaggtcgctagagtgtggcaaggagtctcaggctgctgcttcttcaaatggaccaattttttctaaagaggaagataatgttggagatacagaagtagctttgacgacaggccacagccaattatttcaaaacctgggaaaagaagctacttctactgacgtggctacgaaagaggagcaacagactgatgtattccctgttaagtcagaccaaggagcagattctagtactcaaaagaatcctagaagtgattctacagctgataagggaaaggctgttgcatctgatggaagccaatctaaggttcctccacaagcaaactctccccagccgcccaaggatacagcctctgccaggaaatattatggaccgttgtttgattttccctttttcactcgaaaacttgactcttatgggtctgcaacagccaatgccaataacaatctcacattagcatatgatattaaagatctgatttgtgaagaaggtgcagagttccttagtaagaaaagaacagacagtttgaagaagataaatggtctgctagcaaaaaatttagaaaggaaaaggattaggcctgatcttgttttacggcttcaaattgaagagaaaaagcttaggctatctgatcttcagtctcgtgttagagaggaagtagatcgacaacaacaggagataatgtccatgccggataggccgtaccgcaaatttgtgaggttatgcgaacggcaacgcctagaaatgaatagacaagtactggccaatcagaaagctgtcagagagaagcagctgaaaaccatttttcagtggcgtaagaaactccttgaggctcattgggctatacgtgatgcacgcactgctcgtaacaggggagtggccaaataccatgaaaagatgttgagagagttttcaaagagaaaagatgatggccgcaacaaaaggatggaggccttgaagaataatgatgtagaaagatacagggagatgttgctggaacagcaaactaatatgcctggtgatgctgctgaaagatatgctgttctctcttcatttttgacccaaaccgaagattatcttcataaacttggaggtaagattactgccacaaaaaatcaacaggaagtggaggaggcagcaaatgctgcagcagtagcagcgagattgcaggtatacatactgctttctctactccacagcgaatatccattacactctgtagataattcttcaaactttaacttaaatgttgacttttgcgtgtttcagaaaatagaactttttcttttcaaaggtatagtggatatatagtaccttacctgtttccgtttttgacgcaggggttgtcagaagaagaggtcagggcagcagctacttgtgctcgagaagaagttgtgatcagaaatagatttacggaaatgaatgcgccaaaagaaaattcatctgtcaacaagtaagggcattagtcacacaaaaaatgattaaaatagggaattagcaaagtactagttgtaactcataattaccaatgcagctgaatacttaaaaagtatgtgcttatctgtaaaatgctgataatcctgcacatccatatgtgagagaattctacagatcacaagattaggaataggcgccgtgggtgatg

SEQ ID NO: 26298 - DNA, 3003 bp, Unknown
  misc_feature (1)..( 3003): 2750-1469P.txt file - cDNA_ID_2712246; gDNA_ID_2214556; Annot_ID_134787
tattttcttgctaataccttcaataccaagtgagacgattccaagaacgatagagttaagcatcaatcccaacgcaccaacgtgaatcccttggttgtatagtttcttcattttgtcatctccttttgagtctccaccgtacacttcacgacccatccaatcggtatcgtataaaagaaaagggaaccatgcgatccagttcaaggccgtgacgattaatagcatccacattggacgtttcatcaccttgaaagctccaaagatctcaccaaagaacggagttttctcgttgtccgagtctgctttaggcgaccattgcttgtcttccacgtaccaaagagctatgattgtgacgactaggaggagagtgatggaaaggaagaaacaactcttgagatttgcgcaatatatgtcacatgctttagtcattgtgaaagggaagatcttgtagaggttagtgtatgatcctgccgcgtatcccaaaacgttcccaacagccatgaagaaagagaaaaacgcgtttgctgttcgcgttttcttagcgtctccagcggctaaatcaccgaggaaagcgcgacaaggtccttggagagtgttgttagccacgtcaaggatccagaaaccgagagcgaagataacaacggctcgcatcttgacaggtttgtcgattttgtctcccatgctgtggccaaaatcagctgcgtatccgattagtacaacagcaacagctacaagcaaggcgcctgtggcgatgaaaggacgacgacgtccgaatcttgacgtgcatcggtcgctgaagtaaccgacggatggctggacaagaagaccagagacaggaccacatagccatatgaaagatgaccatttgtgtgggactccaagaagctgcacgtatggagttagcagagacagctgaagagcccaaccgaactgaataccggcggcaatagaagccactgatatcatctttctcagcggagatggtccatcaagatccgccaacgacgaggaagactgtctatctacagctaccacatcgttttttgcttggaggtcactcatcttcttcactttgtcttagaggttgtgtttggtgttggtgatggatgagatgaaagaaacaaggcttgtctcttagagacaaggtgaagaagaggaatgagacttatatatctaaatgttttgattctgtgtttcaatagttttgaaggtaaatcttttatagtaaggctataacgcatatatccttataggattgttgtaataatgacaagactaacgttaatataacagaaatcggtttattatcttatctttatataatttattttgagatcgtgacagatttttcaatttcttgtttctgtaatgtatgacttttataaatgacaacaagttgtaaatgattttgacttattttaggtaaattccatgttcaataacagattatttggaaaaatattttgaaatcaagagatttcaaataaaaaccaaaatcttctaaaattcttaattcaatacacccccctaaaaggctaaaacataaaacaaaatctaaagaaatcagatgttaatcgacaaacaaaatataataacaagatttagagttttctcttcgcgaaagaattcaagagaagggtttaaggtttaaggttaagagtttatggtttatgctttgattttaggttttattatagtattctcattatttaagggttgcaaaaaagtattggtctaagtaaacataatattttttttgttaaatgtaaacttaacattttatgagttgtatgaaaagcttagagaaacatttcgaatttgtaagatttaatcgtttaaaagtcattttaacaatcattatcattccacacatcttccatcagctcaaatggtaccatattttgatcacgttcatgattgcccctctcttagcctttttaaactcttacggttacagactcactgactggtccgtagtccgacaatatttgccaatgacaaaaccgaagcaaagatagaaccaattgccaaaacactaacacctttcaccggtctcttaaatccttatcatacacaagcttatctcaaaagttctaatctcaagcttttatattaagttcttatttcttaatcatattctaacattttttttctttaatcttattctaacattaatatatgatcgtttgattttaacgtcattactagatagagaactattcttctatatatcttcctaagattagagttagtcaaaacaaatacatatttgacaatcgtttacaaccaaaatatcagattattaatgcaaaatctctcttaaataagaaaagaaatccaaacaaatccacaaagctctgtcacttgaataagaaatttgcataagtctatagctacactgaatttttttgtacaattttttttttaaaaaattagggaattaactgaaaatgacataatggttaacatagaactaattataggttacgtaataaatagtctaatcaaaagttttgtgtataaatctcactttttttaatagataaggtaggaaaaagaataagatagaaaacacttactaaaccggattgatcctcggttaaggagaaattcggttttgaaaaaattacgaggaatatcccaacgaacataataatctgacgaaaggagtcatttttggtcaaaacgaagaagaacaaaaaggtacaaacactttctctctgatcctttttttttaatttctttttctcaatttcaatcttctcgattagggtttggaattgcccttggaatgttgaattttaagacttcgctttgatctgtaaactaatttcagggtctcatctgaattctttgttgatttgagatgagttctgggtttttgctaaggatttgtttttatgtcttctaagcaccaaaatctgctcaaaaagtctgtaaatttccaagcaagttgtttactttttcatagtgttgatttgatcttctgcagatcaaattatg

SEQ ID NO: 26299 - DNA, 3000 bp, Unknown; identical to SEQ ID NO: 12524
  misc_feature (1)..( 3000): 2750-1469P.txt file - cDNA_ID_2712250; gDNA_ID_2214556; Annot_ID_134786

SEQ ID NO: 26300 - DNA, 3003 bp, Unknown
  misc_feature (1)..( 3003): 2750-1469P.txt file - cDNA_ID_2712266; gDNA_ID_2214556; Annot_ID_134781
atacatatacacgtcctttatgtacgtgtgtatgcatgatcacatcattacttcattagtatggcttctcgttcacataattcccacgaggatcatagttgcaactgattatggttccaccattgttacacctcactttggcacatccgagtctcactgactttctccaaacaacttgagtgtagtgaccacaaactccattgcacgtgttcgcagcgtagttgtagttagccttctcgctaacccacatgttcacggcggagacgccagacaagtcaccgctaccccaggctaagttttccccgtaaggcccaccagagtgtatgagtctgcagttgcctcttagttgttctgcgtagctccgagcataggctgcaaccctctcgtcccactgcatgggacctacgcctaccgctcctcgtgcctggttgtgaacccttagataatcttgtgggctatcttgagctttcgagggaagaacaagagcacctacaagagctacaaagacgattaaaaatcgagaatagccagtaaaattcatttttctaagttgataatggttattgttgtgttatgattttggggttcgtaaacatcgcttatatagagatttgaaaactatttttttctttttttttttgttaactatagatctcacgtttttgtaaatacatggtccatgtgtgagtattttagtaatattcattgcaattgtccaaatgaatagaagttgttttcgtaactatttttttgtcaatcttgtccttacacacatttttcctaatattgtttcgtatcggtagctttgccattgttgatatatttttttagtatatatgtaagtataccctaaatgaagtttattaagaaacattgtatatagttgtttcatgtcattcagttgttttgtgttttttttttcttcatgattctaatttaagtcttctatttcaaatttgaatttcatatattacttcattcaaaatgttttgaagatatcttcctgtaaataatacagaaaaatcgtatcggacagtttggcaattaagattatatttacagtcagaaaaaataaaagtttatatctacagtcaattttcaaataaaagaaaaaaagtcaagaattatttgtttcttagtgtttcatgcatatgagtatctctatcactcttgcctatggctgaaaagtcctgaagaatatatgccgccacatctatgacgtaagtaaaatagtgacgtagagaaacagtcaatagatcacccattgagatttatccaaaaagaaaaaaaaaaaaaaaaaaaaaaaaaaagatcaccgattgacattgtatacactttgttttttttttccaaacactaatacgcagtttaaattgaaaaactctaggtgaccgatctacttttgtgttcttctatcttcagtatacctaattttgtaccgccttcgtatatcatttaccaattttgactactgatatgcactggctttaaaattttccaatcctgatatgaatctgtgattctaagcaataacatatactccctccgaatcagaaaaattgattttttaaagtttttttgtattaaaaagattgagtttatgtatatttttatcaatcaatattaaaaggttatgaatttcaagaatcaattaattgagaattttaaaatttgatgaattactattggttaatagttacgagaaatagtttagcatgaataaatagtaatttataactaagcattattatttttttaatcggtataaacattctataaaatcaaacttttttatatggagggagaatcattttataagttaaaacaagcttgtgctaacttataaaatgacaccataggatattattacgtaataatatcctatgatatcctattcaatattatatgttattaaaatataaagtaatttaagtagaataacatgttacattaggtaaacaacgtttcaatattttcaaaaaaaaactgttatcagtccaaaaattaacaaaatagtttaaatttaaactctaagttccgatcataaaccttaaactctcaaaactagaaaagactattgtacttttcttttgcaactaacaattacattttttttttgtcatcacactatagaaaagcttttaaaaagatagttgtctcctttcgaaaaaacacgaaaccaatgtaaattagaagatagttcgcatattgatttggaaaagtcagtcctaagattgatgaagcaaattagagtgagtgtttcatgaagcaaagtcagtttttggaagcttttctttggattgaataaatccccacgcgatgatatgttatctctctgcatgaaagtaatgaataaaccttttcaacaatctattaacaatgcaaagacttctaagcaagaaaagtcgtataagttttttctttttggtaaaatttagtttaaaatcgtgtccgttgtttatttgccagatggcattttctattagatttaaaatatgtcagcaatctatttaactttaatgcgaacggataaaatgagattttagcggttaacttgatcaaaatctaataaaaagttacaaactaaaatgaatgataaatgaaggttacatgcatggagaaattttttactttgtaaatgacttgctgcctaataaaaattagttatttttaatatttaaaagaaaacataatatgtaagttaataagtatgaattgtaaggaagcaaacattcttacgttttgaaaaaagaaaacaaaaagattcctacgtaagtatgtattctctttgcttctccacaaagatattctttgtataggacacaatttactttaaacacacaatacaatatgtatatatactaatcaatgatcgttatatatattctttgtataggacacaatttactttaaacacttttcatgcaatacaatatgtatatatactaatcaatgatcgttatatatgtccatcgtactcaacctcaaacatcttaaataatg

SEQ ID NO: 26301 - DNA, 3003 bp, Unknown; identical to SEQ ID NO: 26300
  misc_feature (1)..( 3003): 2750-1469P.txt file - cDNA_ID_2712266; gDNA_ID_2214556; Annot_ID_185731

SEQ ID NO: 26302 - DNA, 3003 bp, Unknown
  misc_feature (1)..( 3003): 2750-1469P.txt file - cDNA_ID_2712293; gDNA_ID_2214557; Annot_ID_134792
ctgattggtctgagacattgaaatccttctctctttctcgtggagaaagcgatgcgttcgagtcactatcatcgtttctgatggaatctgtctctatccgtacctctcctgcctccatatcatttcctttctctctctctttcattagaggttcctgattattgctacctaaatcaacaagaaaaatcactaagaattatagaaagcctaatcatgatcctgattaggtcactaacaaaactgtaaaatgtcataccttgtagtggcctaggcctaccatcaactacatttctccacaaagacgtaaatttagaatcattttgagattctgatggaaaagctctgtgatggaagctctcatggcggcaaaagaagatatctttagggttagtctcagcaaactcttgttgaaaactatctcctgttaggtttggtttctcttccaacggatcgtaaggaaggtcaaatgggtttcttcttggtaataaaacggaaggtgcagagcctggcatgacaagtccatcgatttcgtagtttcctttatcgaaaccataaaagtttcgaccaatacaaatccgaggaacttccatatcatccatcaagcttccttcagctgcaagtaagaaaaatctccttgaccttcttctagaaatcaaattctctaacctcttgtttcgttcgatctcagatgtcccaagatccatcaaattcttctgatcatcctctgtccacgccactacaaccttgcttacatcttcacgcctttcttcttcttccttttctccttccgatgatgatgatgatgaacattcaacttcactttcatcatcaccatcaacacttattagcctctctaattcaacaagatctctgtgattgtcaagaacagagtcaaatacgttttcttctgcaacaagcaacgtcctttctctcttgaatttctccatatctggtgtaatcgtctccggtaatacttctccatagagagtagtcagaataaccttacctctctcatcctcactagcttgagacgaatcccaatctttcccaacctcttcaactttccttcttgcatttcgtctaacactttgttgatgctttaacttagccttctctgttcttccctcttgagaaatcgtagataacccacgatcctttctcttgtcttcatcacaaatcttcgaactcagatcatgattccgtatataaaacgaagcaaaagctatcaaaggagaagaacagagcaaaaaatagaaaacccaaggaagaaaagtgtacaagatgatcaaaaacgtagaaacaccagaaacaattgggtatctcttcacgtatctgaaaattgttttcgttgagaatctaagaattttccaaacgataaagcaaacatctttagcatcaaattttcccattttcttctccttctagtgaatcaaacaaacctgaaacataaaaatcattataagacctaaaacacacacgaaatgatcaaaggtattgaaggaaaacttcaaaattgatgaagaagagaggtcaagcttacctttgaaatgattaccagtcaaaatagttttggaggggttttaattgcagatttagaaaaaaatttctctgttttcttaaaaacatgatgtcggtgtggtagagaggggatggttttatgtacggatcggatcgtgcggggaagacaaaatagaaaaacaacgagggagttagttgcttacatgttgtttttcaaagatattattttcttcttattacatacacttttgaatttgttgatcgtgttacttacataaaattgcaggttaggtccctttgttttcgcagtttttgcaattatttctcatatttcttaatattgggcttttcacatgtaataagcccaacgataagaccatgacaatttctatacgaaacatgatataaattctttggatatacattatgaatttacgatatacaattagtttgtttaaatatcaaaatataaatgcgtcaatggttgttgttacttgtgagattatctttctatttaagaagaataattctcttcgtagataaatttttaaaataattttccgagttttctaatgtttctagatatgatttgatttgaacaattaattcgtggttctttgaatgaatatatcgactgtatttgatttcagttaaactgataataattgtcatttacgtctcaaaagaattgaaatatcatgtctctcaagatatggacttacatattgttatgcattatttatcaaaatatgtggacaaaacataatatcaatgtcgctttcagaataattgaacaacagatattgagaaatcaatttttatggttatatcaattgtcattgccaacatctattacatagtaacagtccaatttacattacaatggtaattcaatgaaggtaatttactttttattggtttactcgtgaaacgacgttctcctcctcacgtaccttatcttaatatcctgatcaacggacaccaattttcgacaaaatatctgagaaagaggacacgtcagcaagcctttcgctttaggctgcattgggccgtgacaatattcagacgattcaggaggttcgttccttttttaaaggaccctaatcactctgagtaccactgactcactcagtgtgcgcgattcatttcaaaaacgagccagcctcttcttccttcgtctactagatcagatccaaagcttcctcttccaggttcgaatccttgatttctccatgaatgtgcatggtagtccaacaattgtcgatgtttttgatagagagttttgtagattttctccggcgaaattccgatttgttcttcaatattatgtgcatgaaactttttttttaagattgtgcgtttagatgcaatattcgactctttgttgttctcatgctcgtcgatttcgatgtgtttctgttaatccattgatcgtatcggaaactgtgattgattgattcatattttcgtttgtctccagctatg

SEQ ID NO: 26303 - DNA, 3003 bp, Unknown; identical to SEQ ID NO: 26302
  misc_feature (1)..( 3003): 2750-1469P.txt file - cDNA_ID_2712293; gDNA_ID_2214557; Annot_ID_185752

SEQ ID NO: 26304 - DNA, 3003 bp, Unknown
  misc_feature (1)..( 3003): 2750-1469P.txt file - cDNA_ID_2712303; gDNA_ID_2214558; Annot_ID_134836
cccactggataggtgaagagagaatgttatgataaatattttctataccataaaccatctgaaagcaagtaaaccactagaaaacaggatgtccagacaaactgaaggcaaactaggagagattcatgtgactagaatccaacaaaatcttttccagtaaggaactaactttcagtacaaaaatgattaaacccaaactggtagagaacttactgtggtggaaggtcagcatcttgagaactttcactaagaatacgctcaaactcttggatattctgtttcatatcccgagtcaacttgctttgagaaggcattttagcaatactgggatagtatgctctagccacaaacagctggtccttcatttgcttcaccttggcatctttcattggttccttattttcctccctccagaggcagtagctcccatatttcacttcacaagttctccaagtttcatcaccacttactattttcctctgaacacctgtatatgaggcttccgattttgttttctgttcacagaagaaagcagagtaaggttaacgttaaatgattggtgagagatataaagatgtctactaaggaaaccacttaatatatttgtacatttgcagggcttggattggcaacaacagttggggacactggtaatcctgcagattaatggagagaccagacgtaaagtatcagaccagaatcaatataaaataatggaagaggaatttcaagaaagtgaagcttgtaaagcagacctctttttttagaatcagtgccgcttgttgcattcacatctctggaacccacgtttatgtcgcttttctagcatgtgatacaataaaacaaaacataagtatagaaattgttacaaacagtttaaccatctcacccaaggaactaattcttgaccttgcccaagacaatttgagatacattaagcaacataattcatgaaagtatttcaactttctagtctcatgagatagtcaaatataaaaaaaataaagagatcattcatctaatttctctaccctttaagcaacatcacacaaaatatacggcaactgattaactacaaccttttgacctatagtttgtttgtagtgccagtaaagtttccagattcactggctaatattagcattggcatcttgcatagctttccatgaaacgaaaaggcatctaagttttttctaatgttagcattgacatcttgcaagaatactgtggcaaacctgatacaaagcctatacatttacaaatagccctattatctgtaatcaaactacaaagcctatatattttacaccacttgaaagacaagatgtgaaacattaatgccaataattatgacagaaacatacttcaatagttgaaaattaaacatatatagaccagatctgaaatgtgtgtgtcaattagagagcagtgtgtaagataatgaagtgcttccaaccaccataaatgctttgactctatgggtacatgaaaagatctaaaatttctgtcaaaaactactaatctataacataaatggaacaggtcaaggcctttaatccacactgaaacaagtggaaccaaccttgggaagaactggattgattttttgaagaacctcatcgacccgttcggatacatctctctgcaaaaccaaagaaagaatatcaaaagcagcaaaaagattttggtataaaaaatgagaatcgaatcaatcaaaggagagtgacattacctgtgtatgcttagtagcattgattctggtaaagctctcaaactgattccaaaagaaagaagattcagaacaaaatcaaaacacaccaaaacaaacacacaaagaaacgagaaattgcttactgaagaagccggttgaacagtgacaaatcctgaaaaagtgaaaaagatgagattagatctgaaacagagatcggcagaaaaaaagcaaagagagtgttagagagagaatgataagagataccaggagagtgaaagccattgtgaagaccgagtaagaaagcaagaggaacaagcatagaaagaataacaagaaccaaaactccaatcaccagaactttccaccggcgttttcctccgccaccacctcctccaccaccgcctccgcctttcatattcccgatttagaattgaatgaaatgtctttcccaattacgaacgcattggatccccaaaacgttgccaacgatctctctatcaatgtctctctctgttctcgatacactcaaatcatactctcgtcgaattctctgtgtgtgtgttgtgttgcagaatgcacaagtataagtgtttctgcacttagcccgatcgcatcgtctctttcccctttgctttttgctacttggaggaagagagagagagatacacacacatacacacatacacacacacacacacacctctttttttttcacacgtgtggctatgtctccgccgtttattatttaacccacttgcaagatctatctccagatcataacacgtgtcttttctcacacggtggtgaattctttttactttttttgttaatcatcatcgttttatattgtcactcgttgaatcctaaactccggtatgcctagcgatatttttcaacgccattgacgacgctttatataccactggtaaatctctcctctgttttttcctattttccgatttcttctttgttaagaattctatgtatgatgaatttagctgagtgaagaagatgaattttagctgagtgaaagcttatgatagtctggtgaaatctttaatccatttaggttcaatctggtgcaagtttgtttttactgtattatgcgcctctttatttgtttgtgtggatgtaatgaagagtatggagctaaaaggatcaaattatggttttattctagcttaggctgacctgtctaaggttctcttgtctggtctgtacttttacattgacttttttcttgtgcttgatttgaatcagtgactgttcttttagttttgagtatgttaatg

SEQ ID NO: 26305 - DNA, 3003 bp, Unknown
  misc_feature (1)..( 3003): 2750-1469P.txt file - cDNA_ID_2712339; gDNA_ID_2214562; Annot_ID_134895
taagtctgtgaaaggtttcctctgggtaccatattctcaggagcagtatcatctcggtgaagtgacactggtgccatacgcggcagattcagatcagaaacagattgagctctggccccaccatcgttaaggttaaatctgcgtatcatttcatcctggcgcggccacagcaaaggggttgtgtcagcagctgatagagaggtcttgtcaccactaccaattccaccaccatgtgagctaggaggcgcagctctacctatccttttcctgacaactgaaaccttctttccaccttctctgagttgccctaaagcaatattataagcttcagctgtaattgccccttcctcagcatacttgatggcttcgcgacataaatgattatagcggtgtatcgagctatcatgcccattttcactgacatgctcatctaactctaccatgctcttggcatttcttgtccaccgtctcaaaatataatgtggtggcaaagtgagtatattagtgacagtaaacaccgtcaaaacatgtcggcagagtatgccggagtgctcaaacatttgacagctgcagtttgctctcatttcagggtagcaaaacgttactatataagctttgttgtcattttcaaaatttgcaaccctaaatgtgctggtagtaccatcatcttcaattctgtttgccgtgtgagcgaatgtctctaccaactcttcctggaactttccaaatattttccttgtaaagagatttgcagcctgattctccatgggtgatggcgtcttcaagactggaggtgtgttgacagtgtcaagatctgcttcaatctccatctcgaaccagctctccatagccctttcgtacagcctaaagaacatcggaagggttgtctgctgattcacatatccatcgaaaaaggaacccgaataaccttggctaggaaacactgcagcaaaaaacgaatcccggaaataaacaggtacccactgagctcgagcattatataaagaattaagccattcatgtcttcctaagtcatatttgtcaatgacagaactccaggacgattcaaactcctcaatcgtttcagtaaagttgatacaattatatagctccacctgaaaactaggatacgcaagacacacatgagccagcttttcctgaccttctcttagcacatcccacttattaatacagtgacgagcacctggaaatacctgaccagcagcaatctgtatggctctatcttgatcagtcaccaaagaaaccggcggttgatctctcattgctgttagaaaagtcttgaacagccagataaatgaagtgtctgactcgtccaaaataagtgcacagccaaataagatagcctgaccatgatgattcacaccagtaaatggcgcaaaaggaacacgaaactgattgcacctgtacctcgtatctaaggtaaccgtgtcaccaaaatgagtataagcaaccctagatctcgaatcagcccaaaacacatttgacatctgattatcttcatcaagctgaaccgcatagaaaaagccaggattctctgcctgcatcctcttaaaatactccaacagattatgtgcatcccgtccaatcgttctcttcgtgtttgtagccatagacgcatttctagctcctctgctattagcatccatagaaacatacatcataccactaggcacattaaccccttcttgataactagatttctccgagttagcaaaatgcctacgaggacgaagacaatgaagcatattagaacttgctaatccatgagtatgctctttaacaaactttgtaacaacccatttctcatgaccttgcaactctatcctaaccattgcatcacaactctcagaaagccttctctttgaccttttactactactactacacacaaattctcgaacactaacagacccatcagttctaggaagaagcttagaagtaaaaccaagctgcctcgagtactcatcatagaaagatttagcttctttttctgaattaaactccataccaacacatggctctgcaattccaatctcatcttgcacccctaacgagttatccatgttgttctgtccactgcaatcactaggttcaacatctccttcatctcctatctcatgattccccattgacacattctcttccaccaaatgaacatccataaccttcacttagtagagaagttctaatttcacacaaatgtttctcatcttcatagtctacaaaaaagtactattagtgtttggagatcttcttccgaacatataaatatgaggactttttgcatctctcactctccgattgtttgttgagagagagagaaacccagaaagaggagaaagcaaaagagagaaagaggagcttacgtcagtcagtgatgcgaagaactcagaactcagaagaatcgaaagtcgtgaaattagggagaagggcaacaacaattggggaaaattgagaagaagctatggcagctatttcgttttcagattcgaccggaggaaattaaactcctgcttcttctcagtcgttcgcgaggaagaagagattcaagcacgaaaccgacgtcgtttcgtgcttttgttggtttttttttttcaatttaaatagcgagacctcgttttaatctaaacccaacaacagaaagccctcataaaaagtgaggcctcatttgaaccgaacccaacaaccaggaaagcccttgatacaagagacaacgcgcgcgaaagcatttcatcttcttcatctgtcttttttagttgagccctaattcattttcggatgacaacttcatttccttgtattgtcgtcataagaatctcaggttctagatgattctctcttctcttatttgatctggttccatctcttcaccgtaccagtgtcaatcacgaatccctttgttttgaaccctaatttatttaatacgcaacacaagcaatcaatacaagagtctcttagcatcatcggcgtgggccaaatatg

SEQ ID NO: 26306 - DNA, 3000 bp, Unknown; identical to SEQ ID NO: 12619
  misc_feature (1)..( 3000): 2750-1469P.txt file - cDNA_ID_2712343; gDNA_ID_2214562; Annot_ID_134894

SEQ ID NO: 26307 - DNA, 3003 bp, Unknown
  misc_feature (1)..( 3003): 2750-1469P.txt file - cDNA_ID_2712347; gDNA_ID_2214562; Annot_ID_134893
atcacggcgcactctattgaagttttcaaagcttctaacaagagtatcacttgtgggttcatcaaactcatcatcatccgaatctctggactcttccctttcttgaaaagaaaagtcctcaccatcatcttcctcctctggagttccatcttcctccttaacagatctcgacacatgaccattcccaacatgagaagaagaaaactggttgtcaattggatgagaaagaccaaaataatcccaaggtgcttcaggtggcatggaagaagattcctcaaatggggttgattccatcttttctatagacctgcttggtgggatactggatgaggtaacagtggcaataatagatactggtggtttctcttccactttttttgaagaaaaccctttgaatttcatatgattgacctggaacggactggtactaggaggcgacggaggaggagaatacgtgtcatggtgggaatgtgaagcaggtggaggagagtatgacaaatgagaaacagatttctcgattaaagcaagaggttgttctggtgttgcactagtggacgtgtacaaggaagattcaactggaacttcagtctcagaaaatttcctgagggcagttccggtactcttaagagactgaacgtatgaaacgtgagcagcagctaacaaacatcttccatcgagtgcttgttggacgaatttttttctttctcgacataactgtaaggctttatcttcatctattctggatgttgatgcacccattgtccaagcttacatgcaaaaaaaagagtaacatgagttagatttacaacctgcagaactactagaatagcttcaaattcagaaaaagaaactttaattagtggggagtgatcatatgttaattaggactcactaactattccgactaggaaattttctgttaagtggttttggagattctaataaataggaagcaggacgatggatagatccatcctgcgacataggcttggtttagaccgagggaactgtgttctgtattttggggttctatttcagttattgatttcagtaaaatagtggttctgattatattctagtgatccttaactctaacaaaaacaaacacaacaatcacaaaaccacttcaaaaaaaaaaaaagtattaaagcctctcaagacactgtattctagggatcaatgcactgacccctggcaagacccgatcagaaataaccaaaacataactagaagagagaattaagtaatagcgagtcatctgttccactaagttatctaatgcaaaggtgtgagtgagagtatcattgtattcatgttgaatatgagagaagaacagtgccctttattaccaaattgcatcatgatatataaaacaaatgaaaattacgcattgcaggatatttgctatttagcgagacatgatcattctctcaaatctcaaactcaaatctcatgcctccgtatatagaaaaaaacaaagaaatcccaagcaaacacaacgaagatacataaattaaatccaaggcaacaaatacaaatcaagcttatgttgctcccaacacaacacaaatcaatcatacataccaaataaaaaaaaccctcaaagcaactatctatcaacaattaaagaacaaatttccactttgaaatcctaacacaatctaacctattctcttaacttagtaacctgttccgccgtttaaagttcctcaagcaaaatccttatggaaagagtaaaactttcacagaaccatcggatagatgacaaacaatcagaatcacataagaaggcaactttttcgtaatcggaatcccaaaatagggcgagagagaatataaggagagcataaccaaagtcataccgcagacaaaacacaaaactgattgaacaaattaagaagttttcttagagtaatcgaaaatcaaaacctgaaaagtgcacgaatttgacaaaaaagagagatttttatagaaaggtaaagaaacccaaatgaaattggaccattagagtagaagaaaacctagaaaaggtgagatttttcacacaagtagaagaaacaacagtaagatggagaaacggtgatacctaaagagatgtcctttgagagctttggagttacgcgagaggatcaaacccaaaagaaaacaaaacgtcttcttctacaggagacgaagaagaaggagagaggtggtctgtgtcgtgtgtgagtcagcagcgaatcagatgggtagagagaagagagagagagagaagaggaatcttatgcgagaggagaaaaaggagattgtgtgtgtatgtgtgtgactaccaacatgcaataaagcatttgcttgcttgtaaagacgattttgacggatgactccaaaaacggtaactttctcttgccgttgttatttctactccggttacttttcttacaccttttttttgtttgtctttttatttttttaaggattcattagtttatgataaacatccttaatctatggtcttagtcaattgctttacaaaacaattttgttacatgtcaactcacattttagtattttactaataatcaaatccatagacagattatgaaaaaataatccatagtgatcccataaaaaatagaaactaatcttatcaaattgacagagatactaagacttattattggcttaatttacagaattgtttgaagaatttttctggaaatgatgggaaagaatctgactgaaatattaaaatagttttgcttcgatgaaatggaggaatagtcaaaggtgtggacaaataattaacatagaaatccaaatactgtattttcataaagacgaagatgggcctctgagagtaaggcctatttatgaagacgaagatgggtctctgagagtaaggccctattggaaataaagctcactgtaacagtaacagcagcaaaacccgtaaaggtagagggagagacacagaggcttcgagtgaaatcgtacattctccgatttagggttccgaacgaaatg

SEQ ID NO: 26308 - DNA, 3000 bp, Unknown; identical to SEQ ID NO: 12606
  misc_feature (1)..( 3000): 2750-1469P.txt file - cDNA_ID_2712355; gDNA_ID_2214562; Annot_ID_134887

SEQ ID NO: 26309 - DNA, 3003 bp, Unknown
  misc_feature (1)..( 3003): 2750-1469P.txt file - cDNA_ID_2712373; gDNA_ID_2214563; Annot_ID_134906
ataaataatcggaaaacgtttttatcgtcgtcaaattagtgagctcagaatacgactcattaagtcatgacaatctgataaagacacaaaaagattccaccaaccggttgatttctggttaaataagaaaaaaaaatgtttttctttttactgttgaaaatattgagacacaagagaaatacacacaaaaattgagagctgctaccatgagtccatgaaggccaaaaaagcccgaagacaggggaaggtgctggtcaccgtcagttatattatctaaccatttctaaagattattaaaaatattttatccaccacaatgtgtgatccgatttacatcgactcacttaatgccttcatttaccgcacttgttaatagacgtcttgttcttcaaatttgtccattttgtaaaattgtagggtcaaaagttgtgatgatgaagttatgaatgtgttgaagaggaggaggggtcctctatcatcaaagagtcatggacggttgtgctgaagtttcatgagacaagatctcgatggaagatctatttgactctttttttagggtttttttgaaattgaaagcatgtcttcccgacacatcgtgcattacaatttcatgatcactccattaattcatcaaatcgcttttatagtcaacgccatgatcctttgactcttgcttcttgagctctacgattgctggactcaattcttttttccgatagtttttcagtatggtggtacatatatgttttggtggtacactagctagttttgtacacataattttgtggcggtaaaaaggtgaaacgtgcaatattagtttaagaaattgagattactaggatccttgtatcatagccaatggtatgtcaacaaacaaaaataaaagccatagtcttatacaatggcggatccaggaaataattttatatggagcacaattataaaaaatcaataaaaagacatagcaaggcttgaacttgggttaatgtggggcaccattaagtaaaataccactacactacatacatttttaattacataatgcaaacttatataagatttatataattgagtatcgggcacatgccccacccaagaccaacgtgtgtccgcccctggtcttatacattgtcatattgctgcggataacaaataaaacaacaaaaattgactgtatagaaagaaaaagaaaagagataggaaatgtggaaagtgagagagcaatatggaacccactagacccataagagagtattggttattggacggacttttcatgtgtctaccatactttggatacgtgtcgtccatataaagatgatgattgatgatgatagtggtgatgatgggcatgaccatgggaggcaaatctttggcagagaatcaagtgaacattgccatgtctttgccactaccacactacctaactatttagtaaattttcttattcttttgccaacgaatctgatcgccaagtataatacgatgagcgcaaaacactatttcacatttaggttacattttttttatttaatactgttcgtagatgtaaaagcatttaaaaatagtatctataatacttagaatataaaacatcatttatactatatattttatattgtggatttttaacaaatcccattaacaagagatacttgtagcatgggaacttacaactaaattaccgttatactactattttcctctctaaataatacattcatctcttcttatttatctccaaccactaaaaactttgactggtcatataatttttatgttaccaatcatcataattaagatttaccaatttaacttcacaaaaaaaaagatttatcaatctaatttactgattgagtattacaccagagaccaaccacatttgtactaaaagtgagaaaaagaaaacataaaaattatatccaataagtaaatgatacgcagcaaaacacgtcacatcgactcgcatatgaatacacaaaccccacaacataaactgctaaatagaaatagggacgatgttgtggtccgacgaaaatcttttccactagtcactctttcaatcaggaccattacaaattatttcgaatgtttgtgcagagtataaataaaaacaaattgaatattgtaaatacatcaacgatccaccgtaaaaacattcaaaattctattccttttttttttttttgggatttaaaccactcttaacattcaaaattataagcaaattcttaattaggttcaacgattatttgatcggtgacatcccagcagctcaataaacatatattaaaatcgaaaataaaaaatactgtcatcacaaaaactcgttattatttaatctcttttaaaacatcttgttttcgaacatcttgctaactaatgtataagtttttttgtttttttaaacgttaaactacaattctttttgacaatgaacggttttttctatatatatatattttcaaatggctgttaaaacccaccaatagcaatgcatgtggttgtggtagtatacacattattaaatccctcatcctcttatcttaaaaaaaaaaaaagtctttggtgggctaaacaaatcctttaaaatcttcatatagatttctttccattatttattttatccattatcaaagtcttttttttttttaaatttctttctctcgttgtctccttggaaattactttcatcatttaaaaaacttgcttactccgtaaaccaaagctagatccaattagtcttatttcctttttattcgtctctctctcactatccgagatttgggttgaaaaatacaaacccccttttatttctcctcttctctcctacaagctcattcagaactctcaacatttccggtagagaaaaaaaaaccgttttttttttaatctctttctaaagaaggatatcaaaacaaaacacaaagttgaaaactttgcatctgggtttgtctattttagattcagatcttagtttttttcgattgaatatctacaatg

SEQ ID NO: 26310 - DNA, 3003 bp, Unknown
  misc_feature (1)..( 3003): 2750-1469P.txt file - cDNA_ID_2712377; gDNA_ID_2214565; Annot_ID_134931
acattattttcatggaatttgtttagctggactgtctggacctgaaagatctggcagtatcgcctctcatttcgacaagtatatgaactcggaggctacattcaaggacttctttgagctctacatgaagtttctgcaatatcgatgtgatgtggaagctaaggatgatcttgaatatcagagcaaacagcctacactgaggtcttctttggctttcgagaaacagctttccttgatctacacggacgctgcttttaagaagttccaagctgaggtacccggagttgtttcttgtcaacttcaaaaagaaagagaagatgggacaacagcaatattccgcattgaagatttcgaggaacgacaaaatttcttcgttgctttgaacaacgagttgttggatgcgtgttgctcttgtcatttatttgagtaccagggattcctatgcaaacatgcgatacttgtacttcaaagcgctgatgtttcccgcgttccgtctcagtatatattgaagcgctggtcaaagaaaggtaacaacaaagaagacaaaaacgataaatgtgccactatagataaccgaatggcacgttttgatgatctatgtaggcgctttgtcaagctgggagtagttgcatctttatcagatgaagcctgcaaaactgctttaaagttattggaggaaaccgtgaagcattgtgttagtatggataattcttccaagtttccttcagagccagacaagttaatgacaggtggatctattggcttagaaaacgaaggtgtgttggactgtgcatcaaaagtgtccaagaaaaagaaaattcagaagaaaagaaaggtgatttttagattcttcaatcttatgagattatttgtagtttgctagccctggcggaaagatctgattgattatcttgtgtttaaaggtatactgtgggccagaggatgcaacaaacaggtcagaagaacttcgccaagaaaccgttagtaatctgattttgccatgctattatatctgaaatctcccattttcttagcagtgttattattcatggcaaattattttcatccaaatacttgaaattagtccatgcaccctgatactattaggcttatttttcatgtgcaggaacaagttagctccagagctcctacgtttgagaattgttacattcctcaagcaaatatggaagagcccgaactaggctcccgtgcaacaactcttggggtctattattcaacacaacaaactaatcaaggagtgggtgcacattattactctgtcattttgttgtctaacaatttttatattactgtttcattgaaattgatacactgttcttgttattctggcagttcccatcgatttcttccatccagaatggttactatggacatccgccaaccatacaagctatggtgaaatgctttatctatctcatttttagtttcaaagcttttgttataacacatgcaaatccatatccgtaaccaatatccaatcgcttgacatagtctgatgaagtttttggtagttaagataaagctcgagactgatatttcatatactggatgatttagggaaacttgcattctattcatgaacgaatgagtcaatacgagacacaaccaagcatgcaaggagctgtgagttgatgttctatgctatttaagtatttttcgggagatatatatatcttattgttctcctcctcccgagtcaagttgttctaagaaagaaggatctatttcattttgtggattgtctagtttcagggacagacggggtttaggggaagcgctatccgtggctgctatgacatcgaagaaactctgcacgacatggtatgtaatcttgtgacgttagtaaaaacgctctaatgttacaaaagaaagaaagagaaaacgaacccaattcctcaaaatgttttcttttgacaatgtcaacttcttccttctcgggtttttatcagtttgattgaagcgagactgcgaaattcctctgtttacagtagaaaatgtgatcagccctatttataaccgttgtatgttttccggtttttgtttgtgcagacaatggggtcctcacagtttcagggatctgattcgagccatcctagtgatcaccgcttatccaattaacagaacagaacaagctcaagagttgctactttcatatctttaaaatagtggaatgttttgtatgtacagaaataggaaaggtctaaagtgtggaactggctttgaggtaaactcttactctgattggatttgcttgtatttataccggaatcataatataaatatatgattaatgtattcacattctctaatcttcttttagacttgtagttaccattcaaaagtcatggacaaccttcgttaaccttgagggccactgagagacaaccttggacttggtcactggctcacttagcaatattcagttattcactctgttgtatataactcaccaattaaattcaaacaactaattcaaaacattatactatagcttttcattaaaaaaattccaaaacattcatttaattatataaaccaaagaacagcttttaagacttaaaatatttcctaagtatccaacaagtcaatacagattttttaagaaaactaaaccattttttcaactttacaacaaaaacaccaactgttacaaaaaaactctcgaatttcctatttctccagccttatgacaaagatatcagattaataaaatttagaattcattactttttcttcatttttaaaattatctacatactatttatttctctccattttattcagtgagaaaataaaattacaaatgcctgaacacaaaaataaataaaattagaataatcagtttcctctagaggatattcttcgtcacaaaattaaaaaaaaaaagagtaggagaagagggaagcgactagcaccttttgtagttttccgtttattttctgtataaggcgggtgatttcggctccttcatcggaaattatg

SEQ ID NO: 26311 - DNA, 3000 bp, Unknown; identical to SEQ ID NO: 12685
  misc_feature (1)..( 3000): 2750-1469P.txt file - cDNA_ID_2712388; gDNA_ID_2214566; Annot_ID_134958

SEQ ID NO: 26312 - DNA, 3000 bp, Unknown; identical to SEQ ID NO: 12685
  misc_feature (1)..( 3000): 2750-1469P.txt file - cDNA_ID_2712388; gDNA_ID_2214566; Annot_ID_186010

SEQ ID NO: 26313 - DNA, 3000 bp, Unknown; identical to SEQ ID NO: 12683
  misc_feature (1)..( 3000): 2750-1469P.txt file - cDNA_ID_2712394; gDNA_ID_2214566; Annot_ID_134953

SEQ ID NO: 26314 - DNA, 3000 bp, Unknown; identical to SEQ ID NO: 12707
  misc_feature (1)..( 3000): 2750-1469P.txt file - cDNA_ID_2712397; gDNA_ID_2214567; Annot_ID_134988

SEQ ID NO: 26315 - DNA, 3000 bp, Unknown; identical to SEQ ID NO: 12707
  misc_feature (1)..( 3000): 2750-1469P.txt file - cDNA_ID_2712397; gDNA_ID_2214567; Annot_ID_186060

SEQ ID NO: 26316 - DNA, 3003 bp, Unknown
  misc_feature (1)..( 3003): 2750-1469P.txt file - cDNA_ID_2712409; gDNA_ID_2214568; Annot_ID_135017
ctggatttagttgcatatatagagagaatttcattagctcttgatgaaaactagggatttagaaaaaaagagatagacaatcaaaatgagctaaaagctagagaagttacgagcatttcagcagaatcgtaaagcccatgctctattaaagtcgcgatctgctcctttggaacctccatttcagagacaagagagttcgtcgttagtggcaatggtgaagttttttcttcggagcagcgatgaagtaaaagatccttcacgctcgctcttcattttgaaacaagaaatctcgaaccgagtcaacccaaaccgacattaaccggttatctatctgaaatccatctcggttcattaaaacccgacttttccaagagcccgacttcaccgaacaatctctatctccggtcatgcctccattaccgtcctccacggcgccttcgtcttcgagacatcttcgatcgccggaaagtatcgcgaaatttgcagggagagcaatatttcctgctttacaggggaaatcgtgtccgatatgcctcgaaaatctaaccgagcgaagatccgccgccgtgatcacggtgtgcaagcacggatactgccttgcttgtattcggaagtggagcagcttcaagaggaattgtcctctttgtaacactcgttttgattcctggtttatcgttagtgattttgcttctagaaaataccataaggagcaattaccaattcttcgtgatcgtgagactttaacttatcatcggaataatccttccgatcgccggaggttatctctctctctaagatcctctctatgaagttaaaaatcacttctttattatattcacttggttattatttcattaggataattcaaaggtcgagggatgttttggaaaactctagctcaagatcaaggccattgccatggcggagatcatttggacgaccaggttcagttcctgattctgttatcttccagcgaaagcttcagtggcgagctaggttggtttactattgattctaactctatagcttcatttgcaatctcctttttcgaagtgttagattagttcgccgttgtttctaactagtgttggctctaaatacagcatatacactaagcaattacgagctgttcgattacattcaaggcgcttggaactagtaagtttcattatacaatgtgttcttctctgtttgatgtttgtagtattggggtttacactcttacattattggatatatgttcacattggaagccttatatatacctgcttcgttgtgtcatcttggattattgtagagtttggcggtgaatgattacaccaaagcaaagataactgaaagaattgagccatggattagaagagagcttcaggcagtccttggagatcctgatccctcagttattgttcattttgcgtcagctcttttcatcaaaaggcttgagagagagaataatcgacaaaccgggcagaccgggatgttggtggaagatgaagtctcctctcttcgaaaattcttgtctgataaggtggatatattttggcatgaactaaggtaagatttttatacgctagggttttttcagagtttcaagtagttacaggtttagtatagtagtacagaaaacacataggcaacctaaacctagtgacttgtaagtctgaacagatgatagagctgatatctgtttggtttaggttttttggtcatatactatttctgatgagaaagaaaacatttttcagatgttttgcggagagtatactcacgatggagacttatgatgcagtggttgaatacaatgaggtggagtaatagcagtaaaaaaaacaggtaaagaaattaggatatgtattatgtgggtttggtttcactaagtaggaacctgttttgcttcgatggttttttttctgaagtcattatgttgtattcgcttgcagataaccgagcactatgctctcgtcaaatgaagtaaatagacagacttacaacgcgactgttggtgtcttggaagttcaatagtggaaagactggaccaagtaagagaaaccaagagttaaagagtaggtaggaggaagatgttgagatgatgcaagtttaggtgtggagttagttttgagatagctataggtggattctcaaatagctgacacttagtctctctacttccataatgtacgtctcttctataccaaaaattctcacccccaaagtttctttccaacgcttttcctcacctcatcattttttcttacgtttcgagtaccacctatttcaacaacattaaatattttctataatttgactatcaatttttaataaattaaaactatacatagttttagataaattacacgaagcttccatagaagaggaaagttcatttgaatttctcttctaaaccgtaccttaaagattaaatggtgaatatacacggggaaatttttttaataaacaacgcgttctctattaaggtattgattgatataagtaagcaagcgggtgtaacacaaaataaaatattataaaaggcttcttctataggttggtaagcggcaatccagctgccattgcctatttgacttcccccattcgatcatggtgagctcgtcttctctcttctcctcttatctctttctctaccattttcttttgctttaaagctctctcaatcatgatcatgaagacccccatcacagcattccattcatcctcatgaataattctacatcaggtttcttctctttccctttctgattctcaacactcttaccacatttctacttttgtgttgtatatcgatttttgttctacattcttccaaatgtcagggaatctagttgaaatgtgatgatttttgtgttgataacttgatatctggtatggattgaatgattggtgattatctctgttaattcatctctgatcgtgtttctgtttgtgttgacttggaatgtggacctggtttggatagtgaagaggctggtttcatctaaggcaatg

SEQ ID NO: 26317 - DNA, 3000 bp, Unknown; identical to SEQ ID NO: 12741
  misc_feature (1)..( 3000): 2750-1469P.txt file - cDNA_ID_2712413; gDNA_ID_2214568; Annot_ID_135013

SEQ ID NO: 26318 - DNA, 3000 bp, Unknown; identical to SEQ ID NO: 12725
  misc_feature (1)..( 3000): 2750-1469P.txt file - cDNA_ID_2712416; gDNA_ID_2214568; Annot_ID_135012

SEQ ID NO: 26319 - DNA, 3003 bp, Unknown
  misc_feature (1)..( 3003): 2750-1469P.txt file - cDNA_ID_2712419; gDNA_ID_2214568; Annot_ID_135004
gttacagtaaaccggaacattagcgtcaattaatcacctaatctgatacctaaaagtaaatatatagctgcttctgtatatatgacaagaattatgacaagaattatataattctgtaaaacatttcagtcatatagagagcttattattaaacttggaaagtaatgaaaagtagtagtaataacttttttgacatgagaaaataagaatattgaaatagatgaggtatatatagcgttgatgactacactaattactcataattattcattgcacacactatattttttgtgttgacaattttactttttgaatgatcacactcgtgacaattaatgggcatgatattaaacaacacatcaaaaccgtgtacgcatcataagtcgttttcatttgttttataagagcaacccagggtccaacttatgttatcatggcacttataaccaaaaagtcttattaatattagcatttttgttagagccaacgaaaaaactagatttttttgtacggtgtgatttttattagatgagactgatttagagtatatgttttacgattgtttggtgtttaaatagtatatctagtcgacagagaagcgatatacaatcttccaagcaaaagctgattgtcgatgtagtggaaatcattgtgtgtcgtcatgagttaatgtgggctagctcatgattattgtcgtctcattttgccaatgatctttaataccatggtcaaacggcaatacctattttggttaactagtgttttacaaacgggtaccatccacaatatcgacttaagttgtatttagctactttggtcgcgataaagtagcaactttgttttccctatcacgtttttacttgcaagttgcaaacatttttattaatagttgatttcgaataatcactaaaataaacatcaaatgaaacaaaacacatctctataactttacaaggaaattaatatagtaaatatgtaaatatatttagttacttttaaatatatattaaaaattaattactaaaaatattgtgactaagatattaattttgaaaatatatatatggttactaagatattagtcaatcaatcttttcctaaaaaaaaaaatattcagaagataatcttttaacatgatcacctctacatattcaattttttttgaatttgtctttttacggacaaatgaagtggcagagagcatcaattgtactcaccattttttccactataaaaataaaaatattagaaaattaagagattttttcttagaaaaaagaaaataagatttaaataatgataaatatatatagacttcaaataggattgttggtgaaaattttgccttgctatttatacctttatagtttattagtaccgtgggagatttttgttcaaatatcatgggcgttatgataacatttatatgaattcatatgccataaattgtaattattatttttgtaaaagtaaaatgatgtcaattcaatgtccagtcgctaccaactcaatggaaattaatacatttgagtgtactaatgtgtttttcttgtgcgtgttaataaaaaatattcgatgtatgaatgattcttaactgatgtaggagttgtaggacactagctatatcttgaatcacatcagaaaagtttattaattctaagtaaatacgcataaggattgaccaattaattcacaacataaataacataaaatcagaaaaatcagttttaatatttagctctatcattaaaagtgacggattgcccattgctttccacaagataataactatcgtgacttagctaactcgttaaataagcaaaatttctctgacgctcaaaactataaaatctaatgatgtttgaatctttatcaaaaaaactagaatttgtagcgacttcgaatacataacaacaaatcaatacaacacactatacaaacaacaataaaaaaaaggatagaaagagaaactattacatgcaggtaatgtggttgcagccttcaccccgatcaactatactcatacagttttgacatttcatccatcctagactctttgttgcagcatcaaatagtccaatctctgaattcttataagccttggacttaataaactcatctcaagtctttatcttacatttttaggcataatttgaaactacattcaaggcatttggaaggttcagtctgagaataaccaaagttgcgctttgacatgagaagtgaacaagatgggttaggacattacattttgtccaaaacgtggatcttgtccattttttctttctggattataagagtcatttgatgatatcagcaatatcgtgaaaatattttaagagaataactaattctaaatcccaaaaactttgggttcgaaaacgtaggttaaagacgaatgtgttaaacattttgatcaaagttaaagagttaaaaatttatgtaacttgcaataatcaaagaaaaatagaaacttggatgaaggcataaatttagggttatgacttaaggtagaaaagagatgtagcagtgcacgtgtgctcccaaaacctcatcatcatagtgtagtgtcatgtgcataattaaataaaaaaactcactggcttgtaccattattaatcgcacaaggagtattacaaatcagttgttttcatcattctactctcatcatttcatttcctctcatcattagcttcttttttcttcccaaacttattctattgcatgatctagtcatttcttttgctaacaatttgttagtaaaattttttagatatttttgatccaaggagttttttttccaataatttttcattggtaagaacgccttcttacacctattctttttttcgtcaatttcttgcacctattttaaaaatgcaatttgatatcttttcaaataattaaataatattttctttgacaaactaaaatgatttatatatggcaaaaagcagaagcattaattaactttatagattcactttttctttttatattatg

SEQ ID NO: 26320 - DNA, 3003 bp, Unknown
  misc_feature (1)..( 3003): 2750-1469P.txt file - cDNA_ID_2712423; gDNA_ID_2214568; Annot_ID_135003
aagtccttgaggaagctcctgtgttcaacccaaccgaagaggtcagttttgttttctttttatgaaagaaaaattagggtattaaactaaattatctttggtaaagaatcatgtactcttacagaggaatatattccttttcctcttacccagtgttactgaattatcaggaattcagggacacactctcatatatatcaagcttgcgtgacagagctgagccgtatggaatctgttgtgttgttcctccaccttcatggaaacctccatgtcttctcaaggagaaacaaatatgggaggcttctacatttttccctcaagttcagctctttggaattcagaccgagaaccgaaagattaaaaaggaggttgatgcagatagtaatgatgctgcatctgaaggggttcagttatgtagagtagaacgtggtcctgggtatactttgaagtcctttaaaaactttgcagatacatacaagaagagtcattttggcatgaaggatgaggttttgggttcagagaactcatctccatcacttaaaccaaatgagctaattgtggcagacattgaaaaagagtacagacaaattgttgagagtccacttattgaaattggggtaatgttaaaaacagttgttctgcttttatatatgaaacggaatatatcactaacttgtcgtgtaaatttaggtgctttatggcaatgatttagacactgcaacgtttggaagtggatttcccttatctgcaccatctgaatctagcaaatattcatcaggttggaatctgaacagtacggctaagcttcctggttctcttctatcattagaagactgcgaatcagtttgtgttcctcgtctaagtgtaggaatgtgcttgtcttcccagttctgggtaagttttaaggttgatgtcaagctatggtcgtcaatttctgaaagcataagtataactggtcaacgcagaaatagcatttgttttgcaaactaccactagaataaattttgcagcattgtaagtttattaatctaatttgcttgtgtagtctcatatttgtctcttggaatatctgttactgaacagaaatctgagaaggagagactctactctctctgctatttgcatgtgggcgctcctagagtgtggtattccgtagcaggatgtcatcgatcaaagtttaaggctgccatgaaaagcttcatccttgagatgtcaggagaacagccaaagaagagtcataatcctgtaagtatttgaacacattaagcatcaatacaagttactcttttcaaaattccgaaagaaaatagacagaagagtgaccaacaacgattccacttgcgatttagttcttgttcagcatacacgaccatgacatgacatagagagatcacacagtatttggatttatctgttcaaagcaaatcctatcattactttgttaaatttttgtgagctattatatactagtattggttcatttacaagggaagcaattcatttggcaggtgatgatgatgtctccatatcaattgagcgtggagggtataccagtgacccgctgtgtccagcaccctggccagtatgttattatatttccagggtcgtattactctgcctttgactgtggcttcaactgtttggagaaagcaaactttgctccccttgattggttgccccatggggatattgctgttcaggtgaatcaagagatgagtaaaacgtcgctgatatcgtatgataagctattatttagtgctgcaagggaagctgtaaaatgtcttaaggaatatgggttgtcgaagaaaaacacagcatgttacacgagatggaatgattcttgtgggacggatgggttgttctccaacataatcaaggtaatactcactgctcctcctctttgcttgtcttattcctcagattatgcactaaaacctgcgtagaataacttcctcagtaccttttgctaattttgtttctctcttttatgtagtcacggatcaaactggagaaaaatagacgtgaatttcttatcagttcactagaatcgcaaaggatggacaagagttatgatgctgtgaacaaaagggaatgctgtgtatgtcttggggatttgtatctttccgcggttaactgttcatgctctgctaatcgttactcgtgtctgaaccacatgaggaagctctgtgcatgtccgtgtgacagaaagagttttctctataggtacactatggatgagttgaatcttctcgttgaagccctggaaggtaaaaagctcagctctatgttcagatgggcaggcatagatcaaaaattctgtgcttctccagccaccacaagttcaaaacccgaagaagacaaaggcaaggaaacagatgaggttacaccctgtaatatcacgaggaaagatgtcgcagctggaactaaggaccagacaagagtgaaggcgagatctttggctgatatactgaatgttaaagatggaaacaatgatgcaaaggagactttagaatcttgttctaagaaatcaaacaggccatgcgataacgattcctctgaggccaacgcgccaaagaaacagaagcagtgatgaataatgaaggagattgtagtttagtcacaaaatgcaagacgataaaaacacttttgtcttcttcttaaatcgatatatgaagcaacttttttttttggtaggcgatacatgaagcaacttgatatgtgttttgtttgttttggctaatagacaaaaacatttttttggtttcactaatatttatttacgttgactctaactaaagtagaaggaaaatatttgacgaaaatacagagccgttggatttgatgactttatgagattgagattagttttgactttctttttttgagagctgcggttttgtaaaaatggcccacaatttctctgaaaattcaaaattcagtgccggagattactcgtcgtagtcgtctgtgtcagatttagttctatttgcgatagtgcgaatg

SEQ ID NO: 26321 - DNA, 3003 bp, Unknown
  misc_feature (1)..( 3003): 2750-1469P.txt file - cDNA_ID_2712427; gDNA_ID_2214568; Annot_ID_135002
actgatgcttacgatctcttttgcatctctctcgtaacgaagctcctcggtcgtatttattaccacgtggaaggcgcacaaaagcctgggactctccctcccaacgtcgcagccgccgtcaatggcgttgccttctgtgggactctcgccggtcagctctttttcgggtggcttggtgataagctcgggaggaagaaagtttacggtatgacgttgatggtcatggtcctttgttcaatagcctctggtctctctttcggacatgagccaaaagctgtgatggccacgctctgtttttttcggttttggcttggatttggcatcggtggtgactaccctttatccgcaaccatcatgtctgaatatgcgaacaagaagactcgcggagcctttgtctctgcggtttttgctatgcaagggttcggaatcatggctggtggtattttcgctattataatttcctctgcttttgaagctaagtttccatccccggcctatgcggatgatgccttgggatccacgattcctcaagctgatttggtatggcggataatcctgatggctggtgctatccctgcggctatgacgtattactcaaggtcgaagatgcctgagaccgcaaggtacacggctttggttgctaaggacgcaaagcaggcagcttcggacatgtctaaggttctgcaagtggagatagagccagaacaacagaaattggaagagatctcaaaggagaagtccaaggcctttggattgttctcaaaggaattcatgagtcgccatgggcttcatttgctaggcactacatcgacatggttccttctcgacattgctttctacagtcaaaaccttttccaaaaggatattttcagcgcgatcggatggattcctcccgcgcaaagcatgaacgcaattcaagaggttttcaagattgcccgtgcgcaaacgctaatcgccttgtgtagcacggtacctggttactggttcacagttgcgttcatcgacgtcattggaagatttgcgattcagatgatgggtttctttttcatgacggtctttatgtttgctctggctattccttacaaccactggactcacaaggagaaccgaatcggatttgttatcatgtactcgttaacattctttttcgccaactttggacccaatgctacaaccttcgttgtgccggccgaaatcttcccagccaggttcagatcaacctgccacggtatctctgcagcatcaggaaaattaggagcaatggttggtgcgttcgggttcttgtacttggctcagaacccagacaaggacaagaccgacgcaggataccctccagggattggggtcaggaactcgcttattgtgttgggtgtagttaacttcttaggtatcctcttcactttcttggtacctgaatctaaaggtaagtcactcgaggaaatgtccggtgaaaatgaagacaatgagaatagcaacaatgatagtagaacggtcccaatagtttaggtgatataatacgccttttgtaataattttcgttttttctttctccttgtctctagcaactcaagttgttctttgtgtaatccattgatacctaattaatgctagagaaatcaaaattttcatgagtcgattttaaatcagttcctaaattgaagatttattagacttgaagaagccgtgcaagttgtgcagtatatatgttaaatcacaatttatgcgttgcggggaagttgagaccacagataaaggcttcacttaaagatacattatggcttattaatctctagggtgaaaataacgaagtgctgaagaaaaactctgttcttttaacaaactcccttgcaccgaacaacattctcattgttcatcgacctatggaagaccaaaaacgattgctactttggtaaattttgtaaactttagggcatatgaaagcggtgggtatatattatagtttcacaatggtaagaaaaatatttgggatgttacagtatttttaggcatggtaaaaaggcccatattggacataaaaatatgtaatccctcaaatgaagtggaaattagataatttatttatttataaaactctgaatttagataatttcttatcttttgtttttgtaaaaaagaatttcatgttggataaaatatatattgcatttattgtgtgtgactatcttattggtggacaaaatatacatttttttaaaaaaagtattatcatcggaaattaggtttttcgacgggaaaaaaaaccaatcaccataacaaaatccagaggctctgttgttcttggggttgaatgtgtaatgtctcataagtcttcggatctcacttcgtccgggtatgtgttctactcgcttttcgtctgttaaaaactggaccttccgatcgctaatcaatatcaatcttagctttttttcgtcttccggttttagattttgtatcctaagctccgatactctttacgagaagcgtttttatttcaagctcagagtcaatcttagtatagggctgctaatggttttcatgtcttggatcacatcctgtggttgaaaaaggagtattctttactgattcttttgagaaagcaataaccaataaagtagaaggctctccttcgtaattgacctggaatctgtgatataagtattgaaagtaccataatttacagtttgtctctcagttcttgaaagtttagatgctgtctaatgatatatggtgtatgagtttaagttcctagactaatcaagaagaccgtttctgtgatctttgtgatgatgactgaatcttctaagtagcagtctttttcttcacacctatcattttttagttgaataacgtatcgtagttactgtgtttaatcacttggtttatacttgacattagatttctttccatcttctgcaggaagttgcatctttattgacctcatctgaagttcaatttatttcgtcttccggaaatcaatccttttggtggctgtaaggtttaatg

SEQ ID NO: 26322 - DNA, 3000 bp, Unknown; identical to SEQ ID NO: 12776
  misc_feature (1)..( 3000): 2750-1469P.txt file - cDNA_ID_2712456; gDNA_ID_2214570; Annot_ID_135056

SEQ ID NO: 26323 - DNA, 3003 bp, Unknown
  misc_feature (1)..( 3003): 2750-1469P.txt file - cDNA_ID_2712475; gDNA_ID_2214570; Annot_ID_135050
attatccgaataaagatatacctaattctgatcaaaagagagcgaaaataagtctctggagtttagattgagaaactaaatgtcaacaaaccggaaacaaaaaaaaactgtgtcaagtaacaaaaacaaaagaaaagactcaaagagagtagcagcaacgtaagatttgattccaaagtgtctcacaagggaggaatgagtaatgctactccctgttttattcactcatcacaagtccatcaatcaatctatctctttactcttggacctctggctgcttctttccacctgctttcaagtaccaaccaatcgaaccgacaatagcaaccacacctgccacaaccgcatagtttctgttcttgtcttctgacacctttgggcccgactcagctgatgcagatgctgttgcaccagcaacctttgcttcgcttgctgaccctgctgcttgttctccaggaccctagtaagttcataagaagtttcagccacacaagactgtaaattttctctttatctaaacaagctattcgtagtttcaacaactggagttaaaggaattatttacctgtcgagctaacttctgaagcttctcctgctccattttctgcaatgtagaaaaccataaacaaggtaaaatataaggacagaagatgacttactcaaaaatataaattgttttgaaaagagtaagtattatgtaacaggtttctagttcaagctagatgctacaaggtttagataacaaatagatttaacttctacgattaagacacaagataagtttcttataagtaaaaccaaatattatctaatagtttacaacagagacagatagaatcaaacaagagcttgataataagtgttcatcatcaacatcacaaaaggaaagtaaatatacttatagttttttcgaggattcttagtctactattattgttcacatcaataaggaaagcttctgatctttaccttaatgaaaacattctcagcggctctctcctcttcgctaagaactttgccactagagaacctacgagacacaattctcaaagcatttcttgttgccatggtaatgaagaagtatcctgtgcataaaacattaaactcattttaactaaagcagacagtgaatgagagagattctaggaactaacaaaatcgttcactttgaaaaccctgaaattgtttgaaaactccataaaaactattacagaaaacctataaggagtaacattggactcttacaatccttttcgtcatcatcaatcataacatggtaaatttgtttttgctaaataaacatggtgaattaagatactaatgtatcaagtgtcaactattactgtatcccacgtatcagcgacaatggtgaattactttaacagaaacataatctacagcacaatagcgatgctagaggtaatctcaagattccacacagacagttacagaaaatctataatgaggaaacacttattggtacttgtctctcaaaatcctttttgtcatcatcatttcatacaatggggaagtcaccaaaaaatctattactgtatcccaagtatcagctactacattcaaatcaaaatacatatactcatggatccttgtggaggctgtagaatgttaagtgtttgttaccacaaaaaacagtgtaacaaacacagcttctcatataccaaatcgatccaaatctaggtttagaaaacgtatagaggaagcacaaaagatcatccagcgaaaatccgaggatcgcgaataaacaacaaatcactgattataacaaatgtaatcataaaatcaaaacctaatccggatatgataacacagatacgaaaacggtagctctgacctcgaaaatggtggtatcggtaacgaaaaatcgaggtcaggtgttagatcgacagagaagaaaaggttagaaaaatttctgagctaatctaaaaacgagaaggaaagaatcgtaatcggagaagatgatcggaagatatgagagacctggttcgatggtagatcgttaaaagtttcgtctggctgctgaatgctgatgaaatccgcttacagaagaaatggctcggtgaagaagaaatgaagaggaaggtgtgagatatggaaggagctaaaatgggcttaaactaaactattgggcctaaaatcattttagcccattgaatgcgcgttgaacatttgtggtcacgaacactttagctattgaacattaaaaagttttctaggatttgaatcttgcctttgctcaaaatagtttctattttattatgatatacaatattgcttttcccgtaagtttcagccagagtacaactccatatttcactgtctcctccacattacaagaagccttcaattacaagcactctaacatctttattagcctttttcttttgtaaagaaaaagaattatatatctatctgttattctcagttttgttcttcatgaaaactcaattgcatattgtaatatctttcttttttttgttttctgttttgccttcaacttcacacctaacatattttttctaaatctaatccatacatttccctactttatctatacgtatctttgtcttatttatagattgagaaccaaacaatgagaataacattttagctacctatttataatacaccaactcaagaaaattgttgtattaccaattcaatataaacatgttaacctacaagaccttttagccccacttggtattctttttttactatatgtttttcctttctatgaaccaacttaatatatttcatacaaaattagtttctgattcaaattttgccctactaagtctctaaataagtttagaatatgtttaatcagggatagtgtggttgactgagagggcatttttgtcattatacatcggtaacaagtcttgataggctcttaaggccagtcttgggttatataacaaggcatctcccttttggtgctcatgtaaattgaggaagagaaaaaggatctgaggaacaatg

SEQ ID NO: 26324 - DNA, 3003 bp, Unknown; identical to SEQ ID NO: 26323
  misc_feature (1)..( 3003): 2750-1469P.txt file - cDNA_ID_2712475; gDNA_ID_2214570; Annot_ID_186144

SEQ ID NO: 26325 - DNA, 3000 bp, Unknown
  misc_feature (1)..( 3000): 2750-1469P.txt file - cDNA_ID_2712479; gDNA_ID_2214570; Annot_ID_135046
tgccacactccatcaattcttcctccaccacaattacagcaatcacctataacaacacagtccaataccaacaccataatgcctcttattgcatcacactgttcatttccagcaaacatatacaattcctagttccaataacatttcaagttaaacaaattctcactactagaataatcatgtatacattccaatgctcaaatcaaagtcacgaacctgatccaagaatatccttgatatcgccagtggttggggaagctttcccgctcaagacggcaagcaaaaacgcagcaacaaccttcattttctgaagaaaaacaaaaacagatcaaaaatcaaacatagtacgattacgtaggagaagaaggagagagaaatggaaatggaggcgcttactgcggaagtgttgatggatctcgcaggaggcggagtgagattagggtttttagacggcgatggagaagaagtacgaaaaaatgaaaactatatgatttatatacgcttagggtttttaatcttatcaatgtatctccgaatttaaaattttatttaggcccagttctttcaagcccatatttatatgggctcaatatttcgattgacgggtaatattgatgttgagaagagaacgaccagattatacaattctctagttttattttgtttgatggatgggatttcacctctaacctcgtcttctatagcaccttcttggtcgatgacatcaaaagtagcttcaactctacacctgttgtttccgaaacatcgcctgcgtatggcatttctcggtatatgtagttgacaagtgatatgttttgcaagttactaataaatttgtggtgtcaaagttttagcatagtctagttattttctcatacgaattatgatgtatttacatattggacggcattgaagggggaacaattcaagactagaattttttttttatccttttcttacaataatactattcttgaagtcatacgtaagccgaatctgaatctaggttccaaatgaacgacaacgtatcattagcaaagtcaaggctagaggtatctcatcaccattcgagtcaagatttaagaccatgactaggaccaatgcttttgttggctactaaaaactccagagtgacaaaggcgattgagatagaagcagaaatgctaacaacaaagtgcaaatgacattcgggtcaaaaactcttgagaatttcagcaatgtctaaaaaagatgatcgaatacaaactaaacaacaacaacatatagatttcaaaaggttacaatattaaaagaggacaacaaaaccggacttttcatgctactaccagcttactcgaatagactgaaacccatgtcctgcaaattaaaaacaaaaacacacacaagtgagccatcatttttaggttaaatttcaagctactattaagatcaagacttttgttagaaggaaagtaaacttacatcatcggattcttccttttcttccttcttctcttctttcttggactcagcagcagaagcaccaccacctcctccacctccagatgtagcagaagcaaccgcaacaccacctccgccaccagacggcactgaagctaacttctcccttccagcagcaatcaactcagccaaatcttttcctttcacttccttcaacaaaagctcaatctgagaatcctctgtctcagcaccaactgcaacaccaaacaaaaacaacaatgccacattccatcaatcatcccaaactcattattgtatcccattgttcactaaatcattactcttaacaatacttacgcatctcgactatcataaacaccgtttaagtcgataggaaccataaaaatccctaatatacatatcatttcagcttaagcaagttctcaactatctaataaagatttcaaatcgaattctccagcgactcaaacaacgaatctaatcatattgtaatgaaatcgattgcgattcatcaaaacgaacctgatccaaggatagtcttgatatcggcactggttggtgaagcttttccgctcaaaacagcgagcaagtatgcggcaacaaccttcatcttctggaaaaatagtgaacagataagtaaatggagaatttgatcggagaagacgatggagaaattgaaatggattagtgtcgtttaccgtggagactgatagatctcgtaggagattgtgagattagggttttgtgcagacggcgatgaagaagtgaagaattaaggaagtatttttagtttatatacaattagggttttctctactttgagtctctccgggtttaaactattatcggatatgtttaatgggcgttggcccggttcatcgctaggcccaatattaattttaaaggtgatgagaaaatttctcaattcttcagtcaataaaaacctatttcttttgcaaactttataactcttgataataatgttcatataagtgaaatcataaaacaatattgtttgtgtaaacaaaacaattaatcttgttatcactaataaaagtgaaacaaattaaatttataattagtaaataaagtagatttatgctttttaaaaaaatcttttttgcagtagctagattgtgtctatatgtgtaatcttttttattttttatccttttaagtaagttagaaaaatctttaaaatgtattatataaaaacattaatggcattggatatgaataataattaaagatttacaaaaatttaccttttaatatatagtagatttcattccatttaaaatcatttatgtaaatgaatcttaatccgagaaaaaacaattatatcttgcatggtctagaaattatttaagcagcatcgttacatacttagaatcggtatatatctacacaacgtgtttgctccaccgtataggaagtttcacaaagaaaaaatcatagctaattctcgttttctgtctcaaccttgtcgatcaagtcatctcccatataaggtaaagcttattcgattgtttagcaatg

SEQ ID NO: 26326 - DNA, 3003 bp, Unknown
  misc_feature (1)..( 3003): 2750-1469P.txt file - cDNA_ID_2712511; gDNA_ID_2214570; Annot_ID_135033
gtaaaaataattgtaatgtactaatgtttcatttagcaaagtatctaacgtaataatataacaaaaagagtctaatccctttttcttgtgctgaatatacataaataaaaaatacagatttataattttaaatcgataaatattttttaacaaagaatttgtaaacttatcgcgatatcatagtttttagcacgttaaacaaatagttatatacttatcatcaatatattacaattatttttatttaatggcatttttgtaattattttttttttaaaagatatttttggtttatatattatttcttcttcatacttacctaaataactaatatttatgcatagattcttaatttcttcatcttctatgcatagatattaatataaccctaaaacaaaagaagaaaatgtgatctactatagaaactttcactaattttcaaccgagtaaatcaacatttaagtaaacataatcttatcgtcaattggctgtattcaaagtccattgaattccatgaattaactatttccaaaattgcatttaattatacttttgtacgtggaaaaactaaatgataatctctgttttttatggacggtctctagaccaatcaagtcggtgcgaaaacatgtcagaaatgcctaaatgcgttatgtctatatgtatgtgtaaatgcatttagtttcaaaacatttttctggtatacactgaaatttctaagttcaacaaagtttgcaataaactatagctgtcttaatatataagtcacgaataacggctctaattaaacgatgtaactgacgagctttaatttcgattgtttttttacttttcagtttcaaggaacaaatgaaaggttggtttcctctacctgagaagaaaagttctatcacaggacttgcgaataagaccgtatatatgattgacatgttgtgcttttaatattaatgttagtgtcacagattgttgtgggagcatatgctaaagtataaaaaaataataattaaaaatattatcacgatcacatgcaaagtacacttgaaacgtgtaatctgaagacagttaggttggaatcagggtttctataagaggaaacccagatcttgtttttctacctcatagtttttttttatggaaaaggaaagaaattacatataaataattcaaaagtggcagaggaaatgaatctctttgtcaagttgatgtgacctttcacaatttgtcaaactgtcagcttttgaatgtgttggaaacgcattggggttgtgggtcgccaacattaacatttccaaaaatggtaagtccaagaataatattagttgttttgggatatattctttgcaatacatccacacacctaacagagaatatatttcttttcctcatactccaatattattactttttaagaaaataattaagtttcatattacccttattgcaaaagcgacgtttagaattttaaacagaataatgacacttgaaatttgtatctttctttctttaacattaaaaaacaagggggcgataaaagcaaccaaagctgtgattcatggtcgacactaacacatggaataaaaaaaggttatctcttttttccaacatttctctggtgactaagttaattgaataaattgtatgcatatatttatatgttctatatatatactgtccaaaaaggaattgaggaatttttaacttttaaggaccatattggaaaatctgccacttctcatccactcataggttcgaaattggtttattataattttaacgcacaaattcccttgttagtgctaaagaaggatacctacaaaaattcatatcgaattctagacgaagagacctatattgtagagctgaaaactgatgttttacaaaaactgatattttttcgggaatgatttggtttaagcaagaaatatcttagtttgcattattcctaagctggtactagaaaacaactatcgataaaacgaggttgtcttccctttggccacctattgacataagaaaacaagacacctatcttttttctctagcaaagatactcctagagtcctagtcctacgacgaatggcgatgctttcttaaataaatataaaatattagttctctacttctcctaacgtactagaagtagaaattctgctgaaaaaagaaaaagaaaaagctaaattcccgacgccaccatttataatgcgttcattctgtttaaataatggctagagaagaacatggccgtaaatccgtaataacacttccaggttctttcattctaacataaatttatgtataaaataaagtttttaatctatccacctgactaattaaatttttattttcataaaggaaagagttttcctataaaacaactataaaaaaaataatagtatcagatttgaaatgacgacttcagtgacgataattttactgaattaccatcacgcccattattatgttttattttataaagcaatcttttattgtgtcctaacaaaaaagctaacttctaaattcttactagggttcaaagacatatttttttatcgaatcatgtcgtatgtatacaaaaataatttattttggccaatacaacagatagttgattagtgttcagaaatacccaactctccaaaaaaaactactctcatttttttgtgtaaggtatgatcctagattaaagaaacgtctttttttttattctctctgaagcatcttattgacaagaaaataaataaattccttggatctaaacgtcaaatcaaatgcattacagccatttcttctcttaaaccctataaatatacatgttcttctcactttatgcttcatcaaatcaacacaaacatatcccccaaagcagaactaaagcaagcccaagcttgtctctccccattccaacacacacattttcatatcaaactcaaaacactatttccttaatttctttcacttattcttcatttcttcgtctaaattcttaaccaagcaatcgagatg

SEQ ID NO: 26327 - DNA, 3003 bp, Unknown; identical to SEQ ID NO: 26326
  misc_feature (1)..( 3003): 2750-1469P.txt file - cDNA_ID_2712511; gDNA_ID_2214570; Annot_ID_186129

SEQ ID NO: 26328 - DNA, 3000 bp, Unknown; identical to SEQ ID NO: 12755
  misc_feature (1)..( 3000): 2750-1469P.txt file - cDNA_ID_2712517; gDNA_ID_2214570; Annot_ID_135031

SEQ ID NO: 26329 - DNA, 3003 bp, Unknown
  misc_feature (1)..( 3003): 2750-1469P.txt file - cDNA_ID_2712526; gDNA_ID_2214571; Annot_ID_135081
aaggactccaagacaatccatacccttccttgtcatgtcccactagcctcagatcaggatcacactcactcgtttgagactttgcagcatgtttggcgtaatcaaacagaaacacctcacacccactcgtctttgcacccacaagcgtcggcttttgaggcatacaccgcgctctgttcacttctccatcaacacgtatcctctgcctaatctccacctgaaacaaatcagaaaattgaagaaacatggtttagtagtatacaaaaactcttctttatcctaaacctataaaagagtccaaatttaatatctcaaatcctataactaactaatccttaacactatcagtttcagctagtcatttgatcgaacacttggtgcgcgtaaaacatgagctataaatattgtccaacaaaacgaagaatctccagggatcaaataccttaggaataaagggatcctgattagcgccgcctatcccaggttctgcgtttggtgtcggggtaacgacgtcggcgaccatgagaaaatcttgagcactaccggaagtatgagtaccgagtataagcttgtggacaccgaagtaagagtctgctacgtaaggatttggcgtcgatggaacccaatggacggtgagagatggccattcgagtgggtgagagatcaaaagatcgtagagaaatggtgtgttcttcttccacacagaaaaatcttcctcgacctgacccattcctgtctcctccttaccttcatctgccattatctctctcgcctctcaatctacttctctctctctcgctgatcttcgagggtttttctggttgattttcccgccaaaaatacacagagctgatcaagggctgtgatgctgttttactttttcacaattgaacgctttgccgttttactgtttcgaaacagcatgcatgtgctgtggatgctggttttgagtttatgggcctgtaaagcccattcttaaattacttgctcaaactacatttttttgttcagaaaattaattacctatagtcctcctatacaccaactaggcaactatgttataactatgttataactaaaagttttgattgctgtgagatataacttgctatatgatgtgacatagtacacataaacaataccatttttattatgagagttcaataaaacttgaatactcaggaagtaagattttgcttatttatatatgtagaatacaaagatgaatagtaacaatactatgtgctgagaatttcacaagtctttacctcaagggttcaaagaatttgctaccatttcaagaattgtattgactataacttcagggcttagaaccacactgattttgaatatcttttcacattcatcagcttgaagcagatcaaactgagactgaagaagagtaagaggcatgaaatgttcttcctcggaagctctcttctgtaaccgagcagcaatcacctctgcattaccttccaataaaacaaacgtaaccttgcaactcgtatagcttcccggtttgtaatcaggatcagaacctctcaagatttctctatactgttttctcaaagaagaacatgcgagaacaacggtttctccatcgagtaaacgttttcgcaaactctcttgtattttttcaagccatggcattcggtcttcatctgaaagagcaatgccttgacgcatcttatctagttgaacaattagtgttaacacatgaaattttcccaacagattcgtcaaaagtaatatcgattctgttacctctgtttgataaagaatgaaaatcatcagcatcaagaaaatcgcaagatagagctttccccaacattttacctatggtactaacaaagtgaaacaaaacaataaacatcaatgatctttcttcaaagtagaagagaatagtacaaatgagaagaaggaataaaaacagcttacgatttccctgcgccacttacgcccataatcgcaatgactttacctgtcactatgacaatgagcaacaaaactgatgagatcatttacattaatggaccataataacaatattggagcttaccgtcatttttagccgacatgcttgatgaaacaggttttggtgattcttgaagaaaacaatctgtgatcaagaaaagtaaacatatctattaactctcaatcttagcttataattcttcaatatttcctaatttcatctgagaggagtatatgactcaaattcaataagtaacggtggaaacgaaagaaaaaaatccctaattttgaaatcaagaacaaaactgtacggatcaatgtttattatacgtttcaaaacttactaagcaaaatttagttttctgtgagagacgacttactgagattctttttgtgtttcttgactctccacaacaccaccaatggtgaagcaattggatacgttttcttgatcaaagacgaaattcacaaaattcgctagattaggtgaattggattagaattgataaaaatctaataaaataataataaactgattaggtggtgagacgtgactttgcaagagaggtaggaccaaagatggaaaatgattataaaaatacacaattattgacaattttttttttttttttgaatgtaaattgataaatctttttttcataaaaaaaatttcaattaaaaaatacaatttctcttatacatgcatgtttctacactattctctaccttctttcaataaataaaaaagtaaaaactatacaacaaaaatattcttcaccaaaactgaacatgaataatagtattatattttaatacttttttttatataagatcaacatttactttagttaatttccattcctataattaactaatattttattgattgataaggaagcaacaaaatatatttttagaaaaaaaaagttttatcctcaccgattgagagcaaagtctcactctcttccttaagctctgagaaacctccgataagcttatcggacaaaaagagaagtagacgccgccatg

SEQ ID NO: 26330 - DNA, 3003 bp, Unknown; identical to SEQ ID NO: 26329
  misc_feature (1)..( 3003): 2750-1469P.txt file - cDNA_ID_2712526; gDNA_ID_2214571; Annot_ID_186195

SEQ ID NO: 26331 - DNA, 3003 bp, Unknown
  misc_feature (1)..( 3003): 2750-1469P.txt file - cDNA_ID_2712529; gDNA_ID_2214571; Annot_ID_135078
cagacaccaggttggccattactaagaacatccactttagctactccaatggttcaacatcagactaggaaaatatcagttgtcaattgggtcatgagcttgcctgaaagatttccacatcatccgaatcagacttgtcaacagagcttttgtgataaacaacttaaagacatactcaaggacataaacagatggtttagctatgatgttctcaagacagcaacatcagatttctctttaggtattaactaacgtaactactctgttttatcgtattcatagccactttatcggattctttttttttggtttacagagaatctgatcggaaaaggaggatgtaatgaagtttacaaagggtttcttgaagatggtaaaggcgtggcagtgaagatcttgaaaccatctgtaaaagaagcagtgaaggagtttgttcatgaagtgagcatagtctcttctttgagtcactcaaacatctctcctttgattggtgtatgcgttcattacaacgacctaatctctgtttacaatctctcttccaaagggagtttggaggagactcttcagggttaagaaaatactactttgttctcttaaacatgatcttgacacacaatttcataaagagttcattaatagttcagtttctgtaggtaagcatgtcttgagatgggaagagagactcaagatagcaatagggttaggggaagctcttgattatctacataaccaatgttctaatcctgtgatccacagagatgtcaaatcttccaatgttcttctctcagatgagttcgaacctcaggtattaaaaaactactgagaacttgtaaatatatgtaagaaatcataaagatgtgtggacctttaacggattttgttttgcgagaatagctttcggatttcggtctttcgatgtggggatcgaagtcttgtcgatacacgatacaaagagatgtggtgggtacatttggatatctagctcctgagtactttatgtatggaaaagttagcgataaagtcgatgtatatgcctttggagtagttttgcttgaactcatttcaggaagaacttctatttcatctgatagcccaagagggcaagagagtttggtcatgtgggtaagtgttggttttgtttacttgtagcagaagcaattatcattgaaaaccttaaaaaaaacagattacttgcgttgcaggcaaaaccaatgatcgaaaaaggcaatgcaaaagagctcttggatccgaatattgctggtactttcgacgaggatcagtttcataagatggttcttgctgctacacattgtctcacaagagcagccacttatcgtcccaatatcaaggaggttagttactctaattttggcagacttataaccgaattttaaatgttggatcctctgttctacctatgaattatgccaagatctctaaccttttagtcacatatccaatatcatttctgtagatattgaagctgctaagaggcgaagatgatgtctcgaaatgggtgaagatagaagaagatgacgaagatggtttcgacgacgaggtttacccaaattcgaacacagaattacacttgagcctcgcgatggttgacgtggaggataatgactctgtgtcaaacagtagcttggagagaagtaacaacagccttttttcttcttcttcttcttcctctcaggagcttcagtcttaattagggtttgtgcttagcttgtctccagttcacttgaggactacgtcatctcttacggtgtctgcactcaatatgtcacactatatatcacttctctgccttggcttttgcaaccattgttggagaagtctttttcctctttctctttttgtatatatgagaggaggaaaatagaaaataattattataagtttttaacgtgattgaatgtaatgactaattttaaaaatcagataagtttcatgaattagtattgctaaaacacgggtttttccaaaaccgtatttaatcattttatagcaagtttctcttgtcaaatataacataaacctttgtcactatcaaaactaaaatttaaatgtttttgcttggtctaagttggtagaggatggtttaattaaaagactcagtagactcaatatctcttgttttggtggcaatgttttgtcaaacaccaaatactaagacataaaaatttatgagtgatactaaaggacttgcaaaaaccatgtataggcgaattactgttcactagttttttggttaagaatgacttggaacttgcagtttggtgaagctcttggaagagtcaaaagacgttgtatatcgatgggcactttgaggttatgtgaagcacatattttgaccagctcaagacacggtaatgtagccaaaaaatgcttcatttggttcagatctttgtcactatctttgtaacctgatatctccaacactttcactcgagatgctgataggcaagacgatctatccgctctcgcgttacgggccttacggaaaacacatacatcaccacaatttcttgtaatcaaacaaatttttatttggttaagcataagtcattccattcaaatttcttcaaaggctactactcataaatttcttgatttattcgaaatttgctatatatatttttatatatttcaatttaatgaaattattccttccagtttttttttttttttaaatggaacccttaagcattttatagaaattcaaacctaaaaaatcggaacaattgaacaaaaacatgcaaacaaacaaaaacgtttgaattggaatttaaagctcccactactatatgttaaagtggtttaaagtacacttcctgggcccaataatacatttaacgggccaccaaatactagttttcactacgtgcgcatcaccaaatctttaacgttcgctcaccaacttttttccccataagttttggtcttcgtcgtacccaatttatttctctctacccgttttttctcttatttcaaaaaaaaatg

SEQ ID NO: 26332 - DNA, 3003 bp, Unknown; identical to SEQ ID NO: 26331
  misc_feature (1)..( 3003): 2750-1469P.txt file - cDNA_ID_2712529; gDNA_ID_2214571; Annot_ID_186190

SEQ ID NO: 26333 - DNA, 3003 bp, Unknown
  misc_feature (1)..( 3003): 2750-1469P.txt file - cDNA_ID_2712532; gDNA_ID_2214571; Annot_ID_135076
tatgacttaccataggatcaggagcatcattttgcttacacataacccatgggatccccaaatccatcgagtgtaccagtttagatgcccacttaatgtagtttaatccatcttctttatatgctcgttgaaccgcactatactcattctcaatctgaatccaaacgccaattttaaaaaaatctttcaaaacttttatgattcatatcttaaaaatgtgtttgttgtttttattaatctttatctttttgtcaatgttacctgtcctaatataatggggcctccttgtgaagcaaaaagcttctcctccttcatcatgtcaagtaccaccttaacatatctctctgtatgttcctacaatcaatagttttctccaaattatttaattgttccaacatatcacacacatatcttacatatgcatagccatatgtgaaaactaataatcataccttgaaaggttcattatcggtacggaagaagatcccgggaacttccctcagccagtaaggaagtcctctgatgtttcattataaccataagcattaaacatgtcacatatgtaaaagaattttatctcaatttggaggaatcagacaatgtaacaaataaacatacccatgagtccattcagcttgaataaaaggtccaagcctcaaggttacatacaaaccattcttctcaattaattttatgaacttcaccaagtcggctctacccgaaaaattgaactgtcccaacaacaaaataaaaaactcttcaaaacagtgatttaatcttttctaaaggtttttgtttgttaatatttcaaattacctttccctgctcaggctcatgaacgttccaaaaaacgtatgtctgaatcgtgttcaaaccgccttgtttcgctctcttgatgatgtttggccacatctgagcaaaacccacatcacatattctcaaaaatgtaagtaaaacaaaatttaaagataaaacaactttaactaacgagtgtatgaatcatttacttcaggagtgctacgagggtaatgtatggagccagagtaaaggagttctctatttccattgatgatcaaagacgttccatcataagttacttctttctttttatcgaccgatttcgtcttcttctctttgtcatcgcttgagagagctccagagaaggagaggagaatcacgagaacggctagtaaaagccatgaatgatcagaagaatgtattttcatttgactatcttcttcttcttcttcttcttcttgaggatttttaaatttaaacaagaatccacctaaagggatatcttccttgtcagagaaataaaaactttagagaaagaaaatgaaataagagaatgtttcgcagagaacataaggtttcagagaaattcacgtattctcaatttgagattccacattttgtttgtaaataaaacttccaataactctcccttttatttccttatttcctcctttcattttgttttcgttgaattttctaattttaaggtttttggttgaagagcctaatttggcgggtatacacacaatgacttctctcaatcaccaccaaaaagaaatgtgagccaatgcttatgttgagaaggtgcgtattacaccaaaaaaaaatggttcatacgaaaccaatgattttattttattttattatgttcattataaacaccacttttggttcttctttaattgtggaaatgtggattaaatccatgagagatctaacaaaaatttgtgtaacctgttatctagttattattctttgtctacaagttgagtaaatttttttgctgtaatttggattatcatcgtttaaacctttagcttatttctaactttaaatatcataacggcaaaaattgtaaaagctttggtatgcttcttttacgtaaaatacataaatgtgttgaccgtgtggttgaagattgaaagcaaagcaaacaacatttgttacaaaaaaaatggctatttttttaagtaatcaattaatcgtcttttaaaaaatcgagaccaactattgttgagaattattttcctcccgtaatcaccatcataaaatatcggttgggcaaatcacgtagcatgcatgtacattaactttggactaacagctgtggagtttcttcttatagcaatattcaaaagacctaataagtctgaaataaacagaggcttgaaggttatacttagattgaaaggcaatgatttacatttacatatataggttgatcaatgacgatctctacgatatgttgtgatataaatctttaaaataaggaaataatatatgcatcactgatttgtggagtgttcctcactcgacgccactctgatttgtaaattttttattgtaaaattttaaagtatgtaaatagggcctataattttttttcctaatgatacatgggcctataatcttaagaaacttttgaaatgggtcctataagttttcaataactattttacctcatcaaatgtatgttatgatttatgattatatttgttgaacatgatgctcatcacccatcactttgctggtccagtgaacgtggacaataagattaagaacaaaggatattgtaataaccattctttatgttaagttattctgattctcagactttatcaaatcccattatagaccgttcaatagatatggtatattacagtaagcatgtacgtaagaccatccacttcaaggcacgtctctctttcagaatcagaacaaaagaatggatctttctccattacctttatgggcaaagcgggcggctaaaaagagactttacaatggtaaatctttacttaaacaatgataaatgcaatagtgcaagcattcctgtttgcaagagaatcacaaatctttgcttacggttcacgctttaaaaacacaactctcattctccttctcttcacaaaccactcatattttttttcacatacttctttgtagtgctactttccattatatcaaacactcagcaacctgatg

SEQ ID NO: 26334 - DNA, 3003 bp, Unknown; identical to SEQ ID NO: 26333
  misc_feature (1)..( 3003): 2750-1469P.txt file - cDNA_ID_2712532; gDNA_ID_2214571; Annot_ID_186188

SEQ ID NO: 26335 - DNA, 3000 bp, Unknown; identical to SEQ ID NO: 12786
  misc_feature (1)..( 3000): 2750-1469P.txt file - cDNA_ID_2712546; gDNA_ID_2214571; Annot_ID_135068

SEQ ID NO: 26336 - DNA, 440 bp, Unknown; identical to SEQ ID NO: 12801
  misc_feature (1)..( 440): 2750-1469P.txt file - cDNA_ID_2712550; gDNA_ID_2214572; Annot_ID_135101

SEQ ID NO: 26337 - DNA, 3003 bp, Unknown
  misc_feature (1)..( 3003): 2750-1469P.txt file - cDNA_ID_2712562; gDNA_ID_2214572; Annot_ID_135098
ttaaatgaacggaatagtactctaagaattttttgttaaatcttttacttgaaaagttttgctgttaataatttagttgaaggttttcaataaatcacaagatacttagggttttatttatcattaagatattaatagaataaaaaagtggaattatttttcttctacaattacaccaatcaagaaaaagagttttcctctcaattactctggccctttacatggaaaagcaaaaaagttgagaaaacttccctctacaaaactgaaaaaataaaaataataattttcttaaaagtgcatatgttttttttcctaattgttcttgttaattccgctgaaattgtcactgtcacaccctaaatacactaaaattatgtgcctttttaaaggacggacgtttcaaatatatatttagtaaggcccactaataaaattgggtttcaaaggacaggaatgggcttctgcaaaatttgcaagacacaaaggcaaggcaaggaatatgtgtgaaagaaacaatgtcaataacaaacttaaaaggaacagaagcgccaaagtcacattggtcaagtgtatggtttcaattggttatgtaagttaaagtgatagtccaaaagaatggttctaattatgttgagaaggtaatccaagattgttgctggatgtgataaaaataaatggaagaaaaagttgttggcttggctcaaatagatctatgtttatgactatacatcaagagttggcttaaatgactgcttcctgcatatttgtaaatctttatatacttttgggatacacatgtttgtatagtttacatgatgcattatcattctaaaatatcagtttccgattaaacgttgaagactggtatggctttctaacttaaacctctttcatctatcaagacatatgcactgctcaacttgagcagctcaagcatatatataattttattttttctaaaagtaacttaattataaactcttacacatcagtttttgtaaggcgaaagatgttatagtcaacaatttttttttgcagagaatgttggtagaaatttggtagacatagtagaaagtcgaaaaaaaataaaatcggaaaataagtatgctgatgggaaaaacattaacagaagttaattggcataaaataaaaagaagaagtttattgctacatcgccacgaattccaagtcaattattacatatttacatgcataaatggttttgatatggttgtattatactattacgggctatgataaagaaataaaagcatgcacgtaaatctaacaagagacatcttcatgcacgagtttttattccatttcagctttccaacaaagaaagaaaaagcaaataatcgctttaagcttttcttaaattgcaagttaatgctctcatttaatcaaattgtttatccgttcctcaaagaagatgcaaaattgaaatttctcttaaacatctatccatatattcggaagggagattattacctcagagtggtcttaattggcatattgattactgtatttgttacttgaacgtggtcataatgggcatatatattggttgaagataaatgccttcttcttccgggtttaaagttcatcttcttctttagcacaaaaaataaaataaaattatcttcttaagactactgattaaatttcatattaataggtatgattggtaattttttacagcttaggttacctccataaatgtggtcgtagacaccacttgaaatgggaatcatcctttttgctatgcctttgcggttattctctgagaatcctattgttagatttatatatggctatattttatgatttcatatttctaaaggtatacggtctagtgtttctgagtccaaatcatggtgttgtgacagtggttaccaaaatttctttcaaagtatttctcacataagcgacaaccatatctaccgacttcaaacacctctaaatcaacaatagattttgggtttggatcactcttccacaagaaggtatgattctcatatgagagatcccaatccaatgattagtgtctcaaaacaaaatatatccaactatgcgagtcttccaaatttaattgaatatttagaaaccatgatttgaatcttcctcttttgtggaaaatttatttatttcctcatttctcctatatggagagaaccttgcttgctattttgctatttagtcacaagttaccaacttaccatccttgctattttgttacttcgtgtagaacttctcgtttttggaatcgtcttcaacgttaccatattttttttatcgagattatcatttcaatttttttatggacgaattctcgattaaccatgaactcatttgtaccaagatactatctaacttttatctccaaatttttatggatctaatgtcgacctatcctagtattttatagcattcgagaatgctttattacctttttttttttttttttgagaatgctttattacctttcattgttatgtataaacattgaaatatttttgatttgtgaatgaacaaaatccaatattttcatggcgaaaaaaatcctttaattatttatccagtaaacctgtaaaaacgtatttgtggaattttctttaatttgattaaattaaaaatagacaaaaaagaaaaagacacgagcgaataaaatcacagtgattttcagtgtttttttccctcgttacaaaacaaaatagctctgtctgaaaaataaagctttaactctctctctcttaacactgttactgtcgtctctctgtctctccattaatctccactgctctaaaaaaattcattaattgctgaaactctctctctctctagtctctatctctcttcttcatccttgagctctgttagattctctctaactctaccatcgtttcatttcttaattctctgttttcttgttcctccagagtgatagatctggcagagaacaatgtcggaattagccaattaggtcgccgagataaaaacatg

SEQ ID NO: 26338 - DNA, 3003 bp, Unknown
  misc_feature (1)..( 3003): 2750-1469P.txt file - cDNA_ID_2712570; gDNA_ID_2214572; Annot_ID_135096
atcagccaagtttctccatttctcaatcaagaaaatcttgaaatactcaaatcttttcaagattcactttcaaagatatcttgataatagcctcaaactctggtttcaaagatgggaaacgacgagaccgtacgattcttgattcacttcttcaatggaagatggttcatggtgtttgcttcgtttctcatcatggcttgcgctggagccacctacctttttggtacttactctaaagatatcaaatctacacttggttacgatcagaccacgttgaacctcttaggtttctttaaagatcttggagcaaacgttggtgtcttgtccggtctaatagctgaggtcacaccgacttggttcgtcctcaccattggctcggcgatgaacttcgtcggttactttatgatctggcttaccgtaaccggcaaagtcgctaagccaaaggtttggcaaatgtgtctttatatttgtataggagccaactcgcagaactttgcaaacacaggagctttggttacttgtgttaagaatttccctgagagcagaggagttatgcttggtttgcttaagggttatgttggactaagtggtgcaatcttcacgcagctttattttgcgatctatggacacgattccaagtctttgatcttgttgatagcatggttgcctgctgcggtttctcttgtgtttgtgtatttgataagagagaagaaggttgtgaggcagaggaatgagcttagtgtgttttaccaattcctttatatttctatattcttggctttgttccttatggcaatgaacattgctgagaagcaagttcatttctcaaaagccgcttatgcggctagcgctacgatatgttgtgctttgctttttgtgcctcttacggtttccgttaagcaagagcttgaagtttggaacatgatgaagttacctatcgaagagccaagcgaggtcaaggttgagaaaccaaagaaagaacttgatcttgatcaggacaaagccgccaaggtgaatggagaagagaaggagacaaaatcttgtttctcgacggtgttttctccaccgccaagaggggaagattacacaatattacaagcattgttaagcaccgacatgataatcctatttgtcgcgacattctgtggtttaggatcgagcttgactgccgtagacaacctcgggcagataggagaatccctcggctacccgaaccacacggttagttcctttgtgtctctagtcagcatatggaactacttcggtcgagtgttctctggctttgtctcggaatacttacttgcaaagtataaattaccccggccgcttatgatgacattagtcctcttattgagttgtgctggccaccttctcatcgcgttcccggtaccaggctcggtatatatagcgtcaattctaatgggattctctttcggtgcacaacttcctctgctctttgccatcatctcagaactttttggactcaagtactactctacattgttcaattgtggacaacttgctagcccgctcgggtcttacatcctgaacgttcgtgtcacgggaatgctttacgataaagaggccttgaagcaactaacggctcgagggctaacccgaaaagacgtaaaggacttgacttgcttaggaagtcaatgttataagctgccgtttctgattttggcagcagtaacgttttttggagcacttgtatctttggggctagcgataaggacgagagagttttacaaaggtgatatttacaagaagtttagggagagtcctgagtccgagtctgaattagttcctgattcaagaaaagctgttgaatttgttggtaaataattatcacacaaattgtttttgttacttgaatcatagttgaataaattaatagaaaagagccgtttaatttctttagtctttctcaacttggtttacttttctttaattcaggacaagttgttgaagcatttcttttgtcggtcaatctaaaatactaaaaaagggtaatagtaatcatgtgataaactgataatctcataacattccaaaacatcacgttcacgagttgtaatgttacatcgtagagctgtcatatagcactcgtgtccgtctcattcttaccaactgtggataacgcacgccgattagttgtgatttacctatttgcccttttcagcacgagctctttggacgttcaagtcatagagttaaaattagttacgacacattcctcttacgagaaaaattgtcacaattgtgtcttaggctgtgaaaaggagactccggttcaagtgtatgtttgttaaccgttttgggatttatattcacattggacaaattttgcaggtagagtttagaaaaataaattcacttgcaaaagaaagttttgtttatttttctttctcatgatcgcacatgcatgggctgataggcagatacaacatctaaatttggggtgattcaaatacgtgtttatattttcttctttagagcagttttaaaactttttttttataagcttaacttacccccaacatctctggttttgtagtcaacacattactagtttcataaagttggcttccataaactaaataatagattatagaacttctacatctccaaaagattcattgtttcaaacaaatagaattaagtttttttctaaagttttttttttgtttgaaattgtgtgtataaatctgccaatattttatagttcgaattttatttgtcactaataaatgaatctaaatttttttaacaacccaaaaaatttaaatagttgagttttttttgttgagaattttcttttaaaactagtgttttgactcaaaactcaaaagtacgggttctctagaaactgaagtgttggctcttttaaacacttgcccttattcgcgcttcccaaagctgcaaaagtttcaactttttaagggtttcgtctgaaggagaaggagcttgaatcagccccaagttagagagaactcaacgatg

SEQ ID NO: 26339 - DNA, 3000 bp, Unknown; identical to SEQ ID NO: 12794
  misc_feature (1)..( 3000): 2750-1469P.txt file - cDNA_ID_2712578; gDNA_ID_2214572; Annot_ID_135094

SEQ ID NO: 26340 - DNA, 3000 bp, Unknown; identical to SEQ ID NO: 12794
  misc_feature (1)..( 3000): 2750-1469P.txt file - cDNA_ID_2712578; gDNA_ID_2214572; Annot_ID_186224

SEQ ID NO: 26341 - DNA, 3003 bp, Unknown
  misc_feature (1)..( 3003): 2750-1469P.txt file - cDNA_ID_2712607; gDNA_ID_2214573; Annot_ID_135113
tcatctcatcaaacaatgctcttgcataatccaagctaccacatttagcataaaaaccaatcacagcattacacaaggataaatccatctgaatatgattttcaatcatcttcttgtgaacttccaacccgaaaataagatcgcttgactgtccgcacgcctggaagacgcttatcacagtgactccattaggcttaaaatcagagcaagctaacatcgctttatacatcttcttacagtcctcaaaagacccactttgagaataccctgaaatcatagaattccacgaaacaacatctctctcagacatttcatcaaacactttcctcgcagactcgatgttatcacactttgtatagtacgttatcatcccattgcccacgaagacatctgaatcaaatccacctcgtataacaaacccatgaacttgtcgagccaatgaacccaaccagaaatcatcacagcctgacagtgccttcaacacacaagagatgctaatagaatccggtctggcagcatcggaagagtaacaagaggatccaatccaggacaagaacaacgagaaagcatcgaaatacatctcacgcgaagtataagcgatgagaagtgcgttgtaagagaaggcatttctaacggtaatttcgtcgaacacatggagtgcttggcggaaacgatcctgcctagtgtaaaaactgatgagctttgacgcgaggaagttgtccggcttgatggagaagacgacaatacgcgcgtgaagctgaagcacgtggagaggaagtcggtgacgggtgaagtgctggatgaggtgaccgtacgcaccgccgtcgaccgccgccttgtttagcaagccttgcaaggctcgttgaatttcgaatcccaacttcattcatatctaaccaaaagctaaaccggagaaataaaacaatatgaatatatagaggcaatttaacgggcttattaatgggccttaaagcccatagtgtcgctgtattacagaacggagttttgaaatcgatttgacttttttagtttcatgtcttgtctgagaaattattattgtcgagctttcggttataaacagtctcgatcttgctacagtcgatcactgaatcgtgaaatagctaacgagtcatctgaagttgagagacgagctcgttctctgagagttttggatatcatatcttcgaaatctggtggagtttcgaatcgtcaggaccattttggtttcgttcaggaatttcgacaaacagattcgtggcgattcagaggtcaggcaatttccgaggattttgatctctcaagaaccaaaaatggagtttcaagcgtgctcgaagaagttatgctggaggattcttcaagctctgtcaagcgagatggatggagtttcgatgcttatggtttatcatccgccgtgagatcttgtgggttgaatcgagactttagaaccggttctgggtttcattgtttagcgttgaaaggtgggtttatctcagatgtctacttaggaagttctctggtcgttttgtacagagattctggtgaagtagagaatgcatataaagtgtttgaagaaatgcctgagaggaatgtggtttcatggacggctatgatttcagggtttgcgcaagaatggcgagttgatatctgcttgaagctttattcaaagatgagaaagtcaacctctgatccgaatgattacacattcacggctctcttgagcgcttgcacgggaagcggagccctagggcaaggaagaagtgttcattgtcagacactccacatgggattgaagtcgtatctacatatctcaaactctctcatctcgatgtactgcaaatgcggtgatttgaaggatgcttttcgtatctttgaccagttttcaaacaaagacgttgtttcttggaactctatgattgctggttacgcgcagcacggccttgcaatgcaagcaatcgagctctttgaattaatgatgcctaaaagcggaacaaagccagatgcaatcacatatctaggagttttgtcatcgtgtagacacgcaggtcttgtaaaagaaggaagaaagttcttcaatttgatggcggaacacggcctgaaaccagaactcaaccattactcttgtctagtcgatcttctcgggagatttggtctgttgcaagaagccctggaactgatcgagaacatgccaatgaaaccaaactcagtcatatggggatctctgctattctcttgccgtgttcacggcgatgtctggaccggaatcagagctgcagaggaacgactaatgcttgaacctgattgcgcagccacgcatgtccagctggcaaatctttacgccagtgtagggtactggaaagaagcggcgacagtgaggaagctgatgaaagataaaggactgaagacgaatccgggttgcagttggatcgagatcaataactatgttttcatgtttaaagctgaagatggtagcaactgtagaatgctagagattgttcatgttcttcattgtctcattgatcacatggagttcctctaatattcagggttctctctcattagttttatagtgcataccagatccagatcttttctataatggatcaagttttgctttgaacgttttcaacataacctctattactaatgaaaagactttaatttgtatagttgagtaatataaacacactaatttaataattaaccaggtaatgaaatgaatgtagctgtataatgcggtaaaatgcaccaagagtttctctatgacgtaatgtgaagttgagaaacacacgccatcaaaattttctttggttaataattaaaattttaaggtacaagtttgcacgattaattcaaaatttactacacaagattcataattaaggaatcgaatataggaaagtgtccaactggtcctctcttatatacccttctccactaataccgcactcagaagacgacgacaaaacaaaaaagttgcgagagacagagagaaacagagacatg

SEQ ID NO: 26342 - DNA, 3003 bp, Unknown
  misc_feature (1)..( 3003): 2750-1469P.txt file - cDNA_ID_2712649; gDNA_ID_2214574; Annot_ID_135141
agatcgtgtttttgcagaggcaaaaaaatactttgtgttacggtctccacctgacagccatgttttccggctcttaagtctctagaattcttcttcagcagcataagccttcgacagctgcaatctgagctctcggatgtgttgagttgttgtgccatcagagtgagctctatcaattctgtttttgagaagggctatatcttcttgggcatttgatcgatatcgcctcttccattgagatatttctcttctgcaggcagtgagtcgtgatcgtagattgtcgtcctggtgaaagattctccggttccacccacgtctgacagcatcactgaacccatcacgctcaaccattcttccatcaaaacagaactggttatgcttctgctcaaaatcgctcgtgattgttgtgatcactggtcgatgatctgattctattaactcaaggaattccatgtgggatgcgggaaattgagttaaccattcgttattcaccaaggatcgatccaagcagcaggcaacatcatgagtgtgtcgttttccgacccaagagaaagggtctcctgtaaacttgagatcatggaagtcacaggtttgtatcattttcctgaaatcaaagaaagagctttctggcctcaagttgcctccttttttctcatggttgcctcgtatttcattgaagttccctatagccatccaaggacctgttctttgtgttgctgttcgttctaatctttcccaaaccaagtgtctatggataggatttgggtgaccatatacacaagataaatagaacccaaatccattaatattaacaaaagtatctacaaggtttggggattgataaagaacagaatacagaaatactacttttccacattaaagcaattccaccacttagaccatttggaggaaccattacaaccctatcataacctacatcgctgcaaatatctctgacgatgtcattcctttacttcgtttccatgagaacaatgatgtctggagagaatttcttctttatctcctttagacgtcgaactgcgaggtcattgcccagtcctctgcagttccaagcggctgtcctcatggaggaagagggggttctgggcccaccgcgcctctccccacgtcattcggctgaaccgtctctccggagcaaccactgctttccccagcctcacggatcaccatcttagaaggctcgtgttcttcatcttcttcgatggtgtcctctctcttgcgtttgcccctatccgctgccacatcctcacgaacatagtctctgttcactccattatttgtttccatctctccatggtacgtggagtaacgacatggctcccaatcctggaaatcttccacggcttcatgatgggcattcatcactaatgagagttattttatttattattgtccacgtatttattttgtttttaatgtatttttttttttttttgccttttacagttcctaatccagatttaaatctggatataaccctataaattataagatatactcgtccacataatattatcaagttttttagttttttagaaaataaaaatctattctaaaatttgagaaaatcaagtgagataattttgtgcctcacaagtcacgagattacttagctcggaagggttttgggctctacgtgtgaaaggcataagatattttagttacttttatgctttacaatttacattactagagtacaaacaaaacaacagctatcatggatttttatgacatcatcaatttacgtgtgtcatttgagatttataatctttattttattatcacttctattttgttttaatgagttcaagatcttttcttgaaagacatatgaagactttaacccaaaaagctaagtattgtctttgatgaaactttgaaatcgagaagttttcaaaattttaaacgatgtcaaccagtattttttatttataaaacagtatttttctctaaatatttgacaagatttttttacccccgcattagctaaaacccattttcgtacatatgtttacaaacagtgtccgctcaacaatttcatgggtgtaggataatttttttttatattttgttataaaattttttgtatgataatttagttaacaaaaaaaaaaaaaatgcattaaaaaaattataggtccattctaaattttatttttgtgttatatctaatttttaaaaatattttttaaaaaatatatgtcccttaattgttaaaacatgggtttggattcttggctgtcgcaccgcttgcccctctatttaaaccggcactgtttacaaattaaacattatagaaaataattcttaaaaaccggactaagtaatgaaaattttaaattacaaaaacgaagaatactaggaagctagaactagggaagaaaacttgaagcaccacattagtcaaagagatcgaagaaagaagccattctctaagaaaatttaccattaagattgactatgcactttatttaaaacacttgccaatatatctttttcaaaagtttttttttcataactcatattaagactttcatcttcaaattaaagggggatgagctttccggatgatacttagacctgagttgagtcaaaatcgcatctccctacaaacaagttcatcataaaccagtcgtagggtccaaagactttcacgatccattaaactgacatcttagtgttcaaagatatttttcttggtgttctaaaacatatatcttctgaacatggctcaattgtgactcctctcaagaaaatttaaaggacttgggggaggactatattattatttttagttccccttaaatatccacataataattactgtttgttgttttctttttaattcaaacatacaccattccaaagagacctttgatagttttctttactaaaatattattgaaaattacttataagatttattattaacatgttttagattgaaaattgctcatacaggcacataaacagattgagatg

SEQ ID NO: 26343 - DNA, 3003 bp, Unknown; identical to SEQ ID NO: 26342
  misc_feature (1)..( 3003): 2750-1469P.txt file - cDNA_ID_2712649; gDNA_ID_2214574; Annot_ID_186294

SEQ ID NO: 26344 - DNA, 3000 bp, Unknown; identical to SEQ ID NO: 12836
  misc_feature (1)..( 3000): 2750-1469P.txt file - cDNA_ID_2712676; gDNA_ID_2214575; Annot_ID_135157

SEQ ID NO: 26345 - DNA, 3000 bp, Unknown; identical to SEQ ID NO: 12836
  misc_feature (1)..( 3000): 2750-1469P.txt file - cDNA_ID_2712676; gDNA_ID_2214575; Annot_ID_186315

SEQ ID NO: 26346 - DNA, 3003 bp, Unknown
  misc_feature (1)..( 3003): 2750-1469P.txt file - cDNA_ID_2712696; gDNA_ID_2214576; Annot_ID_135180
tctattagcttttacagaggcctgaaaaaacttagagttcttatccccacgagacatccatttatccctgcttttcaacctccaaaaagattcctcctctctaaaagcaatacccagctgattttgaataacagaaatcttattccaacaaggaaactggtaactcttttcttcatccaaatcaaatcttaactttttaattcgactctttgcgttataatcctttccttttttccagtgactaatagatgacctacagtcaaccagacggcgcatagaagaaggattatgagaagaaaaattacctatccatgctttgtgaatagcagcttggtataaagggtcttcagcataccttttatcaaacctgaaagttcctcggaaaagctcatgatcattaacaaacttcaccaaaaccggtctgtgatctgatccaagtttctccaaaaaccattgatgagaattaggaaacaaagaaaaccactgtgaatttccaaaacagcgatctaatttacattggatccattcttcatttcttttgcctccccaagtaaaactatttccagtgccccccaattcatgcatatcactggttgatatcatattcttgaagtcctgaaaggaagattccactctagatgggccacctattttctccttattagacaaaatatcattaaaatcccctatcaagcaccaaggagctgttctgttcactccaatgttactgattttatccaggagcaagtgtcttagcctctgtcttggattatcataaacacaagagataaaccatctcttacaaccttgagatatctccaaatccagcaagtttttgtcttcaacaaggaaatctgtatgaaggtgatgtttccaaaatattgctaaaccaccactctttccatccggttcaatagtatgaaagtaatcataacccaaccacctaaagactttcaatatgaacatgtcagaattcatggtctccatgaggaacaaaatgtcagggaaatatttctttttcatttccctcaagtgtcgaattgtccaagaattcctcagtccttggcaattccaactaaggatgccttattgatactgcggtggttcttgaggaaccaccgtaatgacagccttttccatacaatccactctttccaagtctgcaatttccttttttcgtttgatagcattagcaaactcaacattaagactaacctctttttcttttgaaccatcacgagctgcttgcttattgtgaactatagaagcctttctttttcttggattcttctgcttaatacttaatcctgatgcccccgattcattaaatccaaaagggaacccttccgaatctattgaagatgcttgatcagcggataaagaaggtaacttggtaggaacaatcttctctcctggattcactaaacaactctttccatcaagaaatcctgaatcagaaaaactaagatctttctttgattctttagagtttccgaggctaacaaaggggcaaacacttttctcatgtgtgagtcgttgacagaggaaacatctttttcgaatcctttcataatcaaaggaaactgaaatcaattcacccgatggaatcaggacttccttaaagttacgcaagggattccgaacatcaaagagcacttgaaccctgatataattttgtgcctgagatttttctaaatctaattccacagtcaatactttcccaacacatcctgcaatttctttgatagtatcttctgtgtagtagttgatcggaatatttcggagtcttatccagactggaagaaacaaaagagaatcatctgaaggtttttccacccaacgctccatcaaaacacaccactcatcctgagtccaaactccagattttaagatttcaattaaatcttcttctgatttgaaaaagaattgaaatctctcttgggataaagcaacacctcttacccttgaatacaacctccaaattctaggcatgtctaatatccaattagacatcctttggagtgacagattcaaaaacctatccactaaactgcaattatttctgtcaatcgagcaaaactgcgcttgattagacaaaataagaggctatcttcgttaattgacatttcctttatcgcttgatccaagtccatgttcatctccactgatagaagaagaaagcactttcctgatacctaaacttggtgaatatatctttgccgacagaaaacggggatatcttcggtacttacctcctctcaaatatcaaaaaactgatgtagagggagaagttcttatggtcaaatcgattgggacggctttattaacggcgaaggagaaattttccagaaaagctactatgaaagagaacagagagtttttttttttttttttaagtactattggagactaattattcatagtagttaccatttaaacacgtaatgttttcatttagatacgataaaaaaagttaacaaaactctagtgtccttgactacacttttcttacttttgacgtggtcactattattgtggactccccaatatctgactaactcaaattttacctttcttcatacgttttttttatctgtttgttaattaattccagaatgagttgtcaaaccagtaggatttctctgcatgtcgtgtcacttgcattttaaggacagattaacggttatgactagggtcggtaaagcaaataaatcgacaaaattagaaaacaaagaaaatgtggaaaaagcagtcaaaagaagaaaaatgttgacaaatgttacgaatttggtttaaatcaaaagtgaattatccgagaaagatgatatttacccccaaaatatctaaacaaatacttaaaaatgcaattctctaatagactatcaaatatcccgatacctctttatatagtgccatcttcatccttagtaatgtacacacacacacataacacttatttccaactctgtctctctcaattttctttctctttctccaaacatg

SEQ ID NO: 26347 - DNA, 3003 bp, Unknown; identical to SEQ ID NO: 26346
  misc_feature (1)..( 3003): 2750-1469P.txt file - cDNA_ID_2712696; gDNA_ID_2214576; Annot_ID_186348

SEQ ID NO: 26348 - DNA, 3003 bp, Unknown
  misc_feature (1)..( 3003): 2750-1469P.txt file - cDNA_ID_2712716; gDNA_ID_2214577; Annot_ID_135195
gacgaaacaatggccacggtcaaaagactaagtgacgttgaaaacgattccatagtcgaggttctcgccggcacgagagcgagctgggtttgctcatcgacaaggagagaggttaaagtgttgttgggcgggtttgaaggtaaggagttaaggaagctttggtaagcaccgctccatggagcaggactcataattccatagttcctcaaacctttgatttcatgaatatcaaccttaaaatcgttgggtaacacatgctcagattcagtattcagcggaaatggagaaaaatgattgaagaaatttcggtaatcatctccacgtagagagaaaatcataatgcctctatgatccaaaatggagaatacttgtactaagcataagcatttgtttattctctacttgcattttttaaatgacctctaaaaaaagcaccaacgattgacattgagtttggcttttggttgtctcttcccttttcacaacctcttacaaaactgacaaaaaaacatatagtggagctagcacaaactttaggcttctctacttgcttctttttaaatgatcctctaatatgttaccaacgattgatcttgataaaagcgacgattgttccctgaataacaaaaccaaaagtaaagattggcagttatttatatatacaaacacagaacacataatgatgatacacgaagaaccatttttcactaaatttgaatcaaagtataccaaacaacattaggaaaccaaacacggttaagatataaagtaagaaaacagcagacctggtcaattgcacaaggaatcaagcaacgaagcttgtccattccagagaacaaattaaatgtgaaaatgagctaggaaaagatggagcttcctgcaaatatatggaatccaatttagaattcaggtacctgctccgcatggagaatgatttttccaatatgatcttcactggaaaagccaaatattgccttagcctagcaagataaaagatataaaaatgaaaacacatgcattagcgacattgtgcaattgaaggagatatatatagagagagcaaagtcaccttattatatcgaatattgtttgaaacctcgctcatattttcttatagaaaccactacacacaaagttaacgttggttgtatatcttccctcttcaaaactttttacataaataatacactcaaaattttataaattatgtggaacttgatgaaatatgatgtttagcgaagagtatattttactattttctagaaaattatattatttactaagagattatatattaattatgttgttgttaagtaataatagaatatttacgttttactggtcttaatgccatttatgaatttgaatgtaagctaatatgatcataattatcggttacattgtaaagaattcattgttataatgacatgcaatttaatgtggttttttttggctaaaaagttcttattggtcttgattctggtcaaacaatatgaactttgtaaatgtaccaattttcttttagagatagttatgtatacttatatttagaaccaataaattaaagaaatttttttgatatgtagataacacatgtcgaatcaatagagcgccacttgtcagtttttttagagcataagtttgaggaaatcttattttattatataataaaatatttttattataactaaaatatattatcctccttgatgacttaacccatctggttttttttttgtagtggcgattgccagatggcttaccggtttccgtcctcgtggacatactgaagctgttattgctattgcatttagtcctagacctggatccccgtaccagcttctctcgtaagaattgttctttttggcatcttatacgctgttttgtgtcagttctattcattggttgatatcatgctatttatgtgtttggaaaagatggtttatttcaactggtaagctccatgagccctttataaaatctttgcagatcgtcagatgatgacacatgtctgatatgggatgctcggggtgtccagcttgctccgcggatataagtccctaagcctcatagtcctattggtgattggctgattgctttatattcctggttgatttatatatcgatttgatctattggaagctataggactgacttcggaatcatattccaggagaaaaccgtggcggttcttctagtaatggtaattttttttgttgtgcattcaatgctaatggatctatctttgtcaatagcagctctgataatcgtgctagagtttactcggtcttgataaatgtttcttgactagattatatatataatgatgattcagttaattagagtagatacttccttggttacaggtttggggtgctagtaagaccaataagaatgatttagaccagctaaatcatgagatggatgttctggctggacatgagaatgttgttaaattacatttcttatcatatatgttatatttggtacctgctcatatttttaaattacatttcttatgagatcctaattttcttaacttagtcattttctgtggttctttctagtgcttgtgctggaagatctggacgaaaatgttccaaattttaagaattcttggtgtgctttctgctgcaattattcgtaaaagtttccttataatgtttttgacactcaataacatatgtatttgtctaggttctcttatgataacatagttacatgctctagtgatggtagtgcaatcatttggatcccaagatcacggagttcgcctgtaacatccgatttcgataagataaccatgacattcaatatgttttcataggagtagaaaccatatctttatttatgtctttcaggtaaaatgctgccaagccttagaagaagatccgagaggttgaaagataaaacaaaagtgagtattttgtaatattgctttgatcttgtggctaaatatgctacttatctgtttttttacgtctttagcaggctaggatcatg

SEQ ID NO: 26349 - DNA, 3000 bp, Unknown; identical to SEQ ID NO: 12875
  misc_feature (1)..( 3000): 2750-1469P.txt file - cDNA_ID_2712728; gDNA_ID_2214578; Annot_ID_135220

SEQ ID NO: 26350 - DNA, 3000 bp, Unknown; identical to SEQ ID NO: 12875
  misc_feature (1)..( 3000): 2750-1469P.txt file - cDNA_ID_2712728; gDNA_ID_2214578; Annot_ID_186403

SEQ ID NO: 26351 - DNA, 3000 bp, Unknown; identical to SEQ ID NO: 12883
  misc_feature (1)..( 3000): 2750-1469P.txt file - cDNA_ID_2712740; gDNA_ID_2214578; Annot_ID_135209

SEQ ID NO: 26352 - DNA, 3000 bp, Unknown; identical to SEQ ID NO: 12874
  misc_feature (1)..( 3000): 2750-1469P.txt file - cDNA_ID_2712752; gDNA_ID_2214578; Annot_ID_135206

SEQ ID NO: 26353 - DNA, 3003 bp, Unknown
  misc_feature (1)..( 3003): 2750-1469P.txt file - cDNA_ID_2712760; gDNA_ID_2214579; Annot_ID_135240
agaaacgaagggtgtactgtacaaaacttttttttcattttttttcgaagagtgccacttgttattgagatgctgacacttgctatattttcttggagatttttatttcatcttatctttttacaatcaattattacatacaaaagtttttttttaaaaatatatacttatataaaaatttatgacttctatatatacatttttgcagccattttaacaaataaatcctataactggacttatttacaacccaatgccattagcattaattttttttccaaaataattaattttactttaaattcttaatttaaattgtcaattacattatcaatcaaatttaatccaaacaaacttcacattaatcccttaaaattagcataaacgtatttgttagcaatattttaaaacaaagttttttgtttaaataaatattattcttactaaacgtttttttgtctaaataaataaaccctgtatttgaacttatttacaatgtcatgctattggcattaattatttagaaattaaaatatttaattaacgatttaaatcttctaaatctttgcttttagagttattatgtcattacctaaaaggcaaaaaatatatatatttttaaatattattatttatatatttaaactttataaaacattattaatatttaaacaaaaagtttaatatatcaaaaaatttaacatcattatataatatatagtttaaaaaatctcaaaaaaaaatccgtcatattttgtgattcaaaattttaaaaatgaacatatattaaccaattagcgaaaaatgtgtgggttcaacatcccgcatcgactaaaatatttagacaatgattcataaataagatcaacattaataaaataaatgttttttttgcaggatgggttttgcgggacgggtttggcaggacgttacttaataacagttgtaaactataaaataaaaatattttatagatagatacaatttacaaatttttatatatatactatctttaaaaaataaattgtccccgcggtgtaccgcgggttaaaatctagtttaaactctataaatggaggcttggttcaatttatttggacacataaaaaaatgtcatttctaccataattttcttattcttctgccataaattctatatattattctaccataatgtcatttttaattaatttaatttagttttaatagatattttaacttaatttgtttaacaactattattatgcatcacgaaatataagatataagaaaataagaataaaagaaatagtggggttgggtgttgaattttattaataaaaaacattggagtgataaaaaattaaagtaaggaagaaagaggaaatgatgtgaaatgttcaaaattgaggtggaggtgctgaatatgtttttgcattgtacatagttttaagcatttaactattgaattaatattttcaataagtcattgtagatagtcatagagaaaacaattaatcaatactatttttgaatgcccaccagcactctaaacttgcacattatcacaaataccaacggtcccaggaattttccaatcttcatcggtctatgtaaacatagatcatttattttggagaacacatttatattattttatttttagcttttcttggattatgtgatacatatggaaagcacaaaatgaaaaacttcacgaaaatatggatcgagatccaagggatattctcaaactagcgaaaaacaaagacaatgcttggacgttagcctgattggaggttgcaaatgaaattcaagcctcagtggcagttaagtcggttaatataaatctttcaggatatcattgtttcattgatgactcttggaaagatagtgacaagtttttgggcatgggatggttctgtattttaccaaatgaaggacatccaaccatgtgtgctggaagcactcgtctgggcaatgaaatgtatgattggccaagaaaagcgaaaagtaacgctttttataaactgtagatctgatgaagatgatgtattttccaacaaaatggccaacattcgctacatacttaaagacgattcaggaagatagtgatgagtttgatttttttgatttatctctaatgcttcgaaatgtaaatgttaaaacagaccactagatacggaatgttcggatataaccacatatgattatctttgtaaacaatactttttagcattgatttattatttgagttaatctaataaagttgtcggaaaaaacggaaaagtgagaagagaaaaagtcgaaaattcagaaacggtttaaagttaaccaggattccggtttttataacagaaccgatcggttttgtaattgagacgaaaacttctgatatcacttaaaaacttcacagaaacaacacctcgatctcatcgaagctcctctctcttacatatcatcacttcacatcaaccaaacctacttctgtctctctctctcgctctctatctctcacgctctcacaggtttttttctctctctgtctctctcttgttctccatttgcgtctctgtttgtttgatgagtttctgaatgttaaatgcagatgtgttttggttttctgtggaagtttttatatctctgttgattgagtttttctctgatgttgttgggctccaaaaaattcgaaacttgtattatctctcgtttaggtttcgtgttctctgcattgatctgcttctttaatttgttaactatactcacgtatgtgaaaaatctgaactttgtttgttaactctaatccaaatcattagaaaaatgcagattgagatttctctaatgcagtgcttgaaattttggaaactagggttcttgttataatgtttcaagtagtgaacttatgtcaacttgtgctttaggtttgatctgattcttaaattttgtttcatatgtggtctttcttacaatgtttctggatttgttgttttagtagaagaaaaaattagaaaggttgtgagaatg

SEQ ID NO: 26354 - DNA, 3003 bp, Unknown; identical to SEQ ID NO: 26353
  misc_feature (1)..( 3003): 2750-1469P.txt file - cDNA_ID_2712760; gDNA_ID_2214579; Annot_ID_186437

SEQ ID NO: 26355 - DNA, 3000 bp, Unknown; identical to SEQ ID NO: 12894
  misc_feature (1)..( 3000): 2750-1469P.txt file - cDNA_ID_2712782; gDNA_ID_2214579; Annot_ID_135226

SEQ ID NO: 26356 - DNA, 3000 bp, Unknown; identical to SEQ ID NO: 12894
  misc_feature (1)..( 3000): 2750-1469P.txt file - cDNA_ID_2712782; gDNA_ID_2214579; Annot_ID_186420

SEQ ID NO: 26357 - DNA, 3003 bp, Unknown
  misc_feature (1)..( 3003): 2750-1469P.txt file - cDNA_ID_2712786; gDNA_ID_2214579; Annot_ID_135224
atttgcatctgaagcacggtggacggaacatgagtatgtaagtacactaaatatttttattcaccaacctatgtttaaatttttttattataaaaaaatctaattaattttaaaattatactgatgcaaattaacaaaattaaatttatattttgatcaatttttgtattagtggtttataaatatctgttattgtttatttattaacacaaaaatttaattaactattaatatatatatatatatatatatatataatctgtaatccgccacaagaagtttttttaccaatcaaaccttattctgtaccgcttattttgtactaaccgcacttgtcccacaaatatgtattctccctgcatatacctcagttgaaccgtacatcattgtaataacgctttccccgcacaataaaaaccgcgattaccattcagacctttaatgaaaatatttaaagttgtcacattaccaaattatgcacatgcaattagctagaagattaaaagataattctattaacatattttaatcattaacagtaaaattgataaaaattccggaatagagcggaatgatgctgaaataccgtgacacaggatatacacaccaagaagatcaagggttttgctggatattcacaccaacaagatgatctaatcttaaagagttttagaacagaagatagatgagttctcaaagagaatacaaaagggtttataaagagaaaagagaagagaagagaccaaaacatgatcaaaacacaagcccttctcgaaactaacagaaaattaattataagtttgaattagaaaatccgttttaaatacaattgactgccatttaaaataagatggcatagcaaaaaaaaatctccaacaatttcgataattttaccttgtgttctgtttttttttactttttgacagaggagtttcatcatacattcttcttcatctacaatagaaaaagagattattgttaattaacttgatttgatgtttgttttgtgtctcgagaagagttaatggaacaatgagtcaaaaaaggcagaagagagagagatggctatgcgaaatgaaagaggcctagcgaagaaacaaagccctaataaaagcagagaaatgaagcgaaaatgcgatcacatccatgattcatttatttttaaatttatttatgttattaaaaataaattataattaaaaacatatacaaaatatttttagttattgtacctaaacccgcaccagtcccgcttaagtttttcaggtaacagaataaatttaggtgtgtttggttactggttaaatagaataatgaatttctattatgtttggcaattgaaataatgtaattcagaagaaaaaaaggaaaatttgacaacattgtgagtttgtttgttcagaaaaaacctttttctactatagatgattactttctgagctaaaagaaatgcttatttttagtttgacatctaacttctcacttgtcaaattactcttttcattactcataaaaatgcattaaactttttttattggttaccgtgaattaaaaatatataatcacaaggatatgtagttgaaaagacttcgttggcccttttcgaatgattttaaaaccatctcatacgtgtgctaaaagttttgtctaccaactgtttgtcgaaatgcttccgaaacgttttttgtttgttgataaactaataataattctgattttctggtattttttatttgttgtgccgactattttgcagacacgagagattaaaggtatcccaaaaatttctgggaatatagttcttattcaccaatcatttgtagcaaacaagatagaaaaaacatgcctaattctccaaagtttgttttcataagtaattttgaataattttcatttctctttatttacttccattattttgatatatagttcatatccatatctcttatgattaattttttaatcataacatgagaaacgataggaatgaaacctatttgtaggcgtttacgatatttcttatgatacattttttttgtaaattagaatttagaagtagtcactttcgttttcattactggttcaattagaatgagatatgataaaactaataatttttttcaattgtctgctctacaatctacacaggattccaaggaaaaaaatactttaggacttcacatcaccacatcagatattgtcaaagacaattttgttttgtgaaatcgaatactctgaatccggctttgatatcgaggaaaaaacgcttgacaaagcattgaaagaaaaaaaaaatattagttaaaggaaccttatacattttatgaagtttttttttttgtaagcacccgaaataaaattgatgaagtttgagtatatcactatgccttatggtttttgccgaccaaaatatgtcgaaattatgaatacatatattttatttatttatttatattctattaaaattattttgggtgtaataataaaattaaacttctatcaattttaaagggaggattattaatttaaataacattaaatcatatatgatatataatcaaataatattttagtaatcttaaaattaaattaaaatttaaaaactgatatttagataatcataaagtattaacccacaacaataagtgattacaatttaaagaactactattagtttcttaaaatattttaaaagcacatgtgttctaaaaaggttacaggtagataagcagtctgctcctaaagaactataaacaataatcacttttaatttgtttaaaaccagcttgtttcacgccctaaattaactaaaatatatctaccattattccagacaaaacgacgtcggttggtgtgtttcacgccggcttggtgctctaggcatctatctgattctcactatcactactgacacaaatccttttccttttgttcctctttctctaaaccaatctttaaaacaacttattcgtcttcaagatttctccaacaagtcctaccatg

SEQ ID NO: 26358 - DNA, 3003 bp, Unknown
  misc_feature (1)..( 3003): 2750-1469P.txt file - cDNA_ID_2712793; gDNA_ID_2214580; Annot_ID_135257
gttaatctaatccttttaataataggaaaacaataaaagggaaacaaatattggaattttaagtaacaaaatctttattatttttttcttttaaagagaaatatttttacttttccaaaagctcaaccttagtaataatatttactttccagatttacccgtatctgatttcagaaaatacagttaatcatctactacgtgtgaaaaaatcattgactagggtcttatgttttaataaaagtaaacctccacgttcacatagattatgaattaattattatttgtgtattttgtagtgaatatcaatgaaaatgtaaaaattggtaaccaacaccacaatttttttaataaattattatttactgggtaaaactacgttacactaaacaaactgaaattaacgaacattcatgggttttggtttttaaaattgttggagaaaaatatgattatagttttagttaatttttatgttcattttgtgtgtgaattagatactgttcttttctccattcagatgatcttttaaattattataaacgaacgtcaatatttatcttcatttagatgaatcatcgaatggaaaaacgaacagtactttaaaagattagcgagaaggatcagttggatggtttttaataaactcatttaaaaaaggaacagaacagcagttaacggaagctgatttaatccaaaatacgaaatgtcataaaatacacctacctaaaaagaattccagcaaaacctaaacctatttctccttcattcctcgacattcacttcgccggacctcttcactggatctctcactagaattcactcctatctcttgccgtaatccactattctttgccggatttctcgtgcgttctctctctctcactcactctctccttctatctctctgtttcatggatttgatttcactatttctcactctccccttctacctctctatctcttgcagtaagactcacgggtttgatttgtccttgagtcattagatggattcgattatttattttagctcgttttggacaaagtaagattcatgggttttgtattgagtttatgatgcttataagctataattttcatgggtttttgtatttgtcgagattcatgggtatgagctgattcatgagttttgtatctattgtgtatttagaaactgatatgctttagaattgtgtgtcagtttagggtataatttaggtcagtttatcactgtcaataaccatctttcagttatatcaatgctgtattttcatctagttcagtattagattgtttgatgaaaagtaacaaagtatcaatatgtcattactaaatcaggatttatatgctaacagagttaagcttagatttgggaattaacaataagctgcatcggtagacataagtcagagaattttgttatacttttaatgtcaacaattttgcttatggaatcagtcggataattttttgcttgtatacatgagtaggataaagctgatgatgttctgtatcttgattgtgcctttatttttttcggtattgttgctttacccatagaccaatccctggtttcaacttttgtggaagcagcacctgttatggtattgacagaatcttagaacaaaaattataataataggtcttgttataatgcattggcaaaaatcatatcttatgtttaattcatcaaaatcataaatgaaaatagcagtatttcatagcatagaatcaaaacatgatagttcagtgccaaagaaaacaaaaagttacaaatgaccttgagaagtttcacgacatcattttattacctgcataacattcaacagtggagaagaggtaatatgttttcatgtgtccactagttttcaatctaattatttcacttagaatacgaaattggtttttcttgagtttgatttctttctttatatgtttgtagagtagatatcataaaaatggaaatttaagggggatgtattcaatcaaacatttcaagtgatttgttttaaaataacaaatcctatgttattcaatcatgaatttttaaaagtttcatgaaatctaatgttattgaattagtgattttaaaatctacttaaaaatcctatgttattgaaaacatttgaaggattggatttttgatgactttaagagacttaattgaatacacttttagcggatttccttagttaaaaatacagaattttaaatcccatagttttaagtggaatttgagaggattttataataaatcataataacttccttaaattcaccaaattcttcaaaatcatataaaaactcaaaataactcaaaatatacgattgaatacacccccccccctaaatgtcaaatataataatttgaatttttttgattgtaaatatgtatttgattagtaaaataaaaaattaatatggttagaataagaattaaaatatagttagatgaaaacatggacattttaatcgtttttcatattagaagtaactagatggatcattcagctgaacaaacaaacaaagttttaatgaaaaacagttagatgaatcatccagctgaactaccaaaaatggaaccgaacatcattcagataaattagtcaaatgtacgatttggatagattatctagatgtacatccgagagcaaacgaacaggacctaaaattgggctagtgtaataaacaatgtggggtggccggccagattaatgcagagaaattataagccttaaaagtttttctttctcgtcattttttttttattggagtccaaaactcagtataaatgggcttgtattgggcttaactaaatcttgaggaatcagcccagagcttggccacagctctcctctgcatctgagcattgctctcgtttcagattaacaacaacaggtttgctggttttaagacaagatctttgtcttctgatttaaaaattgcaactttaactttatacgaatagcagcaagatgattgatttggctactttatagtttaatg

SEQ ID NO: 26359 - DNA, 3000 bp, Unknown
  misc_feature (1)..( 3000): 2750-1469P.txt file - cDNA_ID_2712801; gDNA_ID_2214581; Annot_ID_135268
atcgtagtcggcagccatttcatccaaccgaggggaaggtaagcaaagagtgaatcacgagagattattcgttttcattagttcctacacttgattgcataggaatatcgctatgctaattcttctctacgcctggtcattctttctttgtgtcgcagagtgcaaaccataaaagtatcaaagtttaagacgagctcactcatcaggccagagcaatcaatacatgagcaacatagaattacgaattgtaaagactcaaagaaagagggtttggtagtagcagtccggttttgtttgttagagttagaaagctcaaaccttgaatctatggctatagaggtttcagttgtagcagtcgtttgagttagttatgacttagaaagctgaaaccttttttgaagtgctttatatcttaagacgttagattttattcatagacgctataatgaattgtttgattgcttacataaagtgttgtaaacttcttcctttaatgttaattcttggctttatgactttgcttgcttggtgaaatagttgcattagcactgttgataaagaagaaaaacaaaatgaaggaattggggaatttctttaatcgacatcatgcttggtcctctcctctgggaagtttggaattcttcttatgaagttggactttatgaagttggacttaagtgataccattagaaggagtagtagtaatcattacatgatcctcatctcaatcacataatacatgtgaataaatttatatttcttctctaggaagactatcattagtgttttgatcaataaataacgagctttaagatgatagcctcaatacctgaactcaaatgggaaactttagcctaaggactaaatgagcacatcagcctttattcaagcgtatgatctcttttgcttgtatctgtggttttatgaaaagtagacaaagtttgtggcctttctttattgcttggaaacagggtaggtttgaaataattatcagattataattttcaacttatatataatctgtgaacgactcggtcatgacgagtaaaatatatggagtttggttcgataccatgcatagtgatacccaagtcaagaagcataacctcttcattacctagagaatctacctcaacaagcaagttgtcgtgtttatttgggtctggattaggatccttcttgaagatgcggaagctcttctcgctttcaatatttttctcgtaaagattgtttagaaccatcaaaacctctcctgatgttgtaaccacaaggttaaaaatacttcgaaaaccccatggtccattatgcacgttgaatagataatttcgagtaacatccttgaaaccttggtctttagacaaatcgatgatttgaatgtaatcaccaacaccgatgtaaagaaagcaaccatggagtacaatatcagatacgctttgaaacacatcggtgatgacatattctagttgaatgtgactgtaatgatcatcagctttcttgtaaaaggctaaaaagttgcaagagtcttccaagaaccaaactgcaacaaactctttcattttctcgtctacccacaaaatacctcttaactcttcagctcttggtaatctaaaaactagaatctgatcattagatgcttgccatttcaattccttatcccctttttgctcgaaagtaaagttatctgacaggagagactctagaggcggaagatcgatcctattctcgctaaacacatctattatatagagattggatttagaatccattacaagaaaccaattacccgagtttgcaaggaatatagtcccagagaagtctctcaccgatttgtaaatcctatcttcgtctggattgtacagcacgcaaccatgaactccttcatctggaaacagaattagccatggagattttgtttttgggggagccgtttgtttcgaaatcgaattccaagtagcacgatggaaatctgcaaagctcaatcggttgaaaatatttctcagcaaatcatgagggagttccgacaaggtgagaggattaggagtttccatagggttctgtctgacgttaatgtttgcgtaatttatttggtctttaataatagggttttgacgttagtataaatagggtttggatgcttgtgtgaaaagtaagaattaatatataacagattgaatgtaattatggaaaattagaaagttaataaatatttcaaaaccaagtgaataaaatttttttttatcaaaaaaataaaataattatttttgtcctttttgtgagatctatatatgctaatatagtgttaatcaatataatctaaaggctaatgttcttgtatttgagatcttcattaataaaagagttttatatctagtgatattaatttttatatttttttatgaaccgtgtaatattagtttttttatttgtaatatatactattaagagagaacgagggacaaaaatattccaaaccatttaagccattttctaaaaacacttcacagaaaaaaagcaaacaaaaaaatttcaggataaaaacgtcgttatatgcgctttacgcagtcgatccgggccgcctaacaaactgaccgtttaaacacacgcggatccctttcttttaccctaatatttatagattttcactcggcctctgtctctatctctctcgccttttttatttttcccaacagaaatcaattcaatttttgttgttgttcttattcttttccattgttgtttttcttttctaggatgattttttttttgtttcattcatgggtttcagttcagttttcagagattcttctcgtgattgccccttttattttgttttgaaagtcacaacaatggtcacgttttgatcgcaaacttaatttgatttccatgataaaaattggaactttcttatgttgtgatcatttacaacaatttgtgcgtgatgggttgttctaaatgtagaattttgtttgatcatcgttgggttttgaaagaagagcaatg

SEQ ID NO: 26360 - DNA, 3003 bp, Unknown
  misc_feature (1)..( 3003): 2750-1469P.txt file - cDNA_ID_2712852; gDNA_ID_2214582; Annot_ID_135278
ttatgcaccaactatatagaagcaaataaagaaaaacactagtaattgttaggaaataatataaaatttggaaaaacaaaacgagaattcgatcagcaatgaagtgtaatcacactaatcagcataagtatttgggaaagcccttacattccctctaatgccgtgcaatttcccaatgaggcaggtattgattgatataacgcattgttgtgaagcattctgcaatgacatgggaatacacatacaatgagtagtagagcatatgctagacatcaataatattaattaaaaggttaggagcacatacaaaagccttaactgatccagctttccaagctcagggggtaaaggtccccttaatttgtgataagtaagactcctgcacacaagaaacttcaggaaccgacaaaagatgcaccacatactgaagaaaaaaaaagaatttaaactaaagaaattttaaacttacaaggctataactctttttgtttttgcatcacaggtcactcctttccagttacatggatcaggatcctctggtctccacagaccaataacaccatcagaagccaaaactccatttctaaaactcaaaagcgcctcacctggagaaaaaaaggatttaatcccttcagcaatctgggcggagtaaatggtgatcatgacttgtcaaagacaaaatatagaagagattaaagacacatatcgctgtataccatcaggactaattgcttcattttcattcgttagtgcagagagaaacgagatcaaaagaaaccatgagcagcagcgcttcattagacagatgcccattatggcaccgttcaagcataatatagctactgccaatcatctgaaagaacagcctccggaatgcaacactcgtagcatatactcagctgctccgtgacgcccagtctatcttcaagaaacaaaaagagactcctgaagttaaataaaataatgtcattagaccgtacaacaataacagctgaccctcatttgaaactctatcaagcctcgatcttccaataatcagacaaccaaatcctcaattacaaatcaagcgttccacaacatcgatgcacaacatttgcatggtctcattaacaattacagcacccagaacagtgagattatctaatcggatcaaatccacctcccaaatttgcaaaatcagaaatcgaaccttcagaataaaaccccaactcattatttaaagaggagctcggatagctaaaatcgaacttaaatcacgaaattcggaggacatcattgcaatcacagcacaagaagaactgaagagtcaacaaaaccattcaataatctaaaaaaacgaaatcgattcgccgataactcagaccaaaatctcacttcccccaaaaaaatggcgaaagagaatgggaatttacacgaacctcaaaatggatccgcgaggaggaagatgaagatgaagaataagacagaggaagaagacgcaattgagctgtaaagcaatgtcttaactaacaacttttttttttttgttgttgttgtgatttatgagagagtgaagagagagaaagtagagtgtgcagtggaaatgtgagatactttggagaaggaatcggctagttacgagtttacgaccaatgagagaggagaagtggagaccacacgtgccgatcatgacttattacacgtgtcgaccgacgcattgtataatgccagaactggacaagggcttgttgggtcagttaaaacatcgttattgcgtgggcctactaaagcccattgttatttatttggaagcgtactgtactttactatctttagggacaattcttgtattttcagctttagcggatcttattcacctaaatcaaacaaacaagtgtacttaaaaatggaacaaacaatggactgataatcattatttcatttgcttttataatagaaatcaaaatattaatattggattcaatctttccacgtaacttcttgttttggtaatttcatctatgattcttataaatttggtaccattgtaaaaatatggcttaaatttgagttgttgtttcatgtgttagcagtagacaagaaaagatatctggagatagagagttacatcacctaagacatgaggatggagatggaaaaggtgtaaggtgtggtgtggcttaaatattcttgtactaattatcaatcaaagtttgtttgaaatttgagtatttgtattctgaatttgaattagatatttcaaatatattaaaatccaaagcgaaatcagatcctagcataaatatttaggatattaaaataataaattttaactagtttttaaatcataaaatacacaatgtttttgaacttccataatcaaactaataaatccattttggtttacgtgtctagttttatagaaaatgactatttatttgtattttatagaagaaaagataatccaataagtaagtaataataactcatgattttgttgattttttaaaataaatatttttataactaaaaatgagttattcatttcaaaatattactttattttcttagaaattaatagattgttaatgtaaatatattttgaaaatatttacagaaccaacaataggaaaattcagtactgttaatcatttcctaaaatagtttgaaaatgccgatctctccacgtggagaaagcaaaagaaaaacgctcgttttaagatttgaaataatcgcgcgtgtaaacatttccaatcaaaacgcgcgtgaagggtttttaacaaaaaaattacaccaccgatttaaacgtagaaaccaaaattcccccactctctctctctcattacgctccaccctactcttcttttttgtccttctctctctctctcttgccggcactaacaacacgaagaaatttttttgaaaagagagagaaagtttccaagagaccgtacgaagaaaaaaaaaacttggtatagatcgataagatcgataccgtcggagagataatttcgtggagtaatg

SEQ ID NO: 26361 - DNA, 3000 bp, Unknown; identical to SEQ ID NO: 12933
  misc_feature (1)..( 3000): 2750-1469P.txt file - cDNA_ID_2712856; gDNA_ID_2214582; Annot_ID_135277

SEQ ID NO: 26362 - DNA, 3000 bp, Unknown; identical to SEQ ID NO: 12947
  misc_feature (1)..( 3000): 2750-1469P.txt file - cDNA_ID_2712882; gDNA_ID_2214583; Annot_ID_135297

SEQ ID NO: 26363 - DNA, 3000 bp, Unknown; identical to SEQ ID NO: 12962
  misc_feature (1)..( 3000): 2750-1469P.txt file - cDNA_ID_2712886; gDNA_ID_2214583; Annot_ID_135295

SEQ ID NO: 26364 - DNA, 3000 bp, Unknown
  misc_feature (1)..( 3000): 2750-1469P.txt file - cDNA_ID_2712890; gDNA_ID_2214584; Annot_ID_135318
aacaagatcactaaggtcaatacattagttgatagttgagtaacatgtagtcaccacaagcatgacgattgaaactacgataagcgccactctcctgcgagtacagaaatgactattatacatttgtttattaaaatccaaagattctacaatcaatctaaagatagttttgaataagaatgtatgggttacgcaaattacatgggttacgcaaattacatgggttacatgattcatcatcatcatcttcgtcttcatcactaatctcaaaaacttttttcggtttttaaggtgctttagcttcagacttttttcttctctctgttttagaggcagaagcttcatcacccttgcttcttctttgggtttttgatgcttctggttcacacacttttttcctctgcgtcataggtgttcctgtttcatctctcagttttcttttcagctttttagatcctcctgcttaatcattagcttgttgttgttcatatctaacttgttccaactcaatgactctccgagattccacgtctaatgatctcaaatactcagcatcaacagaatccaacggatcctatcattaacaaaatacaaaaactagtcaagactagcaaatcaatcaaacaaaagtaaaacatctaattgtttatgtgtagtcacaaataacataccattacaagtgttagatgctctgttttgatctgaaatctgaatctaagaagcttcaatgatcgtaaaaaagaaacttgaagagatagagaatgacttttcagtttccttgttaagcaattgagcgtgaactactacttttagggtttgaactgcacaagaaactctaatagagagaaaaagtttgaaagcctctatgagaaatgaagggttttaaaagagttggtttttctttcgtgggctacccgcatacccgcagtccgcaacgggcttgtccgcaacgggcttgtccgctataatccgcagtccgtaatgggcctgcccgcgagacccgctaatttgtggacaaaaaaatcaacgtccaagcccgttccgccatgggctacttggacaaagcccgcgggctagcggccccgcttgacaactctagtcacgttagtaaggtgttaatgtggaatcattttgcaaaacctatttcttctactaaactcttaaaccctaaagagtaaagacatttgcactaccccgcgtggtcgacgattcgacgcttccaatgacgtcatctcgcctctatctccgtttcctccgccgcttctccaccgccaccggtatagattctcaaaccactgcttaccccggcgcaatcactatgtccaaagctaaatccaaactccgcaaagtacaagatccagacaaagccttagcgatttacaaatccgtctccaacaattccacatctccactctcctctcgttacgcaatggagcttacagtccaacgtctcgctaaatctcaacgcttctccgacatagaagctctaattgagtctcacaaaaacaacccaaagatcaaaacagagacttttctctctacacttatcagatcttatggacgagcttcaatgtttgatcatgctatgaagatgttcgaggagatggataagcttggcacacccagaaccgttgtttccttcaatgccttactcgctgcttgtcttcattctgatttgtttgaaagagtcccccaactgttcgacgaatttcctcagaggtataataatatcactcctgataaaatctcttacggtatgttgattaagtcgtattgtgactctggtaagcctgaaaaagctatggagattatgagagatatggaggttaaaggtgtggaagttactatcattgctttcactaccattttaggatctttgtataagaatggtttagtcgatgaagcggagagcttgtggattgagatggtgaacaaaggttgtgacttggataacacagtttataatgttagacttatgaatgctgcgaaggaaagtcccgagagagttaaggaattgatggaagaaatgagtagtgtaggattgaaacctgatactgttagctataactatcttatgactgcgtactgcgtgaaaggaatgatgagtgaagccaagaaagtgtatgaagggcttgagcaaccaaacgcagcgacgttcaggacattgatatttcatctgtgtataaacgggttgtatgatcaaggtttaacggtgtttaagaagagcgcgatagtgcacaagattccggatttcaaaacttgtaagcatttgactgaaggattggtgaagaataacagaatggaagatgcaagaggagtggccaggatcgtgaagaagaaattccctccgcgtttggtgaccgagtggaagaaactagaggagaagctgggattgtattcaaagggtaatgcagctgctgtttcatcttcttctcaaactagagaagtgttagatcaagaaagagaggatgatgtataaagctcaagaagttgcttagaagatcttatttttgtttgtgcttgcttgcttcagctaatattatggcttgtggaaactgtgatctagcgtgtagaagacaaacgattcccaatttacttgtctatgctttgagccaattactacgcttgcgttgaaagttaaccgtatttttttgttcttttcccccagatcatctgaactatagtctgaattgtgaaaatttcatatcgtttaacaatttaggtttacagttatttgtaaaaccaattcccaaaatgattagtaaaaaaaactcaaaatctctagactctaaataggctaaatatcttaatggatataaaagagcttaatgggcttataggcccattagagacggcaccactctaaataaacccctctttcttcaccgtccgttctaacttctagaaaaatcgccagaagtgacgaaattgaaaatctcagatttctcttaatcggcgacggagtaacgaaacaaggagaagaagaagaagaagaaaatg

SEQ ID NO: 26365 - DNA, 3000 bp, Unknown; identical to SEQ ID NO: 26364
  misc_feature (1)..( 3000): 2750-1469P.txt file - cDNA_ID_2712890; gDNA_ID_2214584; Annot_ID_186594

SEQ ID NO: 26366 - DNA, 2637 bp, Unknown; identical to SEQ ID NO: 12982
  misc_feature (1)..( 2637): 2750-1469P.txt file - cDNA_ID_2712894; gDNA_ID_2214585; Annot_ID_135343

SEQ ID NO: 26367 - DNA, 3003 bp, Unknown
  misc_feature (1)..( 3003): 2750-1469P.txt file - cDNA_ID_2712929; gDNA_ID_2214588; Annot_ID_135375
tctgcaaatgagtcccatatatcaccaagcacaaaataaggcacaagtttattataatcatcatctgctcttctttctcgtagcaatgtctacacagagattatcaccatcaccatcagagaacaacacagacttagattaaaaaaaaaaaaacataaaatagagattgtaataaaccttggataaaaactgagccggtacggatggtgtgaccgactctaaaaaccgatctagattactggaagataaatcggacggctcgagttgttgtttatgcggagaaggagctgatgatggaacgttagagacgtcgctctgagctctacggagctgatcgatgcgctgattggccctgcgagtttttgcggaagtgtagaaaggatcgtcgccgtgtctgcctctcgtcaactgaaatccagcacccaacatctccgagtagtcgtagttgagtttttacctatatatctatatatctatctaagcttaatttagttgatttagcgtgaatatgtgtttgtctccgatgagacggcgaagaagcttggtcgaatcggagattccaaagaaaggggtaaaaatggatcgaatgaaggagaattgatagaacaaaaaccttctgatgatatctaagctccgattaaacaggcaaaagattagtggaagaggaaaatctgaagaagagattcgctgaaatggagagagatttggtaatttcaaaaaaaggggtcaatgaagagagaaagacgattggttagtaattggagggggagagacaaaaaccattgaataacacatgaatccctcataagttagtgtttttacattttggtccttttcattttgatgattgattacagttttacccgaaacttctttgtaattcagttatacgcttacttataaacaagttaatcatacggtaatgcaaggtattttagactgctcagatgcataatgtagatggtgcataggaatgatttggggttatgaatgtaacattttaaaatctgatgagaaatatgtgactatgggaaatataaaggggttaaacattggcaaaagccaaaggccatatgtatattaggaggctctttaatttaatggttgatactcgatgcttgcttgctagatgctgacaagattataaagaaataaaaaagaaaggctgtaaaacatttggtctttctttttttgttcatagataagcttcacaatgttcaagagtaatcaaaaactatactaccattgaagattcgactaatgcatgtacaccaactacattcatcattcattgacaatgacataaacgtatcagaacatatatattcatgtatttagtaacacttatatgagattataaggagttttttgataagtgaaatgaatgaattttcacatattattgagcacctgactctgcattctgcaataggcggctagtttttatcagccacataagtagtcttttattatttgaagatatgcacatgaccaacacattatagtgttctttttgcctggcttcgataggtccacaaataatgggtttgatagaaaacaattcttgcataatgtgggggattcgcctagctagacatgaagcatttttttggagtatataaatggggattttagcaatactatgattagtatttggattatgtaatctgtgatacttaaacacattgcctgcatataaatccatatattatttaaaatatatcatttttgatttttgacagaaatcatagagattacggaaacagataaaagcacactccagaaaattagagacaaatattactattcaaaaagattcagatcgctactaagtgagggtcgccaaatcgcgagtcgaaacaccgattttgagtccgcgaaattcggaaatttgcgtggttgccacaataccgaagtactggaatcctcatcgtgaatggaatctctatatgtaatgtttcagtgtagtaaaattcaggtcttagcatttgctttctagatttgtatgtctaaaataagtgttaagcttgaatgtttgataacagtatcgaccataaatctcccatctaagccgataatgtgttttgatcatcattgtgaattttaaatcagtgaaccataagatagcccaattgggcccaaataatgttgtctgaataaagcccattatcaacagtaacggagttcaaagagtgggtaagagatgtgcgacgtcgttcaggagcttctatatcacaaatcttccttcattttctcagtggaagaggagggaagctttcttctgtagatcttcgcttcctctctctatctatctctgttgagaagaagaatcgaaactttgaaatctgtgagaggaggggttcatagttcgattggatttgatgtctttggtgcatctgcttttgttcgccggccttgtaatcgccgcttcctcttcttccccgggctcgcgcttgattctccgggaaatctccgatcagaaagacaaagctgttgaattgaacactaccaacttcgattcagtccttaaagacacccccgccaagtatgccgtcgtcgaattcttcgctcactggtcagttcttcgattgcttttcacttttcacttaaatctccacttttggttggtgggttttgcagtttatctactacctacagagtttggtgctggatctagcgttgggttctcttgcaagtgtgttcttataggaaaagatttgaactttatgatcctattagtgtgcttcttctctaatcattgctactagaaggctttatattttcttcagttactagtttgggcgtttactgatgcgtgtatcgttttcaattgattctaggtgtcctgcctgtagaaactacaaggtaacataaactattcaaagcctcaactttggagatttccgttgcctaaaaagtgttactcttatgcagcctcattacgaaaaggttgcaaggctcttcaatggtccagatgcaatacatccaggaatcgttttgatg

SEQ ID NO: 26368 - DNA, 3000 bp, Unknown
  misc_feature (1)..( 3000): 2750-1469P.txt file - cDNA_ID_2712933; gDNA_ID_2214588; Annot_ID_135374
ttggcaaactcggtaaggaaaattatagatacacttcaaagatgaaacatagtttgaatctgctagatatatttcgagtcaatgctgaagataaacgtccggtggatttgtggcacaaacctgccaatctgcttgttaatccagttgagcaaacgctcagcagtgcggccgtcatcaataacaagtatctcacttttatcctttttaggttcccaactgccagagacaaacttagtaggaggaccccaaaagagcattggatagtgagaaacagagaacttgtcacagagcttggtattcgtctgcgctgccagggaaatggaccgacttagctcagaaacagtgaaccaagagaatttaacatgattcataaaaacattcggagcatggagtaaataccttcattgcacaatcaactctagtcatcaaaacgattcctggatgtattgcatctggaccattgaagagccttgcaaccttttcgtaatgaggctgcataagagtaacactttttaggcaacggaaatctccaaagttgaggctttgaatagtttatgttaccttgtagtttctacaggcaggacacctagaatcaattgaaaacgatacacgcatcagtaaacgcccaaactagtaactgaagaaaatataaagccttctagtagcaatgattagagaagaagcacactaataggatcataaagttcaaatcttttcctataagaacacacttgcaagagaacccaacgctagatccagcaccaaactctgtaggtagtagataaactgcaaaacccaccaaccaaaagtggagatttaagtgaaaagtgaaaagcaatcgaagaactgaccagtgagcgaagaattcgacgacggcatacttggcgggggtgtctttaaggactgaatcgaagttggtagtgttcaattcaacagctttgtctttctgatcggagatttcccggagaatcaagcgcgagcccggggaagaagaggaagcggcgattacaaggccggcgaacaaaagcagatgcaccaaagacatcaaatccaatcgaactatgaacccctcctctcacagatttcaaagtttcgattcttcttctcaacagagatagatagagagaggaagcgaagatctacagaagaaagcttccctcctcttccactgagaaaatgaaggaagatttgtgatatagaagctcctgaacgacgtcgcacatctcttacccactctttgaactccgttactgttgataatgggctttattcagacaacattatttgggcccaattgggctatcttatggttcactgatttaaaattcacaatgatgatcaaaacacattatcggcttagatgggagatttatggtcgatactgttatcaaacattcaagcttaacacttattttagacatacaaatctagaaagcaaatgctaagacctgaattttactacactgaaacattacatatagagattccattcacgatgaggattccagtacttcggtattgtggcaaccacgcaaatttccgaatttcgcggactcaaaatcggtgtttcgactcgcgatttggcgaccctcacttagtagcgatctgaatctttttgaatagtaatatttgtctctaattttctggagtgtgcttttatctgtttccgtaatctctatgatttctgtcaaaaatcaaaaatgatatattttaaataatatatggatttatatgcaggcaatgtgtttaagtatcacagattacataatccaaatactaatcatagtattgctaaaatccccatttatatactccaaaaaaatgcttcatgtctagctaggcgaatcccccacattatgcaagaattgttttctatcaaacccattatttgtggacctatcgaagccaggcaaaaagaacactataatgtgttggtcatgtgcatatcttcaaataataaaagactacttatgtggctgataaaaactagccgcctattgcagaatgcagagtcaggtgctcaataatatgtgaaaattcattcatttcacttatcaaaaaactccttataatctcatataagtgttactaaatacatgaatatatatgttctgatacgtttatgtcattgtcaatgaatgatgaatgtagttggtgtacatgcattagtcgaatcttcaatggtagtatagtttttgattactcttgaacattgtgaagcttatctatgaacaaaaaaagaaagaccaaatgttttacagcctttcttttttatttctttataatcttgtcagcatctagcaagcaagcatcgagtatcaaccattaaattaaagagcctcctaatatacatatggcctttggcttttgccaatgtttaacccctttatatttcccatagtcacatatttctcatcagattttaaaatgttacattcataaccccaaatcattcctatgcaccatctacattatgcatctgagcagtctaaaataccttgcattaccgtatgattaacttgtttataagtaagcgtataactgaattacaaagaagtttcgggtaaaactgtaatcaatcatcaaaatgaaaaggaccaaaatgtaaaaacactaacttatgagggattcatgtgttattcaatggtttttgtctctccccctccaattactaaccaatcgtctttctctcttcattgacccctttttttgaaattaccaaatctctctccatttcagcgaatctcttcttcagattttcctcttccactaatcttttgcctgtttaatcggagcttagatatcatcagaaggtttttgttctatcaattctccttcattcgatccatttttacccctttctttggaatctccgattcgaccaagcttcttcgccgtctcatcggagacaaacacatattcacgctaaatcaactaaattaagcttagatagatatatagatatataggtaaaaactcaactacgactactcggagatg

SEQ ID NO: 26369 - DNA, 3003 bp, Unknown
  misc_feature (1)..( 3003): 2750-1469P.txt file - cDNA_ID_2712951; gDNA_ID_2214589; Annot_ID_135397
cactcaccaccgcaaaggtccggctaagttccgtagcctcgatttcggcgagagaaatggttacctcaagggcgtcgtgacggagatcatccacgatcctggtcgtggtgctcctcttgctcgtgtcactttccgtcatcctttccgtttcaagaaacaaaaggagctcttcgtcgccgccgaaggtatgtacaccggtcagttcttgtactgcggtaagaaagctactctcgtcgttggaaatgttctccctcttagatctattcctgaaggagctgttgtctgcaacgtcgagcatcacgtcggtgatcgtggtgtcctcgctagagcttctggtgattacgccattgttatcgctcacaaccctgacagcgacactactaggtttgtttctcttatccaaaaatcttctgaggcttataaacattttcagatctgttgattgtttgttgtagattatgatgatcttaatcagattaattagaaaatgcttatgtatcattggttatttagtgtagtttatgatgatgttaatggaatcatttcgttaattagaaatgcttgtggtatagttgttgtagtcttgtgaatgatgatttgagtatatgtttgcgcaggattaagttgccatcgggttcgaagaagattgtcccaagtggatgcagggctatgattggacaagttgctggaggtggaagaactgagaagccgatgctcaaggcaggaaacgcgtaccacaagtaccgtgtgaagaggaactcatggcctaaggttcgtggtgtggctatgaatccagtggagcatcctcatggaggaggtaaccatcagcacattggtcacgccagtactgttaggcgtgatgcacctcctggacagaaggttggtcttattgctgcaaggaggactggtcgtctcagaggtcaagctgctgcttcagctgccaaggcagactagagttaaaagagataaactttgtttctcttgttttctatgtttcaagttttgttgtctgtgtttccttttgaacctcattctgaaatcctaaaagatttttatgataaacctttctctcttctcgaaaagcttatgttattcacattgcatactctcaatacgcaaagttttcattttgtacatatgaaaattatgtaagaacaacgtaaccaattctcgtgatcgttaaagtggtagttgaattgcagattttcatcgaaacagcagcccgccgcattgctatcacaaagaatcaagtctttggtgttagtcgaattgaagcaatctgaagtacctaaaaaaaaattacaaggaatcttaaaaacgaatcttgcagcaaaccttcaaaatgacacagaggactcaaagacatttatgtgcgtaatacaagtctgattctatagttgattagctgagttttggtaatgtgtaatatttgtgtttatgtgattgagatttacctaaattgtctttgtccatcaatttttagcgtttgagactttgaggaattggttttagtatctgatccaatagctagatttgtgttgctcttgctctataattgtcttccaggttgaatatggtccaaggataattggttatcgtcggctcttagatgtattctgctctagtcatgattctagacaagtgtttggacaaggtcctgatgtgggtaaccaatacaggtaaaagagctgtttggttatctttgagtttgtttgtttggcccaaatctataacatttgaatatatgttgaacagatcctgtattttcactaactgtacagaagagttgagactggcttctaccagcaaagaaagggagcaacttaatacaagaagcagtatcgtgacttctctcttgtcgttgactcctctcttcacgagtctcatctccgacgcttcttctcttttcttctgttgctttggttctcatcttcatcacacttattgcaagtttgatcaaaggctcaaaatccaacaaaattcaccattttagacaccttgggaagcacgttagccggaaaaccttgaaaaacccacaagggttttcaatgcgcctcctttggataattggatcatacatacaccattattggataatactctcttgagtcatgaagattaacagaaaacaacatatcatcaataacacaagacggctcttgcctcagatcactcaacttatctatttctctccttgacttcaaattagtttccctgggttggtaagcataagaacagaaccgtgcttatccctcatgtcaaattttctcttccatcaccacatatgtcacaaactctcagtcgcagaggtgcgtaggttcggacagaaggtcttattgctgctaggaggagaggtcaagctgctgcttcagccgccactagggttgttaaacaataaataaattaaaaaaaaacatttgcttctcttttatatgtatatatatccgtttggaccttgttctcaaattgtaaacatttttatgataatctttgtcttctctctcgaaaagtttaaagtattattgcaaattgtaaaaagttatcatcgcaagttttgattattgttctcgaccgaataattttaatatttaaacgaaccgtatcaaaccgagtatttggttatatgtttaaaacgtctttaagtatcaactaagtagaaatatggtcaccaattgctaactggtaaaagcggttgagactcagcatgatgagagagtctcaccacggttcgagtcgcgatattggtacctcgctcctaccaaaaggaatcatgccttaattgttagccgaaataaagtaatctaaatcacttctttttcaataatcatgcagcgaaccctctaaatgaatcagagggtctcaactctcaaagacagagtttaatggaggtggagccatggcgtgactttttgagcgactcgactcaatcgactacaggttgttcgttcatatggagtttcgttccctggttcgaaacagcagctagacgaaaactgtgtaatg

SEQ ID NO: 26370 - DNA, 3003 bp, Unknown; identical to SEQ ID NO: 26369
  misc_feature (1)..( 3003): 2750-1469P.txt file - cDNA_ID_2712951; gDNA_ID_2214589; Annot_ID_186731

SEQ ID NO: 26371 - DNA, 3000 bp, Unknown; identical to SEQ ID NO: 13034
  misc_feature (1)..( 3000): 2750-1469P.txt file - cDNA_ID_2712964; gDNA_ID_2214591; Annot_ID_135428

SEQ ID NO: 26372 - DNA, 3000 bp, Unknown; identical to SEQ ID NO: 13036
  misc_feature (1)..( 3000): 2750-1469P.txt file - cDNA_ID_2712968; gDNA_ID_2214591; Annot_ID_135427

SEQ ID NO: 26373 - DNA, 3000 bp, Unknown; identical to SEQ ID NO: 13041
  misc_feature (1)..( 3000): 2750-1469P.txt file - cDNA_ID_2713015; gDNA_ID_2214592; Annot_ID_135438

SEQ ID NO: 26374 - DNA, 3003 bp, Unknown
  misc_feature (1)..( 3003): 2750-1469P.txt file - cDNA_ID_2713019; gDNA_ID_2214592; Annot_ID_135436
ataataacatttaattgtttgcgtataaaattgcacagttttattacttcatgtctttttcttctaagcaaaaacaattgggtattaaatgtccaaataaaaattaattgaggttttttttggtttttttcgttcttctttagttgatgttttataaaaatgcacacctattaagaaataatataattatataattaattttgcattgaaaattaaaaatatcatgtatttaaaaacaaaaataaaagcttaaaacatcatttataagagaacggaaggagtattaagtgtaatcttttgcattttgttttaaaataagtgtcattttgtcatttcaatgtatatgtttgataataagattttcagttttattcatattatattaatgtataaaccaatagaaaatatataatatattaataaaaagtaacatagataattgaatttttttaaatatatgtgtaacaatcttaaaacacatttctaatgaaacaacatttgcagataaattgttttttatcaaccacatgttgttcaaatcgagtaagataaaagtaaagttacatcaatcttcattatcttggttgactttaaaatattttccaaaaaagatataaacttgtctggcgtatttttacttttggattattttatttctctcagttgtttcatatatggacggagtatataggatttcgcacgtcggtttgtaacttttcacaatgataattattcgcatttagttatcatcatactccatgaaaatgccttgttactccatttacgtatttaaattttattgttccttgtcttgtccaactcctaaataatttctgtcaagaagaatttttttatatatttttgtcataaaaaagagaagagttgtctaatattatatagtaacaagtttagagttttcgtgttcgttgaggacttttcgtttccacattgtcaaatactataataagttagaattgttcttttttatttcttcttctttttattgattttcttgacaaatgggtggatgacaataaggagtgttgagtttttctatttggtagtcgtaagccaataaaaactatataacagtctatatcacttgaattctgactgattaaattcttttaaaacgaattattctctttggaaatatttctccaaaacttattttaatattataccttgactatttgattattcttcccttttattattgacttttctcctgagaagaacaaaaccttgtctgattcggtttgtcaaggtgtaatatatatttttttttttttatcaattctcatatatataatgatgttgagatgtattagtcaagaattttctatactttttaagcaaaatcatgaaggtttctatgaggcttctgagtcatttcttgagcatgttcatatgtgacgtccctgtagccctcatagattaagaccacaaaacttggtctacacaagttttaacaaaagaaatagcatcaaaaactttgtctggtaaacttagatactttgaattctgtcataactatggtctatggtataagttatgagtggtgaataaggttcctcataacttggttaaagaacatttcttaattaggacttgtcgaaaaagttgtaatacttcatacttgtagtaatatacgtactagtgatgacatgctataaaagtcatattggtttaagaatgataacataaccatttgtatcattagttgtctaattttacaagagccatttgtcacataaatatataaggttacgtgtggaatcaaaaactaggtagctaacaagtctttaatacctatatgtatcgttaattcaactgctgtgtgtaggtttgattctgatcatgcgctcgtgtgcatgaaagtaccacacatgcatggaagtcaacgtacaagttgataatatccactaggtccgatctaaaaattatgtcacttcaactctgtggcacggcattgaagtcatcagccaccatgcatcatctattacgaaaccgatttctttggaatctgaatctgaatgttagtcctagtcccactaaaggttgcttcgtcgtaaaagttaaagttttttttttcaagttttttctttctttctattctataatttccaaaagatcagattacatcaaattcagaaatagaaggatagtttaagttcatttcaatgaaagttgttgtagcgtcactatttttttaaaatatccgtttttaacaaatttagctaaatgacatttactataatgtttgttttgtctattatacataattaagaatcttttaaatggaacgcaaggagtattaaatattgggtttctgaccaaaagaaaggatggcattgattactagagatttcaaattctttcaaatgatatctaagtacgtacaaataatatctaagtacgtacaaataataatgtatttttaaaaataatatgctcatatattggtccaacatttaatggacaataagaagacatggtgtgaatatatctgactcactagccgtgcatggattggctgcttcagaaatttctgcactctatccacttgaaggtgacatatatatacacattttaatagtggttattggtacttacttggagtataaatatacgcacatatcagatcagattgtatcattattgtctacatatctttttgaagccgtcataacttgcaagtaaagaatggtcagtctaatgttctttagttcggcctcacctttatgctcttctccatcaaaaattcccaaggctaggtacttgtttacaattataatgcaagacatggattcaaatattttacgctattaagaagtctttctcttataatcggcttcttgatacacttaacttcactctttcttctacagtttggacttcgagatgaagaaacttggtaaatttttctcatcttgactctcaaaactatgaacagaatatagttttatagttggttatcataagtctcttgtcctaattatg

SEQ ID NO: 26375 - DNA, 3003 bp, Unknown
  misc_feature (1)..( 3003): 2750-1469P.txt file - cDNA_ID_2713041; gDNA_ID_2214594; Annot_ID_135444
gatgagtctcacaataataggaaaggaaataaaaccctaaccaagtaaatagtttccaaaatcaataatataaaaaaagaaatgatcctaatagaagaatatatccttctgccttcatgtcaaaatattcgtgatgtgtatttgatgtgtactccgtgatctaaattagttgcttggagatatggttctactcatatcatagtctctagccatatttaacaagcactatccttgattgtctgaatgctttatcaggtttacctttgtatgcgttttcttttcttttttctttttttttgttagcaccgtttaatttgtgttaattgtaaaaatctatatgttaaatagaccatgcaacctgtatcgtagatcataatactttagcatcgtttggacgatattttacgtgcatccaatatctagagtttggctgaattgtcagccatatactagttgcaatctcaacatttcaccataattttttttgtttcttaaataactacaaaaaaaagaaaaatctcgataaaattatatatatttttagatttgtttttaaaattacatctccatgaaccgattagttaaccgataatatgaaaaacattcatttgacgttttatagtgaattagttaaaaaatatatatggttttatatattacgagtgtgatcgatacgtaagaaacaattcctagtaatatatatcttttttttgtcggttcctaataatatatatcagagactaatactggagaatttcctagaaaccttacaactttttttcttgtagataattgcgaaatgatgataatttagctttttgacatggacaggtacgtgtcatatctctctcaaatcacatcaaaataaaagttcgttccatatttcgttaattcgttccatttaatttttaaggaaacatgattttttaatggaacatgttattctaacgtggttatgtgaacttctaaattctaggttatgacatccatttatgtaaaaaattagtatattatatttttaaaagaataaatatgttacaaaaaataagattgcaattttcataacatttaaatgtatgccaaaattatcctaaaactaggtcacaacatttcttttttacttttactccaaaattttgtcatcccacctaattatttattatttagatggtagtacaaccttctagataatctttactctttacaatcaacgtgaaaggaaacgacaaaaaaaatgactcttgtgtcaaagagaaaaggaagtaaccttccttggccacgtctgaaaatgcggaaaaaggactttgggtcgtgacagtgaaacttagagatcttgtcgacaaccagatcgcttcacttgattagtgatactttatcatcactattttagtatttttcgtgtaattttaaatttcatgctctctcttggacttggtccgctaatgattccgatttttatacagcttatcaatcactgtaggagtatcattaaaatttatgtatttttgataattacgaagttatcatatacccatttggactctagcctctctatatcataaaatcagttatgtgaattgtagtggctagtagaatatgagttagtataagtgtatttgtttgttttattagtcacaagtcgtttgtcttattctcaaatagtaatttgtatagatatatagatagatacaataaagtatcaaactagtagaaaatcggtacccaatctaattcattagtaatcaattcatatctaacaatattttatgtgttaatatattggcaacaacttcatcaaatatgtggcaacgattacatcaacgtcgtaaaaaacgtggcatccacgtcagtagccatgagaaaagatatatggtttcacacgattcaataaatttagatataaagtttaaattattgaaatattggatatatattagcatagaaatgtttgtagttagaattaaatacagatactttactttactatgaaatgaccgaactttgttcaaatttgccaaaggcaaacgctaagaaattcacttttgagtaaaatgcaagtagaaagatggtacctacaagactacactcagtgacttggatactgattaaataaattgcatggatagatatttcgatcgcggtcggcatgaattaagtatctatagccaagcaatttgtcagtcaaaagctccattagaaatttaattagaatatttgtattcacgatagccaagcaaaagttttgcacgctctaaaatgaaagtcctatagtagtttctacgcataacgcattgctctttttatgctatacttactattgttcagtgcatatagatttgtctctatatatccctctgtcggcagagatttcaaaaaagatccttaacaagtatcattagtgcacgccttaactatccaaatagtaacaaacttaaacaatagaaaaacttgaaaaaatgtatcaattttcaaatttgatacgaaaaaacttgaacttttaaaatattatttaaatcataaagttttctttgatattttttgtaaaatagtcaaattttgttgaattcaccatttcgaacatatcgctaaattttcataaataaaattaactttcgattaagagaataaaacaacgtcgttttatcaactacaaaacatagtcgttttgttaaaaaagcgtagtggactggagttgccattcacgtttattcatatctagttacaatgaatccaacaacggaccataaggggcccgacgcaacacgtataatactctgatacttatcttcttaattactacttaatttgtttctactgtgataaatttcctttaactttacttttgataaaatattgtcttctttttattctactacggagtagttttttgacttttctcatttcctattctgttcgtttctataaatagagggcatgcaacgtaacatattactcatcacttacttaacatactaagagagttattagaacttgcaaaaaatg

SEQ ID NO: 26376 - DNA, 3003 bp, Unknown; identical to SEQ ID NO: 26375
  misc_feature (1)..( 3003): 2750-1469P.txt file - cDNA_ID_2713041; gDNA_ID_2214594; Annot_ID_186829

SEQ ID NO: 26377 - DNA, 3003 bp, Unknown
  misc_feature (1)..( 3003): 2750-1469P.txt file - cDNA_ID_2713048; gDNA_ID_2214595; Annot_ID_135487
cgtgacaagaatcatacatgaaaatgccatgaagattcgtgacgatggtgtgcctgtgaatttggtggacctcggatgaataagcatgcgcttgagttgaggaagtggaagatgaggggaaactggaattatgtctttgttaaaggttggaacgatgtgcttgatgctaacaagtcgaattcgtttaaggaaaaagacgtctttcctctctggtctttccgatctggaacaggtaaactctgttttgctctcacccctaaaaattccagcaacggctctacttcaggagaatctggcagtggcggcgatggtgcttctacttgaggtgaatctggtcaggtaccgttacccattcctccggcaatagattctagccactctggccaaggctgttcaggagagagcagctctagttcttcctaatcataactctgcttattgcttaagccacaagtaaaacggatttagttttcaggcaaatctggcttggttttctttcttttttttgttcagttgatgaaatagtggggttttgtccaaattgtgagacccatgatatgatgttttgatttgagtttctttctttatgtttgatttttttttatctctctctgatgctgcctatgtttacttatgattagcattgaaaatgcagaacaaaggagagagaacttgttttcttatattatcacaaaaagatccatcaggctacaacaacacacaacaagtgtaaagtttcttggctctactaaaaactcaaaagtcaaagttggatcaatcatcaccataggccttgaaacaataccgctcaatataaggagcgttaaagaaaagatcagcttccaaccatttcggataccgaacaagatctccagctaaaaactgcatatacctcttgcttccttcgggaacaactcgaacctctccttgttcaatgtaaaccaactgatccacctgccaatcccatggcaatttgcatttccctgtcttccaaactgaccatctcgaaaccccaagttcctccaaccgtttctgtgaaactttccgttccactttaacattgtatagctcctctaatggtttctctgtctgcatacaagtcaccctaaaggctctttgaactgacaggttatttgtcttcttacatgtagtgacagaacctgggaatggtgtagtcattatcagacttgccatggctgcttttatccaatcttgtcaaacctgagatccacaatgaactttaaataacacatatcgaaaacattgtgatgtgttaaagtcttgtaactcctgaaacagagaaagaaggtgaatttcttaactctagtgagtaaaagtgaattatattgtaaagctgaaggctttatcatttaccctctttgcaatagcttatatgaatcaatgacacagcgtaacacaaaaactcacaattcaggaaattagctaatgcccatttgctatttcgattggaaaagtgaaaactcatcgcaaaattgatgatatacgaatttaacccaacaagcaaaaaaaaggttgtcgatttcaaaaccaaaaaaaaaagcggaagacagattatacgcatcgaaatcgaatttcttaccagcggaagtgtgagtgagagtaacccttaaaccctgaagcagtcaggcttatccgatccccgatataataaatgttacagaaacgaccctaatatttatatttgttttaactttagactagaagtttgttttgagttaatgtgacccaaatattttttctatagacgtaacgttttcagatttgacgtaatccattggtcaaacttttgcattgagaatgttgacgtagatgatcttttgcatagcgcgttatatcttcttttttctttttctaggtgtggttatacgtgacgaaaataaattacgtttagtaaatggagaactacattggtcggttaaccaaacaaacaaccaaacttctctaacgttgatattctatattattaggtatacactaattaaatcacaacttgcgttcacattctcacctgatatgaaaccaatactcaatttccttaactggaaaaattccatgtggcctctagaagataaagttttcggatttaatattttttcgtgaattcttacagaaaggaaaatggttagttgaatctctaaatgaaactattctcaaaataacatatattttgttttacgttgttaagttgtttactattttgtcagcattgtgaggtttagttgtaatattctctctttttcttaattaacatgtagatattcccgtagagaaagcactaaacttttgctttgagaaagaaaagaaactctttattaacaaagaaaggaataacatataactcaaataaagacatgctgaatttatcatttcattcatggtgcatattctaatgttgttaaaagtaaaatatttcgcattagaaaggttaacaaaaacaataaaaaaggcatatcttcatatcattgttatattatattttttggtttaaaatatttaaatcctctgtcagaaaccagagagaggcgtattaaggtttctgcgttttgttaaattgatcttgagctctaaaggctgtctaatgcagtgttttatttaattagcctttataagatttaggcaaatatacataaacaactaagtaaatatatacttcctctgtttgaaaatatattagcatatctcaataaatattgaaataaatattattccttgcatgtgtgagtcatttacttattcttaaaatttgagttacataacaaaaaaaaggaagcttcgtagcagttttcgttcgtcgttggaataaatatatggagacttagcaattaatggtgccctcacgcggttctactaaaccgacctcctttttgcttcccttacctatatatacatatatctctatcttcacttcatattaatctacacctctacatacgattttcattaaacacttttcaaaaacaaatcataatctgttcgaagatg

SEQ ID NO: 26378 - DNA, 3003 bp, Unknown; identical to SEQ ID NO: 26377
  misc_feature (1)..( 3003): 2750-1469P.txt file - cDNA_ID_2713048; gDNA_ID_2214595; Annot_ID_186901

SEQ ID NO: 26379 - DNA, 3003 bp, Unknown
  misc_feature (1)..( 3003): 2750-1469P.txt file - cDNA_ID_2713056; gDNA_ID_2214595; Annot_ID_135483
cctcatcgtcgacgtcgaaactctattacatgtaaaacatatgttatacggacgatcatttgattattttgttacccttatattattcatatcatatacgagtgaatgaaactgtagtatgagaaatggtctaattaatgttttaactatatgaaaaaaagctcttactctggtgtatcgtacatatcggtagtgagtttcctttcagaaaccacgaaacagtcgtcaatttcttctctatctccatttctttctctggagatatttgacagggctttcttaacttccttgatgattgaccttatgaaatccttctcagatttatcactttgatgtgtaaaagaaaagaagattaatgggtttagtagctttcctttacacttacttggtatcttgtgctacaagaaacagacaatttttatgattgaaaaatcgtaacctgtgttctggtaagcacaatgcaaacgttcgggaaacagaagtcaaagcttccgtccatttctggtatctttctggttcatgatgatatctctcaatcagatccctgaatttatcgccgaattttcctttaagacccttcaccactgcgggatcaagcttgtagaagatgggaatcgctatgattttcttttgatcaacgcatttcttgatctgtaccagctcgtccaaacaccattttgactcggtgtatccctcagagaagattaccaacgcgatttttgactcacctatcctcctaaacaggctgattaggtcttttcccctcacctcgtgctcatctataaagacgttgatgttttttttcttcaaggcaggcacaagaaaactgatgaagcctttgcgtagctcttttcccctaaaactgatgaacacttgaggtcccgttgggatcactgatacattagaagaagaagaaggagaagaagaagctattgccatccgatctcgagttctttcttagaaacaaaaggagtttgatcgattcttgtttgaaagaaaagaagaatctggaagacgcaatgaaggaacttgttctgggacagcaaaatctgtatgtcttttttttttttttggttggaattgaaattacctacatcctatcgtcgttaataattaatattcagacaaaagaaactttttggtatatttcctggaaacttcggtgcctaaacacggaagttgcaaaggaagaacacgacataagccccaataattgaatggagaaaagaattttctaagaatctctggaaaacaagtgactacttctctgaccacgcatagggggaaaggaatttcgtcctgaatttcagaaaaatttcgacgtaatttctttgcaattcaaggaaaatttgcctcaaatatgttgtctcaggttttgtactacactactcaaatatgtttaagacaagttactaatactcaaagttacatgaaataaatagttagattgtattgcagaatccaatttgtaaaattagaattggttttaaaatatttagataaaaaaaatataaattattattagaacttaaaatattctattaaaaattttatatattttttacaacttatttaggtgagtcttatctagttacatacgatgatgaaagttgttgttgctagactccagatgaagagaacaaatgtgatgatttggactagaaatattaattgtcattcttctctggctccaatggttattcaaataagtatatgataattgaaattttaataaatgaataatgaaagcagaaaataataagagtatcatgttggaatctttcacgatagaagatgaagaagttgtagaaaatgtccaaccaataacgcaacatattggtgacatcttttgatggggaagtgctgatgtttgggagaggtccacagacaactcaacaactatcaattaataagtatactattttatttaaaaaaatcagaacattatcactagcaatatcgtatttcttatgtgtgaaaagaacacgattcctaatttctgctggttagatagattcatggcatttttttcttctttttttcgtggtttttaggaatttgtaatgctaatcagtagtacatgagatttttgctaatcattctccaataatctggtgtagcatgtgaaacacgtacaactgaacgaagcatattctgtcaacgcgtagtagcctactaggaattgatattattttttgtgtgaaacacacgtgttttgtgtgcacaaacttaattaggctagtgagtcgatcgtgacatcatatttgaatttcacataaaggcgatgttgttaagaaaacatctaaaagctaaaagttaaaacctaatgatggacatttcatatgatacttcatcgatgtttagtacaaactatagcgacgcgttgcctaatttttctgtaacttttcttgtgatggcattgaaaaactaaattctattaagttaaaatattggaacgttatagtaacatttactatcaaccatggacgaagtttaagtttaacattaaaaaaaaaaaaaaaaaaaacatggacgaagttccatgctcgctgaagacatcgaataagtaatatttcatagcgttttaatacaagttaattagaacatttttagagacttaacacgttaggttaattaaaaagtggtttaacattgtttaattaagatagaaagcggccattgcaagtttgaaacacaaatgaggatagaatatgatccgagtaaatatcaaatcatattttataatgtaatggatgttcaaagaaaatgtataaccagataaaatagacgaaagggatttgaaccatgagtcagcagtcagtatccattattaaaaaatagagaaaaacaaacactaaaaagaaaagactcgtcttcctataaataccttcaaacatctccctttcttcacgcctcttattgttgtttgctatataaatcctccaatttctcaatattctaaacaaattatatattttcttacttacttgttctcttgtaatg

SEQ ID NO: 26380 - DNA, 3000 bp, Unknown
  misc_feature (1)..( 3000): 2750-1469P.txt file - cDNA_ID_2713075; gDNA_ID_2214595; Annot_ID_135464
tctacatcaccatcaagaacaaactttgacaactatatgcactgcaatcagataagcattccgacaaaacaaaaacatgatttgtttcactccgaagcaagatgagagattcactcctataaaatcgatatcatcggaaagagatactaaaagttactttttttagttaggccatacccaaaaagtagcagaagatgtgtaaagcacaaacctttatcaccaaaagctaattacccagaaccacaactatcttcgataatctacagcgaggcacaagacaatcctgagttcagaagtaacaaaggcttcaactttggaagcatcgacaatcttcgatagagaatcaaccaaagaaaaataatcgaaaattgatactattattaattaattccctccggaaacagacctagaagacgaatctatgtctcactcataagagttcagtgagaaaaacccctagttaaagttgtaaactttgaatcagattcggattagtaagacagagaaaaaaacgaaaagcaaaacccataagtttgcaaaataaaaaaaccagagatcaatgaccaatcacctgaaaagagaagcggaggaccacaagtagaatcaagaacaagtgatggagggagaagaagaagaagctatcatcttccccaaagtagtagaacaagagagacagagagagagagaattggagataaagatggggaaaagcaacgggaacaagacaggcgccaatgtctttgttactaattaattatgtatgtaatggtgagtcttcccactcaggaatgtccacgacaatacttcaccttccttattccaatgttcttatgctttaatcttctttagaagatgctcggtcgttctcctccttaatatgtttttttatttaacgatccatgttttttcaccaacatactgtacatactttagcttcataatataaaatcgaaaatgttaaatatatactccagaaagtttctttattaatctcatcgattgaaaatgggaacttatatataatcggaacatgaaatattagttcaatattctttgtacatttataaaaccataaatttgtgtaggaaatgaatccaaactttcttttttagtatttcatgtattgaaaaatgatattttagaacaaacttagagaaaatcattgcttaaaactgagttttttttttatatcagcttacatataaattaaaaaaccataatctttttaatcaatcaataatgaattgtgttattattttaaaattttaatatcaaaataatgagaaacaagaacttaattaggaaggacaaaacaaggtttgctacaaatgcatttgcgggtgaatcctttgcaacgaccgtcagtgaaaccttcgctaatgcatacttggcgacaattcctccatttcagacacatacccttccagtccaagctctttgcttcacacatttgttgtccttcaaccatctctatatctataatataatacattatcattattcaataaataattgaataataatataattataatcatataaacaatcaataattgacttattcttcaatatcatcaaatattaaattattcaagtagatgcgtaaaaccccatgcattaaatattaaaatataagcgtatattatatgttttagtaactttttaatattgtgagtttgtgagaaactagatttgcatacctggtgaagcaagaagaatggttaagaagaaaagtgttggaattaactgcatagaggtagtagagctcttcattttatttcctactaactagttaagcgatatgaatacgtggggagaattgttgatattgaaaattagcgtgagaatgtcgcatttatagtaaacatgtgcacaaagcttttttggtatatcaacgtatgcatacgataatgaagaacaataggaatatgtggaaaagaatctgatcttgacgaaaaatatctgcaaatacacatacgagaatattttgttgtttatatatatctctagtactgtactgtactggttaaagatatatgctaatgattttttctttctttaaccactatgaatagacaatctaccataagagaagagattgaatcaacatagttaaagtgggccgaggggactgatacaatgaacgtatagactatagagtgttaagaaaattacaaagtggtagtaatatcatagatgaatttagactaatgtgaagctagacagatatgcaaaaaaccattcctccataagttcttccaaaaaaaattcctttataatgatatatttgtagtttagattttggtgtgttttgacttttgagtttatatctttatccaataaaacaaagttacgtacaaaattgatcaaagccagtcacacagcctaaaattaactttagattacattatcactaacttgcttagataggaaaccatcgttttaatcaatcaatcataaatttggttatctataaagttttaacataatatcaatatacagagaaataaaaaatttagtacaaatgtttggagtttggttgttacataattcgcagattgtaaaatttaatagtttattacattaaacaatgatgtaagcacagttaataaattattattctaatgacatatccgatccagatgcaatctgaatttcactcggaccagtaaatttaccaattgaggtcggtttgattgcctataaccggtaaccggcgagaccgacagatatcatcagaaaagacgaaagagtttcatgttttttttttttttgtttaggcttttagccaaactctctctagtctctctctctctctctacttgagagtgccgtctccattttctcaacgtagtcgtttattttgaacaaagactctctccgtttaccaaaggtcatctcttttcttcctccttctctcacttttgattatattttctgacttcctcctcctttctcagaaattctctttcgatcttctctacagtgttgttaacgatg

SEQ ID NO: 26381 - DNA, 3000 bp, Unknown; identical to SEQ ID NO: 26380
  misc_feature (1)..( 3000): 2750-1469P.txt file - cDNA_ID_2713075; gDNA_ID_2214595; Annot_ID_186875

SEQ ID NO: 26382 - DNA, 3003 bp, Unknown
  misc_feature (1)..( 3003): 2750-1469P.txt file - cDNA_ID_2713083; gDNA_ID_2214596; Annot_ID_135493
cgttattttctgtatatgtgagtttatgtatgtcaaaatgacatgatgagattttttgtaaacaacatcttaaaaacaggacatgtgatttttgtaatcgtaaaaactttgggatgcagtttattttctaatcaaaacaaggatatatctaagtaatcgaaatttttttcgaaaatagaactagatgacacttatagattatagatcacacctaattttgaagatgtatctaaaagtccattcaatttttctctgttcccctaataagaaatcatatgttcatattcaaaaaataagaaacacaaaaaaaaactttaagaaaaacacagatgatcaaccgtctggctagagtttggtaaaatattaatatcttatgatttcatattgttccataaataaataaaaaatcataacataagcttttcttgctgattgtctaaaattatgtatagatggaaaaagccaaatcacatgtgatggagccagatttgagtgagagtcatgtgtcaattgtcaaaaacatcgacattataagtctttaagccatgtgcatactggtcagaatctatttagcaataattgagttaaatatcttagatatttttgcatactgttttcatatataaatttattccaaagtttgaaatagtcgatcgaaaacacttaacaatagtaaaagttgaaccgatcaaaggttggatacatacattcagacagagacacccatatcatcaatcatgtttcaatcttcgtggaacatccacataacattattttagtggcaaaataaaaaatgtgttaaatatcactagaaatacaaaaaaataaaaataatatataatatatgcttcatcaataggtgtctggtcttcaaatcatgtaaatcatatactattaaattaaaatgctaagatgagtttcttccatttcattcaagatttggtttggagcaggagtagttcacggatatgattttagtggattgtttataatcgtgacttttgttttgtgtttgatcgacttgatcgacccggccaacttatgatcttccgtaaactaaagtcaaaagcaataatatttctttctttttttgtatgaaaaaagcaatgatatttcactgatctctacggagtaaaatctctttcttggacttcatttggcatagattcttttagttcgtttcacattctctttcagtaccagagatttcttctgtatgttttaaatcttggtcataccgtctttacagcactagcctctagtatcacaatagataatgattttctaataccaaaaccatatagtcactcatctggactagatagattttgaagtcctctagtttctatgtagtgagatcctccattcatttctcttgactttcgtgaggtttgagaatccagtcatgtaacccatagcaaatgattcgacaactgtattacccaatgtcaccatctcaaataaagaagagaaataggattataggaatactgatcttccatgtgatctaattttgtatatatcgcacacttatcaaaatccattgtaaattgtagttttttgcttgaaaagaaacgcaaatagtatcagcagaaaaaagctacacaaatagtaccaccacttttttgtttatctttagaaaaacatttttattactatccacacaaaaaactactaagaaagttataacatcatgtcaataattcaaaatcattatcaatgtcaaaaaaatattagctttaacaataactaaactcagccatcaagcccagataattgtatttaagtatttgagtttttaaattgcatttgagtaatttactcgtaaatcatagctcatggaattaaactaaaaatttcttaaaaaaaggataaaaatccagtaaacgttggaattttatggtaaaagttcgtcttcaattcttacgaaactcatcatagctatcaatatcatacctattaaaatcattagaatcgtctagaaaccttttttaaaagaatttacatcgtcaggtcttaagaaacaaaatatttattatttaccagatacagacataaaagctgacgtgttgacattttaatttgatggaaaacgtataaatgcacgacacgtgctcctactggaccacttgataagttacgtaacttatcaagcttaccgaaacgaacacgtgataacagagaactaaattcacaatttttgttattgataaaagaaaatatttaaattttgaaaaagtaatattaacatatactagaagctatataattagcaaataatatagaaatgaactacttatctaattttagttctaaattatttaccaataatttgttcatatcttgaaattgttaattgtatatcttaaatctttgactgaatttaactcttttaatattaaaataattaaataattaatcttaaggtatttaataaataaaaattactaaaaaaactacaataaaagatctatatccaataagaaaattaataattatattgataattagggagcatatgcgttattataaattacaacctaacctactttaccgacccaaagcctaaaaaatccgacctttttttgttttctctctctagaagtctctctgttttcatctttctctctctctctctagctcttcttcctcgtttctggcttttctgggaattttgatcctttggcccccattgctcgcttgaattacgaatcagatatcgccgatcgtcgtagatctgcgttgatactgtccggctgagtaaacagggtgaacaaaaaccaaaaacagagagggggtttaaaaatcctgaagaaaatcgcatgaatttgtttggaagcctgattttttcatcttcgatttcgagccacttcacgacttgtcttctcatctttattcttcatttctctccccagcttaatagtaataataataataataatagtaatcgtaattccaataatctcgagagtaatcgtttgatcaattgaaaaaaaaatcatg

SEQ ID NO: 26383 - DNA, 3003 bp, Unknown; identical to SEQ ID NO: 26382
  misc_feature (1)..( 3003): 2750-1469P.txt file - cDNA_ID_2713083; gDNA_ID_2214596; Annot_ID_186923

SEQ ID NO: 26384 - DNA, 3003 bp, Unknown
  misc_feature (1)..( 3003): 2750-1469P.txt file - cDNA_ID_2713087; gDNA_ID_2214599; Annot_ID_135530
actttttcttctaacacgaaccttttcccttgtctttgttttctttttgttttgttttgttttggagtttgtttatctttatctgccgaaagtttaagacttcagcctcccaccttggcacctccttgcgtccacgtcatcttaatatgtaccaaggtttctaagttcttcatgtcaatagacattataacatatttggaatccatattatgcaaggagacatcggttttactaatgcgaattgaggggcttgtataaaatcggtctgcttcagaaaacattccatttttcaacccttgaaagtccattcagtttaccatccaagagtttttccttgttgtgaatgataagaaaatccataacatttatctaattttatcgtattggaaaaataatttaatatttctgaatacatttattaaaaatatagttaaaaacgatgtatttttagcgttttataattatttagcattatttagatgttttcgttattttgttattacatcattttaattattattcatgtgacttgaaattaattactttttaaggtcgaatctttttttacgcctgcctttacacttcttattagaaggttatgtatcgaaacagccatccaaaatttaaataaattctaaaagaagttatatatattatgaatgtatggtgatactgacatgggtagggtacattctttttctattgagttagttgatacgttaagttggatgagatataacttatactatcatataagctttttttaatttgtgtgtttcaagtttggtcggttttgtttatgtcttttgtaggtggggtatacagaaaaataagagaaaaaaaaacaaagtcaaagctgactttgacgacaaatcgctaaccttcgagagatgatgataacaagcctaattaaaatacacgttacgtcgcaatcaattgcttcaatctcattctcattgcatgtcatccttagccgcggttagccgaccatactatcaacgatgtgcatactatcaacaatgtatttgtaataattaagtagaaaaataaagaatgttccaccgtccaaaagaaacacaagtacggtcctgagagggcttgagatattttgcttagtgatatatgtcaacatcttagttaagccccaccggttctgatataaaagtggggaaaatatttcataaccacacaacaaatctctctgtttctcccgctcttgctctgttttctcaaagacaaaagaggacatcgtcgttgactcctcttctctatggctactgctaagaacaagggaaaatcaatcagggtccttggtaccagtgaagcagagaaaaaggatgagatggagttggaggaggagttccagtttagtagcggcaagtataaagattcgggtcctggctcggacatgtggttaggagatgcttcctctacgtctccaagaagtcttaggaagactagaacctttgaccgacataatccctatctcgtatcttcttatgctactcctcagccgccaacaacaactacatgctctgtctcttttcccttttacctccctccagcgattcaaaatcaacaacgatttttacacccgaatgacccttcaggacaaagacagcaacaaatgatctcgtttgatcctcaacaacaggtgcaaccatatgttgcacaacagcagcaacaacaacaacatctattgcagtactggagagacattctgaagctgagtccgagcggaagaatgatgatgatgaacatgttaagacaagaaagcgatctgccactgacgaggccaccggttcaacccttcagcgccaccaagctatatagaggtgtcaggcaacgccactggggaaaatgggttgccgagatccgtaagccacgaaacaggacacgtctctggctagggacattcgatacagcagaagaagccgccatggcctacgaccgcgaggccttcaagttgaggggagagaccgctaggctcaatttccctgaactttttctcaataaacaagagccaactcccgtgcatcagaaacaatgtgagacggggactactagtgaagactcaagcagaagaggagaggatgattcgagcacggcattggcagtaggaggggtgagtgaggagacgggttgggctgaggcatggttcaatgcaattccagaggaatggggacctggaagccctctatgggatgattaccactttcccatttctaaccataaggacgatcttgacgccacacaaaactcttcttctgatacaatttaggacctttgttagaatatagatatgcttagttgtatgactgatctagcttgtgttttttttttgggtggagacagtttttgtcatcttccacattttagattctattttcgaccatcatttttttcttgatcggtgactatgaatctaatggggtcaatcattttcacatataaaacttaagtatttggtgtttgtacttcatcagttcatcttattccatagaaagagagtgagaagtgatcaataacccttttaactgaaaaaaagaagaagatcaaaacctaaataagatttaagtacatatgtctaattcgacgtaagacatttttggaaacgatcaatgtactaacgagttgaattctgatgaatcttgagcatgaataaacggactttgtagtttgtacaattgataatgaaacagagagcaacattatgtacatgtgatatatgctgcatttatttatgggcttttattagatggaccgagctctagcaaaatccaaagtaaatgggcctaatcctaacgtggacagacaagggacacgtgtcacactaccgacatctcgtggagttggataagccactcgaaagtcgaaactcagaagatccaaccagagccatcatcatccttccaatggctattacttgagaactcttctgattaaacatagcaacaacaacaactcttcttctcctctctttctcacttcaatttagcgatg

SEQ ID NO: 26385 - DNA, 3003 bp, Unknown; identical to SEQ ID NO: 26384
  misc_feature (1)..( 3003): 2750-1469P.txt file - cDNA_ID_2713087; gDNA_ID_2214599; Annot_ID_186993

SEQ ID NO: 26386 - DNA, 3000 bp, Unknown
  misc_feature (1)..( 3000): 2750-1469P.txt file - cDNA_ID_2713093; gDNA_ID_2214599; Annot_ID_135525
tgtctcagaaaaagagaagacagtgaacaactatccaaaccgcacctaactagtgaatacgggagggcaagggagggttctcgctcaaatgcttctatgcttcctccatccaatacattcaataaaggtgaaatctcatatcttgatttcttcacttttagatttcaagaaagtcacatgtttgttttctcttcttcaatgaaattcaaacaaaagacaaggaggctagaccaaaagagagagtaggaggtgcttcgaagctgcatggtggggcagaaagaagcgtaggaagtgaatcaaagcaggagagtcatgagatagacatgaatggcaatgctatggatttgatgcatccctcatcaattccacctatcaaaagggtcatcgcaaaggcgactgaacctgctgaagcatctctaaaaaggacaaccagtaaatcccatggtcccttgacagctgtgaagcatttcacggtcgcatctctacaacaacacacaaatagcttttcccacgaaaaccttattggaacaggcatgcttgggagtgtctacagggcagagcttccaggtggaaaggtatatatgcattacattcattctttctttatgtgtattcaatttccgcaactgataagttagtttactttcttggatagctcttcgctgtgaggaagttggataagaagtctcccaatcatgaagaagaaggcaaatttttggagctagtgaataatatagatagaatacggcatgccaatattgtccaactcgtgggtttctgttctgagcacagtcaaaggcttctgatccatgagtattgtaggaacggtacactgcacgatttgctgcatattgatgacaggttgaagattgaactatcatggaatgtccgtgttaggattgcactagaagctgcaaaagctctggagtatctgcatgagatctgtgatccacctagtatccaccgaaatttcaagtctgcaaatattctccttgatgacgatataagggtgcatgtctcagactgcggcttggctcctctaatctcctcaggtgccgtaagtcaggtaagcaagactcctgagaaatctgatttgcttgtctcatagcatttgtatatgttccactccaagctagtttgtgcttgttttagttatcgggtcaactcttagcggcctacggatatggagctccagagtttgaatatgggatctatacaatgaaatgtgatgtctacagttttggagtagttatgttagaactcttgacaggtcgcaagtcatatgacaagtgagtggaaatgaggtcttattcatatgtatttgtggtttgaacttttgttcttaaaaagaaatggaaacgttatgcaggaaacgggatagaggagagcaatttctggtgagatgggcaatcccacagcttcacgacattgatgcattagcgaagatggtcgacccatccctcaagggtgactatccagccaagtcgctgtcacactttgctgatgtgatatcacgttgtgttcaggtaagcatcactagaaaagaatacaaattttcttacaccaatgtgaactacagtgtgtattaacatctatgtgttgggacagtcggaaccagagtacaggccactaatgtcagaagtggttcaagacctctcagacatgatccagagagaacatcggagaaatgactcaaatggggataatcagtatacgggaagaagatagtttaaggagattgtctcttatacaaaacaagtggtattattagtattctttagaaagtcgaaaccattgttctttaacgagccttgcttgtattattatatatgtagagtgtgtgagtgtgacacaggcacacagcttactctgctttggccttttagtctatccacaacacccccaatgtatttccaccggattaggattagcaatctctgagtttttccaaaaatccatagtactgctacttcaaattttgaatcttttttctttctaaatagtattttatcatattcttcataatatgattcatctctttagttttgtcaaccaataatgttttgtttctcgtttcagtgtgatgatgattgtgaattagataaagcaactacggtaaaaccactataaattaaaactatgcagaaaataataaattataccggtctcgagtcggattagtgtaaaattaacaaaattctagataaaagtatggtatcaataacatcataaattaataatcacataattagatctatatttaagttaatatataatctatggttttaattttttttaagtattgaattttcgttagagtatttctcaaacttttattgaatcaaccaattgttttgtctctaaatttaattgaattatgttgtgtttttaaactatcctatgatagtatatcgtttataacttcgtaatacaattagccattatttttttgcaaattttcaactttttggtatgcatcatgttcattccaatagtctactatagttgaagttattaatcataaacttaaatttatgtatatcatttgtataaatgatacaattattgtgatttactgccaaatgatttttttgaaatattaaatttacaattctgatattacaaaaattataacatccaaattgaattatttcaactcatatttttctaaaattttaaaaaattaaaacaaacatctttataaagtaatggtgctttttttatagaaaatttatcatcactataaattaataaaatattatggtcccatcattattattaatttttgtagattttcattttactaatgttaaaatgttggtttgttggttatctccggattagaaaaccgggtataacccagacgcgccaaacacttccttattactctaaaacgcgcacccaattgcttcatctccaatcgctctctctctctctctctctctctcgctcggtgtgatccgtgtagagagattggatttgctgagtaacggtgcaatg

SEQ ID NO: 26387 - DNA, 3003 bp, Unknown
  misc_feature (1)..( 3003): 2750-1469P.txt file - cDNA_ID_2713101; gDNA_ID_2214600; Annot_ID_135561
ctttgggtggtagtgaatataaccagagtcatagcgagaataaagcagcttggagaacacttccatggctaacacgaagaggtagggagacaagggatcaccttgccttagacctttagtactgttgaaaaaacctcccgagaccccattaatagagattgagaaggaaggcattgagatgcactgataaatccagttgatgaaccgatcagggattgcaagcgccctcaaagctgcaatgacaaactcctatttgacggagtcaaaagcctttctcaaatccaccttgagcattccccaaggtgagatatgcaacctgttataaccatgaaccatctccgtggtaaagagaacattctcagctaaagatcttccaagcaagaaagccgactgagattgaccaatcacttctgaaaataagccctgcaacctgccagtcaaaaacttagatataattttgtacagcgtattaaggtaggagatgggcctaaaatctgatatgaaagaggcgttagaggttttagggattaagacaagggtggtagcattccactgcttaaggagctgcctagagataaagaactcgtgaatggcagcagtaacctccgacccaataacgctccaggaatctctaaaaaattcaaccggatacccgtcaggcccactaaatttgttccgcgggagagatttgaaagctgctttgatctcatcatcactaaacagcctttacatctcagtagactgcgcctgagagcacctataggtaagcagcaggttcatgtcatcttgctccaacgagaagggagtctcaacctcacccaacagcctctcataataggccatacaatgatcaataataccttgttgggagtcaatcaccaccccattgcagtcaacaagggactttatggggttaaaacactttctggaatccgccattctatggaaataggaagtattgctatcaccctcagcaaaccaagaaaccctggatctttgatggaagaaactctcctcagcagaggaaagcaaaagccacttacgctgagcctccagttccaaggctgcattgagatcggaggcattggcaagagtcaggtcttggcgccttaaaaaccactcatgagcctcttttgtacgcagctctataccagaataattgagcctactgaagtctttaataggcttcttgagggctttcagctttttagaaaccctgaacatgtgagacccaaccacgttagttgaataccaattttctataacaacattcaaaaactcctcattattcaacagaaaattatagaacttgaagggacgcttaacactaataccatcagcctccaacacaaccccacaagacacatgatctgagaagtccaaattaccaaagacaccaaagacggaggcgacaccggaagacccatcccgaacaccagaagagacagaggatgcagcacgagcacagactgctgcgaacttagaagagcttgtgaccaccccacgaagaagcttctttttctttttctttggcattagaacagaaatttccgaccaccgacgtgaggccgacgttggggaaaaagaagcgaaacgaagaaaagaaaggtttttaaaagatactttgaatatagagatcgaatttaatgttgtttctgtcaccaaacgctcagcctaaatcgaagctctacctatctttaagatatctattatctaccatgcatcaactactaggactactctttttttgcgttttattaattatctttttacttatttaattttctataatgtaatcttgtttttcttaacctagctagtatattttattttggtgtggtgaacatccaaattaatatataagaatgtttgaaaaaataatatattaatatcaacgctcattgtgttcttataacaaaaaagtaaataaaaaagtagttgctttcgtttattaacattgcttttctatatagagtttatattatgttgcataatatgaaaggtctgttatccaaataattaaaaaagatgcactgctcggagccttctaattaaaatactttatacactagacgtatgctaaaaacaccgtattgtcttttacatagagatcatataacaaaaaaatgtatatataattttttcagtatatatgaatatataattataatgatacaataacaaaaaaagccataaaattgatatgggtcaactttccaattttcagtttgtaaaaatatgattatctaacaattttcagttttttgtttttgtttttttcagttgttttgtaacacctccgaaatccgaactatacaaaactaagagtatgccaattgttcggttgtcgaataacgtttcacaattacgcaacttgagaaaaactaaacgtaggtgaaaaacaagaaagctaactacagtatgtggattcagtcaaaacttaaacccaaaaaaatccgaagaatccaaaaactaaaagagcaaaacataagtcaaacctaaaaaaatggaatgggtcacacgttattaactaatatactacctgatgcttaatgcttctgaaatgaacacataaaaaaaattgaataaaataaataaattagataaataaaaataaaaagatgtcggaatcatcaaaacgtcaccgtttcatagctcaagagctccgtcctcgaactttgcgcttcaattcccaaaaagtttcttaattttttattttttctcctgtgtaagtgcaaacatctaaattcccaagaaccaaaactaaagatccgtaaattcgaagcaacatcaacgttctcgagcctctctaattattgttttatagaccaaaaattcttcgtttttcttttttccaggaatttttaatttgtatgggctgatcagaaaaaagccactttgtgttttcttttttagctggacggtgtctgaatcattcaatgcctttctcttctctacctttctaaatctctctctctctatctctccatcgaagcagccatg

SEQ ID NO: 26388 - DNA, 3003 bp, Unknown
  misc_feature (1)..( 3003): 2750-1469P.txt file - cDNA_ID_2713128; gDNA_ID_2214600; Annot_ID_135553
tggatgcaaaaaaatctgatagttgaaaaattgttggtttcttgaaaagcttctgttatgaatctgttgttaatcatgtcacgagttagtgttatcctttagatcagacttatactttgacttgagctctgtgaattgggaacttacgtcagaatagccaaccgcaatataatgctatgttcaatgaatttaaggatatgaacatgttcttgttacaaggttcttttgataatgacacaaaagttacgagttgagaatgaatgtgcttcttcaatagagcataaacgcataaataagagtgacaattaaaaaacaaaaacgcatagaaaagagcacaaaatgaagttgcccattgctttcagcctttcacttaactccaatgatcgtctatgtccttcttctcgttgcccctcctagtctgattctgaatctggctcatccaccaatgggggatggactgacttgagttgtttaaagtcgtgaacattaagatcctctacgtggtttacaaaggtgcaaactctacaagttttctttaacacttcaccaaaaccttggatttcaacacgttggagagtgttcctttcgggattgaagtagaaaacataaaacggttgcttaggtgtatatttgagcatcgaaaacactatttcacccgaagcagtccctccagcgatggaaacacgacgacggaagaatctatcatcggtccaagtgtaggcatatttcgaccattgctgtttcttaacatcctctagaacccacacacgcaactcattaatgtcatcatcgttaatattatactccacatattcgtcgacatccgaataataaagcttataaatgtcgacatcatcctcccaataaatcacagctaattttcccttatagttgatcaatcgacaaaacctttctacgtcaataaacgtgaatttctcagacctaatatcaaagcaaactatcacataatcagatactatgccatgaccatccttaacacaatccgacgtgctacctaagtaatacaaaactccattgatgcatatcccttcactcttaatatcatgtctatcatatcgtaagggacaatttatctttctccacttcatatgtccagccccaaatgtaagaattttactatgaccaggaccagatggataaaatatggacaatgccttgtattgcttgtcaatcgggtcaaatccgaaaaagctatacgcctttctgtaagtataccgattaggtaagatggcataccgtcctgtagtggggttacatattagaggtgtagcctcgcctcgatcaccatataaatagatcaaccccgaggcgtagccaattgaaaaatattttaggtcataacaatgacagatatatagcttgtctggagagaacttaacatgaaattcagcggctgctacaagagtcgatgaggatttctcatatggattctcaagctgtggcgtcgagaagaacctccacacacagtttttctcttcgttgactttctctgccatggcgaataagaggcgcggcttagtggaggacctggtcaggaacaactccttgaaatatggactaccaaaaattgatccccattgcttcgacacgcaatgaaacctcgcgactgactttgcaggcaatctcgacaaaatctccacggtgagatcattcgttattgtacttggattcatgattgccgatcaaacgaagaaagagagatgtgataacttgtatataaagtaagacctagagaaaccaattaacaaaagacctaaagagtaaagagtaaagaccatatttatatatcgttaacgtccaagtgggccaccagctattggattttcttcagtaatcgctgctttataaggagacgaacaagatgagaatcaatcctgatgatgtgtgacatacaattgcttgatgaagaagattgggttggttcctaccagatttgcttgcatggagaacaatgttatggagtctatgttttgtatattaatatatactttgattcattaattcatctgatatggttatcatgacagctttgaatgaactctgtttctggtgaatactataactcgttttgagacacagatttgcaaaagaaactcgattgttgcgagttataatgcaacttgtgaatctggtttgcttcttagtcattttctcagggaaactataaaacacactacatactaaaattggtccaaagcctcaaacacattgagctagatagaatgatagacccatcagatagacaataagaaaagttcagataccaacttaaacataaacgaaagtgatagattgttgttactcttaactcgattccacacttagaaagcacaaattcaacttagagaactacaatcgaaagagaagatcaaattcaattatcaaagcaataatcaaacagatctgagaatcaaatcgttcgctaagtgttagctcacgatacaatgatcaacaatgatcaacattgtaacatctccagacaaattctctctctctctcaacaatctcagaaaatacataaagaaatgaaatgagctgcaacggctcctttaaagctgagttctctttatttccatcagcgtcttccatatcctttgactccagcttgttgaagaataatcaaatctcgtataagtcaaagtcacattcgtataagttagttattaagttacgagtcgtgtctgttaacacagttgtgtctttatcaagagtcatgtcttttacacaagacaatgtttcatttcatataaatagatcgagtctctgtttcctgtaacacaattgagttttgtaatacaatcaagtcaataagattgattacattcatactctgttttttcgttcttactctgttcttctttcataacaaaacattaacatggtatcagagcttatcgattgagaggacaagagaaaacactaaaaagagagagaggcaacaaaagtgagatcgtatacgtctcagcaaaaagcgagacgatg

SEQ ID NO: 26389 - DNA, 3003 bp, Unknown
  misc_feature (1)..( 3003): 2750-1469P.txt file - cDNA_ID_2713146; gDNA_ID_2214600; Annot_ID_135547
ttcaagctatggttgttttcgatatatttgaccagaattgtcatttcttcattttaaatatatgattacaaattgcagaatatgctagtatttttttttccaccataagtgaattatcttgggttgagcaaatagaaaatgtgtgttagatactttagatgtaggctggatcttgtaccagataacgaaaactggtttgcatggtattgcgacacgtatgtggaataacaaaacctttgtgtgtcggatcattctatcaaaatcaaaaagaagttgaaatatacgatacggtaaaacaaggtgcactagactaaagaactaaattttcgaaaagcagatgagaaatgagcccaataacttcaacaagaggtaacgtcctgccaccaccatctccttagtccaaacgtccacatgtacaacatttatttgcatatgggccaatgttttaaaaatatattaattttgaaaagcctaaagctgaaccgattgtaccgaatccgaaccgaagcaaaaaaaaccaaccgaattaaaaatttgaaaattgaaaataattgaatggatactaaacactataatccgaagagccgaaatcgaatcagtaccgaaccgaaatattttggataaccgaaaatatccgaaatacaattatatattcagaaattattagttatttgtagaccaaataataaaaaatacttgaatatatataaaaaataataaaaatactcagagataactgaatatctaaaaatatctaaaaatactcgtagcaaaataccaaattgatattaaattttaaaatcaaaagaactaaactttaaaaccgaaagtattgaaaccgaatagaatcgaaccgataaccgaagaggtaaccgaatgccaatgactacctaaaggtcttaaaataggcccagtcatctcaaaatcacgagaaagaacaaaatgataacatgtaggaacggtttatgtttcttctttagtatctgcgtaatttataaagtacttcttcttgcgtaagatacaactactaggtaggggggacgaaatatattcgtgatagataaatacatttaataattggatagggagatgatagaatagagttaatcacgatttctccgttagcgatcaaattctattactcgagttcagtttttcacttgtaaattttttttttacatctgagcttggaaaatcttgtttacatggatgaatcaatatagattgaaggttacatgtttaactgtgtgtttgtttttgttggaagaggaatgctaatctcgttgaataaaaagtgaaaattcataaactgaaaacttttcgctaaactcgaagtttggtatgaaactttttgggaatgcactgaagaattttctggatgaaaattagaagaaacagaaccaaaggtgtacagcttgtgttagatatcacataaatcatatctataaccaaacttatagacatgtttagaaataaatcatgttgaggtagatagtacgcacacggcacacttccttaagtgttcatttcaagctagtagataaacgatagggaaccaatgattcaggcatattaattagatgaggtaagtatacagttccaatgcaatattaattttaattaattaatttaacttcattgtgggtggtaacacaataatatgatttaatgaaataagtcatggttacaaaagttgttgctctatatccaccagtgaaccataatagtatattcatggctcttatccaattaaccaaataaaattttctaatcaaacggtttgaggacataaacaagtttaaaacaagagatagtggatgtgttttgtcacagccagatttctatagctttttctaataacagaggacaaacaaatagacgttagacttcccttcatcagatacatggtttcacaatgagatgtgacttgtgagtgttgcatgtgaagattcacaatgaaagtaatatgataaaaattggcaaaataacatggtccatggtttgagggaaacattgttggaatatcaatcatgccagaaattgcccaaaattagaaaataattgtttcatatataaatcatgccagaaattgcccaaaattagaaaataactgtttcatatgtatatcatgccagaaagtgcccaaaattaagcttaaaataattgtttgagagacattacagaaaagagagggtcttgtaaaaacaaaagacaatataatctcacgtagtttggtcgtttgcagagagattaagatccaatatttaaagacaaatcagcacaagcccgacaattacgagtttttggtcgcaatgaccaatttttcctcatttccaacaattagaactctcattaattagtcataacccacttctcaaaagaatagaaatcatattcataacttattttaagatagataatttttttgaaatatgttcttatagatttgttttctggtcaacaaaacattttcttatttattaagaatgcattcatcttttacaatcctaaaaaggtctgaaaaaaaaacttttgtcctaaagttaattataagttataacttaactttaaaagctgttaatttctacaatatccttctatttaaataattgctaacacgtcatcctgttattcaaacaaaatctattgaaatttaatattttccttatatactaacattttagagattttatcccaaaaaaaaacattttggagatagaggttttccattaaaggtaattaaaactggagatagagtttatacagtggaatatgctggccaatataatccttattaatactaaaacaaccccaaaatatggatcaatatatggctttacctcccaaaagagaagtaaaaactaatataaaattttaggagccttctcattccgaaaacattcacttttttctactacattaacacttttgtgtagatattattattcgtgttacatagcagaaatggttcttacacaatcaaaagaaacctagtcactaatg

SEQ ID NO: 26390 - DNA, 3003 bp, Unknown; identical to SEQ ID NO: 26389
  misc_feature (1)..( 3003): 2750-1469P.txt file - cDNA_ID_2713146; gDNA_ID_2214600; Annot_ID_187030

SEQ ID NO: 26391 - DNA, 3003 bp, Unknown
  misc_feature (1)..( 3003): 2750-1469P.txt file - cDNA_ID_2713150; gDNA_ID_2214600; Annot_ID_135546
agcaagatattttcctttaattttggtatattcgaatttagacttcttattttggagattaccagttaatgaatgagaaagaaaaatctcattgttttccatagattttatggttcttatggaaaaaataggaagaaaaagtctttaaatgtttacattccgaatctttagatataataaattacgcttaagtgaacaattagtgttgggagaagctctatcaaatctagaagaaacaagaaattagcaaaacagtgagtaagatgttggattgacggctcgtggaaacaatcggattcaaccataagttttagatggtggtgccttcggagagacaaccaaactgtactacttggagcaaaatgtcattggacgagtctctctcttcttcacacggaaatggagactcttttatgggcaatgaaaagtatcatcttaaaaggattgattgtgatcaggcgttcaaaactgatagtaacgagctagtgttgataatgcaggcgtctgatgtttcaagatttctctaatctacttgatgagattggccaacttcgtgattctttctttctttctcgttttataatattgttcgctcttgtagtttttatgcagattgtctagttcgttactctaaattttatactttataaatcttatttgtaaactattttcctccaaaatgggctatcaatcgtagagtgattttctaaattaatatgttcttgacatattagatgatattttaaaattttaatgcagattaattagttctgtattagttttgatgatttatgtgatgtttaatataagaaaatatttttaaaaaataatttaatttacatgcaaaaatatgtaacatcaaatatagaaattggaggagtattaaatacataaattatagtgatatggcatactaaaaaaactatagctttttaatttgttaaaaacttttgtttgtagttaataaatatgttggactgtaacgtaaactgacacgattctaaccttttataccaaacgtgaaacaaagcgaataagttttctttactagtctatgccaccctcacactatttacgtgtattaaaaatattgtagtatgactttttattattattattgtagtatgacttttaaaagcatttttactgtgtttttatattttcaaaatatcctttttactcaaaacatttgtcgatttatttctttgcattttatgatattttttttctttgttttaatttctgcatagtttcgcaattgagttttagaattttcaaagaggtttcagagtttgatcgatttggatatttaactagtatgacatgatcgattacattttaaaaataataatatcagcatatcatcatcaattatatagttgatgatgatatgctattattgttttttattagtgataataactgttgaaaaaaaccactgatcgtcagtcgaattcctgatcataaaagtcatggtccatatcagctatatgagcttacacggcattcctagctcttattataaatctccccacattataatgaaagcaaaaacttaaccaattgcaacatgcaaataaactaacctctatgaacggagttaagtaactattgatcgaggaaaactagcaagtcagagcaataactgttacttaccatttaattttaacttatgaaatgatgggaaacgtatagtaaaataaaataaccaaaacgtaagaagtaaacaaggtgcattttgaaacccaaaatgttaaaatactggcgatttaatctcttaaagcttaaatgattaagtaactacctattgataatactcacaatttaattttatttgaaaatatatatttttaggatttttaaccaacagcataaaggaagaaattcacattcctataatgtgatttttaggctaaaaaggaagatggaattctaatattatctttgtcaatttttcaatcattgatcaacttttgtatagataggaaaacaactatgtgtaatttttttaagctacttagagtttatgtgtttgagtttcttttgggagatgtaagaattttttagatatccgagtttttttttggtacaaggttaacttacaagatttaaagagtacaagatttacgagttgatcgagcgtcttcaatattttgagttgtgaattcaaatttataattcattgtttctgtttcggttaaaaatatggttttaagcacttgatttattatactcccttcgttattttataaatgatgttttaagcttaaatttttgttcttaaatagattattaaatttgattatttatattatgcagattatttttttattggttgattagaaaatagatgatgtttttgtttataaattataaaataataaattcttaatatgtgtgtaatcttctaaaacatcatttataaaagaatggaaggagtataagacttaatttattacgtatcggatcacaacaaacatgcacttgaatcacatccacctaacttccatctaggtgtttgtttttgcaattattcatatagaattgatttggtgatataagtttacgagttattaaaggaaaaaaaacaacaacaaaaaaaaacaaattcccaacattagttatccaagagtattttttttttttttagttatccaagagttaacaataccttctaatactgttctctacaagtctactatacctacgttgcaatgataatttcctgcgtgttttttttttccttttaaacgtcacatgtttaaacaattttcactaacccgttatttacacatgtaagagaaaaaaagatagccaaaaggacttatagtgttatctatttaaaaactaaacttgtggtgtctacctaattaacccatctttgtacgtaccaatatcgctttcttcaattattagtaatatataaatataaatgtttgtagtagctgccggtcattttttctttctctctctcctccctaagcaaaactaaaacaagctatg

SEQ ID NO: 26392 - DNA, 3000 bp, Unknown; identical to SEQ ID NO: 13134
  misc_feature (1)..( 3000): 2750-1469P.txt file - cDNA_ID_2713153; gDNA_ID_2214600; Annot_ID_135545

SEQ ID NO: 26393 - DNA, 3000 bp, Unknown; identical to SEQ ID NO: 13134
  misc_feature (1)..( 3000): 2750-1469P.txt file - cDNA_ID_2713153; gDNA_ID_2214600; Annot_ID_187028

SEQ ID NO: 26394 - DNA, 3000 bp, Unknown; identical to SEQ ID NO: 13133
  misc_feature (1)..( 3000): 2750-1469P.txt file - cDNA_ID_2713155; gDNA_ID_2214600; Annot_ID_135544

SEQ ID NO: 26395 - DNA, 3003 bp, Unknown
  misc_feature (1)..( 3003): 2750-1469P.txt file - cDNA_ID_2713179; gDNA_ID_2214602; Annot_ID_135585
cgtctttggccatttctataactttttttgttatatatgaaagttgtgttttgtattgtggatatgttgtgtttgtgaagactgaagagacgaatgaaagttgtttatatagagagactatagctatagtgagtgctctcattaattttgcttgtcaatatacgttaataattgtatacgtgttattgattgattatattacgataatgttttccttttggtaggcttatggttgtttttattattcgtttcaatgaaatgaatatagaattgtgtgtatgacgattatgattatttttgtggaaactttctttcactaattaattacctagctagctgtcatgatgatatataatctaaaccaatctaatcattgctacataatcaatagaaactgattttgcttaatatattcatgttccactgttttttttttgtttaagcagaatttccatatacattagtataattaactgatgatagtaagaattagctactgctaagagtttttcatctcaattagtgtttgtcataatatgatagttaaggtattgttttgttgacaaaattaactataactaaattattattattttggtttcaacttcaactattgatacaaatctgtaactaaagatgaacttatttgagattctgattatttaaaagaatgattgtggagctatcaataggaacagagaccttttaattctaaaattatggttgataatggagttttgtggttaatttaacttagcctcgccgccccatacctaaacgttgttttcatttggaccgaccctaatatactatatgcttctatatttttctttctcttgtcctatgtcatgagccttgtcctccccctagaataatatagactgtcactcttttacacataaaataaataaaaaatatgaagttatgaaccttatctatttgggcaatacttgaaagttgttacttgttaacgataaagctttttgaactacgagatagctagattgatcaatagtaaaatttctgattatctagattctatcatccttcatttaatttctagaaggagctccttatatagttatactagttcttatgcatgtaattagtaacgattaaattgacttcctatgctcttaacgttacaaatcaaatctattaggtggataaaaaagagtcttttgatagctctcagctaaccctaccatataacaaaaacataatttatcacatggacatgataaaagaaacggcgtcgcttcacgggttatgtttccactaaagtagaaaatatgatgaaagttgggtccactggaccggagaaaccgccccatatagaattgattagctccgtcaattgcatcggcaccgtccatacagattaagtccaactccagttcagccgtcccaaccactcctcttatgccacgttgtttagtccccatattcaacaatcatttgctctcactcctcaattccaaatttccaattgcaattttcttacgtatattattcagtattcactaatcactagtctgtctacaaaaataaattggaaaaataaaaagtgtacatagacaaaaggaatgtggtgtaatgtggtgttcatggccaatgttttgccacgtcacaatatccttatcgttgtagcgacatttctctgctcttattggattatatttccacgtcagaaaggtgctctctctctctcggtctctcccctggttttatttttgttttctttcatctttgtcgctttctgttttgttaaagaattgtctactcgatattggttacgaatggtattgttctctgtggaaaaatgggttaatttgttatgataaacattttttgttccaaacaaataaatgttctttcatttcatagtaaattttttagtcttctgaacacacgtatatatatgcttgctaacaatgaatccacaataacagatcataaaattacatctgactcatatgtaattctatcatgatatgttgagtcaatatatagtcgatggagtatatatagagttataatttgattgtagtgtcctatgacagatttaacactcagcttacaccgaaaaagttaagtctcaaataaattacgtatttatgcgttatttaacttattatacaaaatgacctaaaataccatttcattttcctatacaaatattcgcttactatatatactatatgtttaccaactatcatgaaaaagatgcacgaatgatccagaatgtgcttgaaacggcagaaaaacaaaagaatcgtgtgacacgatcgagacaaatactttactaatcatataaaatcattatttatcaaaaacttaaaaagcacctacagtatatgcaatgtggatacagctaaaagataaggtatgtatgttaacacacaagtatatatgatcatcattgtcaaatatgttcacttatataattgctcacgttttatcggtttttggttttttgtcaacggtcaaattttttgggtgatgcctaacaaaatttaatgacgtgactcttgggacggtgatctatcagtagcatttaacaatctagttatttggaaatgaattacagtatgagatttatactatttgtataaacttttcaggaaatgttaaattatatctttaggagattttttgtattggttctcactgatttagattatcaagttactgagataaaaaaaaaattaatacttgttttagatttcctttagttaccactgaccaacttctttagcaaaaaaaaaaaattaccactaaaccaacttatgcattcgttacaaaaaaaaataccataaaacaaaacatcaatgttgtaagttgtgacattaaatcaaaagtgtcaaaatcaacagtagcacaaaccaagagctcactctatataaagaacctttattcttcatctcacaaccacaagccctacaacaaccacaaagcaaaacacttacttagaaagtccagaaacatccattaacacatatg

SEQ ID NO: 26396 - DNA, 3003 bp, Unknown; identical to SEQ ID NO: 26395
  misc_feature (1)..( 3003): 2750-1469P.txt file - cDNA_ID_2713179; gDNA_ID_2214602; Annot_ID_187098

SEQ ID NO: 26397 - DNA, 3000 bp, Unknown; identical to SEQ ID NO: 13163
  misc_feature (1)..( 3000): 2750-1469P.txt file - cDNA_ID_2713183; gDNA_ID_2214602; Annot_ID_135584

SEQ ID NO: 26398 - DNA, 3000 bp, Unknown; identical to SEQ ID NO: 13163
  misc_feature (1)..( 3000): 2750-1469P.txt file - cDNA_ID_2713183; gDNA_ID_2214602; Annot_ID_187097

SEQ ID NO: 26399 - DNA, 3000 bp, Unknown; identical to SEQ ID NO: 13153
  misc_feature (1)..( 3000): 2750-1469P.txt file - cDNA_ID_2713189; gDNA_ID_2214602; Annot_ID_135575

SEQ ID NO: 26400 - DNA, 3000 bp, Unknown; identical to SEQ ID NO: 13153
  misc_feature (1)..( 3000): 2750-1469P.txt file - cDNA_ID_2713189; gDNA_ID_2214602; Annot_ID_187087

SEQ ID NO: 26401 - DNA, 3003 bp, Unknown
  misc_feature (1)..( 3003): 2750-1469P.txt file - cDNA_ID_2713196; gDNA_ID_2214602; Annot_ID_135572
ggccaggaaggatcactacatctccactggggtcaatcttttgagatgcattacattagattagaacgacctaaaaaaagtcgtcataaaggaaaaaagatagtaacgagaatattatctttctgagtacaaaaagttggagtctgctaaagtccatacattaggaggcgataaaggaattcgtcatttgtccatacataataagacccattattgatttgcccataatacagatcatcattcagatatatattatttaatcaatttctatatgacttgtatttcaacttttataaagtatttatccaagatgataatatcaaagttaaccttaataattatacgggaatgagatcatacctaataatcttgtcatgctgtttttgttacgtgacaaaatataaccttttttagtttgctaagtacaaaatataaagtttataaagattacagtttaagggaaaataaaataaacatttaaacatattgatactataactaggatacgaaagtaaacaaaaaaaaaacaagaaaatgccattggaaaaggcaaacgaagcattatatatccattataataaagcaatagaagaggaggagattgatttaaaagctcattagccgatgcaatgatgttttaggaagaagataaaacagttaaacactcagatctcaagtttgtctactactctcccaaaacccgataatattgttctcttctttacgtttgaccggtgtctcctatcttcggtcttcgcatgagttcaattttttaaataaagatattttggatattattagtttgatcattatttacattaagttattttaattaaagctatatatatctacaagatctttttaccactttgatcctccaccttctttcataacgtttatcagcaattttgaattatcaatttcccactatgagtatgataaatatacacttttttcttcttttttttttcacttcaacattgctaataagaaaaatgattacaagtatttattttctctaatctaaatatactaaatcagcagtcacttttccaataactaatgcattcagtgattgacacatcagcttagtactattttttattttttcatttttacgcatagtatgtgtcgtttttatttaactttgtttctttctcaaatgattttctctttcatccccacgatctccacatctccactttctctcttccaaaaactccatgactactgtgtaaaatctcaaaaatgggtttctcaacatcattaatcgattactcagaaatcaggtactttgttcatctcaatgaaccaatttaccatcttctatttctgtttgtaattttgttttatatatatagaaattttccatagatccgaaaatcatatatccttcttctagatttctatggtttttttttttttttgctttgtttctgctttatttgactgaattcgatttctctcatacatctccatttttccataggattattctttaatacaatcaatgcctatgattctcccgtctcacaaacactcaaggaacaacgacaaattttggcttctcatctgaacagttgccttaaaacaagggtgagtttaatatcttaatcgaagctcaagtgtttttttgatggtaaattaattctcatactttttactattcttctttcatctcttattttacttctttatatctgcaatttcttttttgtattaaactgcaattgtattttcacgcaagatttttgtattaatacaaatacttcaattttaaagtcatctcttattttacttctttatatctgcaatatctttgatattgtttcaaaggcagcgtctgcgtcatgtagttacttatttgtgcacattttacatttttttttagacttccaagctttgggtgtcaacgaatgtttgtaaactgaattactgatgatgagaagaagaacacattacaattggttggagctaatgatgaaataagcggacatgtatatacccagcataattttcgtacttatactctcttatatttctaaactcttgatttgttagttattgcctatcgcaattgattcattgggtagaaaagttgtaccttctttatatctttttcttaatctttgtatattcttcgatcaatgataataaatttgttgtatattaatactgtctgctttattttaaaatttttagttaaaagttgtaacagatataatctaaaacaatgttatccctaaataggggccaaatgctagttatattctaaatcagtaaataatagttactacatgcacactaaaacagacatagcgtacgtgggggacttattttgggaattgtcacatgtgtgtgagtcactcaccactaggttcgatttatatctaacgatttttcccggaaatatttatggacgaaaaagcaaacattataagattcatttgtttgttttatatagtacacaaataatagagaattaaatcactaattttaatgaaaattaaaaataaataatatatatatatatatatatatatatctgttgacgaaaataaaagcaagtatatccgaataaaattacgaatataatttagggatgaaaatagaatctcctatacagttaagatattataagaatattcatggttagactatcttagaattagataattaaggaaaattatcgtgatcatcaatttacaaatttcatacctgaattcattgtttaataaggtaacctgtttattttagttttaaaagtatatcaacaagagaactttgatcactaaaaaacaaaattcatacaaactttaatcacttccctatattgaaatgatctaatctggatgaaaaaaatattatttattaatttcccataaaacaataaacatgtggatgtagctcttaaatattcttagaggcagagaatgtcatttattcaaatccggaaatatattaaaaatgttgaacaaaaagaaaaagaaatatattaaaatg

SEQ ID NO: 26402 - DNA, 3003 bp, Unknown
  misc_feature (1)..( 3003): 2750-1469P.txt file - cDNA_ID_2713206; gDNA_ID_2214603; Annot_ID_135614
atttttatgataaacatagaaaattctaaaaaaaggaaaaaacccgaaaaatacctcatttattttttatttggacgtttaatatctaattttttttggttggaagaaaaatacttcagttaattatattcggtcaaaaaataccttatttttaaattattggtagattcaaacctctgttttaacggtcgttaacggacgttacggtatctataaacaacgttaaattataacaagaaaaatagacgaaaaatactcaatctatttacttttggacttttaatacctcatttttttgttggaagaaaaatactccatttaaatatttttatctcgtgagttagtaacttttaaaatcgtactttatataataagatgtaaaatttctaacacgttatttcgaccaaatggttttatatcgactattatcaagccaaattctactattcaaaatatgtatatccaacgacatatttatatcggattaactattaataccatagtaaattcataggttttttactttgagttttttgcttagaaaataaaaaaataatgacataaatacataatgtatattagatatagtatagaaaccataaaaatgaactcagtttcttatgtataaagatcactatttcgtgtttattcttttatttgatccagttcttccatagaatatccaaattccaaaggattacaatatttcatttttcttagagatgtttttggaaatttgaaatgtaaaagatgagtgtattatacagataataaagctaacgtggatacagagaattggtcatttctaattaaatatgaagtgttatacgattgaaggtggaacgtcattatcaaatttccttattttcctttgcttcaactgtatcattaatcacatcttccataaaattcaacgatatggcgtaaaaggatttgaccttttaccctaagaaccttaactctaatctgcctaatctcaaaatgacataatttactctcttaattcacagcttctttcctaattacataattataaaaaatcgcagtaaactttactaattggttccgtagattttaattttcattattttggattccattattatgtatagtaaaatggaaatttaacttgttggaatacaagagaaagttttgccgtatgattgaagatagagcaagatcgatcatacaaatataacaaatcaaggttaaggttaaaattgaatattgtaaccaatcacgttcgtcagatccaccaaaatcggtgcttcacgtcacacatatttgcttcacgtaaacatcaagaatacctaaaaatatacgaaatcatttatttacataaacgcaaacccaacaacactaaccacgagatcagaactagtagtagcaaacgcatctccagcgaccgcagggacagtagtacgtatatctctttacctgaggagacagcaacttcgaattgaacgacggaggaaagggctaaaaggacgagagccaccgtgatcatgactattaccggcaacggagacgtcgatactctacaccgtgcgcagaagcaaccgtggtaatgcatcgctgatcgccttctcactgttttctttggtttgtttaatggtttctattactcggaagataatgaaacaaagaaagataaagagagtgataatggtttgttaggactataaatgatattattatgatcgatgatgataccactatttcgagaaaaatcataagtactagctagtggggtaacgaaggaaaatatgtggtaatttacttatgtatttcgtcaattagtgggtccataatttgtctaattttgactgaaatatttgtattaacactcaactaattaaacattggtttcttcatgtttattttgcgtttatgggtttgaatggtaacttttaatcaaaacgatagttctgtacaactttgatagctactgatcacaaaactttatcaaaagcgttattataagttttactttcagttttttttttacaactttctcgtacaactctatcttacagttttacattattccgaaaaaacttataactaaatttattgtactgttttgtattaccaatgagacctatatcatattcgctcatacaatttgtttttaggtgttgatttctttgctaagcactcgccactttcctatagtacacatttcaatcccacaaaaacaagtaaaatttgtagaaatgatactttaacaaatgaatgtaactattaaagatcgatttcttttctattcaccttattattgttgttaaagattagtatgaacaggacatgtctttaaaattctgttctgatcgggtttgtgagagatatgagtgattggtggttaggacatgagaacaaggaagcttatctcagtagcctaccataaaaaagacactcacttcaccttgttccactcattgtatatataataattacatgttgtgcctaatgtatgtcgatttcagggattcataccattgttcttttttttttggtgagtataccattgttctttttgtacaaagacaacaatatatgtaaatccttttttaaaatttgatttgattcattttaattaagactcaaaatataatgtgcaattgattaaagagaatataatacattatgtttttaaaatatagacaagatgtttttgacccaaaaaatagaagaaaaatcttaacaaatatagcatattttggtatttttatttttatccttaccaaaaaaaaattagtttggtatttttatgatatataaaaagaaatcctaattaaaaaatggtaattcaagaaatatttattccaacaaaaaaaaaacagataaatactttcttatagggcctaaaacggtttttgtgacccggcccatttaatgtgagtcacaaatggagttatcttatagtttacctgtaaaaaaaaaacttttgtcgtcacttaaccgagaaagcaaaagagaagaagaagaaggaatcgaaaaatg

SEQ ID NO: 26403 - DNA, 3000 bp, Unknown; identical to SEQ ID NO: 13183
  misc_feature (1)..( 3000): 2750-1469P.txt file - cDNA_ID_2713210; gDNA_ID_2214603; Annot_ID_135612

SEQ ID NO: 26404 - DNA, 3000 bp, Unknown; identical to SEQ ID NO: 13175
  misc_feature (1)..( 3000): 2750-1469P.txt file - cDNA_ID_2713221; gDNA_ID_2214603; Annot_ID_135597

SEQ ID NO: 26405 - DNA, 3003 bp, Unknown
  misc_feature (1)..( 3003): 2750-1469P.txt file - cDNA_ID_2713225; gDNA_ID_2214603; Annot_ID_135594
ttatacatcagtacaactaaaaaaagtaacaactcaggaagatggtacctcttctctgtcgacttattcacagcttcagatttcttgtttacgttctttgatgccttttgtcctgtaatttcaagatcagtcacacatttcaccttataagctttatttgtattgtgtcaaatgagaaagaagaagcatactggccatctcgttcaagaaacgtattccttgtgagtgtacattaggggtcactttatccgcgccactgcataatcacaattggctttagaatctgagaagcgggttctgttcgttatgttaaaagtaaaaaacttgttgagagtttccaaccttagagcctttcggagaccttccactgatagcactcgaacaggctgagtggtctttttgtttccgcttctatctgctggtggctcaactgtgtaaatcccttgcgattttagatctctgaacgctgttctcaagttcctgaaatagaaaaacatcccaagaatcatgaaaatttccaactcgtggtatgaccaacctatgaacacgactaggtaggattagcataccctcctttgagttcagttctcattgtagcaaatttgtctgatgcattctgtgaaaaattcatagttagtgaaaaacatggttcattgcattgacgccagaaaacaagaccaaagtattaccaaaatgtaccagtttatgaatcttgcagaatgctccttggcgcctgaaaccaaattcaaagttgtaactcaacattcaggaaacaatacaaagagagatgcatcgctaaggtaaacttacttgtttacaacagatgtacaagttgttccatctttccgctttgctgtgcagactccataatcagctgaaacccccagtttaaccatttgtttagcagagttgacactcaatgagaactcacgtccctgccacaaacataaattttttaaaaagaagatttagttaagccatccggctactggaaaagctgatgctatatacttaccccattgtccttgcgaagtgagcaattaaacagaccgaaaaccgttcctgccttttctgtctcattctttttgtaagcatcaccaaacaagaacaaggagacattgttttcatttaagctaccgatcttccatataccataagcctgcccaatggagcttgttttgggttgtcctttctctgttatcactcccattgtcgcccagcagccagagagtttgtcacccattagcaagttcctacacagaaacttgttttaaatctcttctgcttcccaagagtagtaagtaatgtttatctatctaagaagtgaacaacttactttattgttggcaatcgaacgaaacggatatctgaaaacagatcacttatctctgcagggctaagtaattgattcctacaaatacatcaaaagattggctatttcagctatagattggaactgaaaaaacaatctacgactatagtagctgtgactcacattgctagagtgaaaagggtttagctttacctaatgcgcaagccagaaaacttctcaatgtcattggtattggagttgttggagcctttgggtttagtgtttttggcgattggtttaggattatagtcaatgcaatcttgaacaacacttctgaagtcagacaagtcagagtgacccctacgcttgggggattcatcatccgtgagatatcctgcacaaacgttacctcgcattaaggacaagaacaatccaactgagagaaaagcatcaaactttacagattcttgagcgaattagatggaaacaagacgcccccagatcaatattcgaatcataagatctattacgcaagtgattgatcgaatcagagatgcaaatcggaatcgcacactggatttaagaaagcaaaaaacaaaaccctacaaaagtgagagagaaactcaccgggtgcagcagaaggagaaccaggaggagtttcgagaaccctatcgtcaagagacagaagcaattcaagatcctcttggtcgttttccatttttcaatttcacgatccaatagcgatgcacaagaacacaaaacaacatctcgtgggcgggagactgaatttcgttgcccgccgaaacgcataagcgacgccgtttcgttgttaataaataatgtttcataccacccggttttaccggttcgtgagaaagatcaggatggtgaaataaaccggaaatttgagtgacgatagtgtcggcatggcatttttttttgtctcttaacgagagagagtaaataaaatagtcagatgtcttacgtggtccatcaacaaccacagggccctaattgccaccaacatccacttaaagtgtgccacctgtcttaatcatgggcttcttatcaacatgcgatggcccaatataagatacttacccttctctttcaataattatccaaatgtgcccaaatatagtttttagaacaaatgaacaattatatatgttttcgtaaacaaaatactaattttctttgaaaacatatacgtaaatttcaatattgatgtatgtagaaagttatgaaaaaggaataagattttcattaattaatttattatagtatcatcagaaagcaatgttattattcgaagagagaataaaaattaaaaaaattaaattaaattgctgatattttttatttttaaaagtaaaagacaaaaaaagaacaataaaataaattggtccgtgtctttagcagcgaagcgcacacaaagtttgcttgccttctgggcttcacgattctcacgacatctgtttatcttctccgatttccacgtccatggatctcagtcaatgttccttaatctctcttttcgattagtccaatctccactaatctctgacctcagatcgcttccgacgccgctgaactgtgtccgtcttgatctgtgtttaggagaaagcttctagggtttttgttttggttgctgagtagaatttgttggatctgaaacggaaatcaaaatg

SEQ ID NO: 26406 - DNA, 3000 bp, Unknown; identical to SEQ ID NO: 13203
  misc_feature (1)..( 3000): 2750-1469P.txt file - cDNA_ID_2713232; gDNA_ID_2214604; Annot_ID_135637

SEQ ID NO: 26407 - DNA, 3003 bp, Unknown
  misc_feature (1)..( 3003): 2750-1469P.txt file - cDNA_ID_2713236; gDNA_ID_2214604; Annot_ID_135621
aaacattgtcatttttctagtattctcacagctttcccttatctttccgagcatcatcatccatccgtccaacgtcgttgaatgtttgaccggtcatttgatccgacgccttcagtgaagtcgccaccttacccggctttgaatcctcgaccttgacttcaaccacagtcctacccgtccctccatgctcacgtgccgcgcgtgtttcctccacaatgtctgatggcattgtcagtttgctctttattgcttccgttacattccctaatgcaccaaaaatagtccctttcgcttcatttcccctgcatgatttaatcacatcaaaaaacaaaacaaagagtttcacagtcacctttaaacttgaagaacatgacaagatataactggcatttcatcatttacctcacggcagcagaatctttggtctcttcggctttttgagctcccgactcagtactctccctagtcttttgagatgcctcttgggcttttgctccagcttcttctttgagctctttaccttccaatctcatttcctccatcttttgtcttgttacttctccagctttctccatgttttcctatgttatcaaaacatcacattatatcaaaccatttgacatatgtaatcttcatttacatggaaacaaagttccaagaaattataccttggcagtatctttggtctccacagcttttcctttggcctcctctgtcttccccgacaagaaacccatagctctcttcgctgtctcaacggcactatccttcagctctcctagcttactcaccgtaacatctttcccctccgtcgccttctccaccgtatagtccttatactctccagtcttctcagctgtcttatcctttgcttcaatagccttctccgctgtgtaatccctagcttccacggccttgtccaccgtgtaatccttatactcaccaaccttctcagccgtcttgtccttagcctctttagccttatccgccgtataattcgcagtctccttcgccttctccgctgtcttatctttagcttctactgccttatccaccgcatagtctttgtactcaccaatcttctccgccgtcttatcctttgcttccaccgccttatccgcagtataattagcagtctccttcgccttctctgcagttgtgtccttagcctctttagctttatcaaccgtatagtctttatactcacccaccttctccgcagtataatcagcggtttccttagctttctcgacggttgcgtcctttgctccaaccgctttctctgaagctatctgagctccttctttggtagactcagccgcttcgtgggtttttccaactacagcgtctctcgcatgctcatacgttccttggacagccctgaacactgatcctatcacaccgggcctatcttgctccggtggatgttcagttgttctctccgtcaccttatacattgtgacatcagcaccaccggatttgttaatgtcatgcaagtcctcagccgctagcctcgccgcaacctcggctctctccgccttttgtttgtctgacgccattgcttttttctcgattgcttgaaaattgatgaaaaaccgctttagaactttacgattttagaattctttaacttgtgctatcagttgagctgcttttgttacttcttatagtaatgctctgtttctgttgagacgctacgtggtagatagagggacgcaacagctgccacgtacaatttacttagctttatcttctacggacgtggtatgacacgtggacttttcatgcatggatcatgattcttgagtgttcatggcatgacttaagagctaagacataagcaagcaagcatcgatggtcggtcgtatcaaatcttttgatatcataatttgtgttggtcgaggaaaatgttaggtgaagatcacattcgccatttcaaacttactgaggcacataacttggaaacaagcaatttagagatatgaaagattacttagttattgccacacagtttattggaagttattgcctcaacatcaaaaacttggaaacaagcattttagaaaaataaggacgcaagttaatcattggatagagccgtttattgatcaagtcggttatcaatataattttgagtttttgacggttcttgggagggtatacaaaaaagttcattgcaatagtttggatttatttccaaattttctctaatttgccagctaattcaggttagcacatgagtctattgtcttaaccgaatagacaactctcttttttgttaaacatctctattagtcaccttaactttttttttttatcaaaaataaataaatcacgttaatcatgttctcacatagattacttttatacttaattaggtacgtcctttttttattatttctccgacaactttgttgacgcgcatttgatgccgaatcatccaaatcggtcacgttttctacatgatttgtcgtaaatatgatatacactaacgtgagtaccttaagatctcaagtatatagttaagatcagatcaaatcagaaacacttagtttgagtttcgatttgatcaaccatataacaatatatggaacttctagctagcatcatggctttcataatgtgtaggtacgtgtgagtatgagtacacacgtacgtatgtcgtgtaagtggagaatccgatgcccaaacgagtaagcaagcaaaagcaatggtcaaaaagcaaccgatctcaattaattatcttattgtaaaaactcaataaaaagttaagggaaaagaataatcttacaagacatgtatcctccacaacaaaaagaggactgtataaaactatttttttcatgagaccaatgattcgtataaaccatttaaatttgatcaaaccctcacaagattgatcaatcaattctcgagtctctgtttcggtcacataaccgaaaggaaacttttttagtcagaaagaaagatttttggagttgaaagcaacataagagattaatg

SEQ ID NO: 26408 - DNA, 3000 bp, Unknown
  misc_feature (1)..( 3000): 2750-1469P.txt file - cDNA_ID_2713244; gDNA_ID_2214604; Annot_ID_135618
tgggagcatcagcatcatcagtttggtacaatgtacgagttcgtcatccgacaaaagaagtaccaatcttagattatgatcttgctcttctctttcaaccaatgcttcttctcggtatcactgttggtgtttctctcagtgttgtgttcccttattggctcattactgtcctcatcatcattcttttcgtcggtacttcttcgagatctttttttaaaggcattgagatgtggaaggaagagacattgttaaaggttagttttatcttccatcataagttgtggcttttatgttgtgtgagtgtgatactgaatgttttatgtggcttttcttaaacagaacgaaatggcgcagcaacgagctaatatggttaattcccggggagaacgtgtgtaaagcttcatacttttgattcctttagtcatgtttcttgatcttaaactgaccacattgttgattctcttgttcagttttaatcgatacagagtatgagccgctttacccgagagaagaaaaatcagagctggtaagagtgtatgcaagatgattttcttaacttattggctcttcagacttgcataaagatttaaaaacttacaggaaataatacgctccaacctcaaatggaaagggcttctaattctagtaactgtgtggttgactttcttgctcattcaaattgtcaaggcaagtaatcttcttcttcgtctaagcattctcaataatctttatgttgagctctcatcaatggaactcgtgggtttatacagaacgaaataaaggtctgcagcacaatatattggatactattcatcgtacaggtaacatatatatgtcgcagataacctttgattatgttttgtgctctcgctaaatcaagtcattcggaacaattttccctttgtagttcccagttgctttagcggtgtttgggtttgaagcaagcaaattgtatacagcgaacaaaaagaggttaaacagtggcaacactgaatgtatctgtgaagctacgattgagtggactcctctgagtctaatcttctgtggtctctgtggtctcattggaggtatcgtaggtggtctccttggatccggtggtggatttgttctcgggcctttgcttcttgagattggagtcatcccacaggtaaacacaccatcttatcagtatatatgattgtaaaacccataatcattcatcttgtgtctttcatttttatctaacggttaaaacacaggttgctagcgcaacagctacctttgtgatgatgttttcttcgtccttatccgtagtcgagttctatctcctcaagagattcccaataccatacggtaagatctctaacacacaacatgagatacatttagaagtcgtagcagaataaaaaggaaactgatgattgacctttgtttcattgacagcaatgtacttgatttcggtatcgattcttgccggtttttggggacaatcctttataagaaagctcgtggcgatcctgagaagagcttccataatcgttttcgttctctcaggagtcatttgtgcaagtgctctcacaatgggagtgattgggatagagaagagcataaagatgatacataaccatgaattcatgggattcttaggattctgcagcagtcaatgaatcaaccatctatctgaacaaaaatttcaagtgttttgttttcatttactggacaatttcggttgtccaacaccattattgtgagaagttataaaattagattgttttacttgcagtccaagtcatttgtgctctgttcttggtcaatacatagttgaccatcttcagaaatagagtttgtctaaattgttgtcattgtgttttgcttgtattcaaacgttgtattattatttgcgagacgatagataaaataaaaatggaagtctttttctattcacatcttcaatgtaactacaacaagaaaacagaacatgttttggtaatctttctaattggaggaaggagggcaattgatttggacttggctaagattgttgaacaacaaaggcaactttgagacagttgactaaagaaaaagacatcttcagacaaatctaaccacaacatcgtcttcccacttgagtgattaaattttataagcatttaagtattgtggttccaaaagttttgtcaaccaatgataagagagattgcaatggaatgattcgcggatcatcttggtccatataccattttagccgtgagtttttttcttggaatttatgtatagttttgtgatatattgttcgtggttaaacgtcaaattcgaaacaaacaaaaaatgatgcatgtgagatatggaagtccaagccaaacaacatttggtcctattaagactgtactaactatcattttttatttattagaggccatcaaatctttgtgtaatgggtttttaactaaaacatttctttcatgggccaagacatttaatttcggctaaaaggcccattaaactcctccaaaactagggctcaggcgaattcatctgccttaaatagattcgtaattctagaaaacagattttttagggtttcaagtgaaaagagtaatagcgcggcggagccatggttctcaagtaatcaatctcttctctatatctctcttctccatgcttctctgttcataggtttacattgttgctaatgatccatgtgaatattgctactgttgaaaatgccaatttgctaaaatgagcttcttttggttcaaatctgtttatttcccgatcagaaatgtctgcaaattgtgattttctggtacgagatatggcttgtgttcggcaataactagatcttattgtttcccttcactttgcaacatttttgtttgtaattctgtacattgaattaattgtgtttggtctctgtttcaaatcattgtgactcttgtgaatcgtattgtttctctcattgggcagatatctaattagccatttactagttctgcttttaggacattgtaaaatgagatg

SEQ ID NO: 26409 - DNA, 3000 bp, Unknown; identical to SEQ ID NO: 26408
  misc_feature (1)..( 3000): 2750-1469P.txt file - cDNA_ID_2713244; gDNA_ID_2214604; Annot_ID_187163

SEQ ID NO: 26410 - DNA, 614 bp, Unknown; identical to SEQ ID NO: 13209
  misc_feature (1)..( 614): 2750-1469P.txt file - cDNA_ID_2713251; gDNA_ID_2214605; Annot_ID_135653

SEQ ID NO: 26411 - DNA, 3000 bp, Unknown; identical to SEQ ID NO: 13208
  misc_feature (1)..( 3000): 2750-1469P.txt file - cDNA_ID_2713264; gDNA_ID_2214605; Annot_ID_135646

SEQ ID NO: 26412 - DNA, 3000 bp, Unknown; identical to SEQ ID NO: 13208
  misc_feature (1)..( 3000): 2750-1469P.txt file - cDNA_ID_2713264; gDNA_ID_2214605; Annot_ID_187204

SEQ ID NO: 26413 - DNA, 3000 bp, Unknown; identical to SEQ ID NO: 13206
  misc_feature (1)..( 3000): 2750-1469P.txt file - cDNA_ID_2713268; gDNA_ID_2214605; Annot_ID_135644

SEQ ID NO: 26414 - DNA, 3003 bp, Unknown
  misc_feature (1)..( 3003): 2750-1469P.txt file - cDNA_ID_2713280; gDNA_ID_2214605; Annot_ID_135640
agatagatatttgaatattcagatctttgatgacccgtctttagatccaataaaccctataatctagttattaacctgcagtataccgcaggtaggcttatactttagttaaactaaaaacttttattgtaaagatgatttaaatatatatgatattattttatttgattttaaatgtatagtaaactgtgagttgtatatgttttgttgatattatctatattgtttagtgtttaagattatacacttgtagtttggttgttaatttaagagtttcacctgtagtatatcatcttgtattaatatcgatctaaatccgtccattttacgattttccagcttgtattaaaaattgaatcacatctaatatgttattaattactgtagtatataagattataaattttcaatataatatgtgtgaaattgaatagaactatttcaaattatgattcgttactcagtagaaagttttcttaaatctatttttctcccgttataatattttttcatgtattgaacagtttatattcgtttttaaaaatttaaattatggcatatgcgaaaaaaactctaattatttgtttataatgatgatattatttttcggcaaaaatagaatcatataaagatgagaagtgaactataataattaataaaaaattaatatgataatttagatattaaatctaatttgttgattttaattggttacttttttggaaattaataatgtatttcgtttttctaattaaattaaattaattaaaatttagatatcaaatcttatatgttaattttgattggttattatttttggaaattaataatatatttcgttttttaattaaatttaattaattaaattagtatttgactttttaatctttaaagagataaattaatttactctttaaaattttatttctaatggtatacccatgtaattacttacaaaaattaaggttacattttaaaatgtacttcccaaataatatagtaggattttattaatttttatttgtctttaaacaataaagcttaaagcaaaagtgaaaccaattacaaatttacaacagttgcgatgtgtctagaaaagcgaaaaccgattttaaccctataaggccagaccaggccaaggcctatcatatcaaaaagggcaaaaacgagtgaatttggacaaaatcgaaaccaccaatcagaaaatatatgtggttaaaactttgaacacatcaataaacacgaaaagggtaataacgtcatttccataaattcgtaatcattcgtcctcaaatctttattgtcacttttacaaaaaatactcccaatttcagagaaacctgttgaaaaaaaattcagggaaaattggaaaaagtgatgatgatgacgagagatcaattcaaatcttaagtcctccaaattttaaaaatttcgatctccactaccttcgtcatcttcctctacttctgattctcttttctgggtttgtcgtttaatgggttgattttgtatcgtcaaaacggagaaaacaagaagacttcttttggttttcttattgcgaagaagatatttctagggtttcgagattttctgggttttctgggtttttgtgtgttctttgattggatttgattattgggcaatttccttggaattcaagaaacttctaaggttcttaaagtgtaaagctttgtgattttctcttattcatacattctaggactttggttttggagttgtaatggcttttgggtctgaaaatgagagcgagacgaagatggaaggttggttgtatataatacgatctaatcgatttggattgcatttctctagaaaacgttactttgtccttggagatcatcttctcaagagtttcaagtctatctccgattctaaaaccaaggtcaccaccatttgattaatcgcaagttcgtttggttgttcataatctcccattttggattaggattttaacttttagtagaatctgaatttggtttttacagaatgctggacgaagtgcggtgatagattcgtgtatccgtgttactgacaatgggagagaaaatgttcatagaaaagtatgaaagttctcatttttaaatctttagttgtggagtttagttatgcttttgttttaatggtttgtctggaatacttgtaggcattcttcatatttacactatacaatacatcaaatcacaatgatcagctcaaggtaaggtaatttctgttgttttgtttttatgttggtacactatatacatctctttttttcatttgttaagctttcttgttttaattgttatatagttaggagcaagcagtcctgaggatgcagcaaggtggattaatttgattaaagaggcggctttaaaggttatataaatggcaattagtaacaagttaagagctcttcttggaggttggagacttatagttatatgttttatgcagggtgccccttttcctggagatgtttttaattgttccaggagtcgatgggactctttgaggtacctctttttttccacgtaatcaattggatacatctctaagctaactgttaaataaattgctgagccagtagttcctgccaatttttgttagttacgtagtacagataatggtttgtggttacttaagaaagaaaatttctgaaatcagattgagtagctcagtgcgggaccatcactcaaactctattgactggacacttcggtcgtctgcacgagttgatcctgttacaactgatgttgttgcgccttctccctggacaatattcggttgtcagaatggtatagttcatactcaaatttcattgatttttgtttggctggaatgcatagtgttaacatgtgttgcacgcaggtcttcggctttttaaagaggcaaaagagagagattctctcggaagggtcggtatttttttcactcttaatctgttgaaaaggtattttgggtttattgaagggaatcatgttttgatgattttgttgcatg

SEQ ID NO: 26415 - DNA, 3003 bp, Unknown
  misc_feature (1)..( 3003): 2750-1469P.txt file - cDNA_ID_2713290; gDNA_ID_2214608; Annot_ID_135706
tcacaggttgtgtttcaataatgttcctgaagctctctcacaacaaatttagcggccgttttcttccaagagaaacaaacttcccttcacttgacgtgttgagaatggataacaacttgtttacggggaacatcggaggtggtttgagtaactccactatgttgcggattctagacatgtccaacaatgggctctctggtgctattccaagatggttatttgagtttccttatttggattacgtattgatatccaacaatttcttagaaggtacgatacctccttctttgttgggaatgccttttctttcgtttctagacctttctggaaaccaattttctggagccttaccgtcacatgttgatagcgagctcgggatatatatgttcctacacaacaacaacttcacagggccaattccagacacattgttgaaaagtgtccagatacttgatctgcggaacaataaactctctgggagtatcccgcagtttgacgatacacagagcataaacattcttttgttgaagggaaacaatttaacagggtctattccacgggagctttgtgatttgagcaacgtcagacttctagatctttcagacaacaagctcaatggtgtcataccttcatgcctctctaatttgtcatttggacgcttacaagaggacgcaatggctctcaatattccgccctctttcttgcaaacaagccttgagatggaattatacaaatcaacttttttggtagataagattgaagtggaccgctctacttatcaagaaactgaaatcaaatttgccgcaaagcaaaggtatgattcttatagtggaagatctgagttcagcgaaggaattcttcgtcttatgtatgggatggatttgtcaaacaatgaattaagtggtgttatcccgacagagcttggagatctcttgaaactacgaaccttgaatctatctcacaattccttgttgggatctataccatccagcttctccaaactgatagatgttgagagccttgatctttctcataacatgttgcagggaagcattcctcagctactcagcagccttacctctcttgctgtgttcgacgtgtcttccaacaatttatcaggaatcattccccaaggaaggcagtttaacacctttgaagaggagagctacttaggaaatcctctgctttgtggaccaccgaccagtagaagttgtgagactaataagagtccagaggaagcagataatggacaagaagaagaagacgataaagctgctattgatatgatggttttctattttagtactgcttcaatttatgtgaccgcattgataggcgttcttgtacttatgtgctttgattgtccttggcgtcgagcatggctccgcattgtggatgctttcatcgcctcagctaaacatgtgttgccttagatctgttgagcttagttcttggatatttcagtgaaattttgtttatgtatggtttgagtgtttttgtagtgtaatttacgatgccttttcacttatgaatagttgtgtctctttatctcaattttttgttaaaatatttaaggttttttttgtctttttattgaatcttttttttattgaaatatttacggattttttaaaaggttttgtcctcttattacatgtcttttgcacttttgaacggttgtgtctttttaatgcaattttttgttgatatatttataaattctttcgaatgtatctttctatcgtatctttttgttgaaatgtttacgattattttttacaatcgtatattttcagtttacgtttgtgtctttatagttgtatctaatcatttaaagttatgtctcttcattatattttattgcatttactcgtcacaatttctcgtatgagtagttgtctatctaaatgtttgtgacttttgaactttatatatttgtcactttctaagtgaatcccaaatttttgttcttttacacaaatttgttttattataaatccaaactaattaatctgtaaagtagctccaagttctttactctctaaactatttttaaacatacattatttcaatattaaagaaattcctctaatttttgatctaaaaaaaataaaaaattggcatcttcgttagaatttttatacttttttaaagttgattaaaaattcttcatttctatgatcattccaaaatttgatttagaatatataatttttaatgaactttaaattttagattgcaatgtattttgatttattgttaaaaaaaactttttaaaaaaaaattatcttagtttatgacttttcgtttcatatttgtttattacaaacttttttgaaataattttctccgcgatgtcgccggggtctgcgtcctagttattagtacaatggaatcaaactaatgtaaaactgtgaacttgacggaaaaaaaaaaaaaatactgtgaacagcaaagggaaaaaaaaaaaagaaaaaaaatgtcagaacaaatccttctcctccattgagacagtgtacttctgcttcaatggacatttgatatcatcaaatcctgcgtcaggtgagaaagacgcttcgccgttgtcagagttccttttctttattctctgtagaaactagaggcaaaaaatgtcggaagttttcatgaatctgagtaacttgtatctgcttctgtttacatgtttctttggtccgtagatcgaagtagaactgtcacttacagtttaagactagtaagctcattactaaacaactgtattaacaagatttaggcttctttttttattagaatgtttagatttgcttctaattcagatgtaattttagtttattcaatctcaagaaccagacgatgagttatttacatgaaagataggcttaattaggttgtttctattggcctaagtgaaatgtgtgcctcctatgttgggtgttttaactaatgctgattgatatgtcatatgttgactgattatgttactgtgtttgtagtttacgaatg

SEQ ID NO: 26416 - DNA, 3000 bp, Unknown; identical to SEQ ID NO: 13250
  misc_feature (1)..( 3000): 2750-1469P.txt file - cDNA_ID_2713298; gDNA_ID_2214608; Annot_ID_135704

SEQ ID NO: 26417 - DNA, 3003 bp, Unknown
  misc_feature (1)..( 3003): 2750-1469P.txt file - cDNA_ID_2713342; gDNA_ID_2214610; Annot_ID_135741
aatgtcatttaatcccccaactttcaaaaaattggccattttatacatcaacttcgtatgtggctgtttaaaacatgaactaaacgttgactaatttttaaaacatgatctttcattgatcaggccaaaatagacatgccgttatcagtcattaacggaacttctaacgtccgttatcatccgttaactttattagtcaagtttcaaattgtggccattttaaacatcaacttcttatgtggccatttaaaacatgaactaaacgttgactaccatttaagacatgaaaaattcgtttacagggccaaaatagacatgtctttatcagtagaacctagaaacccgttaatgactgttaatctgtccaaaacaacgtcgtttgaaaataatcgaaagaacataaagatttttcccatatgaaattccatattaaaaagttttaagcagaacccaagaacatagtttgataaagcgataatcgcagtgccagtaattggaaacaaataaaggtgttttcgtttatatatttgttttaaattttaaaaggaatcatggaagcaaattgaagactcattataagattgttcgtcttgtttgggcggttgtagaaatagatttggggaactagggtttcatttagaaaacaatcctgattttcttttgattattctcaaaacaaagtcgttttaggaatactaatagactcgttaacaagtgataatgaatgttataagtttttttaatgaatgatgacaacatgtttattttggcttggtcaacgaatttctcatgttttaaatggtagtcaacgcttagttcatgtttaaaatggccacatataaagtcgatgtttaaaatgaccacaatttaaaacttgactaataaagtcgttaacggatgataacggacgttagaagttccgttaatgactgataacggcatgtctattttggtatggtcaacgaataatcatgttttaaaagttagtcaacgtttagttcatgttttaaacgaccacatacgaagttgatgtataaaatgaccattttttgaaagttgggggattaattgacatttttccctattttttaccaccttttgcaacaataaccttttatgttgtacatttttaaaaataccccttccctttaacagaatgaccaaattactctcatctaataggaacatgtaattggaaactgaaattttctagccaaatttatttttcccgcaaaaaaaaaaaattccgccaaatttttttcccgccaaaaaaattcccataacaattttttttttcagccaaaaaaatgcttttaaaaatccttgtgaaatatttttagcggaaaatagatttacaaaggattttaaaagagttttaaaagatttactagggatttaaaagagttttaaaatatctacaagggattttaaaaagattttaaaagatttacaagaaattttaaaaatttttaaaaagatttacaatcgaaccgacccgaacctgattggacccgaaccgagattttctatttattctattgaatcctagaataatatacccgatatacccgtacccgaccgggtattacccaaacccgacctgcatacctgaatgtcctgccctactacaaattttgatatacagtattgctaaaactttatcatcgttttgttattaatatgacgcggttaaaaaaatatgagaagtctacaaatttttagacgtagatgagataataaaaaggaaatataacttttctctattattggtatttagtttttataaacaaaatgtttacaaaaaagaataatattttttttgtaataataaactctgtaaattgtgtacttttgtgatatataagcttcaactttctatatactttttaatctttgtttttttttttaatttaaaatctttatataagcaaatataatttatattccactccgtttaaagcaccatcgatgaaaattcccggtggattctcgccggtaggaggagatgtctcaattttcactcaaatcttttttagtttttaccaaaaatatattaaagtaaaaggcaaaaaatcttcaaatttattcttaccaaccaaacaaacaaaaagaatccttgcaaaataatcataaattttaaatattttcccatttaaagagatatgcaagtgagaacttttgagaggcgcaacaacaagatggcgcataatagcaaaagacctaattttgcttctgggtccttggattttcttcctcttcctctttattcccctcaaaacctaggagcccaacgagagcacccctttcctcttcttctatatccctttttatctcttcgcagctttctctcctctctcagatctatactctcttctccttcacaatcgttcgttttatcctctccatcggattcgtcagatatcttcgatttctcgtcgtttcatcggttccaggtcaaatccaggtatgtcaattgtaaaatttcgatcagattcgtcgatttcgatcagctttttcgattttggatctattttctatgaaatatcagatctggtgattgttttacatatttttgggttgaattcacaagattttctggaaacgagatcgattaattgagttttctgtgtttttatcttaagctagatctcgatttctatgtttttggattgatttgataagattttcgagaattttttgtgtttttgtcaaagttcgatctcgatttctatatttttggttgaattcacaagactttctggaaacgagatcgattttgtgagttttctttgtttttaatctcgatttttggattgatttgagaagattttctgaaagcgagatcgatgtttttggggattttctttgttttgttcaataattcggtctctgttttcttatcaaaaaattcgttttccatctcaaatcgatgttcttattgatttaattgagttttagtttgcagggatttgatcgttggtaagctatctttcagcaaacatg

SEQ ID NO: 26418 - DNA, 3000 bp, Unknown; identical to SEQ ID NO: 13279
  misc_feature (1)..( 3000): 2750-1469P.txt file - cDNA_ID_2713360; gDNA_ID_2214611; Annot_ID_135764

SEQ ID NO: 26419 - DNA, 3000 bp, Unknown
  misc_feature (1)..( 3000): 2750-1469P.txt file - cDNA_ID_2713381; gDNA_ID_2214611; Annot_ID_135749
ctgcaaaagaaaaaaaaaaaaaaaaaaaaaaaacctccacttcatcaatttttgcaactttagctcgtacttccgaaaatacggaataaacattatatgtatactagataaggcccgtctatttaggcgggtgtacccgaaattttcaaatattcgaacgggtctaaacttcaaaatctgaaaaactcgaacccgaacccgaataggtatccaaacatatttcaaatataagtatatattagttatatttatacttatatatagaaaatattaggattttttggatattttagttatttttgtgtatttttagatatattcaagcaaaactactcgtgttgttttggaaatttttgaaattttaagtaatttaatagatttgcacacaaaatttgatatttcaatatataaataaactcgaacccgaacccaaaccgaacccgacccgaaatcttaaattacccgaacgggtcctaaacttctaaacccgaaaacccgaacccaaaatacccgatccggatacccaaacgcctagggctaataattaataaaaaaaagaaatccacaaaaatatttagaaaccaaacattgttgaaaatatattttctatatatgccgtaatctcgtaagttaattttacatcatgcaaattaatattaaatgagttaaaattaataaatgaaaataattgaaaagttaaatcctataaactaagctatttttctcaaaatgttctattttcacttatgattacatgagttaaagacaaatttgttatttttccttttgttgaataaatgttaattgtttataaatatatagacatataaattagtatatgtaaatttgtttactttttaagattttctattttttagagaataaaaaaataaattttgaatgacacatgtaaacatctgatcgtttgacttgacacgtggcacaatcctttgagttagcaactttgaaaaccatactttatataataagattgtaaacgtctgcacgttcacatacattatattttaaaaactctaaaggtggagttgaactcttcgtcgcgagggcttcgtttgacatattatttttcaaacaattacaaacttaacggtagcggaaaaatgttacattgcgtattattattaacttcatattattagtttgcatttttttaatgtagatgattaaattgcaaaaattgataagttgaaagctttttttgcacaaacccctactttaagattataagatatgaatattattatcaaggtgatgaactttgatagcttactttagttattgtcacaatcttatattagtaataagctagcttccaaaatatcttacaagttgcttgttcctctaacttaaatctcacaaaacttaagatatggtaaattgtctagttcttatcatcttttcctagtcaccaatcaagttcataactagtcaccatagtggtcaatattttccttctattgaacagagcaccataatgattattattttggtatcatacttatttttgttgaattatacatatgaaagttagttaattctttctgtatgaaaacacgaacgtgttaataaaaaacagttagctaaaagaatctttcaatgtctgtttccactctttttcccattaatgaatcctgttgaagttcaccctaagtctcccatagaagcacatttctggagatgtagcgattccacaaaggtagattagtccaaagaaagaatgagtccttaacaacatcgactcatacttatgtgtgttgtatacattttcgtgggcaggtttagtacgaatggctgtgtctttgcctacactctcaccaattcacaacactaacggaagttcatgctggatgggcctttaggattcttatagaacacagagaagagaagaagattaggagagtagatagagaagtacttcttgttcatataacataagtgtacagagaaaaatggtgataagccaaaaagaagacaaagatttgtaagtagaagcaaatcaaagcgtgtagagaactttttttgttgatacgatgtatagctttcatgggtacataatacaaaatcttgactgatgaaaacgtgttgttgtgtgaggtttattggaaaagaatatgatttttttcgtccggaattgtggcaagagaatgcgcgtgaaataatgaatgaaacataaaaccatttattagttatggaaggaagttgttggatacaactaaacacgtattgaacataaacatagtaccatcatttcgatttagaatggaagtggatggatacacctaaacacgtattgattgatagttggaaattaaaataaccttttgatttttcacattttttaacctttttgtgttttcaccttgttatgggtaaattaaaggacagaaaaaatatgatgaattcagtagaaagtaaattacgtactctcaaatccgaccaaaaaagaaaaattattgtcttaaagtataagcaactctcaagattttgttcctaagttatagatttttactaaaaattattttgaaaattcattcaaatttcaaacttgtatctcttaaatcgttaattaaataacactaaattttaagttaatattctttctatatttttcaattttcacactcaatttaaatttaatattacataatttattcactaaaccttcaaattattctaaaaaatcaaacatatatacagtctccaataaacccctaatcaaataatcccaaaaagttttgagtaaattctgcgtttcctctttggcttctcgaagaggaagaaaactttggcagagagcgaagcatcacacatattttggcctctccttcacgatattcgaagaagtctcctcctccttctccaacgaatcccagatcaggcggcaagtaggcgaatccttacgaagaattctaacttcatcatcaacgatagatactctagtttgattttcaaagtagtagtgtaaaggaatcagaaatg

SEQ ID NO: 26420 - DNA, 3000 bp, Unknown; identical to SEQ ID NO: 26419
  misc_feature (1)..( 3000): 2750-1469P.txt file - cDNA_ID_2713381; gDNA_ID_2214611; Annot_ID_187367

SEQ ID NO: 26421 - DNA, 3003 bp, Unknown
  misc_feature (1)..( 3003): 2750-1469P.txt file - cDNA_ID_2713393; gDNA_ID_2214612; Annot_ID_135782
tgcaagaagaccgctgatgcatccaacatagccaaactatttttcaaggaggtagtgcgccttcacggggttcctaagtcaatcacttcggatagggatacaaagtttctaagtcatttctggtctactctgtggaggatgtttggaacagctcttaatcgaagttctacacctcatacgcaaatcgacgggcaaaccgaagtaactaatagaaccttgggaaatatggttcgaagtatatgcggggataatccaaagcaatgggatttagctttgcctcaaatagaatttgcttacaacagtgttgtacatgtggttgatttggttaagttaccaaaggctcttgggtaagtgcatcagctgaaactatggctgaagagattttagttgttaaggaagttgtcaaagctaagttagaggctaccgggaaaaagaacaaagtcgctgctgataaacgtcggagattcaaagttttcaaagaaggtgatgatgtgatggtgctccttcgtaaagggagatttgcagttggaacgtacaacaaggtaaagcctcgcaagtatggcccgtttaaggtgttgcggaagatcaatgataatgcttatgttgtggctctcccgaaatcaatgaacatttccaataccttcaacgtagctgacattcatgagtatcatgcagacggggtcctttatccagaagagaacttgaggacaagttcttcagaggtggaggagactgatgtaggagagatttagcagttttacatttcttttcatatttccttatttcaagttttctattttgcttagagttttctattttatgatttggtttcttctctatatatagaaagaccctaagttttttgctcgacacgttttatcattttaattaataaaagcagagagtttttctctaatctggtggatttccaaagtttcaacctttcaaattcgacgcttgcgaacttgattcatgtttaggcatagtgattgctattcctagaggttccgactccgtaagtattttaattctatataaataaatgaagaaaaaagtaatcataattacccaaataaaacagtttgtttatattcctttttaaaattttaagtaacatcgttaatgtgcttagtgttctttatgttttgcttcccgtcaatattaaataatctttacatggaaattaatcggtctcatatataaaagagaaattgaagacgattaagatgctattaactttatttatgagtatgtattatgtgaaacaccttttatttataacttcaacataatcgtttctaatctttcaaaaaaaactgcctaaatatttttaaatcgttacgtctcaaatatagtctttttaaatatagttaatttatcaaccttatatatttttggataaaaaacatgatttatatgatcaatttagatgtatttttagtattagaggttttcctaagaaaataaatcatgtttttatgaagtgtaagtttctgaggttttttcacaaacccccaccatctgttaatgcattgggtctaacttcatttgatgaccgacttcaaatgaattatttacataggcatgaacaaaattttaaattttgataattaaaataatctttaacaaagaaaaaagataattaaaataatcacagttttttttcttttgagaaatataaaataatttagaaaaattcaaaagaaaacaaaaataaaagagggagaaagagatgtggcatgagtgatgggtgtgtatgggagtgagtgagagctgtgaaagggaagagtcgcagagagtgcagaagttttcagagtttgcagactcactcattattttccctctctctctctcaaacttttttacttctattctcataaatattttttattcaaaacaatttattattcatgcatagtgtttttaacacaagtggaccgtgtacacttaattttataaatgtcgaatgtgttggagctacgagtactacgagtcgtctatctaaccaaagatgtcacattacacgatacggtttatttgattgaagaacaaaaataatgatttggtataattcaaaatttataaactcattacaattggacttctttcattttattttctaatactataatgaatgattaagagaatgttctttgtggttagctaaacctttataacgatctttgtaatagttgcaatatgcttacatgtttctttttttatagttaaaacattaagaagaatagaagagggacataaatcctctcacttggctatttacttactatatttaggatcgaatataaatgctaaaaacatcttaaatattgtagggttaaattcaagcttctttcacaaataagtattttttttttcttattttttctttctcacatatactaaagtttgagatataagttatatgactcaaaagatatcataacaacccaacattagagctgaaatttttaatgtcttattattttgtacacaactttacctcttaagtttcatgacttgttagattttttttttgtcaaccaaaaataattagaacttaatagagtcaatcccgaaggatattgtttacgtatacgtatgtaacttggtagattctcttttcggttaccaaattttctcgtttttctaaacgcaaacaaaagttacaaactcctgaatataatacgtaaataaattaaacataagttatctatgccccttgtcacaaaatttagcttttaagaaggaaaagaaaaacctgaaatggtgcttaagataaaaccaaaactaaagctgaaaagaaaattttaagaaataagaaaaaggaataataaacaagaagaggacatgaagcacagagattctgcagactgcaggtgaccaatggacactttatcaataaaaacatacctactactctcttacactttcaattttccaatacaaatcccaatctttaatctctctttcttcttcatctctctttctctttctctcttcatg

SEQ ID NO: 26422 - DNA, 3000 bp, Unknown; identical to SEQ ID NO: 13300
  misc_feature (1)..( 3000): 2750-1469P.txt file - cDNA_ID_2713397; gDNA_ID_2214613; Annot_ID_135791

SEQ ID NO: 26423 - DNA, 3003 bp, Unknown
  misc_feature (1)..( 3003): 2750-1469P.txt file - cDNA_ID_2713401; gDNA_ID_2214613; Annot_ID_135788
gttagatgattaataaaaatgaaacaggataaaatatattttttaattgtttatgtgaaattttcttctagtgatgtatcatcatttgtttatgtgaaatttgatattccatatgttttagtatatccataagaaactcatatctaaaactgatgtatcattatccattaatattaatttgttgtacaagtgaatgatagttaatatcgcttatatacgtgatttcttgccgcatgtacgtgagatcacacttcatgtgcatccaaaaatttgcattttatttctagaaattaagcgacaaggaagacagagctagagagtactgtctttactctttagacgtgcatatgtctcctcgtactaattactcttttaaaatccttgcatttcattattttctgcgacaacatatttggtcggaacttgccaaatgatgtagctattgtccacgtgatgttttagtttgctataatatgttttaagtggatccttactcaacattaacaccaccctataataataaaaaaaatttaaccattcattattcaagtttgataaccaatatatatccgttgctcaaaaaaaaaaaaaaaaagataaccaatatatatcttattgctgtatttatctttatatagttttattttaatagtttttgaaaactgaaaccataacaagaaagcgtgaatccaaacgcattcctatgaattgtaaattgacaagtagcattttagaatagatggaatctaatctctaaatcgtaaccgaataaatggattggatccgttgcacagatggtttacaaagataatcatattataactaatccgaatttcaatcttgttttgatctatcttttaatagcaaagtccatgagtttagtgtttttgagattcctggaccaaagggtcatttttcgcatattaaaatgaatgagataattacgacaaaaaaatgaatgagataatttgggaaaattaaatatatacaaaaccattattatatgaatgtactaaattatttttaaatttttatatttcacctatacctaatacagaatacagtgtcattgctttgactccctccaccaacaagtgaaaaacctaataaaattttactaatagaaaacgaatagtggaagaaaccatgtaatgtccaatcaaccagtaaatcggtttaaaatatataaaaagtcagtattcttaagtagaaagataataaatttgtgcaatagtaatcaagatagtagatacgccgttggaatcaaatcttcttttcttgaatgtgttgttaacttaagccaaccatttgattctctttactgcagctatattaattattaaacaccaatgcaataaccatacatttcttcgttttatttagtctgtatattcgatcatgacatcattctcccacacttccaaaaaaaaaaaaacaattcgatgacgatatctatattagttgagacatgcatatctacaatacgaatattcgttattctcatttactgatgtggcgattatgatttatgactaaacgagtgattaactatatacaaaaagtaacaattaaaacaaaagtaatagaaaaatattgtgaaatgaaaattccagtgtatcactaatgaagcaattaagaatagaaaactaatactataatgtttatattcccatccgtgcgtttccattcactttaagaaatgatcatattcgcaaccaacaatttgaagcaaacggtcctctactttttattgttcgttttctctttaccgaattttaaaatcacgttaattatctgtataactacctttttgcgttgaagtatttacaacttgagtaaaatgtagattcgtatcaggatacaaacacacaataatactattcagagttcttagtaaattagtttccttttgcagcgatttatttccgtcaagtgtataatatagttaaccaacataacttaagttaaaatttcccaagtatagatataacagaagatcaaatatcgactcgaaactgagttataattaaattaacacgtgaaaataaatagaaaaacaagaaaatatctcgcacgctttccaaagccctagaacaataacgttcgatggattggaaaaatctctgctggtacattcacgagccaacacgtttgcctgccacgttccagacacaagctagaaagtaacggcatcgtcaaatctaacgagactcatcaaggaacaatttataaacatcaatttctttttggtttcacacgccttattatggtaagaaactatttttgcctattgaatgaaaaaaattgataagacatatgaaggatgagacctaactatagtcttaagtacataacatttactactactcaaaaccgttgtctttaattttaacggtccacattcgttctcacaataattgaccatacgtttgtttaaatacttcaaaggaaaggaaaaacagcaagacgtttgtgaggtaatggacaaacgacacgtagtttgaaagatgagaaggaagacaaaaaggcatagagaggaggaagagaaggagcggtttcgtaactgaaactgaaaaagctttaagagaaaacccggaaaaaaaaaaagagaaatattttaatcaattcttctttatcacaaagagtgcctttgtattaatgaattttgatgttgtgtaatgaatacagacataaccgtcgtgtctcgtcgttaaagaaacgagagtttttcagctctttacttaccttttcttcttacccttctttcatgactcttcttctttgatgggttaataatgctttgagcttgatgatttcgattttagtttcctgttagtgtttgttttcttctgtaaagcttggattttttttggtttcttcgatggcgaatgtggaagctgatttcagaacatcaggtgagttcaaattttgacttcaattttctcaagttttgaattttctttttctcttgggaaaaagtcaacatttttaactctaatcatg

SEQ ID NO: 26424 - DNA, 3000 bp, Unknown; identical to SEQ ID NO: 13316
  misc_feature (1)..( 3000): 2750-1469P.txt file - cDNA_ID_2713416; gDNA_ID_2214615; Annot_ID_135807

SEQ ID NO: 26425 - DNA, 3000 bp, Unknown; identical to SEQ ID NO: 13317
  misc_feature (1)..( 3000): 2750-1469P.txt file - cDNA_ID_2713441; gDNA_ID_2214616; Annot_ID_135812

SEQ ID NO: 26426 - DNA, 3000 bp, Unknown; identical to SEQ ID NO: 13322
  misc_feature (1)..( 3000): 2750-1469P.txt file - cDNA_ID_2713445; gDNA_ID_2214616; Annot_ID_135810

SEQ ID NO: 26427 - DNA, 3003 bp, Unknown
  misc_feature (1)..( 3003): 2750-1469P.txt file - cDNA_ID_2713509; gDNA_ID_2214620; Annot_ID_135874
atcaaagaacaaatatattttcgttctaaagtttaatatccatttgattattttgaaaatttggttcggtttcggttcggttccggttctttcagttttaaaatttagttaccatttagttattttgttttgaatatttttggatattttgttattttgggatattattggatattttcggataatttttgcttatttttgagtattttattattttctatttcggttcggtacaaatttggtattttattattttggtttcggttcggtacattcagttcggtttatttgcccaggtgaagacgtagccactaaaccataagaacaaggcccatacttatcgcacatgggcttttaactgtttattatatataaaaagcccatcatgtggttcgttacaattttctgttaaaatgtttggcccattgtcgccgtagattgtcttctccgttcgaaatcgcatccatcgccgtcgtcgtcggtgacgaaaaccaccgcgtaaaaccgtttcctaaatcagatgttcaatcttagaagtatctcttagaagctctcttgtatgaaaaaatgggactgttaagcataatccggaagatcaagaagaaagagaaggagatgcgtattcttatggtgtatgtcatattcttaaatcgttaatcttctccgatctaatcgtacattatcatgttgtgctgattttggaatgtttttttggcagtggacttgataattctgggaagacgacgattgttctgaaaataaacggagaagacacaagtgtgattagtccaactcttggattcaacatcaaaaccattatctaccaaaagtaaagctctatttctctgctcttgtagtttcgtgttcttcagagttggtttaggaatttcatcgaacatgttataggcaatgatgagtttgtggtgaataatgtgtgtgtaggtatacgctaaatatatgggatgttggtgggcaaaagactataagatcgtattggaggaattactttgagcagactgatggtttggtttgggtggttgatagttctgatcttaggaggttagatgattgcaagatggaacttgacaatctcttgaaagaagaggtatattcataaaagtatcaatatctattcaatcaaaagcttttgtaagctgaagcttgggttgctgtttttggtgaagatgattcatattcaaatcttggttttaatggcagaggctagctggttcatctttgctgatactagcaaataagcaggatattcaaggtgcactaacacctgatgaaattggcaaggtaagggttttgaaactcataagtcgatttggacataggggttatcgggttgaatcattttgtctctcggtcgggtttctcaacttcagtgaagattagtgggttaagtaagatatgttttgagttgtatattgtgtgttaaactgagtttcatcttcttgcttatgaaggtgctaaacttagagtccatggataaaagccggcactggaagatagtgggttgcagcgcatacacgggtgaaggtttgttggaaggattcgattggttggttcaagacattgcctccaggatttacatgcttgactaatcgactactgcattgcacaatcaatggcttgttatactcaactatatgcagtgactttgtattggctctaagtttttccttcagttctattgtaacgatgattagacaaaacataaatatttccaagacgaactcttctcattttgtttcattgaaagagacttaacaacaaaatgatgtctcatacaaccaaataaaacttattgataaaaatccaaccataatctaccacagatagatgaaagttgtctctgcagagtaagaaggaagaagaagcatacaaagagagatcatttggacttctttccttgtttcttcttgacgacttcatcagtgtacattatgcctttgcccttataaggttcagggggtttgcaactccttaccgttgcagcaaactgatgcactctttgcttgtcgattccagtgcagcaaaccacattgttcttgaaacaaaagactcgaaccgctggaggaaccgcaagttcgacttcgtgactgtaacccaatttgaggtataagaaacgccctgcttcctcagctctagctttgtatccaactccaacaatcttcaagaaccggaaaaacttggcttccatgtctctctatcctacagagaattaccctgccaaagaggaaaatttctcagcttcttcaaattaagaacttggaaaccaatagagttcaccattatcataaaacgatgctcaatcaaaatctgaaggcagtagattttgtctctctagccactcaaatcacacaagtaaatatgaaaattgaccaaccatgctacgaaaaattgccatttttttcattactttgtatctcagagacgtagaaacgagcgatgagctaacacagtaaatacgtcgaacactttccgtgcactatttcaagaacaatataaacggaaataaaaactccagataacctcatttacaagaacatggtgacttctggactatgaacatcgccaaaatgagaaagaaaacaaaaatgttcgatactatttctaagtgattcatcaaaatagcggaaagggaagaagaagaagatagtgagtgagagatcgattataaggaacagttaatacctttcttgatttccgacgatgaatgtgacggctctgctttttcgccggcggatctagatcagtctccaactccggcgtaaaaccttctccttctcttaatttcgtttctttgagaagcatacaaagtggttgacgttttatccatgttaaaaaaacggcacgatgtttattcctccaacgagtgtttctttgaacaaagcccagtgggctacatcataaagcccaaaagccctttttaacttttcgatgttttgtttcctcgccgctcttttgaccggagagctctagaatctctcaacaatg

SEQ ID NO: 26428 - DNA, 3000 bp, Unknown; identical to SEQ ID NO: 13359
  misc_feature (1)..( 3000): 2750-1469P.txt file - cDNA_ID_2713515; gDNA_ID_2214620; Annot_ID_135869

SEQ ID NO: 26429 - DNA, 3000 bp, Unknown; identical to SEQ ID NO: 13380
  misc_feature (1)..( 3000): 2750-1469P.txt file - cDNA_ID_2713612; gDNA_ID_2214623; Annot_ID_135911

SEQ ID NO: 26430 - DNA, 3003 bp, Unknown
  misc_feature (1)..( 3003): 2750-1469P.txt file - cDNA_ID_2713615; gDNA_ID_2214623; Annot_ID_135910
ttgtccaccttcccaatgaatccccaaataggcaaatcatcataatacatctgaaagtaataatctttttcaacagctcttcgaaagtgttcaacttcttctctactaagcttctttttacagtacacctctgagtctttctcatctctaaagttaagcttgtatggagcactaacaagcctatccccattcaaaacctcaccaagagcttccttcttatctttcacaccctctacacaaaccaaaacaaatgcatattgacaccaaaatacacaaatccgaaaaaagtgaaaaaccacacataacagagacaacattgagcgtgctcgtacctggaatacaaaaggggagatcgaaatagcgatacgtctcactgcaacaatcatcaaacacaagtaaaaatcagtcatataacaatgcaatcgaagatctatcacattttaagaacacgaatcgaattttttcaaggtcagatacaaaaattcaataccaacgcaagcttctacagaaatttgcaacgatcaatttatcactcatcaaagagaatcacagatctaagctaccgacaaaggaactgagattagagaattggatttacctgggattgtgaaaggggccgaccttgttggcgtagagaggaacggagtcaccgtccttgtaacggtggtcggaggcatcggatctgacagtaccggcgccggagaagatgagagctccgataaagaggagcagcgtcgttggtaatctcatgatgatgtgtgttaatgtgagaggaagaagaaaatcgtgagatctgagtttgctttatatttttgagagcaacgcttatggcaaaaggacgattatattacttttatttattttatctctctttttaacgaattttcttctactaaatgcttaagaaaaaatattgcgaataaaaagcattatgtaagaaaataaaatctgcgacattttaatattttttttagaaattgaaatgattatttttatatattttatttttggttgttttcttaaatcttctaaacaaaattcgtattaattcacaaaattttaaattatttaatacgtttcgtaagaaacttgtgaatggcagaggcaagtgatataaactgaagcaaataaaactttctataatcgatattttttgttacaattgtcgttttttttttaataagtagcaattttctattggtagagtgattctctcgttcttgtgctttctactatttataggagttttattgcattccatgtgactataacaatcagtaatgttctttttactctttaacaaaatcatgatgatgaagatacaaataaaaaggtggtcaaaagaaaaaagatcaatagtgcctcgtttttttttttcacaatagtatctcgtttatgaaattgattaaagcaaagcaagtaaaaagtattatcaattggaatataaaccaaattttttgtacataaaatgaatgatgtagtaatttatatacctgattatcttaactaaactcaattttttgcaaccaaaccagataaataagaacactataaaattaagatgttaattacacagacaataattttatttatttataaagtttatttttgtaacagctctgatacttattgattttgcaccttctttgatggtggtggcgaatcatacactcatcagcgaccatgatatgtaatccatcaacgagttctctctgaatcttctcgcctggaaccagttttccagagcataaacataagccttagaacaaaacaaacatctactatcccctgaactactaatgatagagtaatcaatgtaaactcttttcctattgtagaatttaccattagacaaattattatgcatgttgttagcatctctactcttgaaaaatcttcgtaagctgattggaaaatcaaagaataacaaactaactaactaacaatcactactctataagcaaatcttgaataccaatagagattctttatgttggattctatctttgagcatttcattaggatcgacggttggtcgattaatcaatactaacccaaacagtcttttaacatgcacacttgataccttgtaggtgcttctgggtagcatgaaaatgataattggtgttattctgatatgcgaaattgaaaatgttgttgtgcatcagctaagcataattgaaagtttaaaaaatattataaatttaacgtgaagaattgaaaggtatcagattaatgttttggatcagccgaatagagtcaggctaatccaaattctcaaatattttcgaaaccttaaacacatcaaactccacgaagtaaacacactcacacacatatcaaaatccacattataaatgtatttttggtaggctagtcgtctaattctaaaatagccaatttacatttgcaattgtttattcaaaaaagtacaacagtaagaggtcttatcaattaaatcataagaaaaatatgtcccaaaatgtcaaaaaaccaactacgaatatttcttttccttttaaggccaaaccaggttttggaatacttattacaaataaactcaatttcaataaattcttgtacacaaattaagcactaatttcattgtgaagataccatagtcacattcacatctatatgacatcaatctataaaatccaaaacaaactatatattatatttatattatttttttgtcatcattatatttccattaatttatctaattctggttctaatatactcttggtcagaaaaaatataaacattgaagaattggtcggctgaaaattgtgaaaaatatatagcagaaaaatatgataatgttatcataaacaaaattaatagtaaaatttaattttaatttaacactacagtactatacacgtgtgtatgtatagctctataagtatttactctctttcagctatttattttttcagtgaacgagcattcttcttcttcctctgtgttgttgcttcttagatatattcaaataaaatg

SEQ ID NO: 26431 - DNA, 3000 bp, Unknown; identical to SEQ ID NO: 13390
  misc_feature (1)..( 3000): 2750-1469P.txt file - cDNA_ID_2713627; gDNA_ID_2214624; Annot_ID_135921

SEQ ID NO: 26432 - DNA, 3000 bp, Unknown; identical to SEQ ID NO: 13389
  misc_feature (1)..( 3000): 2750-1469P.txt file - cDNA_ID_2713631; gDNA_ID_2214624; Annot_ID_135920

SEQ ID NO: 26433 - DNA, 3003 bp, Unknown
  misc_feature (1)..( 3003): 2750-1469P.txt file - cDNA_ID_2713634; gDNA_ID_2214624; Annot_ID_135941
ggtttgatctaagcatgtcgaaaagaactcgaaaaccatggtctagtctcatcaacgatatgcatcaccatgcaatatgcacccaaagctcacaaccaaaaccagacaaagaacaagagcaaatcgaagacaaagagattgatcgtaagagtttgaacaatctgatgagatgcgatgagaaattgaatggagaagctgatgttaacaacaagagctctctagatcaacatttcgaggatggcgaggggatcaagccgacgatgcaattggtggtgaagaaagagaagcaaggtggtttgaaattcaaaggtatggtgggtcgatatgttaaggtctggagcggtttgataaaggccaaacgtgaccacaaatcgccggtctttcggtttaaaacttgaatcctatatacgtacgtttcatatacgtgatcacatatatatatattatacgattagttattagagataagctgtagactaggcagttttttggaatgttttgcgtacgtacgtattattgatgtgcacgtttgttgttggcatattggttttgacttgagattgtaattagcactatatacatgcaactcttgttttttttgttaagaatctcactacatgagttttgctttgtgttttgagcttttgccaaaaaaacaaatctgttaaagtcttttcgtcgtcagatcttagggtgttacggttgatcttttttggtttaacggtctaaactgtagtcgttctttgccaactagttacgattaggtgaactttaggtttatacataattgtaatatataacttttgatatttttgtagctctaacaatttgaagtgttttttataaagaaaaggcaaaacataaagagaaaccaaagataatgttttaaaacataaaatatgttcttaaatacaaccatttttgtttttggataattgttttacttctgttttccaattaatattcgcgatattataacccaataaaaaaaaaaatcttaaagaaaaataaaacacgaagaatgaaacaaatttaagtgttgtggctcggattgtgagttgtgagtttttgtatttttcatatatatcagatgacacatcgtgacatagatgaacaatttaactgacgatgtctgactaagacctatcctcattttctgccattacaatagttacggggttaactaattgccaaatgtttaaaatagtttataggtaagtaatcttctcagtcaatcaaatattatttttgttatactttttttttttttggttttaatgttaagggtttgttttactttatacgtaatacaatacaatttctttctaatttaatcaacattgcttagtttcaatccaaattacataatataaaatatgcagaagcgtggcgattttatagctatatatataacctccaaattagtgatgctttaaattcatttcctaagaagataacatataataatatcaaaatatcattgtaataaataactttaacactctatgtagttcatccatatgatttatcatatactaaaaaacgagtaaatactcaagaagtcacatgaataattaacataattaaagacagtttttgatcctcgaaaaacatatatagtatcaaatttgaattcttcgttgttagattcagttagtttgtctaaattaaaaatatatggatgttgtttttttttgtttttttataatcatgtagtttacgaaatgtacaaaacttctcaaattcaatagttaacaagtttttttgtttttttttaaacaaaaaaaaaaagacaatacgtaacaagttgacatcatgaaactatatttgacgatattgtttgttgctcttacaatatgtcaataactatagcctaaaatctttgtcgttcaaaattttcctgctctttatttccctagggctttcacaacatattttccggcttatcgagtttttattgtcgtatcgtaccgactactaggcgggtacgcataacaacgtagtttttttttgttcacaaataacaacgtagctaatttatttatttttcttatattatcatagacttttgttggttaaataaaataaaataaaatgagaacgtatcaggtgacctcagatgtaaggaaagggtcggtagtacgtggcatattatcattgggtatcttttttaccaattaaattggagatgcatcatgcatggcctcaccgaccatgttaagtaaccttgtggcaccgtcgaaaagcaagaatctttaactaaagtgtccagtcagctctttttcttttactttatttcggctaccaaacattattatacttcacaaaatatacgccaagtaatttttttttttctgcttaaaagtagatttctgcaattataacttttaagacaaaaaataaatgttttaacaaatgttttaagaaattttaagcttaaattttgtccagttttgatcccaatttttgtccagttttgatcccaattatgtaccaaaattataacttaatatttcattatatcaaactgtatttcaatatatatacaaaaatttgttgctcatatcatcatatcatatcaataaataaacatacgtcagattacatttatagttatatatatatataataaatttagatctcatattctcattgttattttgattaattccgttagttcatttaacactcgcttaatccagtttgattcataaacctatctgtaaatttaaataatatattacgttatccattgtataaaattaaatttctattactgaatacaaaagaacgtatttaattacatttttgtagaatccgaattccgaagcaaattaaacattaattgttaattaatttctctttataaaacccacctcatcctccaacttcttcatcaatctcaattctcaaacatcaagaagtctctacaaaaaaaaaatctcacatctaaagaaaactctcaatagaaaacaattaaacaacaatcaagaatctataatg

SEQ ID NO: 26434 - DNA, 3003 bp, Unknown
  misc_feature (1)..( 3003): 2750-1469P.txt file - cDNA_ID_2713642; gDNA_ID_2214625; Annot_ID_135963
tgaggaattttacattgatgaatttgattttcttaggttttgagtaattcagaaactcgagtgatgatcccgaatgatgatgatgatgcaaattctatgaagaattatccgttaaatgatgatgatgcaaattctatgaagaattatccgttaaatgatgatgatgcaaattctatggagaattatccgttaaggtcaattccgacggagctttcacacacttgttcattgataccaccttctttaccaaacccttcagaagcagcagcagacatgtccttcaattcagaactcaatcaaatcatggcaaggccttgtgatatgctccctgccaatggtggagctgttggtcataacccttttttggaaccaggattcaactgccccgagacaacagattggattccctctccactcccccatatttattttccttcgggttctcccaatctaataatggaggatggtgtcattgatgagattcacaaacaaagtgacttgccactttggtatgacgacttgattaccactgatgaagatccactcatgtctagtatcttgggcgatcttctccttgacactaatttcaactcagcttcaaaggttggtaatgttgtctccaaagttttctgtttttaacccctccaatatgtatacatagcaaacaccataaaaagacgcatgttttatgaggcgatattgtttcaggtccagcaaccaagtatgcaatcgcagattcaacaaccccaagctgttctgcagcagccttcttcttgtgtggaattgcgcccacttgataggacagtatcctcaaacagcaacaacaatagcaacagtaataatgcagcagcagcagctaagggacgtatgcgttggacgcctgaacttcatgaggtttttgttgacgctgttaaccagctcggtggcagtaatggtgagaatctctgtccccctctctctctgtttcttgattttaagatccttgtctttgaatagagttaacgatgatgaagctcttgctttgtgccttattttaatgtagaagcaactcctaaaggtgtcctgaagcatatgaaagtcgaaggtttgactatttttcatgtcaaaagtcatttgcaggtttagtttttattttttcctaacatatgtttatcctaatcctcatagtctgtttgtaaaagtctacaatttttcttattcatattgcagaaatatagaacagctaaatatataccagtaccatcagaaggtaaaaactgactcttttatgtagagtcttcatgtgcatttatttttcttaagatgagtaaatattgtagtagcttatatacacaaattcgatcagctcttgttgatctatcttattctactcttatcttgatatttaagttaaaggctctcgacattgtttgcttgctagccactattttctgattttctagactaagaaccctcttcccggactcatttagcctttgttataatctgagcagttttttttatgtttaacttcctacagacgatttttactttaagatgactttctttgatgattagcaggttcgccggaggcaaggttgacaccgcttgagcaaattacatctgatgatacgaaacggtggggtttggtgacatcacaattcacaactgctacaccattatcctttctaataaattgacattactgattttgcagtgggatagatatcactgagactctgcgaattcagatggaacatcagaagaaactgcatgagcagcttgaggtacaacgatgaacatataatgagtcttagctttgtggtgttatctgtttatattccttgaagttgcatacagtagggattgaaaagggggcttgttttgatgtgcttgcagagtctaagaacaatgcaacttcggatagaagagcaaggaaaggcgctgttgatgatgattgagaagcaaaatatgggtttcggcggaccagaacaaggagagaaaacaagtgcgaaaacgcctgaaaatggttcagaggagtcggaatccccgcggccaaagcgtccgagaaatgaagaatgaaggaaacctttcttcggatggtagatcataaaactgtggttttggtggagttgtagagtatgacttattaggagtagagctttcagtcttcttcaggccttttctcttttttttttctttcttaaaactctaattttctgattctcagctctctaggaagaaacaaataaagagcaattccatctttgtgatgtaattctgagtgcagagattttagatttagtgtttaggtggattttaaactagcttttatttcgagtttcttcctgtatactgcgttaatttcataattgcatgtatggaatcaactcatgtaagttagattaatcttcgaaaatatttttgcttttgcatatggaagaaagatatgcacaagattaaaggttttgtcccacatcgctaagctcgtgaagcattagtcagaaccaacctgtatataaagaaagctgggccgatctttcaaatcatacctttctcggccttttggctaagatcaagtgtagtatctgttcttatcagtttaatatctgatatgtgggccatcggcccacacgatattaactctattttttaagggaggaagcccattaaggtagcttgctacctgggtttccgcgagtcgcccatgcgttgcactactgcacgggcttggctcaacccgccaatcgaatagtaaaatgatttactttactttataatttccaaattattgatataagcgtagttaataaaaactttttgacggagctaaacactaattaacctacgtcttctcgacagaggacaaactcaaattcgtaggtgagaaaaattcgattttggaattgttcatattctaggtttgagcttaattggatatatccttggtgattggttgatttggattcgattaggtttaagtataggttttgatatttggattttggaagaaaaagagtgatg

SEQ ID NO: 26435 - DNA, 3003 bp, Unknown
  misc_feature (1)..( 3003): 2750-1469P.txt file - cDNA_ID_2713658; gDNA_ID_2214625; Annot_ID_135954
aatattcaaccgttgggtttggtaaagccacattcaaagtcaattccaaattttcaacgcttacaagtttaggacctgaacttttagtttttcatatattggttaaagacttttaatttcttttaattttatccataacttctacaaagtcaaatctcgtaatcaacattaacgttcgttaatactatgaggtaatcaagtataagattcatttaaattattccggaatccgagtcatccgatattatgctagacctgttcttttcgtaaattaaatatctttgacttatagatcttgtaagtacttgatcctaaacaaattattgattgctaaaagtgtatattgtgcaatcaaaatatttttaaggtacatcgtgatataattgctataattctcttaccactatatttgtttcctggatggtttttccttaagtagtagcatttacaaaactgaataaaagtagctagttaactttaagcaaaatataaatataatgattcgaacaaaatataatttatttgatattttgtagcttggcttaacattttaaaacttgaattggaaagtaatggaaacaagctaaaaagacatttcatggatgattttgtaatatttttttgattaaatgttagtagattcatacctaataaagtattttctttatattgtcattttttaatctaatgttcttcaaagataatgattatagatttagataatagataattgcccgtatatatgtagattttatatatatatatatatgataaaaaaaattgaattgacattaataacagtgaactaaaaaccataattttgaccaagatttatagcttaataaattgtcttactattatcgttgatgtatcacaatccttggtttaaaatccagatatgattgaatgttgtcaataataaaataaaaaaaggtcttagggggtgttattggtttatgattttaaaagagttttagtgacttaaaatgtcatgtacaatcagttgttattcaatcaagattctttatttagatattacgttgtgaaatccacatataacaatgttgtcaaagttttagagtttcttctttaaaatttgattaggtgaataacattacatataagtaatgaaggaaatgtttgttttgtttcaggaccttaagatgtgagcaccgctggtaacgaactagcggatattacaatttgttttcatatagaaaaatggctagaaaagaagaaccacacaccttaaaatgcaatgatgaaaattgtggcagcatggtcatatgtgttaaaatgcaatgatcataatgggacataacactatgttgttgtatcatgaatcaaggagaacaaagtttttagctaaactcagcaaaattgctacttttaaacttgactagagcgaagttgagaattactactaaaaagtttctgaagattaaataggcaaagaaattacagagacaaataaataaagagagtaatagcttggaagtgaaatttataattcttttgagttataagtcaaacgaatatatatgtttatgagttcaaagctactaaaaaagacaatatatatttttaattctttttttgctaattacactatagcgatgaaatctttggtaagggccttagaagttcacgatttaagaattacatcgattaaagtcaaatttcttgcatccctactcaattttgataacatttgtggtaagattttggaaaggattatttgaaagataaaactgaaacttcatttagttaaacttagcgatgaagtcaacgattaagggtttgtaagaacagatagtgcaccaaactcataattatgcatagagctagaacttggaaacaaatctgatgatcgaaaatcagataaatgaagtttctgctccctcttcataattaaagttgctatttaggtattatagtttcaaatatttttgcatatataaaatacgtccattcaaagacatgcaccataacatgcaaaagtaacataatggagaaaatagtaacatatgttgttattataccatttttgaaattgttaataagcttttcatattttctactattttttaaataacgaatcttggcaaaataaatgagagattattttaaatgactacataagaataccagatttgctattcctttttggtaattgtgtgggaatgaaagtaatgaagtttaaattagacaaaacaagtcaaattaatcaacaattttggttgtatttgctcataacatgaagaccacgtttagtagagttaaaggaaaaaaaacgtgagaggttaaaaagacaaataaaaaaagataaaaagctgttcttctcctggtctcaagtataacctcccctttttcgtataattctatttttagtacaaactttatttatctgtctttttcacccctcccagagaagaagattcaattccacttttgttgttgtttgttccaatttgtgttttgtaatcttcttctctccctaatcttcttcaccgcgcattcatttccttccctccataatccaagcttccgttacaagctctctctctcttcttcctctttttcgtgtttgaattttcctgaaattaaaaaacaaaatctctcaggagcattattgattttgctggaggatttgaaaggtatctaattcttaaattctgtgatcatcttcttttgattcgcataggctggtgtttagctggaaccttgaattcgttcttaccaaaaaaaaattgaattttcttatgatttcaaactcttctaaaaaaattagggtttcgttataaataaaggattggtgattcgatgatcgtaggattgtgttgataatattgctttgtttttgattagattgttgatgtgtttttttttgtgtgtgtgttttaggagagattttgttggtgtgttagttgtttgattttggctgatgttgtgtgagggaggaggaggaagtggtgtatgaagccgagctttaatacggatatg

SEQ ID NO: 26436 - DNA, 3000 bp, Unknown; identical to SEQ ID NO: 13413
  misc_feature (1)..( 3000): 2750-1469P.txt file - cDNA_ID_2713662; gDNA_ID_2214625; Annot_ID_135953

SEQ ID NO: 26437 - DNA, 3000 bp, Unknown; identical to SEQ ID NO: 13420
  misc_feature (1)..( 3000): 2750-1469P.txt file - cDNA_ID_2713666; gDNA_ID_2214625; Annot_ID_135947

SEQ ID NO: 26438 - DNA, 3000 bp, Unknown
  misc_feature (1)..( 3000): 2750-1469P.txt file - cDNA_ID_2713686; gDNA_ID_2214627; Annot_ID_135995
gtgagaataagaagattaaagagaagatagcaacgtgaagtgaagaagaagccatagatgccgatagaaacatagtattgagtagtagagaagctagttgcttggagtgtagtgttaggaatgttgttttggaaattgctgagttatgaggaggttcttgtgaggttttatagtggtgaaaattcgaaaactagccgttagattatttactttttgttttgttgtgaaaaaagaagaattttgaaaaggtaaagaaacgttaaatgtttgttactgtagccgttgcgagtgatgtaaccgttagagaaaatttgaaacaatgtaattatggatactgacatttgttgtgtgtgtcaggcaaaactatgagtgtttctcgttgtctcgcttttaattttgacaaaataattgttcgtgaataaacgtagtaaacaaagtaaaatctagtcattctatttggtgatggtgacgtttgggtattgccgtattgggcctattagctattggggtgatacgtatacacacctttacattttcggatatatttgttgagatcactcctggcccaaagaaaatagaaattttcaaaaattttaacaaggaatttacgttgttcttcttttttcaataaggatttcgaatcaacagagcaaggaccaagtgctaaaaccaattatcaattgagttatcttctttataacatttactagaacaagacataagctcatctatgactatgagaggcgtgtttatacaagggatttggtttaactaatagcaagaatggctcatgagtttaccaactaacgaggcatcaactcatttactcagctacatgatccgtttgtgcaacgtttcccactgattgagactattgtactgacatgtctagcatcaccccgtaaactatagtattgtttaggtgaatttggtctccctaaccatatatagggacatgaagaaaatgtcttgtgcagtttgtcagtcatattagtgtattatatcttgttacctccaataatgtcatatattggaaaacttgagaagtgatcagggccgatgaatgaaacattttttttatgtaatttggttaaaaagtgtaacgaaaaaataattaaagtgaaatctacttttcaaaatcgttaaaatgttttttgtgaacttcaaaaaatataaaaaatagcttacttttcatttaaaatgtctaaatttaatgtaaatattaaattagaaaaatgaatttatacatataccaaaaatcccagttttattttgtatgtgaccccaatattcttaaaaccaattaactttttcgacggaccaagtattccgtcgatttggttcaatatatatgtaacgaaccataatctacctttcgcggttgaatcggtagctaaaaaattatttctaacaaatataaaattacaaaaattgtatttttctcattaatgacttaaaaacaaactatgatatctaagtgtgtactcattcaaagattatttaatttttttaaatgaagtcatggcaaaaggaaataaattgcaaattccgagtttaggaaagaaaagaaagcaaatcttaaataactcaaaaaagaatattggaagacatgtatcatagtcctaaacaaagtaacagatctttgggtcctcctttcttttttttcccttctatctgaaatccgacatcatcctcaatctctgtctgaatttctcaatagctatatcatcttcttcttggtcttagaatcaaagaaaaaccctagttcctcttttcccaagataaccaaactctctctcttctctctctgcatcattccctttcttctttctcgcatgtgcagagctatcaaacatctgttttgattgaaagctaagtttccaattccaaaacggaagaaattgaaagtgtgtatgtcaagacaaaccaccaaactacaaaagaaacaaaacccacatcgcattgttccttaaagacccagcaataagattatctcacgcttccttctttcttcctgacatttttctcgtttttgttttctccttatttggggtttttcctgcaatgtgggtcgcatttggtcataagtgattatttctagggattgtgtgacctctctgcttttttgagttaagcatttaaagaaacctctcaatggcgttgtttagaaagttctttcacagaaaacctcctgaagggttgcttgagatctcagagagagtttacggtatgctctttcttcttttaagtgatgggtttagggtttgctttcttatccttgctcttctttgggctttggagtattgatttttagaaagtttgagtttttaggtcttaagatcagattttgataagtgtagtgtcctgttttagtttctagttctttttaggcttgttgattgaactgaatctaacatttgatagactaagattcttgatgggtgagatttagttcatggattctgttaactatccatgagcacaggctcaggctcattggtggaaagtctatctattatagcttaagatgtctcattctcaaagaattgtcaggaaacagtttcttttgtatggtcactgggttgcatgatttctcaaatccttttgcttgtcttatcccttgctcttagagtattaaattttagaaagtttgaatttttaggtcttaaaaatcataattttagcctaagtttatagtgtacttcttgttaggcttgttaattgaactgaatctaacatttgatagcttaagattcttgatcggtgagatttagctcatggatagatttttcaggttttgtatgttcactgtgttgcatgacttctcaaattcgtccttgtcttatccatgcttagctctgagaaatagactattttagtgagaaagatacaaaagattgctctataagctgcttacgaaatataagattgctctataaggttgctgaactttgatgtttttgtattacagtctttgattgctgcttaaccacggatatg

SEQ ID NO: 26439 - DNA, 3000 bp, Unknown; identical to SEQ ID NO: 13435
  misc_feature (1)..( 3000): 2750-1469P.txt file - cDNA_ID_2713730; gDNA_ID_2214627; Annot_ID_135974

SEQ ID NO: 26440 - DNA, 3003 bp, Unknown
  misc_feature (1)..( 3003): 2750-1469P.txt file - cDNA_ID_2713744; gDNA_ID_2214628; Annot_ID_136011
tgtgtgtagctttgtttggggattctgagcagtctaaggagatgtgtcatggctggaggcaatgctactgatagccctagtgatctctgaaccatccataccaaattccatctccaaatcacaaatgttaagagagatctttcctctcttcacatcaatcctagcaccagctgtagttaggaaagctcgcccaaggataagaggatctttaggttcctttccataatccaagaccacaaaatcagcagggattaaggaattaccaaccttaacaggaacatcctcaaggattccttcagggatttgtttggaacaatccgcgaagacgagagtgattctagtcggcgtgtagttagtcatgcctaatctttcagcagtggtctgatcaggagtgatagtgcaacgtccactctctgtgccttctctttcttggcctttggtagcatctttttttattttttcttatttatttttttttaattttaaatttccattaaaaagttacatggcaacagcccaacaaggcacacatgcacaaaagaaaaagaaaaataaaaaaggaaagaaaacttacaagcccaaaggccaacaaagcacacaggcccaaaaacaaagaaaggaggaagcctagaacagaaagcagcggatggcttgagaccgaagaaaaagcacctgaaacagagaacgaagaagaagaaccaaaacagagaagcggtgactaatcaactttggaacacagcaaaccaagtcatcagaagcgagtcacccacaagaccctgacccatcctcctagaaagtggatcaagacgggcccttacaatgagctggatttccttaatgagctgagtatgattcaaaaatgaggatgtgtgaatccgagagttgcgctccctcaacaacagataaatggaagcctaaaagaggagcttgattataagtgataggttctttgacgtcgaagccgtcttcaaccagaggagagaagccatgaaggacgttggaggagatagtccaacacacctagtgaaataagtccagacagcgctgctatacgggtagttgaagaagaggtgttctctagactcatcccctgagttacagagcacacacactgcaggaatagagaaaccccaacttttcagcctatcccttgtatgcaaacggttccaagccacaacccaagagatgaaagcatgcttggggacccgatccttgaaccaaattgatctatgccaattaacctggacacccggagggtgaagagccatccaagtctttgaagcagagaacgagtttgaaggagcatgagcatcgacttttcacagataaacatcatctttagtacactcagccatactccccacaaccggtaagcagggctttaaaagaagaatggaggggttacgactcctactagcagacagccatcaaacaccacctcttaagccatcttttacctccgtattcagaggcaaaccaactaagataggtccagtaggccccgtcagattaatgagaagaccaagactcgttcaattgtcttgccagaaacttgcagtttcacctgaaccaacatcacacatcaagaagggtctcgctaaaggtggtatcttacaaagcttcctccaaatctaactaccagaggaagacggattcaaatcccaaaagcatttgtgtctaatgagattaattctgacccacgaaacccacaaggaccctgcagctgtaaacaataaccaaatgagtttgagagccataaccttgttccaatctatcaaacgtcgaagacccaacccgccacactccttaggggaacaaactgtttcccaagcaatttttgctcctcaaacggagtttggagctgctttccataaaaaagcattacacatctcctctagctttgtgagacattgggtaggcagcaggaagatcgaaacccaaaagttaattgttgaataaattacagacttgagtaactgtaatctgcccgtaaaggaaagatgcctagtagttcaagtagagaacttaaatttgatcctatccaaaagaggctgataatcatgttttttttcatcttttgggccattaggggcactcctaaatatctgactgggagggctccttgtttcatccgaaaggtagccgctaaagaagaagacctggcatagtctcctccatctagcataagagcggttttggacttgttaatgcctagtccagacccaagcttaaacgcctccagaatgttgagaatccctgcaactgggctcatggacccatcaaagaaaaccaaaacgtcgtctacaaaactgagatgagtaataaagggagccacacacctggggtgaagattgaataggccattgatagcacccctatccagtaatttagcaagaatatccattacaagcacgaacaggtgagatgacattgtgatctccctgtctaataacctttttactacaagaaaacagacaaataacgactacaaaaagcgacaacagatgtcgtcgtcatttttggcgactacttgacgacagtgttacgacaactatacgacaacctgaacattagtagtcaaatagtcgttattttacgactaacttcgttagtcggcaactactcgtctattaacgactatttaactattatattattgaagggagacgtttgtcgttacatagtcgccaatgcacgactacaatttccgactacgatagttagtcgcctgattggcgactaaaataatacacatttctgcaatcgtaaaatagtcgcaacttagtcgcagagtagtcgacttaagcagttggaaaacgttttcgcattgccaagtaggtacacctaatttgtttgttgtagtcgtaaattagtcataaaaattcgtatatataatcaaaattcaggacactcttctttcaccaagaaatcaaaacaacaatcaaaaggaaaaaaaaaacgattgaaacgaaaaaaaatagaaatttagtttattctataatg

SEQ ID NO: 26441 - DNA, 3003 bp, Unknown
  misc_feature (1)..( 3003): 2750-1469P.txt file - cDNA_ID_2713761; gDNA_ID_2214629; Annot_ID_136018
ttcatacagttgattcctcttgtgttatgttgcctctattttgatttctagatggatttcaaaactctcatgcaatttatcgaatccctggtgtgcgtagaaagtatgagaatgaaaaatgtacaaatctgaaaacaaataacatatcaaacattcggaacattagcatgaagagatgaaataactgcgcacaaaaagaagggggaaaaaagaacaatattttttgggttaatagtgagattgcaaaatttataatccatagtcgataaaacaaaatgttttttatagtcaaatattcaataatcagatttataagatataacatctcaatcattactaccaaaatgtatagaacatctgaacatataacatctcaattattactaccaaactgagttttcttttttaatgtaattcgaaggccagccggtcaataatcctagagttggtcttgtaatgtgaattgataggtgaatttactgtttttatcgaaaaaatcacatttttaatcctgaaagtgtcagtggatactatgttaaacctcgacattatttcacaaacattataaaccaccaaagtaattttattaataatataaaccttaaaactgaataaaaacatacatagtaatggccatttcttcttcataattatgtagtattatatatgtaaaaacttctgaggccagaaatagttactatgtaatttatgtatagttaacacacataaaaaaaatgctatgtaatctttgtctctctgaggctattactctcattttaacaaacaactgcacacaaaatgaaaaagagaccgtacctatcactacacacaatgacgatagaagatattaatcgagttgacgattctgctgccttcgtatctctccctcacgcacgttctatagagcgcataattttcatcaacaaaactgatttttttcatatttctctttctctctcttttttttttcttttgtgaaaccatgtttctctcttaaccaattagaccaattcatagttttcttcttatacttaatcgtctcgcttttcttttaatatatgttttctggactaaagtttcttacaaattttgtctttggtatctaataatcgtctctctattctgcttcccaaaaatacacttcctttcacgtactaataaaacgtgacatttagttttcttaatagatgtcacatactatataatatataccgaaagtcaaactagcgaaagagtttcttcatactttacattgatgaaaattataaatactctaaatggattttgtattaatgttgatatttcgtgatatttaaattttatatgaatgttgatccaaaaacccattttaccaaaccaccataaaactcattctgccatataacatgttaagtcatgtaacttatcttgccatataatccgtcatgcaatatagtctgtcttatgctttttttttatatatttttaaattttccataatattataaatttttgttaattttaatccaccctatattgaaacagcgagttgataattttttaatttattaatgttgatccaaaataagtctcgctaggccatcataaaatctcgtcccatgttactttttattttaaaatgtttaattgttcataatattataaactttctatgctctcaaatatatcgattataataattcgtgtaaaattaaagaatttaactaaaaaccgaattaatatgtatacaaactttttaatttggatgtttgttaagtgaaggtttccagctcgtttagatttatattcattttgatcttatttataatataactctgaatcattatctaaacattttaaccgatgtgggacattaaacacatattttttcattaattgggtaatatatgtctgttttaaaatttttaaattacaatatatgtagaaaaaaattgagatttttttaactctatgtattataaattattcaaaggagttaaaaaataatcaaacaaagatggaaaaggaatcttaaatctaaatcattaatttgaaatatcgaagcataattagtggacacagtccaattttggtaatattggtattcgacttttaggaaaaaaaactggtgggagatccatgttaaatataacctgacccaaataaatttttatgaataatttttcttaaagaatcagataccatttgtatctaaaattattttaacccttcagccaaaaaatgacttcaaaaatactatagagataataaatgaataattattgggttcatccataagattaacctttttattcacctcattttattccatctaattattaaacttatttaattataaaatccaaacttttactacttttttataaactcaaaccgatatataatctcgttgtaattacataatctaaattttaattctcttttgtaaactcaaacagatattcaacctcgtttattgtaaaatataaactctaaccattcattctaaatccgaaccgatatataatctcggttaattataaaatttaacccttttataaacctaaaccgatatttaatcacgtttaattgtaaaatctaaatccttttataaattaaatctaaactttttaatgtcggtttgaatttataaacgggattataactaaaaaaaattctgttatgtttttagtcataaaatgttaatttgtttatgattatttttgcaaccatttgttttgtgtttataattgttttcaaccgaatgaaaatgaatttccaccagacttataccggacgaaaagagtcttttaatttcaattttttaattggagatgcaaaatcctcgttttctcatgtcagttgtcgacgggaacaaaaactgaactccgcttctaagatccttcgacggagagaaagatatttcagatctgatcggagagaatcattctcaaaatttctccattctaatttctctttctcgagagagtgaagagagacaacaaggaaggaagaggaaaaatg

SEQ ID NO: 26442 - DNA, 3000 bp, Unknown; identical to SEQ ID NO: 13479
  misc_feature (1)..( 3000): 2750-1469P.txt file - cDNA_ID_2713769; gDNA_ID_2214630; Annot_ID_136043

SEQ ID NO: 26443 - DNA, 3000 bp, Unknown; identical to SEQ ID NO: 13507
  misc_feature (1)..( 3000): 2750-1469P.txt file - cDNA_ID_2713781; gDNA_ID_2214632; Annot_ID_136074

SEQ ID NO: 26444 - DNA, 3000 bp, Unknown; identical to SEQ ID NO: 13507
  misc_feature (1)..( 3000): 2750-1469P.txt file - cDNA_ID_2713781; gDNA_ID_2214632; Annot_ID_187992

SEQ ID NO: 26445 - DNA, 2810 bp, Unknown
  misc_feature (1)..( 2810): 2750-1469P.txt file - cDNA_ID_2713793; gDNA_ID_2214633; Annot_ID_136090
ttatctatgaaaaaccattttctataagcaaatcttatcagaaagaaggcatttttatggagtccataatttttctgggcgagacagagcaaaactgggaagacaaaggatagactccaagcatctctttgtgatcaaacggagctgaagggagataaatgctcataatatgacacagaaagggtggagatggggagcacacttcgttggtgcaagcacaaaagtgagagtctgagagagatagagtcgatctggatatggtgaattaagatctccaatttgtgcgggtcttaactgttagcatgatgtgtaattatatgagttgaagggtttgatgttgagactcaaatgggtttgtgtgtagtagagaaagttgtttgtgtaatcacgggtatgtgttgacatgcactctccctttatatatatatagcgtaaacacaaagcaaaaactaaagatacagtttgtaaaccaagtagcttttaccatgaaataaacatacatatcacagggccttgagagacttgtcttattcccaagggacaaaaacacagagatcaatggtccaataacttgagaaggatggcctgttccatcggagggaaaaatgtcacaaagttgaaatctgtttacaaaaataaggggaagaataggagggtatggatgaaaaagagacttacggggcaacaagcatgagatctcattccctgatgaagctcagaggctgatatcaaaagcttctgcaaacggtactctcctgtctgagactgtcctctattctctgcatagcatataacttgtcgctctctcaggtgctcaaatgcctgtcatgtcaaccatttagaccaccacctttaaaccatggcatctcatgagagctataaacatacccttaggcagacattttgtgcgtagtagtctgaggtatgaaaagaatcgtgtatcgccttatactctggaatacacatggaatctcaagtcattttcatagtggtgccatggtttaaaccaaatttacagattacctttcatcacactgatgaagttgtatgagctttgctccttcacttctaacctcctcatacagaccagaagataaagctccagtacggaacaatctgctcaacaaagatagtgtcaatagatattcccaaggaaaatgtatatgcaacaccgcagcttattatacctctaacggcttccaactttggttgcctttgcatacttgaaagtgctgctttgaagttctcaagagagaggaggccagattccaaattcattaaagaaacagcgcagaatctaacatcaagagatagactcaacacagagaaaatgatatcttaaggaaacatctcatgattgtaatcgaagaacttacataaacttcaggaaactgttcacagtagaattagcattaaacaatgtcttaagtatgtctttaaatctcgtgtctgatgttaaattctgcacaataggttttttttttttgaaattggttagtatcagttgttcagaacaagaatcaacatcatctaaaagctaagcatgtcatagtagtaattgggattggatattagaaccttaatcttatcattgaaccgagaaacatatccactggggaagcctgagtctgctggtagagacagcaggtgtacaaacaaactagaaacatagttcctattagttaaataagttgattggaaaaatagttgactggctattacagaaaagaagctgctcattacccgtcaagttcttccctggaaggaggaagaaacaaaaattttctgtgtgaaaagcgagatctcactcttttctccagaagttggtcggcgtcctgtggtgacagattgcatattataagattttgaaccagagtagtattaacaagaaccaaagtcagctgtcatcaaacataaaaatacatacaagaaacagtttgtaaagcccaaagcacatatatctgtatagcgatgctcataccagtcgagaactaataccgacgacaacagcttgtgaggttacagattgcatagcatcgtccagcamactgtatagcaccgctgctttccctatatatatataagcagataatagggtgagtggatagaaaacaccaatgtccaattcctttgttcatcaaaggttaaaagaaaccagaattcttgcctgtgcaaacatgtcaaattcatcaagcacaaagatgatagtcttatgtgctagtccacatgccctgaaatatctctatcagtttgtctgcgttgaatatcaaaaaggctcatttatgtaaaggtaaaaatactgaccgcaacatggctataatgaattgtgaattgtcatcgaatgatgcctggaagtgcaagagagaaagcaagtcaactgagacattggctacacagcaaagagaaagaacattcggagagaacaatgtcataccattttggagaatagtaggtggtgttccatgcacaactgtttggcaatttcctgaaaaatcaatgtaagacggtgagtgaatgaatagattaggtgtaggaaatgagaatggtgggctctctccctctcttagaccttaaaggcacaattatcatcactatgcaagagtccattcaatctgatctgcaatcacattgagatggtagtaagatcataacgatgagattagatataggagatagttccaaatgtataagaaatcagacatactactgatactgaatcaggaaactgctccaataamtcacctasamcgagatccaagacctgaaatcaacccattttttgaaataaaagaagaaatcaracgccaatg

SEQ ID NO: 26446 - DNA, 3003 bp, Unknown
  misc_feature (1)..( 3003): 2750-1469P.txt file - cDNA_ID_2713800; gDNA_ID_2214633; Annot_ID_136086
ataaaatataagttgtcaattcaaaaagttccttattacactgatatactaagtattttcttatagtagaaagagtgttttatatgaaagcaacattgtttcttagaaaatattaaatttttattttgttgatccaaaatagtttatttatatttgagaaatttaatatatgagaactgtaaaatacaacgtttggagagaacgtaacactagaaaataccataaagaacacaacccgtgcactcacctcattaccgtcatcgacaagaccattcgagatcgcatcaccagtctttattatcaaggcaccagcaaatatgcaaaccttcagaacggtgcaggcttcactaacgtgataatttgtaatgttctgttttgagatcatctccaggcctagctaactttatgctaggttattcagctgtgtatgtttaaatgcggcatgcgttactgttttgataaagtagctttagaagaatgtagtgtgttgggaataagagtaattttgttttgtgtttaccaaattacagcacaacacagacatattcattcttcatgctcgtgatagtgcctagagaattaacgacttgtgatcacattattagaggaaactcctaactaataaggattaggataaacaacactacatgtggtacactcaacaactcaaagattatctcctgaaaccttatccaactgttcttcggccccaagcagtgatgtagatggctggtcaaaggcgaggacatggtctgactgatggtaagaagtgttcaagcctgattctagtattgggtgacccactacaatatcaggtgtataaccagctgcacctctcaccaatcgaggcttctttgataatctctcctctcctgtgctctcatctggagacccaatgttacaccctgagtctggtgttaaaggctcccggtaagatgagagagactcgtcaactgagagacttttgtctggtccacagtccttgccagacttgtcttgaagaggagactcagatgttggggcaggggttgcaggatctgaatcgcccgttactggggctgagggttcgccgagtactccactgagtcgttgttgctcttcaattatcttcttcaagtactttccttgtgcttctatccgtagttgcagctgtctttgcacctaagaaaaaatcacatcaaagaataatgtcatatgtaatgcaaaattcagtgctacactgaaaatcctactaattgtttcgttgttgcttgtctttcttaagtaggaatggtgaagcatacttctagttgctcgtgtaatcgtttctgaacttccatctgcaacttgagggcttcagttatctgcattcccctgtaatctcgaaacgatattgatcacttaatctgcggcgcgaggtaatatatatatagcatcacaaatcaagctcaaagagggaaatttcacgtacgacgagccgtccaacccagagagcatatctccagattctttcttatcagtttttttccctgaaaattgaaaaaaccagttttcaggtatataggaaactggtagaatgagaaagaagatgaagaaaatcaatgtccacactaccttcagaagacgaatctggaagatactttgcaagtcgatatttctgactcaaaatacacaaatgcaaaaatcagcaagggtaagagaaagagagacgagacaagatgccacacagtttgagaatacctgtaagtgactcttgacatgatatatagttaagccttgtacacccatcactctaagaacgcctttgggtgtagctcctttggaaatcaaaggaagaaaaatgtttaggaaccctaagcaaacagacgataggctttccctctcatggatagtagtaaagcatacaagaagagcaatttgattatattggtgtgcatattattaccacagatattgatgaggaaaacatgagttactaaatttaccatagactatacaagaaaaaaggaaacttactatcagggccaccaagttgagcaacggcatcaacgaagcgttcatgtagctcatgcgtccaacgcagacgttgtttggatgcatgactagaattggggcctccgttgtctgcttccatcagggctaagatataaacacgataaagggaaagtaatgagtagtggcaaagctaggaaatgataacatatgaggactggccagagagaaagagatagaaatggaaacaaggaagacgaaatagcgcccagaattagctagtaaaaacagtccaagtcaagtttaagacttgctccggcagatccaccacaggacaccaaaatcagagacatgttcactaaaatcggaggaatttgtcgccgagaaagcaaaaagaaaacacaatccaaggttatggaatctacgaacctgtgggtggtggatctatacacgacgcccctccattttcggaacttgctcttctccaagctaaatcttatctgaaatagaagatattgtgttacagactagtttactgagtccggtgggttacagggcgggcggcgatggagcagagtcctcctcaaaaaaattccagtcttcttcttatcgctcgatcgacgaattccaggcagtggcattgactattgctgcatttctttctgggtaagccgggcctctcggtataggcccaaaccattctaaggcccaaaccattatattaagttggttggtccaccaaagtcagcagcagctagaacaagagcgactctgcagctgctcttctcccgcttccttcctgttagttagcctcagagatcctcgttccccgataatggatttgggaaaactgatccagctgtctgcgctgctgtgcccatttcttctatcattacactttagaatcgctggggcctccgcccacatctactcttcccagcccttccacgatgtcggtaattctctcctcctctacggtggcagcgagggcatcttcgcctcttcccgatctttaatcaggtatattctatg

SEQ ID NO: 26447 - DNA, 3003 bp, Unknown
  misc_feature (1)..( 3003): 2750-1469P.txt file - cDNA_ID_2713826; gDNA_ID_2214636; Annot_ID_136137
cgtcaaattgtcatacaagataaaccaaaattaatttacttatatgtatttgcaggtatggttggtttgtccatgatgcgtcaggttctattatttctcaagttccaacttcagatccttgcccttcactcgaggatgacatgaatgtggataggttgaacgaggtcaacatgctccttactgaatcaggacccttgtctgtgcattcaactgctgaacaaacgacatctgtagagcccagtcagggtctagtatgtgcatctggtgtccatgatcgtcccgcaagatctagagatgattatgaacctgcttcaacgagtattactccacttgagcatttgagcggcggtaatgcacaatcaccaggagaatgggctgatagtcttactaacataagtataggtgatctactttctgaagtgcccgatgacatagatagtgatggtgttgatccacctgccaccgaaggttcacattacctccttcgagatgtcccatttacctctgactcttttgatgctgcaattgctgctcatatactaagacaccagaacaagccaagtgctcaactaccgctgacttctggctcttcctctctgtgggatgatgaagaaacacgtgatgccttctctttccaaaaaaatcgtttcgcaaattccaccgagctggctagtgttgcttctcctaaaggtgttggcagagtaaatggagagccttcacagttggtggaggtaactatatcagcctcaaattccacttccctcaattgtttacaaaactaaaccatctgattcaatactttctcttaggcttcatccggcgatgagggatcttataaccctcatgacgatggagatccaatggaagagggtccagcagaccctcatacgatggattctccagggaagaccccttgtggacttgcggatgtatactgggtaaatttagaaatctcatatatttccccaatgtaaaaaagtcatatatattcaacaacaacacatgtttcctctttgcagcccgactcgttaggaccactggatttagacattagatcgtcaaagtatacagatgatttgatccttagtgagagcctcgggggattgagccgtctgatagcaaccagccttgatgcgtttcagaactgctcgctctttgggttcgacaataagaaggacaagtctaacatggtatgaaatggaaccaaagctaaagcatggggtccaaatgttgatagttgaaaaagaaagtgacttcttgccttttgaaaaaagaaacttttatcaccaactgatagcttcactgtacaaaaatttgatgtaaccttttactcttcctttcacacattcttttgtgttgatacatgtttctctgtgtacacttttactgttaatttacatgtttatttggctaccatgccttctttcttttttttttctttttttttgttcttttgtttatagaagtttcatgacaaataagaatttcaattaatattcttaagttcttttaagagtgcgagtaaaagaacaatcgtaggacgcaaaatttaactcgctcattcaagagtagtgttgataagtccttttttttttcatttcaatattctacccgaaaaagattccaaacttctacttttctacacttgatcaccactataatcgaagatttatgaacaatagactctttaataaagtaaataaatcatttaaaactaagtttgtttgttgtcttgatcatatgtgttcaaattggttttctcttctattctctacattaaaacatcctccaacattcagttttctcactctcaatgaaccagtaatacacaccctaggtgcactagatttcattcaaaactaaatctggttcactaaaccaaaccatattgattttcaggaggaaaaccactttttttagtgtgtagtacgagtaagtttacaccctgagatgcagggttttttctttgtcttttgctaagtgcgtgagatgcagttttacccctagttagaggaaaacaatgaatttgtgtaattttaacattttcttgttatgaggaatatgctctgaataatgagaaccatacaagatacaacaatgacataagccaagttgtcataaaaggccaaatgtgctttaatgtgtgatacaccgctttacactggcctactctttcacttcacgtcaagttcgtaaacgaagagacaatctctacgtgccctccccttgaatattcagcatcatcttctttttttgaaatcaaatttgacggcttctgttgtcacaggatatactatagacaacaaaactacatatgatacaaggcatattcgagttctgatcattcacaataaaatacatgtgatagaagcaatttaaatatgtgcctgaaatatataaatcaagaaagccattaatcaaaggttaaagcaatatggattgtacgtgttgagtgtatttttttttttttgtcataccaagaataaaaacatcaggccgagacagtagtataagcgagggaagagatagattaggtcctcaattcaaaggacaccaacttttgatattttatagctagcagccgtaaatcatatttgttctatttttagcaatacaacatttcttagacaccaaaatcggtttagttaatcagatttcaagtatgattttatgagattctaagcatggatgattcttttcattggctacttttaaaataacagaaaggatctaaattttcatttgtagtaaatttgaaaacgttggcgtggccttgcatatatatttagaaaatcgtacagtggaattggtttaattggtaaagttttctaggaatgatgtagacgaaacaaataataagattatcctttaaaaattcacttataccacaatcaaatccatattgaatctcactcagaaccctgataaatatccactctcagtccatatatcactcaaaacttcaagaaaaaaagattcttcaaaagagcaaaaaaatcaatg

SEQ ID NO: 26448 - DNA, 3003 bp, Unknown
  misc_feature (1)..( 3003): 2750-1469P.txt file - cDNA_ID_2713830; gDNA_ID_2214636; Annot_ID_136136
tgaaaagggtttggatttggaatctgctggtttgacttatatatacgtgagagatgatgcatcttcatcaatcaatcataatggttggagacagtccgatcctgacctttttcattttttccataccatgtacagtatattatacaagtttgacttaggtgatgacaaaataattatattatcatttattattaactgataaacttcatattttgaacgtagtaacgattgatcttgacatcttgaaagtctaaaacagttgtaagaaaaacatagcttcagttttcaaaacctagagctagagtcaattaccccaaggttagaagatcatacacagaatttttttgaaatgttatccgaactcaatatgattatatcaagtgtaaaaactttatcatcgaggaaacatattaaaaagcatgtccttgactatagaaatgattaggttggtccacatttagaagatgtttgacctggcttcagccattccattttcaactacttgcatattcttgcaaatatacaaagcgttggtgtccgggtcagatacgagctaatatgaagatgatcaagtgcttggttacacaaaaccaccatgtcaaagattttatgcgaaaacctaaaacacgagcatgcatgtagctcgattgttcaaccagagaaatcaaactcggagctataccgaaattatgttctgattggactaatcgacttatagacgcatgttttcatatctaagtttttgatggcctttttagtccatataagtttttttaaaatgcagcatactaatatttgaattcagactctattttgatctagacctactaggaaaactcaaacaaattgagtttagtgatatattgagaggtaaaatactaaaatggtctaactaatacaacttacatgtttagtagaacttaaattatgctttatttacaagactaaaagagtagttaaacttgaaatcttaaactgtcgccgtagaaataacaattgggtcaagaaaagttttctaatccttatcaaaatagaaaagttttctaatataatagaaaaaacacccgtaagtgggaaaacatcttctacaaacttaataagaaaaggatatacatatctccaatccacatgcgaatagttttgggtcaaatctctacgcttcgcgtaacaaattgaatttgtcaaacaatttgagcatgacatgatgaaaaaaggccagagtcatgttaattcgtcgtatcgtaactccgacttctgactttctccattctttttaacgaaacgataagtcaacttttaaccgaaaaggactacaagtcaatttattcattaatgctctacgtgcataggttatacttattggttaccctatagaagttgaaccgtgagatcaaaaatcatgttagataaaccggctccgttctttgtgacgttgacatatatttttcttaggccagagactatagctagataaataactccattcttggctgctcgtaggatacgaacccaaaacttggtcatattttatctcaaaaataagatcccaaaaaatatcgactattagagctatcgataccatacgtgtttcaaagatgtaaatttgaacccctctaccttgaaagcgtgtataaggcttattttctgaaaaaaagtgttagctcatctaacatatacaaagattaaagattggatcgttgacagaagaaaagatttacaaaaatttggatcttgtgaattagttactattgggctaaataaaagcccatgtatgtatttattggaccagacctaatttttgtaccagggcctgaggactatatccaacacaaaccacaatttcaaatattattttggcgttttaacttctaaacgctttatctttatcatgcgacttgccagatgccaacccaagccacgtgcattacgattcaactaattttttgttgtctttttttcccctttttaacgaggcaaaatagtagaaatatttttctattttcatgaaattgtagaagaaaatagtaaaatttccgaattttcctaatctatagtttcactttagataaaataatacttagcgtgacgaaggcaactggcttattcaactttatgtgtttaataaaagataaaataaataataatttcgtatatatttctctcctttgttcataaaataattaaaatatttttgattgattctttcgaaaagtaaaaaaactcatttaattacaagaatataatatatgttaacccaccatgacaaacatatattttgacatcttagataacaagtaactaaattaattacattcctttttattttattttctttttaattttatgtgaatgtaaaaaacaagaaaaaaaataaaatttatttttctctctcgcttggttcaaccgtggttgttcatcggaaaaatatcttcggcttcaatttcgttcgatttaccctaaattctcgactagtgttcgtcaatcccacttccaattccacatttcaaaccttttcaggtaatatttctcatatttttcgtgttttttttcggggtcaaacttatttttttaaaaatttcaattcaaatttcgagtttgtatttagtaaccctagttcttaatttttcaatttttcgtcttcccttatgagatttagcttaattagggtattgaattaagtagaattgggtttttgtttttgttgtgatctggtgaaattaattttagggttttattgaaggtgaaatttgtttgttcttcgttatatcttcgaaattagggtttttcaaatttgtgtcgtggatgtaaaaattatgaattgcctgtaaaatttttctgtcggttgctaaatttcttgtgattttagttgatgatcgctatgtagagtttcgccttttttttgggattttgaatgttcatggtttaggattcattgctctgatttgtaggaagttgaaatcaaaagcatgaatgcttaaacagtttacgcattattgcgaaatg

SEQ ID NO: 26449 - DNA, 3000 bp, Unknown; identical to SEQ ID NO: 13548
  misc_feature (1)..( 3000): 2750-1469P.txt file - cDNA_ID_2713840; gDNA_ID_2214636; Annot_ID_136126

SEQ ID NO: 26450 - DNA, 3000 bp, Unknown; identical to SEQ ID NO: 13576
  misc_feature (1)..( 3000): 2750-1469P.txt file - cDNA_ID_2713844; gDNA_ID_2214637; Annot_ID_136156

SEQ ID NO: 26451 - DNA, 3000 bp, Unknown; identical to SEQ ID NO: 13565
  misc_feature (1)..( 3000): 2750-1469P.txt file - cDNA_ID_2713848; gDNA_ID_2214637; Annot_ID_136149

SEQ ID NO: 26452 - DNA, 3000 bp, Unknown; identical to SEQ ID NO: 13585
  misc_feature (1)..( 3000): 2750-1469P.txt file - cDNA_ID_2713852; gDNA_ID_2214638; Annot_ID_136173

SEQ ID NO: 26453 - DNA, 3003 bp, Unknown
  misc_feature (1)..( 3003): 2750-1469P.txt file - cDNA_ID_2713856; gDNA_ID_2214638; Annot_ID_136168
aaacacatcagattttaatgcccaaatttctctcattttcttgcttcgaaaccaaatattcaaagagagcgagagagagagatagatcaagaaagaaagagtgatgcagaagcaagagttcttggaattgttcaaggccgcacaacgagcggctaagtatgcgagtgatgagaattctccagaggtctcgaggtgtatccaattcatgaagcgtttgaaagaagctcctgcatctcttgattgtgacgtggtcgttaacacaaactccattggaaacggaatccgttttctccgagatcacaaaaaccccctaattcgatctgaggcagaacttctttcagatctttggctcaagtatctttacgccaccggtagaaaacagaagtcgacagattctgtttagttaaacagattcagagaaattcagattcaggttttgaatgtaactgtattaatgtgttagagacttgggtttgaatgtatatgacattatattactgcttcttaatatggcagattttgaataaagaaaaggtttcacgagagaagattagaacactaatatgtatgacaaaagctttcttcttgattcaatgaagtcacactcatttcaaatccataaataataaagcttacttaagtactatagttggttaaactcacaataatatgacaatgttttgctactaatcacatcacttggatcagttattttttgttaaaaccttgacttggatcttacactttgatgacgctcttggaagcatcataagattcctcatttccatggtggtttgcaagttattactgttgtttaccacgcaaattttcactagctcaagacacggtaacttctccaagaaatgcttcatttgattcagctctcttgtcgttccttgatagctcaatatctccagcaccttcacttgagatgatgataggcaagaggttatgctctcgtcggtatcatagcaaacacatacatccccacatctgtttgttatgtagtgatcgagaccctgaagcataacaaagaaaaagagtaatgttaacgacctaccaatatatatatggtgtttaggatgtgtttgtgacatgagataccatgaagatgagggtttctaggtttggagagttcttgatcagaagtggcagcatttgccatcctcttgccttgtcattcccaatagatagactaacaaggctgtcgaacaatggcatttctttacatgagaaataaagcagcttcaacaaaacacaatgtgttagtctgttgtcactcaataacacaaaagttgaaataaatcatcaaaagccccaagtgaatctcattctcgataagcaaaaaaaaagaagaatgttatttataaggaaagaacaatatatagaggaggctgacctctagagtgtggctagataagtgaaggattctaacatttctgattccattgatgagatttctcatatcagcgggaatggaaccgagagatccatttcttactcccaccattcttgtttcatccatccgaagattgagtctagcttcgatgagggaatccaacttaacattaggatacttacccaaaacataaccagagtgtttgtagtagataagattaggagcatctaatgaaatactagtaaacttgcgatcaaatcggatgtgtagtctctttagagatggagaagacacggaacaagtccaatctacacatcgccgctcctcaacaaccagttcttcgagaacaggacagcgagatataagagttccaacaacattatgacctccaacaaaattaactgagtcaagacataatgtcctaagcaaaggaagagaaacatcttgagaaagcttgattgtaaaaccacgtcctactctcagcttaaccaatgtcttgctcttaaagatcattgcaggcactggtggagattttccttttaaagtaatgaacacatcaagatccataacaccatggtcaagaacgttgcaaatccaactttgaatgcgagatgaatcagtgccacctcgaacaccaacatgactctttagagtgagcttctttatagaagaaccacgttgcgtatctagcaatttgtcaacgaaagccatgtaatttctgtgaatctcaatccggttttgcttagtcttaggcacagattgacgatcatcaatatcaagattggaaaccaaaacaaacatgttcttccacctcttagagagtactgaggttgaaacagcttcttttgtggagataagagacagaatacgcccaagaacctcatctggtagacggctgattacatctttagcattcattgataccaaaaccttaaaaccacagcaattggattcagaaacagtaactagacagagttgatgagttcaaaggtctgttctttttcatacaatgcaaagtctaatacaaaagttatcatgtatctcttcaatcacattgattaccatagaaatgaaaaagacgaaacagagcagacaacataccttgctaaagtgctacttgctacagagtcgtgaaagctctccactttcaataccaatttaatcgtgagatcaaaagtgaaaacatcgaatactagggttttggaaagtttaagagaagagacgaagaaactgaaacaacttattataagcaatttcctccatttccacatgaggaaagagtaaagcagaaagactgatgaagaaaaggtaagtagtctgtttgggaaagaaagtcacgtgagagaagcgtgggcctttaagggtaaaactgtcatttaaatagtcgccgttctttacacttaggattagggcttctaacatttaaatagtcgtttcgttctccgtctctcctttcccgtcggccggtgataatttcgcaacccaaattccaaatggtaagtttcagttcttggatttgtatgattttgtaatgtgaatagggatttgaagatttacttacttttgaaattcaggcgtcggagaagaagctatcgaacccaatg

SEQ ID NO: 26454 - DNA, 3003 bp, Unknown
  misc_feature (1)..( 3003): 2750-1469P.txt file - cDNA_ID_2713874; gDNA_ID_2214639; Annot_ID_136205
actactgaacagaaaacaaatgcattttggagcttttaattggatacgtgaagcttggtcatggagcaaacgttttgaagaagttattttcagttggacgccgagaacgaacaaccaaccggctgatatgcttgcaaaatctcatctgccacaagacacttcctttatttatcattactttgtaccaaattttatcacaaacgccctacactgtaatcactattaatcatatcaattgaaagaaattgttaaaaaaaaaaaacctggggaaataaaccaaaccgaacttacggaaccgaaaccgaagaattaaaccgaatcgaaccgaaccgaaaatttgaaataaccgaatggatagtaaattctataaccgaaagaaccgaaaccgaatcggtaccaaattgaattatttcgggtaatcaaaaatatcggaaatataattatatttttaaaatattagttatttttatactaaataattaaaatacttgaaaatatatataaaataataaaaatacttaaaaataactgaaatatcgaaaaatatacaaagcaaaataatcgaatggatactaaatatttaaaccgaaagaaccggaaccgaaccaacatttcaaaataaccgaatggattaaacattagaaccaaaagaatcgataacctaatagaaaccaaaaccgaatgaataacctaacgcccataactacttatatctctctctcgtctcgccgtttttttcccaaaatcggttatttttgttttcttttatcccaaattcgaaataacggttaaccgaaataaccaatcggttcagtgcgaagaataaatctgagaatgtttggcacaaaagagaagacttttgatctgtggagattgcagtgagaataagtaatgataatggatataaaatttgattagtgtagaacttggatgagatattgtcgatcataatatttgaatatatatttttgaattcatatattgagaatacatatgccatgaaatattatatagtgaggactagaaataggagaactatcttgatgagaactagccaggaggcctagacaacaacactcaactccaccatcccaacttttcagacatttcccttcttcatatccttcatgtaagcatgttgcattgcattctggtgtgctataacatttcatctcacactgtttgattcctctgaattgccctatttgattcatatatcaacagtaaaaaaatagtcaatagaacatttaaagatttttattgcccccacataattttttttcttcttctttgcatctactatttactatttagactcaagtggatttccaccaaaaaaaagactcaagtggcaaaactatcattttcttaagataatctatgaaaaaaatgagataattacttataaacagataaattttttacctgaaatcatgggaatatagatgaaagtcaacatcatcaatgaaagtattataagagatgacatttttgtgatggccattagatgtttcttgagaatacaccaagttttttttatcggaaaatatagttagattcaaaagaaagaaaaacctagaaaaagtaatcaaaatcagtgttaagaatccgtaataagaggacatctcttgtcttctttaaaaaaaatattcaacatttttttatgaagtttaatattatatttaggatttacctttctttttggtcaaaatattgatgatttaccttttggttttataatatttctattattcattttaatggttttgactagaattgaataaattaacatcatatgaaccattcaaactcactttaatagatcttccataacatgaaagaatttatcaataatcttccatgatatatttttttaatatatcttccatattaatatattatatagtaaataatatttagcaaatattttatttaatagttttttacatgataattttagtcatatggtttcatcatctagttgcgttccccctttggtattatgtttttttttttaaagtagaattccgcaaataccgattttatgataccgctgtttttggtctatttaaaaaaaaaatacaaaataagatatcttaaaaatggtgtttgtcaaataaaacattgtttataccgcatttataaacagtcttaaaaagttttttaattaaagtgttaataaagtatcatagatttttgaacaacttttccctttataatatttttgaaatatgatatcaaaaaaatgctgtttgtcaaatataattttgttttgtttcattaagtataatcatatgtcagtttggtacaaaaccaaatcaaattggagacaaaagaccgaaacaatttcggttctaacaaaaaccagatttgaattttggtacacaaccaaatcaaatggaaacaaaatacttggtataaaaccagaattttggtttggtataaaaattggaaacaatagaccgaaacaatttcggttctaataaaaaaccagaatcgagatcactgcaaaccgaaccaatgtaatcctcttcggttccaatttttaaagtcaccgtgctttttcgtcattgtctgagaggaagaactgttccgttgacggagcttgatggcccaaccaccgaatcgtcatttctcaatagaaaaaccctttctttgtgattgcttcgttccacgaaattgtaagccaaaggaacattcatcgatccataatcaatatgcacttgcttctaacctcgttgacttcttcttcttcaacctttttgttactcgattaccaattcattgcctggaaattcttgaatcctatcaaagtcttctcctttgatttgtataataaacctaaagtgtctcacagatacgataactcagtttcctcttaaggtctttcttctctcttactaacatttacttttgggttctgttttgattgattgaagcgacatgggtttgacaaaaaactttgcttttcttgtgttttgttgtcaaagatactgtagcatg

SEQ ID NO: 26455 - DNA, 3003 bp, Unknown
  misc_feature (1)..( 3003): 2750-1469P.txt file - cDNA_ID_2713882; gDNA_ID_2214639; Annot_ID_136202
aaagagactcttgagatgcttgcttctctaggaatgtctgacactctcggcatctctgcagtcgacccacaacaagctatggcaccaatccctgctttcggcggcggcagggcacccagaagatactaagatggacgattggctctcttttttcacagttagggacaagaaagacttgtgtggttgtttattgtttcttttgattatgtcttaaactcaatgtgagactctttcgtattaatggtttttgagttatgtggaaccaaaattggagttcaaacattgatgatagtctcttatcatatatcctagtttttgcaacctgttaatccaggaggtgacggaaaacaccagaatgaaatgtgtcccaactttgatgatagtctcttatcatacatcctagtttttggcacataagattataaaacaaaatggtaagagattcttgtcgtaagcagaaaggtgggaagtagttactgaaagaaacctcaagaagtactaacctcatgatcttttcaactaaacgatcatcctgagcgatatgatgaacctttgtagagctggtaacgttgattacccaagatcctctatcaacttcacagagtaaatggtaaagtttcacccaatcaccaggtttaacccgataaaagagatgactgcttagatgaactctcaagatcgttccaacggttggaaagctgagcagtacatctcttgacagtaaagtatgaacagagagactgctaaacattgtacaccaaatagaagaagagtaagcgtaggatatggaaagcgtagagtcaagcctgaatgaatgactcagctcaaaacagataatctgaagattgaaaactcttttccttgctagttaatactcacttagccagaatagatgctgggggtgcatcagtcccgtcccaaacaaaaacagcgctcgtatcttcatcggcatggagaatctccatcacaagaaacagcagaaaacaaggtagtatcagtcaacaaaacataaaaggtatacagtttgagccaaaaaaagatttgtaagtaacaatgaagtgctttctcatgttaatagagagtatagagcatattaccctacacaccaaatcaaagcgttttcctatctacggagcaaggttttgttctgtaagatatactctgcatagctaagtaccaaaacaggaaatgaaagcttattggaactacattggtaacaaaccaaatcctcaccttcgaacaaggcaaaggaagaaacccatctactacaagcagcgtttactctttttccactatcaaaagtttgcatctacacaataaaaatccaaactttattacctcctccacaaaacacacaaggaaaatgaagactctttgtgccttaatgcgagtaaacagaatcatgtcgtcgtggttcttgatttgaggaagttgttcaagagtcctactatatacattaacagtaagtccaggacttggatacgtatcatcaattatccggagagtacaaatccaatctaagaaaaaaatccaactttcagattttgggtaaaatgttagagctttcacaaaacaaattatatgtatttgagtcaaatttagggggtttaggataagtaccattgttgcgacattgttttggttctctttgttcaaggacgataccaatgagactgacttcttggttgatgagtttaatggcgtctttgattttgatgagcttcggactgtctctcttcttcgccatctcccggctttgctacaacgttttcaagtattatcctgacgtcattagacagtgataatatggtgaaaatgaccatttgatttcgggaaacatgtcattatttttttttgtcaatatatgtcatttcataacttaactttaaagatgttttatacatcaacttaacgtatggttatttatatatatgaactaaatgttaactaatgatttgaaacatgagaatgtgcagaaaagacatatcactatctaggtataaacatttggatttatttgaattagaataattcgggttggagaattttcggattttatgattattctatttgtttttggttaggaaaggtgacgaattttgatcattttccttcggttttcaaagaaaaaaaaaacaaaaaaaaatagtcataaataaaaattagtttaaccttactaaattttgtctaaaatttgcaaaaaacaaattatatataattttaataaatataactaaatttttcttgatatcaaattatttaagatatgttatttaaaatatgttatttgttataaaattatagctaaatataactaaatgcaccgaattacatttagttattaattgttttcttagctttttcaatctcgtaaaattgttccattaatttttgtttttttcaagtttgaattaactacgtaaattaggtttggagaaagcaaaattagaatacttttgtaatcgaatgtctttgaagatttatagaacaaaagaaattgagcaaaattattacatgttccctagatgagtgtcaggaacttggtatatatggagtttagaagtaaggttaagaaaaaggttggcttcgaggaactggagtgcatttaagtggatgaaccgtgcataaggtactatacaagaagttttgaagggagaacttttgaaggaatgaactaaggaatgaacttttgaaggaatttgaactcttcctaaccaaagtatagaagacttcctaaccaaagtagtgtagtaaacgaaaaacaatcaaaatgtgacaaatcaaaggtaaagactagaccagtctctgctcaactgtatttttcaccaaccattgcaaaaaaaaatcgccgtcttactattaacccacgtgttaatcacaccaactaccaaaaatattcataatccaacttctatataaacttttgtttgaccataaattacaaaaaccatttgaattttctttcttcttcaaaagttcgaaacttttttttttccggcaatg

SEQ ID NO: 26456 - DNA, 3003 bp, Unknown
  misc_feature (1)..( 3003): 2750-1469P.txt file - cDNA_ID_2713890; gDNA_ID_2214639; Annot_ID_136196
caagcggcacacagaatccgggaacaggccatggtgactgaatgtttgggacgacaccgttaaaatgatccaatgtgtgtgagatcgattttaacatgtactcaaatgaatatctcccccatggaaatgtcttacaaaacgtaagatcacttgcagccctaacacagaaatcatcaattggactagccctttctccagtcttagtaggcacgacaatgctgcttgttagaaaatagaggaccgccatccgcaacctatcctttgatctagccggttccatctccattagcttggtttttacgtcttcacgtctaattaccccggttttgaagtacctgttggcgaagttcatattaccagcactctaataattagctggataggccttgcagttgaaaccagagatcaaagcatgctccctaataccatagcggatgggaactccattaacaacgaaccaaacctccttcttcttctcaatagatgtcgttcgaagaaaaagcatccacatcctcattaacttgtgggtatatccggaaggtaggtgatagatgtgcttgaaactcggatgctccataaaataattattttcaacattcgttagaggatgttccaagtcagcgaaggtcttcaacacctccgagatataacacctcgttgctaacttcatcttcttggtatactccgacgccgggaagtacataccaagtggctgcattgccatcgcttcctccatatcctgaaagaaacaaacattcattcatatatcactcaattgtaaatagtatgccacattattactctgtatttccaaaaagtattccccgaaattaccagtattacacaaatcgtactattcatatatcactcaattgtaaatagtactgccacattattactctgtatttccaaaaagtattccccgtaattaccagtattacacaaatcctactgttcatatttcactcaattgtaaatagtactgccacattattactctgtatttcctacaagtattccccgtaattaccagtataacacagatactcctattttactatatagtatttctcaaagttactagtactaactactgataaatcacaattgtagtattactctaaggtattacccacatccgccaatattacctaaatatcaacatagcatttcccaatgttactagtactgtccacagttcacaattgcattattacccaattagatcggtattacgaaatggaatacttaccacatttgcgatgtcctcgtctatggtcctctcctccacgggtttttccactatcacgtcctcgtctctctcgtcctcgtctccctcatcctccacggacttttccacattgacgtcctcgtcgctcgcggagctcctctcctcctcctcctcgataacggctaggccgtcatcttgtctctccgcctcttccacgggattagcacacgcgagttctttgtttgtctccgtctcctctgaatcggaatcggagcccaaggtttggctactactccctgattattcttcttcacttccttcttctttttcattttcatcttccacctcatcagtttgcatattctcttgagtttcttcagccggaatatgcttcagagcatcataaaacgtagaatcatcaagcatcgggctctccgtcgttggagccgtcgttggagccgttgtcgttagagccgctgtcgttggagccgcattggttgccatcgccgtcgcaatcgtttgtgccgtcgcagtcgtcttcgccggcgcctgaaccttcgctttcttcgccggcgcctgaaccttctctttcttcgccggcgcctgaaccttcgctttcttcgccggcaccttctccttcactttctccgccggcgccttaactttctctgtcttcgtcggcgccggcgcttctatctcctttcttttcccttgacctcctccacgcgtcttaggcggcatgactgatttcgaatcggaaatagaacggaaatactggtgaaagcaagaagaacgctcgattgaatttaaagaaatagggaatgttgtggttaatttcagcggttactaaggagaagaagtcaaaaaatcgaaaacggttgtaatgagaacaagaaacaatttcgaattggaaaatccctggaaatattaaggttttttttatttgattttcaaataaagagtaaaagtggttcgggtggtttggttcggaaacgaaccatgatttttctggtaattaataggttcggataaggatatactagtaatatccatctatttcgaattaagaaaaaataaataaattatttctgttttttacaatgattttttggcttcctctttgcaaaaaggactgccagacgatttttcgattttggaagaccgtggagatcaaaacagtctcttttgtctactcagtcccctcttgatctggtacgtttacatctgcaatctcctcatctctttaacccattttcatctcttcccttagagtttcaatcatcgaacaaaattattctgatttggtcattgatttgcttaaagaatgatctttctagttcaaagccaagttttttcagtacccatctcgatatctctttgtcccttgttgcaaaaatgtcgaatctttcatatgtctcatgttgagtaaaagctgcatacaaagtgttcgtaaaaatgccgcaacgaaagttacttgacattccagatcagattattatttttacatatagtatgcctatagaattatttcttgaaaatttgggcatgtcaataaattcttgttgcatagcgcattagcagattctaagtatagcacagtaagtaagttgcaatttggtttgcatatcgatttagttttagtatggtcagcttcttattaggattatcaaggaacttaggacttgcggtctatgtggtgaagcttctgtgatgatctctgaagtgtttttgttgaggacattatgagagagagaggtatagtctccaccatg

SEQ ID NO: 26457 - DNA, 3000 bp, Unknown; identical to SEQ ID NO: 13621
  misc_feature (1)..( 3000): 2750-1469P.txt file - cDNA_ID_2713894; gDNA_ID_2214640; Annot_ID_136226

SEQ ID NO: 26458 - DNA, 3000 bp, Unknown
  misc_feature (1)..( 3000): 2750-1469P.txt file - cDNA_ID_2713916; gDNA_ID_2214641; Annot_ID_136235
tcctgcattatacagagaagcccgagactttcgtaattatctgctaaacaatcctgttttcttaattccttcacaggctctgaaatttgtttagcttaaattatctactcaatgcaggtcagtgacttgataaactgtggtgtctatgtgtttacttcagatatcttcaatgcaattgaagaagtatatagccaaataagagacacatgtgagtattcattattggcctctctcagagacttgcaatattatcaattagagacctgcttcatcattttcatgattcttttggtcttttcataagttattcattgtataatctctttaaacttggcagctagcaactaccaatccgctacaaggtctgttcctgcagattttgtgagattagatcaagatatattgtcacctcttgctggaaagaagcaactatacacatatgagaacaaggatttctgggaacagatcaagactccggggtaagttggtggtaatcattgtttcagacgttcttggattactccttatgctaagaaattgctttaaacaggaaatctttgaaatgctcggctttatatctttcccaattccgcgaaacatcgcctcatattttagcttcaggagatggtactaataggaaaccaactataattggtgatgtttatattcacccatccgtaaaactgcatccaaccgcaaaggtgagtttatttgtttcatctcatgaattctagctaaacttctcattcagtttgcaaatgaaatgacacacttaaatttctttggaacaagatcggtccaaatgtgtcgatatcagcaaatgttcgtgttggacctggtgtaaggcttattagctgcataatcttagacgatgttgaaatcaaggtaatttggaatcagtgttttagaatgttcttcttgttatgaatccaaaagattcgttgtttaatgttctctactcttgttaaatgcaggagaatgctgttgttataaactcaattatcggatggaaatcttctataggtagatggtcaagagttcaagctagtggagattacaatgacaggcttgggattaccattcttggtaacttcattgttttctttttgttcaacaaatttttcgttatattttttctgattaatttgtttctgcaggtgaggctgtaactgtggaagatgaagtagcagtcataggaagcattgttctccagaataagactcttaatgttagtgttcaagatgatatcatcttgtgatttatcacaatgattatcgtttggattttttttctttttaattgaaacagagaaacttttacagaattgtgtattacatgaattgagttcacaggattagattttgagtaagtgaaactatggaagatttgtaaactctcactgtactttgtgtttagatactaaaaagattttagaagaaagagttttaaaagatctaagataacaaggaatcaaagaagttttgcttcttgattgtgtaatcactagtgttcaatacctccttaggctcctttcttttgtgcaaattgctcactagaaaaattgtttatcttgacttcgtttgtgggggtaggcccggacataataccggaacccgaagaaccgaactgaacttgactcgaaataaccaaacccgttctacttcggttccggctaattacttgatcgggttctgttttcaaataaccgtgggtaccggaaattacccgaactgaacccgatacccgtgggtactttttattacccgaacatatatatacatagggctgcgcatatgggtaacccgttcggattcgggtaaaacccgttcgggttcgggttaaatgggtaatggatttactacccaatagggtaaaatgaaaattttcgatttcggtctagttcgggtacattcgggttcgggtcggcttgggtaaagaatttcaggccctaagaatagccaaacaaatgaaaacgggtattttatgtgtagatagcgggtacccaacaaaaaaaaaaccttaaatattaacaaattttaataatttaattagatttagatatattatactaaattttgacaaacataacaaataatttttaaatagttgggtatttagatctaaaagtaattgatatatttagatttataattataattttagattattacattatattaagattaaatataattaatatttttgatattaaatctatgttcgggtatcctgtttgggtaacggataaaccccggaccgacctgatacccacgggtttactaaaactttacccaatgaagtaatttcttaaaaccctaacccaccccaacccgatttttcggttcgggtatcaggttcgatatcgggtcccgttttttgcccagccctatatatacatatgaggatatatatacactaataatgtgacttgtttaatgatttgagttatggaacaagcttaaaacaaggtttacttcttgttttatattattggcttaaggaaaaacttgttataatttcagatctttcgggttttatggatatttttatgtatgtttgggtatatttggacaaagtttgggtaagtagtactcaaacccgaaatagttttggttacttatggtttttttaactaatacctgaattatcggacccgaagtgaagccgaaccgaacccgacccgaaattgttgatataaccatacggatccaaaatttctaaacccaaaaattcgaacccgaaaaatccgacccgaccctgacccgaataccacatgcccagggctatgttaggggaaaaaaaaaaaatacatgtgggcttaaatggggtttgaaattaaaaccggtctgaatagacggttcattaagaaaaccggcaattaaaaaccgaacttcatagagagtcttctttacgcattctccgtcattcggttaagttgcatcgatcgttagggttttatcgagagagcaaggagagcgatttctcaaatcgactttaatg

SEQ ID NO: 26459 - DNA, 714 bp, Unknown; identical to SEQ ID NO: 13658
  misc_feature (1)..( 714): 2750-1469P.txt file - cDNA_ID_2713919; gDNA_ID_2214642; Annot_ID_188377

SEQ ID NO: 26460 - DNA, 714 bp, Unknown; identical to SEQ ID NO: 13658
  misc_feature (1)..( 714): 2750-1469P.txt file - cDNA_ID_2713919; gDNA_ID_2214642; Annot_ID_136289

SEQ ID NO: 26461 - DNA, 3000 bp, Unknown; identical to SEQ ID NO: 13664
  misc_feature (1)..( 3000): 2750-1469P.txt file - cDNA_ID_2713923; gDNA_ID_2214642; Annot_ID_136285

SEQ ID NO: 26462 - DNA, 3003 bp, Unknown
  misc_feature (1)..( 3003): 2750-1469P.txt file - cDNA_ID_2713938; gDNA_ID_2214642; Annot_ID_136267
gtgttgatcagttcctaataacaaaagacttatagattttgtaggaacgtacttatttactacaaaattcaacaaaacgaaagaccaattcaaactagactcttcttactacttcaagtaattaactgacttcatttacaagtcctagcattaggtttcagatttgtttgttcttttttttttttacaattagctaatcatcatattctcattatgtttaatacttgggacaggttctatataatgcggatcagagatacaccctttgacttttccgtactcactcaccacgcgagcgtgacacagtgtctaggatcaataggaggtcatgtttggtaccttggagtggctaaaccgacacttattgaagatggtgatgatggaaagatggtagataaattgaaatcaaggtctggtcacttgtacgctcctcctgcggttgaagagattcgcgtcttcagggtctcgggaccaaagtttattaaactgaaccacggtacgtggcatgttggaccactcttcagtgacagctacatggacttctacaaccttgagctcagcaacacaaatgtgagtgagaatggttttattgttaataatgtatggaatggtgatgaatgacttgtttttattgacgacattgttgttgttgatgatgatgttcaggcggtggatcgcacgacatatgatttcatcaaaaataaaggagtcaccatccgagttgaccccaacgatgttgacacatcgtcctcctaactcaatcttatcatcagtgtgtgcttctgttttcatgaataaattgagcaatcgtgaataaaatttgtatgcaactgtgtacaaattgttttttttttttttttttttttttcaataaatatcgaaaatacttgttttctcatattttcatgttaatcccatacttttaaaattgacaagaaaacctaaatatactttggtgtcttctgattgattttaaaaacattttgagtggatacaaaaagagctcaagatacaatcctctttatttttattttcttgtggtgcgtttcaacgatggcgaaatctccggtggaagtgaatttgattcctatcgaagctactccggagaacttcgcagagtatggtcaagtcattgaagcctctcgtgatggtgctggtttcggtccccacgacgctcaactagatctctctagaggaaccccacggtactcttttccccgattctcttaaatttcgttaatccttaagattatttgttaatcttcgtttaaattcctcatttttgatgctaatttatcaagctatgtgatttgtgttggttcctaaatactagtgttgtacaaggtatttataacaaagtcctagcttttaggtttcagattggtttgttctcaatgtgtaatataatttgacggcaggctctatatacttaggctgaaagaaacacccttagggtttttcaagatcacacatcacgcaaaggtgacacagtgtctaggatcaataggaggtgatgtttggtatatgggagtggctaagccgtctcttattgaagatgatgacgatgatggaaggagcgtagatacagtaaaatcaaagtctggtcacttatacattccacctgaggtggaagagattcgcgtcttcaggttctcgggaccaaagtttgtgaaactgcaccgtggtacatggcatgctggacccttgtttagtggcagctccttcatggatttctacaacttagagctcagcaacacaaatgtgagtgaagaatggttttaaattgttaatacacagtagtgtgatgaatgacattgacggtgatgttgatgctcaggtggtggatcacacgtcacatgatttcaccaagaataatggagtcagcttcggatttgacacattgtcttcctagctcaatcgtatcattggtgtgcttctgtttttccttgtggatctatatatgtaagcctgtgtagtgtgtacactctacacaaattggttatgtgcaataaaataccggtttaagttaaccaactttgtttccagtactccttaatctcctccatctggttttttaatcattcttcaatttgtggttttgtgttaaaaaaaaaaaggaaagcaaacctttgaatatattaaagaaaattggtgacatcattcggcgtttctagtaatctgctctgttgccagttacagtatatacttaattcattagtaaagtatatatatttaattttattaataaaaacgattagtaacgtgtaaccgtagccgttggatatatattacacctacacgtgcaatgcaaccatctttcgatcgcacaaaaagcaaacgaaaggccaagagaagagctcgagatcgatccgaatttgtggcaaaatcagattctctgggtacacaaagttttctcttcactttcatctttttcttcatatattattatattcgattttgcatcctgctctgtgagtgttcttctaattccaatcactatctctgactgattcatgttttcagtctcatgtgtttcattatacttttgttgaattcaattacaggttttgatactccatagatagagtgtgtacaatctgtacttatttagtgatgatccactttttgtattctttaattgaatttgagaaatcatattgaattaacgaatatgctaacttcaggaagacgatattagcaatcatggagcgtctaacatctcctcctcgtttgatgattgtctctgatcttgatcatactatggtataaagctgccatttttacgtctttttaaaagtttgtttgattgaatgattgatgtgattgtttgtgtaggttgatcatcatgatcctgagaatctatctctgctgagattcaattcgttgtgggaacacgcttatcgccatgactctcttcttgtgttttctacgggaagatcaccgacattgtataaagaactcagaaaggagaaacctttgttgacccctgatattaccattatg

SEQ ID NO: 26463 - DNA, 3003 bp, Unknown
  misc_feature (1)..( 3003): 2750-1469P.txt file - cDNA_ID_2713942; gDNA_ID_2214642; Annot_ID_136264
ctggtactcttaagaaaagtgagatattggcatcactaaataacgcaggacttcctgctaatgaagaaaatgctatagccatgatgagatttttgaaggctgataccgaggagtctatctcatacggacatttccgtaatttcatggttttgctgccatatgagcgcttacaagatgatcctcggtaagtatagtactttgttttgaaataaaattgatgttttattttgtagcggcttgtctttgcactaatgagtaaaatgccaatttgaccactagaactgtttggattgaaccggaccagtttccccttagtttctcccattcatgttgatttcctcaaacacttcaaacttataatttttgttgtcataccaatggtgattgatgctatttttacttgtatagtaacatctggtttgaagctgcgactgttgttgctgttgcaccccctgtggccttacctgctggagatgttctaaaatctgcattagcgggagggcttgcctctgctctctccacttccttaatgcatccgattgacacaatcaaggtgagtcctcttggtgcttttgcaagctgaatataagtaaatgctctgtttagacaagtttaggtgagaacttggctactacaaaagtctgcgtaattgacatctgcttctacaatatttgaatatttaaatagatgagtatgccaattattcctcctggcttcttgtggcatactgttgacggattcgttatcactttcatgccagacacgtgtgcaagcatcaaccttgtcatttcctgaagtaatagccaagcttccagagattggtgtccggggagtgtataggggttctattccagcaattcttggacaattttcaaggtcttttcagttgtttcaaatcaaagatattttcacttctacctattaaatttgatttccatgtggcttaatctctttcatcattgtagccatggcctgcggacaggaatattcgaagcaagcaaacttgtgttgatcaattttgctcccaatctcccagaaattcaggtgattatcactctctactcactgtttggctggtttcgtcaagattctaattttgtgcttcaagtatatgtattattatgtgttcttatagttcatggcatctagtaagtaaaccatatgttagaggaaaaatccaatatcaaggctatttcattgcagtacttagcttccttgatgcaatggttgacatggtagttggtagatcattgtatactactatttgttgcatctccttggttctaaagttctagtagttatgtaaagtttatggctagaataatatacacttgatgctgctggggctaaatggtctcttaattgcttggtttgataaagttgtgtatggtttctgaagtagaacccatccgcttttggttaacagttacatcgtttgcatttgtgctttctgatctgtgttttgtactcggtaaccaatgtgatcatttaatgcaggttcaatcgattgcatcattctgcagcacactattaggcacagctgtgcggattccatgtgaggtgctgaagcaacggttgcaggctggcatgtttaacaatgtaggggaagccattgtcgggacgtggaagcaagatggtccaagtggctttttccgtgggacaggcgcaactctttgccgcgaagttccactatacgttgttggcatgggactgtatgcagagtccaaaaaggtaagaaaaccgaaatgattggattatcataagggtcactactgtaattgttatattgattggggtttatgtgtgtattgtagatggtggcgcaagctctgggaagagaactggaggcatgggagacaatagcggttggggcggtgtcaggaggtattgcagcagttgtaacaaccccatttgatgtgatgaagacgagaatgatgactgcaacgccagggagaccgatctcaatgtctatggttgttgtatcgattctgcgtaatgagggaccgctaggtttgttcaaaggagcagtcccgaggttcttctgggtggctcctctaggtgctatgaactttgctgggtacgaactagccaagaaagctatgcagaagaacgaagatgcagtgctagcggatcagcttggtcagaagaagctttgctaatgggattttactttgctttgctgctacgaagttttttgggggcagcttaagccggagactcacctcttttgttaaaagctactttgcaaaattttgacaaaaaaaaaagggttcattgttttgttgtgcattgaggacagtttcatttactctttataaaaactctgcttcaaaaatgtgattttttgccctctctacaattggttgttgctttgacagttgcaattacttcaatggtatacagtagccttaaatcgccatattacgaatcttaaggtaaattcgttgcttctttttgtcaccaaacataagagacattggcaaatgttggtaaaaagaaataacgttgtgaatgtaatacactcaaaccaaatgattctgtcaatacaaaagcaactctgtaaacgtaacatgagaaactcaacaattcacatatgttttacaaaatctactttctgtggtattcctgaccaaagcatcaaacttgggctcgtattcaggagttattttgtccacgtacttggggatctaaatgcctgcagtaataagagattccaactttggtacttcaacacgtttcttctctcaatcctcctcacaacttcagtagtaaaaaagacaatcactttgaagggaaacacaaatgaaatgactgtcgaattcagtcaccggtaaacacccttatatgttctgttattttctttttagtcccatactttttttaaattcacaacaaaacccattattggagttttctgattatttttaaaaacagtttcgagtgaataaaaaagctcagatgcaatcatcactttcattttcttgtggtgtcaagtcaacgatg

SEQ ID NO: 26464 - DNA, 3003 bp, Unknown
  misc_feature (1)..( 3003): 2750-1469P.txt file - cDNA_ID_2713944; gDNA_ID_2214642; Annot_ID_136262
acattggcaatggcttgttgtcgagaaacgactgaaaaagaagaaaagctcgacgagggcggaaaagaggtacctcatgtcctgctccatgtattgtcaccagagtcagccctttgtaaacttggctccatccaccaacctgttctttcagtactcatgcattagtttccacagaagaaagaaatgagactgaggaaactgagtattgagttgtttttttctacctgtccatcatcgttccaagggtaccatttggagagtggttgtaacttgagggctctaatggagtatcgtgttccagtaatgggaaccactgaatcagtgtctccgctgcatccaaatttacagaacaagatatcaatcatgataccaaaccgggatgtacaagatgatgatcaaaaggagaagtagatatacctgaaaacccatatcctgagacctgcggcgatgagttctttgtagattggaagcatagacagaggagaatctgcccatttctctccaacgatgtcactaaacaagaaaactatgtcactgaaaatgaaccacaagagaacattttcttaaatttgttgacccactataatgtgttttttacctgcaccctttccatggataagctagtcctgttatattagcatgcatagccttttgaacctccggagaattgaaatacatgccggagtatttctctgtgcaagggtcataggctctccacatccatggcttagataaacaaaaaacgtagcaagtttagagatttgtcaaatcttgttacctatggactatgtcttggtagaataacttgaatctatagaagcagccataaagcaaatcaagtaatcaactcagacaatgaattggaatcaagtagcagagagaatccgaaagatttttttgcagtccagaatccagatatcatgtaatccccactctactttcttggactaaccaaagtacatctacttgttgaaataggctcatatattggtcattttgaatctggtagcacaaagagagggtctaatacactagatacgtagccaattctgcatataaaggtttgactttcatgttctgtctctagtaaagttggaacctcctaatgaccaaaactaccttactcgagctggtaatagtagttaaaggaatatgatgggcagtgatggaaaactcacatgacgaactctcgagaagcgagacctaagagctgcagcctcctttttacaagtgacagtgtaaatgctataaggatcaatattgccttgctccaagtctgcagcttccatggccttggtgcatttagaggacgggtgctcggatgatccaaattcacacgtgatccgtaagttgtggtaagtgagatcagatatcaacccatgagcccaccaatattcaaataaacccacgtaatcatggtagtcatcaatcacagcattcccaacctagaaacaaactcacgtttataccaacacaaaaagaacatgttaatagatttgtgcttctttttttcttgcttacaatgaagcctttaaagttgatagctggattgcgtttctcataaacaatctgtgacaactgaggaacataatgacctaaagaagaaaagtgaaaatgcttagctaagacaaagtttccaattgaatagaatcagtaataacaataacctgcatagctttctccagcaatgtagaactctctgtgtttgtattgaggaaacctctcaaaccatttcacaagaaacacataagcatcttccgctagaaaaaatcaaaccaaaatcatcaaatgattgataaatctagagaaagagaagtcaaaggtcaagactttaccagttctctgatctccggcagtatacaaatcggaggtagtattcgaatacgagaaaccaacaccagcaggagattcaaggaagagcaaattcgccactgacccaatataaagagtgttaatttaaggattgtgaaatcaaaatttggagagaaatggagaaacagagagagatgtacatttgttccaagagtaaggattgtggtaaagagttttgccatcaggattgattctaaaaggtccgatttcttcagcggcaccgtaagctacggaggaacaaccaggtccaccgttgagccagaggacaagaggcttagactcagggttttcactcggtggtgactcagtgagccagtagaatagtgctcttcctgctgactcgttgacggtaatgtaaccagagaagtgagagaaggagacatcgtttggttcaccgggaaggtgaaagattcggtctttttcttgttcgtgtctggaacaagaagcgtaatggagtagaataaggaagaagaagaagaggagaaggagtcgagccatggttggatcaaatgataagggtgaagatctcaatgtttttgatgataataaaatcagtgagtgatggtggggacagagtaagtgagattaataaatggcggttatatttgtatttcttacatcattgactttatttacaacgatgactttgtccttgcctatgttacattgtatcatcatctatttttgattcgaagagccaataagaaaccgaaaaacgtacacggactcttacttagctaaacaactcgagtaactaatggttatcccttaatacatgtcatatctagactctagtcatcgtttcggatccaaattcctcaatcagtcatgtgattttgtagagagacataaaacaatacacaaaaataaaattttgtccattaggtgttgaagataaaaaaaaaaaaaaaaaaaaaggtgtgcaagtgttatcaaggtcaaagaaaaaaagttcgaacacgagacttcatgcttgaagagagaaacagtaaccactagaccactaaaagaaatttataaagctacaagttttattaatatataaaggaaaataaaatctctaaaaccctacaacattcatttggaggaggagacctgaatctttgcaatctcgcaacagaaacggcgatg

SEQ ID NO: 26465 - DNA, 3003 bp, Unknown
  misc_feature (1)..( 3003): 2750-1469P.txt file - cDNA_ID_2713947; gDNA_ID_2214643; Annot_ID_136293
tgtggaattgtcagttaatgttttcatatacataatcaatagcctagttaaaatattatcaaacaataagagaagttaatggatggctactcactaatttaggtaactcaattaaaatgactgccaaaaaaataattctacaacagttttacaaaatctaaatttataacaacagatatctaaactaacattaatcaacgtctcagagtagttttcatttcactaacctttaacattatataaggatgtgttaagttctcctaagacgaaatcaatagaagcctcctccatgggaatgttacgctgagattatgcttggcttgtatacattttacatttccaaactcaaattttgtaaaatcagttaatatacaataaaagacgtcaagcctatacctttctctcaaaataaaatgggtaaacagtagctaacatgttcttatcaaataaacaaagtgttattattaacatatcaataactattagaattgccctaggattctaaatagcttagaagatgacactgaaatcccattctttaaaagaatttaactcttaaatgaagcactactgtaaagataatctgctcattaacctgtgacatttatatttctggatagctctattgataagatttctcttccctcttcatagtatagatgttatttgcaaaggttcatcaccttaaacagagacttactactttgcttttaacatactagggcacaactatatggtacattacatatgatatgccttaacttaaacttcctaccagtaagtaaatctgatacacaatagtgttgttttctataaattgatgtctcactaatctgttaaatcgagatttcagaatagctatgatgacgaaatctcagcagctcttccaaagtctcatgttacttccaaacctcattcatctgaataaatatacattgattttcactataacataaaaggacaaatcaatgtgccatatatatgaaacaacttttttgttatatatatatatataaatatgtatatatgaagtatcttaactttaactcaataacaatatcaaaatctacaaatctataaaactaaaattcaaaaatagagataaaaaaaactaaccttaacatatatatttcggaatacctacaatgacaaaaactataaaagaataaatatgattcagtatgaagcttacctcttcatacggttcacgaattataaaaatagaagtataaagcgagttgcagtaacaatttttctatgataatcgcgcaagtgattttttcttcttctagagatattcttcattttgttcggtgaattttttctcttttttgctaataagacaacaaatttctacagatggattatggattgattctaatagcaaggcgggaatcagatggggactttttaacgctcaaggtcgttgccttctcaaaggctccacgtcaatagagccaacaaactcagctttggatatggaggccattgcactacgggaagctctactgcagatgagacgggtcagctatcagaaagtcatattttgagggaactcgcgcatgctatatggtcatttagagtaggtaattcaataacgtcaacctattggggacccttagaaaatccaagaatacattaaggatatagtcgttatgtccaaaaactcttatgcctttctacatgtaaatcgacaagagaaaacagtaacggacacactagctaaaacagttagacatcagaacttggtttgtgttgtctcttggattttttaaatgtatgtcaatgttatatctagtgaacacttcttatactgtgtttccttgattaatggaatatttggccgacaaaaaaacgaaaaacacaaacgaatttcaagacaacatatatttgtccacaaataaacactaacatcaaatggcatatgactaaatggcttcaaaatctgttactattggatctattaaaatatggaacaattcttgggttcaccctttagggggtgaatccattcattcaccgccttttagttgactaatgagaatttgacatgtcatctatttaaaaaataaataatttaatcacaaaatttaaatcttaatcactattttatcaacccaaaccaaaatataatttcgtttaatcacaaaatctaaaccctaacagctattttatcaacccaaaccgaaatataattttgttttaatcacaaaatctaaaccctaaccactattttaacaacccaaaccaaaatataatttcgttttaatcacaaaatataaactgctggaatctgtaagtttaatcacaaatataatgtgaatttaacaagatgttagtttacaattattaaattgtttagttccgtaaaaaattgaacttttaaattttcacatctacacatttaatttctgaaaattttaaaattctcttttgttaactaaataattttttatttggtatataaaaaattataacgttttaaataaaactataaatatttgtattatattacattctattctaaatactattctaaatacatgtctatattgctactataatataaatatactattataatttcataaaacagaaataaatacataatatttttcataaaacaatatataaaaatactattgtattttcactaaataagtgcggattaggatctaatatgcaataaaacctaatttttcctttatacgattaactttataaaatctcagtttataagttaaattaaattttgtaaatttaaaaattgtttataaattcctatgaattgccaaattttattttaaactaaaatttcacatgttaatatagaaaaaaacattaatttttgtatttgttttcatcaaatgcaaatacaagatttctccattgagaccttttcgaccgtaaaccgattgcgatcaaattagctgatctgatcggaaaatcacaagaaaaccctagaaaactcctccggattcgaattctcgactcgattcaatg

SEQ ID NO: 26466 - DNA, 2584 bp, Unknown; identical to SEQ ID NO: 13693
  misc_feature (1)..( 2584): 2750-1469P.txt file - cDNA_ID_2713951; gDNA_ID_2214644; Annot_ID_136338

SEQ ID NO: 26467 - DNA, 3000 bp, Unknown
  misc_feature (1)..( 3000): 2750-1469P.txt file - cDNA_ID_2713955; gDNA_ID_2214644; Annot_ID_136337
agtcgctttagagacctcgggaattcaacaacttggatgggcaacacttgcttgccctttcactgaccagaaaggtgtgggtgatgctgatgattcatatgcttttgatggtcgaagggtaagcaaatggaacaaggaagctgaaccttatggtcaatcatgggttgctggggatgtcatcggttgctgcatagatttgaactgtgatgagatttacttctacaggaatggtgtctccctcggggctgcatttactggtattagaaaacttggacctggatttgggtattaccctgctatatctctctcccaaggtgagagatgcgagttaaatttcggcgcttacccgtttaagtaccctgttgacggtttccaacctcttcaagaagctccaactcgattttcatttgcaacagagctactacgatgcttctcaagactgctggataggccagaccgctcattggctgatacattaagtcgactgaggagatttgcctcagtcgaagaactcttttgccctgtttcgtctgccatatgtgatgagttcttttatatacttgagcaagaccctttgttggcggagtacttaggacggggtgcatttctgtcattcctcttggagactttcagaactcaagcaccgcatgattcgtcaagtttagacaaagttcttgatgtgtttcttgagttcccacaatctcatttgatctttgagcatgtagtaaacgctctggcttgtggctgcaaaacagcgacactgattttaaccgagtgtccatactccggaccttatccctatctggcgctggcttgtcatttgtttaaacgggaagaattgatggtacaatggtggagatctttgcatttcgagtttttgtttgaaggtttcttgtcatgcaggagttccaacaagcatgacttacagcacttaatgcctgttgtttggtggcctggatcctctgaagatatatcctacgagagtagcatgggatttacgatctccgctctctctgaagccattaacaaggtatgataggttatttctgacttattttatttttctataaataaccgctggcataagtctcctctggaatctgaggaacataattaagtaattctttctcttggaattcagattgaggagaagcagaggaacctctgtctcttggtcatacaattcataccacctgtatcacctccccagcttcctggttcagctttcaggggattcctacagaaccttttattgaagaacagaggcgcagataggactctggccccttctggagttacacgcaattcggttcttgtctctttgttctcagttatactccacttcttgtcagaaggttttgcaatgctgaagagtagtgaagccgtccatcacaatgttggttttcttcacagaggtggtcagcagaagtttccattgagtttgtttcttaaaaatgatccacatcgcgctgatattactaggcttggcgggctatttagtcatatatcgaagtcctaccccacagatgatcaagaagaagaaataatgcggtgggaagaaggttgtatggatgatgaacagaatagagtaactcacgcgactgagcaaaagccatgctgttgcttagcttatgataccgatcttactaaatccttgaaggatcgaggaaaaaatactgctcaaagttctcgtggtcgatgcagttccattcctgagagatcctctcatgttgctgcagaatgtagtgctggaagtttcagtgaagaaatagacgacaaacctagcacaagtaatcagtctgaccctgactttggttatcgtccagtaagatttatgcggactgcacttcaagagagtagaatctcatctgctatactaagcgaagaagaactattggatgctctattgctattataccatattgctgttgctccaaattttaagcaggtaattttaattattcccgtcttaattagattttgttgtattttttgtacgatacataccacaacctgaataagcttgagaggctgataggttctctttctgcttttcttaggcatcatattacatgtctcaccaatcgcaatcaatatcacttcttgaagaaactgataaacagataagagaacgggcttcttgtgaccaaataaagcgcttgaaggaagctcgcaacaactacaaagaagacgtgatggactgtgttagacattccgcatggtaagtttcacttaactcatggattgcgttaactccagaaggagggtgtagtgaagaggtttcagttatgattcatgtgaggcaacattacaatctatatttttgccctcattctgaatcattttgtcaggttccgcatctcattgttctctcgatggaagcaaaggggaatgtatgcattgtgcatgtgggttgtacagctacttctggttctcagcaaaatggattctgtgtttgtttatattccagagttctaccttgaatctttggtaaacagcttttgcacatttctggtacttcttgatataaatgtcaaatgaacatgtttcagtttctctttgatcaaagttagtagatcttccaacaacttattctgttgcgttttctctgtttctcaatgaaatccctaagtttacaatctctttgattatttcctcaggtagactgtttccatgtgcttcgcaagagcgatcctccgtttgtcccatcaacaacattcatcaaacaaggactttcatcatttgtatgcctaaactcttatcacacaatcttttttgtctgttatttttcctcatggctgactgttagttgattagctctaacatggtcattgcaaattcttgggtttccagatcactttcgtagttacacacttcaacgattcaaggatatcgaatacagatcttaaagatctacttctccagtcaatatccgtcctggtacagtacaaagagtacttggaagctttcgagaacaatgaggcagctactcgacacatg

SEQ ID NO: 26468 - DNA, 3003 bp, Unknown
  misc_feature (1)..( 3003): 2750-1469P.txt file - cDNA_ID_2713962; gDNA_ID_2214644; Annot_ID_136330
ttttgtacgcacaaagtcgggtgccaaaacaatctcccctgcatcattagtacaaaagacacaatgatgaaagtaaggattgcgaattagtgaagtagacgaaacatcataagacatcttggaccattcgtgttttgcagcatcctctataacccacaagttaattctataatcagatccaggaaacaggagtgcaggctttccctcgtagcgtgtcagctttggattcaagtccccgtctggtcctcctttaataagatcaaacttttcagatctaacatcaaagctcatgactgcatgattcgaagctgtgtcgagcatagctacataatacaaaacaccattgatacacaaatcaggagtatcttcatgacagagacagtgaggaggaaaatcttcaaccatcctccaagaattcccttttctcaaagtgaaaacctgaagctccttagctaaataccgtctctgataaacatgcatgcctttcatcatacacaacactttgtaatcaccatcaataggatcataacccatatggtggtatatacattcatgattagcatcaatcttgggcaggataatggatcgtctagtgctagggttagatactattagtctagggctagacactattagtgtagaaggaggtccatggcaaatcaaaccgtgaacagaaggagcaaaggttttaagctgtagatgagggcaattcataaggtaagttggtttagaagacgaagttgattcaccttgatcaatcaaggagaagaagcaatggattccgccgcctgcgattgtaaagatgagactttgtgggcgagtcgaagaattaatcaagtacgatttcatgaagtctctgttgcgaatgatggaagtatattcttttgatacggagaggaacctagctagggttttgacaggtaaccttttgagtatctccgggatgagatcaaacggaatctgaaccgagtttccactgcatgtaattagatcatcggatatcttcgtcttcttcgatctctgtttctccatggcggtgataagaacgaaaggcatcgatttgacttcacagtgagaaaaacttaaggaataagagaagaaatatgaaaggacggtgaaaaaacgtggtgccgttttaaacgggttggaatatgactaaacgtcgtgccgtcttattaataaggaagaaacttttgacgcatgtcacggatttaaacactacacgtttccactaatgaccattattaatccattatacacactaaattcggaatttagatgggccttgtaaaattgtttcgtaaccgaaataaatggaagattttaaatatgaccaaatgtaaggagactgtattgaaagacaaaatattaaaagttatttgagttttaataagttttggtatgattctggtcaacttggttgaattaggaaatttgttattcaaattttttcaaaattcagctaaaattatgagatttgaatttgtttttaacctaaaatttttcttgaattgtcatataaaattatttaaatcacttcaaatccactacttcatttttttacgatttgattgtatattttctaattactaatccaataatatatttagcaaaacttcttaattttgaataaactaaccaaatttggatatgtagcaaagtttgataatatcttctaaattctgttttttgacgattagattataaaagtttttggcaattttagtttttttcaagcaccaatgaggggaagttgttaggaatttgaaaatttcatattcataacatatatttcttttggttcttattaattgattttttagaaaaaaaattgttttaaaaaaattgatttttaggaaatgtaaatcataaaaactaatatatttataattagttttaatatattattttaatctatatgttttttctaaaaaatcaattaaaaaatcagagaaagtagttttttgccaaaaaaattctgatgccgaatttgagctttgtatcctcagttttcttaggtgttagtaagatattttgcttttaataaagaagataattttgtgaagaaaaaaaaagttttgaggagaaaaatagaggataattaagaaatgtttataaaatggtcaaaacaactaatgacatatttaaagggggaaaaatgtcatttaatccctcaactttcaaaaaatgatcattttatataccattttatatatgcgactgtttaatatatgaactaaacgttgactaatttttaaaacattaaattaatcaacgtttagtttatgtattaaacggccgcatatcaaattaatgtataaaatgacaattgaaagttgagagattaaacgacatttttccccgcatcactgtttcagcttcaccaaccccattattctctctattaattatcaaatgaattagttattagtcccttaattattcaaaaaaaaaaaaaaaaaaagtcgactcatcctccggcgggagtagaaaattcttcttggttctgcaggtggtaatcttgttttccttaatgaagtttcttagcgctaattttttatatgttttctcgtttaaaaagtgtcaatttttaaaaatcctttcccttttacggttcaatttgatttggataataattctctttttctctggaaagttcgaatttttttttgtttggaagcttggagaaaatattatactcttctcattgaatgatcaatttacaaatcctcatttgatcgatcttgtcaatttttgaaaaaaaaaatctgaactttgagaaaagttattgagtttcgatatctgtcggtcatggtttgattgtggctgttgggtaagacaacaaattaggtagggttttgtgatattgatgtccgtagtccttaattatggccaaattgttgtcttttaggttttgacagtagcaaagaaaagctgaatctagttagaaattgcttttgcagggtttttgaatagtttgtgtattgaagattgtctgaaatg

SEQ ID NO: 26469 - DNA, 3000 bp, Unknown; identical to SEQ ID NO: 13688
  misc_feature (1)..( 3000): 2750-1469P.txt file - cDNA_ID_2713978; gDNA_ID_2214644; Annot_ID_136320

SEQ ID NO: 26470 - DNA, 3003 bp, Unknown
  misc_feature (1)..( 3003): 2750-1469P.txt file - cDNA_ID_2713990; gDNA_ID_2214644; Annot_ID_136316
gagggtccagaataatgggcagtggtcactgttttgtcctaacgaagctccaggtttggcagattgctggggagctgaatttgagacactgtacactaagtatgaaagagaggtgagtccctatttcatccatgtatatgctgcttctttagtaactcaaattcctgttatctcaatacagttatgtttgttcatatcttcagggaaaggccaaaaaggttgttcaggcgcagcagctttggtacgaaatattgacatcccaggtagaaacaggaacaccatacatgcttttcaaggtaagtaacagtcatcattctgtagctacacgttatggccttataatcattggttcttactccaaatttgaatgctcttaaactataggattcatgcaaccgaaaaagtaatcagcaaaatctgggtaccataaagtcgtccaacttatgcactgaaatcattgagtacactagtccaacagaaactgctgtgtgcaatcttgcatctattgctttacccagatttgtaagggagaaggtgagagggagactggttttttaaaatttgctttctctttattactcaatgtatagctctaacattcttcatctcacaacagggtgtcccattagactctcatccacctaagctcgctggcagtctggactcaaagaatcgttactttgattttgaaaaattagcagaggtcagatacaagcactcgccttgcttgacctgaaatctgattcttaaggaattatctgtggagatatttccgtgtctgtgatgtgatgtttgactttttaatttttctgtgtggccaggtgactgctactgttactgttaatctcaataagataatagatgtgaattactatcctgtggagactgcaaaaacttcaaacatgcgtcatagacctattggtattggtgtacaaggccttgcagatgcatttatcctccttggaatgccatttgattctccagaggtagacttgttttgaattatgatcaatcttggaaaatataattttgttatctgttcttaagcagtttaatttgttactcaggcccaacaactgaataaggatatattcgaaaccatatactaccatgcactcaaagcatctacagagcttgctgcaagacttggcccctatgaaacctatgctggaagtcccgtgagtaaggtatgcatctcagccatcaattatatcaatttggttttcccaaacttcataagctaccattgtggattgttatgctgactttatcccatgcttctctagggaatccttcaacctgacatgtggaatgtaattccatcagaccgctgggactgggctgttcttagagatatgatatcaaagaatggagtgaggaactctcttttagtagcaccaatgccaactgcttcaaccagtcaaatccttgggaacaatgaatgttttgagccctacacatcaaacatctacagccgcagagtcttgaggtatgtgaatattaaatcatttgacaagtatgtttctggttttccccatttgatgcttactcacttggttgtcttggtttgtacagtggtgaattcgtagtggttaataagcatcttctccatgacctaactgatatgggactttggactccaacgctgaaaaacaaattaattaatgagaatggttctatagttaatgttgctgagatacctgatgacttgaaggcgatttacaggtatagcttccacttattttgtgttttcactctctactgtctagataaagaaatttgacttgtttcttctgtaaaacaacacagaactgtctgggaaatcaaacagagaacagtggtggacatggctgctgatcgtggatgctacatagatcaaagccaaagcttaaacatacacatggacaaacccaacttcgcaaaactcacttcgctacacttctatacttggaaaaaggtacaaaccttaatcatctaaactcttcatatgataattgtgaaataggttagagattctatagagtatctgatccttcactcatctgacaattactcttaatctcacttatgttgttgtgaatctaccttaagggtctgaaaaccgggatgtactacctgcgatcccgtgctgcagctgatgcgataaagttcaccgttgacacagccatgctcaaggtagaaaaaacaatgcaaactctttacgctgattcttcttgtgaactcagacattttacctatgagttgttttcgttggggtgaatgtaggagaagccgagtgtagcagaaggagacaaagaagtagaagaagaggataatgaaactaagttggcgcagatggtatgttccttgacaaaccctgaagagtgtttggcctgcggaagttgaagctctaagttatagtttgggtcttaaaaagttagaaagtaaaagcatgtctcttggacggtcttttttatttacttgcttatctgggtgtattttgttaatagtttcctaatgcttaatgttgcttgagtttttgtgtaatccaatttcgtttttaccttttctcttgaaacaataaggatttgtaacgagaattatgtataaccaccaccaccttacggtagattttactatccatatataaatattttaccatccatttataaatatttgtagtttggtactactaccaatggttgtaagtaatctgtaagaatatattctgatcattgtagattagaaaatgtgttactacaggtttcactagcttatcctagaactagaaacatgaaaattatgtatcgaatggtgaaaatattaatacaaacatatttacgtttaaatgcatgtgtacacaacaaagtttctaaagcaagctctatcatatagagaataaagtaaagcatgtagccaaacactctgaaactctgacgaatcgtttatcactgatttctctatcgatagtcccgccttcattgccaaatttaaactcgaaatctctctctcactcactcaatg

SEQ ID NO: 26471 - DNA, 3000 bp, Unknown; identical to SEQ ID NO: 13711
  misc_feature (1)..( 3000): 2750-1469P.txt file - cDNA_ID_2713996; gDNA_ID_2214645; Annot_ID_188488

SEQ ID NO: 26472 - DNA, 3000 bp, Unknown; identical to SEQ ID NO: 13711
  misc_feature (1)..( 3000): 2750-1469P.txt file - cDNA_ID_2713996; gDNA_ID_2214645; Annot_ID_136352

SEQ ID NO: 26473 - DNA, 3000 bp, Unknown; identical to SEQ ID NO: 13739
  misc_feature (1)..( 3000): 2750-1469P.txt file - cDNA_ID_2714000; gDNA_ID_2214647; Annot_ID_136386

SEQ ID NO: 26474 - DNA, 3000 bp, Unknown; identical to SEQ ID NO: 13738
  misc_feature (1)..( 3000): 2750-1469P.txt file - cDNA_ID_2714004; gDNA_ID_2214647; Annot_ID_136385

SEQ ID NO: 26475 - DNA, 3000 bp, Unknown; identical to SEQ ID NO: 13737
  misc_feature (1)..( 3000): 2750-1469P.txt file - cDNA_ID_2714010; gDNA_ID_2214647; Annot_ID_136382

SEQ ID NO: 26476 - DNA, 3000 bp, Unknown
  misc_feature (1)..( 3000): 2750-1469P.txt file - cDNA_ID_2714018; gDNA_ID_2214647; Annot_ID_136379
agactcgaatgtctacttctatgatctaaccaaaccgaagcacacatgtgtaaacaagctacaggttagacaataacttcttttctttttttttatctgaaacttttgtgtatggattttgaattataggaaacaggattcacgagttgtgagaaatggatgcttgcagggtcacaggtttccagtaatgtgtgttgcgtggaaccatggggagaacttgttggcttcgtctgatttctatggtgttgtcattgtatggaaaagagcaaagacaagctcataaggtttgtctataatattataaatgaatctaaatccgtcatttttgccacaaaggctttgggtttggcatcatctctgtatcgctaatctcaaaactgtgtcaatttagtttcccatctcttataaagatatagttctgtgacactcctatgcacagattcaatagcttaaatggttggaacagacacgtccttaatgagttaataactctttccatagataagttggtagacaatttgaagagatcaagttaattgtactcgcaatgttttttgttttgtcacattatcatgaaccagattaattatcagtaaaattaatgaagattacataaacaacattccattgtagtctagttggtcaagatactcagctctcacccaagagacccaggttcaacaagttccggcaagctggttcatctaattcttcaggggaccaaatggaatatgatacttggttctcttagagaaatgtggctctaggattatattgaattcaaattatgtaactgatgagcatttggtgcttatattagtgtggaagtggttggactagataatcatgctaataattaaacgtatttcaaccagcaaaaagaatccgagtgttttgtgtattaattcttttactaaaagcaatagaatctcaacttcaacgtaagtagggcactaataaaaacttaacatttacaattctcttatttcccaagcaaatatcttcggcgtcatgttcatattggattaataataataagaagaagggttggttggtcgtcgtatattatgaagacactcttccctatccactgactctatctgtccattgtccaggtctctctctctctttctccttctgccatctctgtcccaattcagacttctttctcttcgctacccatcatttcacgttcttcacttatccaccccaatttactatttttattttcttttcaagtttttattctcatattttgaagtgtaaatttaaataaaatgcttacctatgttttcccacaaaattaactcttgtgtatttcgtaattttttttttcatagaaaataactaaatcacttaattcacaaaaagtctattttggtctctccatgcaaaaactataacctttcagtgtgttggtaagaaaaggtggtaccaccattttctatcacactaagatatctcaccacacattttaatttgacttacctcttaccaccatttcgtaccaccttatactacaaatcagacttattataaaatgtcttggagttgggattttctcaatttgtttctgattcgtaatcgtaaagtcctccatgacaagatatggacctacacttagtgaaaagaaagtaaaagttagaaaatttgtagaaatacctaaaatctgtgggcacaaaaagacaaagctaagtggggaaaaaggccacttattcattatttatgagaaagagataagaatatgaagtgttttttttttgtttattccttgcaaaaatagttgtatgcaaatgcaactatatagtaaatagcatgtggaccatcacagatattattcgaaagaacaaaaaaaaatcaaatgttgaaacttgaaagtgaaatttaaagacaaagaagaagaaactgtaaaaagcttaccaaaaaagtgaaattattttattgaaaagaagttgaaaaaaaacatccgtgtgtaaactttgacacgtcgttacccaaattattccccactctaataaagatggactagtctacacaaaaattaatattatctttgattacaaatcggacatgaaatatttaaaaaattgcatagcaccaaaattagatatgaaaaacgttcattatatatttgtcttattctccaaatatgcttgataaacacattattatagaagaattacgaaaatatcttttactattgacaccaatcaggaatatatcaaatatttttagataagaatataaaaaacacagaaaatgattgtatggtggttatagcttcattcaattttattgcagcaaacaaacagaaaggccagagagacgaaagagagaggcattagggtttaggattaggttttagaaaagggtttagatctctaccaactggtttgttaagaacataatctccttaccacatttttactcttgaaaacattttgatctgtttttgttatcttcaccaaaagacttgactccaagaaacaagaagaagaatcaagaagcaagttcaagaaccagcttttaatgaaatctctacttcaaaaaggaaacttgctttaaggaggatggatcttttgttttcttgaatcttttgtgtgggtaaaacattttgtattatcaagattttgatttgaggagataaagagtttgttgttaagtttgtgttcttgggatcatcaagagttaaaacaaaaaaaaaaaaacatttcttttttccttcttcaatttgagatttagtgtctcctttaacacccacaaagccagcagatgctttcctggtaattctttaatctatcctttcttcttctttttaaattcttaaattcatgcagagagataattctcataattttcattggttcaatttcttaaaatttgcttaattaagattttattacataatgtgaagtataaaaagggtttagtgttgtttgtgtttgattctgaaacagatgactccttgtttgatctgatcataagaagaagaagactatg

SEQ ID NO: 26477 - DNA, 3003 bp, Unknown
  misc_feature (1)..( 3003): 2750-1469P.txt file - cDNA_ID_2714022; gDNA_ID_2214647; Annot_ID_136378
ttttctttctcccccattttcatgaaatattaaaaatatctcaaaagagcataatacgacattaatttgcattaatcgtcaagttgcaattatgtgtctaatcatatttacaatgctacacaaataaatatattatagttatcaataaactctctaatttggcgtcttgtttctcccttaccatttgagaactcaatttttctccaagagaaaaacaagaattccaaggagagataattaagttatgggtatgtcaccattaacggtgaagaaacttggtttcatcttcatgattgtttcagcttctgctctttctgtctcctttgcaggtttcacttctctcacccactctcttctgttttgttgcagcttttctctatacttcatgtgcgcaagaaattctttagtccttgttagaaagaaatgatcacaattgtataatctttagtccttgttagaaagaaatgatcaatattgtagtttgtcgttgtgtaaagaaactactaaacaatgatgatcatgatttagttatactgtatgtacaattaagtaacctatttttcttatagatgtaacaaataaacttcttttgttatgcaggccgaccatcgatttttgttcataaaaaaataaatcttcgcgaagaggttagtctaactaacatatgaaggggaatgtgtttcatgtaactttgtgcataaataagcatacattttctaaatttgaatacataataaatcttttttgctttcaataaataattttggagctgaatttggttaaatgataatgtgactcagatggtggaaagaagcatgcatgagcatgagaggcttctaagaatgaacacaaaggattatgggaacaacagtccgtcacctagacttgagagacctcctttcaagcttatacccaattgatgacattagaattggttctaatccatccttaaataatatatacatatataggtagaattagtttcagtgactatatagttccatcgaaatttggagatgtaatataaataaaggtaagaagctagcttgagctatgctatactcttatatttggtgtgctgcatagattttggcattttgccatacatccatggcatcacaatcatgtgtctttgtttttggttttcaaatatatatttatgttgcatgcaatattatttatatgtatatatatatatatatatatatatatgagaatttgaattcttactattagacagagatagtctaacagtaaaaaatttgtgatttgagttctataacggttcgctaataatttctaatcaacctctagatctattattatgatattttctgagaaattccttaggcatgacgatttttaatctatatgaatttacatcgaattttattgtttttcttgttttagttaacaatttttctgtttagtttgatttcaacactaagaactttccgtgtgaacaaaagaactttgtgaatctgatccttaagtattataatgaactcttaatttgagggacttacttgaagtctaatttgatatatgtcaattaccaattaagaaagccttcccatttgtttgatacaacacaatcgaggtgacactagtatggccaaagagatagttcacgatagaaaatcaaaaatcaaactttgcctcaccaaagattgatgtagtagaaactaaaaacaccatgagaaactctcatgttagaaaatcaaaattcaaataataatcaaaataaatttatattcaagagttgtatatatatatatatatatactagagtcgtcggatgcatctaaaccatagtccttgattcatatatgtgacgttttcatctccacaaatgggtaattgtgttattacatagtttaaccaagacgacatcgtctatatacaaccatttagggcatgtgttgtccaaattatttttgctatgaatcatagcgtataacaatgtttgtaccaattttgtattattattcaagtcaaaacataaaaaaaatgtttgtttttggtcaatgacctttacgtaagtcacatacaaaataaaattgtaagaaagatgcatatagaatctttaaagcattctgaaatttgataaaagtagacattaataatgagagtggaataatataattatatgcttatatacatctttcttacaaattcattttgtctatgaccctttactaatttagataattacatactcttatcacctctctcttagttacagttaatgaattatgaacaaaaatatggtaatatgacattaatgtgtttaaccttcgaaagatatatcgatggcgcaagtaaaaaaaagagttgaaacgagtttttaaaagagagacaatttacatgagatatttttcgttttaattcttagaattgaaactgttagttactctcaattttgttcattaaacactctcattattgatttctcttatcagcactgatggtattagacctgtggcaccaatagcacctcttgaggggttttatgcaaatccaaaagttaaagatgtcaattggaattggaagtaattcaaagggcttttatgcaaaagtttgtttttctcataaaagtttaaatggaccggactatagtctgggtcgcaattaaaatcgcttcaaattcccgagtcagagtctctcagcttcgaagcacgagcgagcgaggcaaaccaaaaagaatccaatttacatcatcttctccaaaattcagctcgaaattttcaacctttactggtttaatggacattctccagaccgatcaagcttcctcaaacggtatacgaatctctctgtgaaaaaaattaggtctttcttctgattttagtgtcactacattatatgcatgtcgttcccaaacccgattttgtgttagttgatccaaatatttgaagaaattatgagtaattttgcaatgttctgaagccaaagttgttgtctttcttgtttttgtttatttggagagtaatgtgacagatg

SEQ ID NO: 26478 - DNA, 1673 bp, Unknown; identical to SEQ ID NO: 13756
  misc_feature (1)..( 1673): 2750-1469P.txt file - cDNA_ID_2714038; gDNA_ID_2214649; Annot_ID_136408

SEQ ID NO: 26479 - DNA, 3003 bp, Unknown
  misc_feature (1)..( 3003): 2750-1469P.txt file - cDNA_ID_2714056; gDNA_ID_2214652; Annot_ID_136452
catcagtgcaaaacaacagcgcaacagtttcaaagtccatgaatttcaacagttaaagagatgataggtagaccctaacctgacccatttcttagctgaacgagaagccagagtcgccttgtcctgattcttgctagaagaccccttccttcgggatgacccattttgcttattcccactaaacgcattgttttccttacaccttcttaaaccaatcgactccatacccgatttcaccaactcacaattaccaatcttccttctcttcttctcctcaaaacaatcaatttcatcaagctccacactttcagtcttcacagccaccgcctgatctagtaaacactcccgtagcggcctcttacggcgacgatagtagacgcgaacaatctcaggacgctgaatccgcaacttataatcatccgaacgacaacaatcgtcactagcactaacaccgctaccttcaatctcgaattgctcaatcatcggaagcttctgggccttaaccttcttagacatcagactgtgagaaccaacggcattaacacagcacaatgccgatgaaggaatagagtagatactctcaatagaatcgtagcgaatcggagcttccactagatcgtggacatcaatttcgatctgggtttcgttagaaaaacacgccatggagattattcggagggagaaagcacagggcttcgtaaaggagacacctttgctcactctctctatccttctttcactaaacccccaaaaaaattgctagggaatttcgtggattggagaaattagggtttaggaagaagaatcagagaaaaagggaaaaaaacagatcctttggagggagaagctaaaaggcttttttacgtttcccgccgggtttattaagatgatgacaagtctttcagatctattgctctgtctccttatatatctccgcatacatacattcatatatagtgtgtgtgtgtatgtatataaaaattaatatctggttaataaaaacatataaaactaaaaataaaataaataaaaattccacttgtagaaaaaaaaaatcccggttgtcatgtattttattttcaacaagagtcttttttttttgggcaaaattcaacaagagtctctgattcttttatatagttttgttttcagataattgttgtttaccagtttttgtgtaatcttcactacatggaatttgttttgttttttttcagttcatacgtatatttttgggtttttagtctgttaagtatagtgtataagacatatttttctggttaatccaaattaaattccattggaacaaaaagacaagattgactagaatttgaatgaaggtagaaatcaaccgaattgctcataaattcaattattgaatggggttcttcaagtaatactacctattttctcaaatgagctagagaattttcttgtgaggaaattccaacgatttgctcccttggtattacttgttttggattgttctgaagttttctagaataatataatatttcaacctaaaaagcttagtttgtggataaataatcaaacatatgttaaagatttttgtgatagatacaagattttttctatgaatcggacaagtggaactctaatccagtttttaaggtgtgataagttgaagtaaagatatgaggttaaaagaaacatttcaactcacttcccttatcttcattcttaaatgaacggctattcatagcaattacttgatttggattcataaaccgaatatctgtctagtaggagtagtctttacttaacttaactaaagaacaatatacggttgactgtagtatattagtatgcttttgacacatggaaaataccgctgctaacttgatcgcatccagtgacttttgcagtgtgtcatatatgttaataaggatgtaatcatcatggttaacagtagttgcattttcttatgcggtagcatacaatgctcactagtgctctaaattgatccacatagggatgctatacacgctagagacatatatatttaaaagtaagtaaggttaaaatacttgctttcatgagcttcaagataggtgatgtgtgtacctccaaagttcttcccatcaactaggcattagaatatgtcgtttcctagatacttggggcagattggcggcttatcagcttttcggatgaaattttgatacttggacaaactggcagctgatggatggaacttattgtcaaagtatccatatagcgtttgttggttggctttctctagatacccacaaaatttacacaacacatatggcctatggtcacaaaattctttgatgtcatctaacattgggattcatcatcgcttacatgatttacgtccatatatacttggacataaatattatggaatgaacaattttaaattttcatcaaaataccaaccacactcacttaggattatgaccagaacaaataaaataatacatacttgattaaaaggagaaaaacatttttttatgtctttgttagtttttattttaaactatatattcatcaaaaaaaaagagggaaaatcacattttcagacacatacatgtccaaaaatatttgttttcccctcaaattcacctgaacttaattagtaagagaatcagtgacgtcatttagtaagagaagacccggttcggaataaaccggctaaagaagacccgggtcaatcagaatcaaaattgggtggttttggttagttaaacaaccctagggatttaaatactgtaaatcgtccagctctatttgtccctctcctccactctcgccaactatcaatcaaatcttcttctccttcttctccgccattcttgtccctcttaaaccctatcatgctcttctgagattctcccctcctctaattcagctctctctcttggttgggaatttcaaatcgaatatcaaccactgcctctgatcgtcatcaaggtttactctgtttagtgtccggattctcaaactccacggagaatg

SEQ ID NO: 26480 - DNA, 3003 bp, Unknown
  misc_feature (1)..( 3003): 2750-1469P.txt file - cDNA_ID_2714080; gDNA_ID_2214652; Annot_ID_136442
ttaatggcaaatatttaaggccaaactttccggtcttatttgtatcctccttgatgtattaatgaatttttatttcaagactatatagttaaagatcacaatgagtgacgaaagattgttttagatgttaaaaaaaaagtgaaatcaattcatttacttgtggcatatttggctaatttgaaagcacaaatatgagccaaagtacatttgatttaaaaacaaaagtcgacaaatagttgcattaagaaacaagaaaaaaacattgtttcagttttgcaaatcgtgatgatcacttaagcctgaaacttcccacgaatcagaggatccagacgattgcctatgacattataggtagcttccgatggatgaatcgagtcaaagaacataaactccgaccgattttgacacacaggagaaaagacattacacatgaagctcgtctccaagaaccctgttccacaacatcctctcttcgtctctttgaaccctgtttcgattccacacacacgaatcatatatatataaacaaataagataacttgtggagcaagaaaaatctttatgtacataccgtatttgctagggttttggatcatctccatcataggattatagacatcggcgtaaaggaatttgcttcctggaagagatgcttcgatttggggcaagagcttctgaagtttctcattgtacaaaacagagtctttgttatggtgttccaagcagaatctaaaaatgttgcggaatttagcagtcatatggatcggtaaacaccccattggcggtaaacctccaaccaaaacattccggacacctaaactgtaaagctcctgcatatacaccggagagattaacaaaacaaacaaattatcataaaactttcagtcactatagtctgttccaaaaccctaattgtggtaatatatatatgaagaaatattttagacgttacccgcacgaaattttcaagcctcttaagaataaaatcttggtaaccagaaatgaaaggatactcgagacgccttgagggaatatcgtaatagttcaaaatgaaatcattaggccctgcactcacaaccacgaaagcattgtttatgatctccatcgctttcttgtctcccacgatacctttgagacgagcaatgtaactcttgaacatgtttggttgttccgagacacgaatggcttgtgtcgagagactggttaggtcgtcgtaaccgcaccagctgatgcgaaacagactccggttagaatgtcttggtcggagagatttggttgtaagaaaggaggaataaactctttgatgttgagtttggttgcgattatgtcggagataagttttccgtttgagaatcttccgttagcttttccgtctggaagatccatgccgtaaggaaagtgttcagctctgaagattgttggtaaagggtagttgttgttgcctgtgtcgacggttgaatcgccgaagattagaatcgctgggaagagcggtttcgttgttgcatttgcggctgcgtcgcaggacgctagtaatgttgttgtgatgaagagagttaaggttatggctttagaagtcgacattttttgttttggtttttgttttttagtagatttgaagaaatgtgttgtttttgtggtgtatttataaggtgactttttttttgttaccaagctggctttgtgaggttgtttttcttttaaagtgtgtaacaaatggatgaagtcaagagctttgaaccttatagtctaaataaagattttgttaagatattgatgagcttttcacaaaactgaaaaacaatgtggtcaaaagaaaataaatttcgttggtcgagcaaaggaaaatagaaaagcaaacgtttttgtttagcgtttaagaattgataatgtgaaaaaacaaatcgataaagaaacaaacaaattaaaccaacatatcttgattccaactgaactccaattctgaattctggtttaagaaaatgacctaaacttaagctgagagtgttttgtcgttttcttgctaacaagtcatattaagattgctatatttattaaaatttaacattaacccaaaagaaaaaaagattaacatgtttataaatacctgaaccacaaaaaaaaactaataaattctgttctttcatatgatatggataacatttaacaacatactataacatgttccagcatgagatacttaacttactaaacacgaatctagagacagttagaacaagtgtctagaaaaataatttataccaatatctgaaaccaaaatcaaactctctgaagtaggccatacttcttctgttcgtgtggccagcggcgactccgtgcatagttttctttagataaatccaatattgataagttgaaaaaaaaacaatttgaaaatttacactttttaagtttttataaattaatgggacgattttaacatttcttgatgaccaatgacaacattgcttgatgttgtaaacaatgttatgaagaagatgtcaacttcatgtcttctcaggtcgcaattcaattttatatcatgtaaataaatgggattactagtgatctcttctgcaatacactttttaatatcagaatataatttctcatgttcatttgaatacactttgttttctccttccaattaagtagtatacaaattttcacaacaatactttatgtttctcgatgtgattcaatgtttatgcaacattattattagtaaaatagatgtccataaattaaatagaagttgaaacttgaaagacaaaccgagacgaatcccaaaatggaaacccaatgtttctcgaacacacgtttcatggaatcattgattcgtttgcatatggccccacaacaaagatggcatatatgcaataattgatgcttctacgtcgccacttttctaagaaagaaaccatctcctttatataataatctttcctcaccactcaatatgttatatccgataacaaaaaacaatcacagagagaaaaaccaatg

SEQ ID NO: 26481 - DNA, 3000 bp, Unknown; identical to SEQ ID NO: 13791
  misc_feature (1)..( 3000): 2750-1469P.txt file - cDNA_ID_2714082; gDNA_ID_2214652; Annot_ID_136437

SEQ ID NO: 26482 - DNA, 2962 bp, Unknown; identical to SEQ ID NO: 13833
  misc_feature (1)..( 2962): 2750-1469P.txt file - cDNA_ID_2714092; gDNA_ID_2214656; Annot_ID_188777

SEQ ID NO: 26483 - DNA, 2962 bp, Unknown; identical to SEQ ID NO: 13833
  misc_feature (1)..( 2962): 2750-1469P.txt file - cDNA_ID_2714092; gDNA_ID_2214656; Annot_ID_136502

SEQ ID NO: 26484 - DNA, 3000 bp, Unknown; identical to SEQ ID NO: 13875
  misc_feature (1)..( 3000): 2750-1469P.txt file - cDNA_ID_2714122; gDNA_ID_2214663; Annot_ID_188938

SEQ ID NO: 26485 - DNA, 3000 bp, Unknown; identical to SEQ ID NO: 13875
  misc_feature (1)..( 3000): 2750-1469P.txt file - cDNA_ID_2714122; gDNA_ID_2214663; Annot_ID_136553

SEQ ID NO: 26486 - DNA, 3003 bp, Unknown
  misc_feature (1)..( 3003): 2750-1469P.txt file - cDNA_ID_2714125; gDNA_ID_2214663; Annot_ID_136552
ttttaaaaagcatttgatttagctgttttatcgtaatttatctaaattgtttttttgtctcgtcaatctagtgacactcccttctgtacggaggcatgtcgagaaaaacagcaggaggctgataaagggaaacataaattagagaagataattgaaaaagaagatgaaattagataaaaagttgaaaagcatactcataacaatgttgattgatttcatatattaacatcatcctaatttttattcttgtcaaaaaattaggaatgacaatagttttttccccctacattttagtagttaatatttcccattttaaaaagtcaaaccccatcatgtatcatatatattgtaagataagatatggtgaaatcttcttgatatatgtactagatttctatgtaagaaaaaatttataaagcacatattttattcttttggtaaaaaatttcaaatgtaaatgtttgagaccaaaaaaaaactttattttgactagttgtagattttttcttctttttccttttttttttttttttttttttttctttttccttttactatcttattctctatcttcttttttaatataaatatgggtgtgacaggtatgaaaaaaataaaaaaaattagaatttttttttcttctctcattttagtttatttctgaaaaaaatgagttaatttgataacaaataaaatttgtgtggattgagaagaatttagacgaaaaaaaattcttcaagagtatataccagtgcacactcgtaaaatcgaacactgttttgaaatagtattaaattaaattaaaaactagtctatagtattaaattaaaaactagtctatagtattctttcgcccaaagaaaaaaaaaaagaaaaaagtttatagtattaaactaaaaactaatctataatggcatgtcggaatttcttttaatcgatatatgaaacattgttcagggtgattttccaaatagataaatagggttcgagctcccgaacttatagcttttgggccttcctcgtcttcagtttggacagctacgtaggattctatataaaatcacaaaactttagaggcaagtgatgttcgtcttgcgttaggactgctccattgcaaacaagtattgtttatggatatttgtgaaatttctgagtgaaacaaacattttccttgttttcaaatttcaaccaagtctcatggtctgttttactaatattagtgtttaaaactctataaaacacatccttagtatttttcggattaccacatgtttgctttttgttgaagaaaatttatctctagtggctagacatacgaacatcgaaaatttagcaaaacgatttcttttaaatttcattattttcaaataaaacaaaaatcttaaaatgcttggatttttaaccatttaaattatcaccttttagttttttttcttttttttttcgtgtgcaaggattttattgattaaatgcgtttgagttatacagagccgaaaatgaaaaaatcttttcggatacaaagccgacgggtacatagaaacccccagagacatgaggccaaaaaaggcgaacaaacaaaacaagccttaaaagaaaatatacaaagataacagttacaagtaataggtaaagcctccaaaacaacaacactgaaaattcttcccaacaagcagccgattaacactttcatggaacaggtaacagctaccgaagtaatagttaaagtctccattttcttctgttttatagaaaatttaggtaatatttcatatatatatatatatcactcagaaattacacaaatattcaaaaaaaatctgaacattgggagcaaactttttgaagcaaatcagatcataaaattagataacccgtagttacaaaaaaaatacttattgttctataatataaactcagctctaatcagattccatttgctaatttaaccgtataaagatatttctaatttacaagattttaaaatacgagaatgacagtaggaattagaaaaaactaatataaagcagaagaatataatcgtcaacacgtgataaaataataacccaatggataatttaatactattacagaaccaaaacaatcaataagcaaaaaaaaaaggcaaagtcccggaacttgcgtcagaagaattttgactagaaagaaaaaaaatcaatttcgacggccatttttttctctcatcgtacggattcctatctctcactactcagatgcttccttcttcactttaatcacccttttcgattttcgttttccagctttttgattcctctgtttcaccaagtagacgaagtagaagaagaagaagaagaagaaagttttcacctttactctaaaagtttcactttttatgtctgctttgaagctctgagatcggagaaagcaatatctatggcggaagcaagacgattcagcccagttcatgaattaggtgaagtgaaagttttcttctttctgtagtatttgagatatttttgtttgcgtgggtcaaatcaaatctttatccgatctatttggtgtgagtattggtatatagtcatcaaagtttcaatctttatctattggaatctattcaaaagggcatttttatccattattggtgtgagtgatgatttgttcttgttgaaagtatattttatctgaatattcatcacttacttattagtttacttatccaagttgataacgaatctattctaaatcatgttcatcatttttagtgggttactttttacttctttactctttaagtttctatgcataatttatgattgttataggcagctaagaatatcttgggaaatttagtatcgtgtgttggttatactttaattagctgcttcttgtgaggaagttgactttttagctactacatcagaaggtactatagtgtctcttaaaagctttcttgatgaatgatatcttcttagttgtactaatttttgtgtgtcttctgattgcaataattgttgtccacagatg

SEQ ID NO: 26487 - DNA, 3003 bp, Unknown
  misc_feature (1)..( 3003): 2750-1469P.txt file - cDNA_ID_2714129; gDNA_ID_2214663; Annot_ID_136549
accaaaaccttcagcttctgatccatagtaagcactgaagtcaataaagagataaaaagctccctgcaagtaaacaatgccaacaatcaagaaaaagacgaagaagaaactagccagtaatagcctcaaagataaacggagaggtacctgaggttcagagatcttaacacctttgatatcacctaagcttttaaccaagaaatctcgtctttctctataagctttaaccatctctgcaaccgtttctcctccagctttgcctaacccaagcgcagcaacacctgctttctgagcaatgctactagctcctgaactaaccttaaaacaaaaaccagaaccgatttcatctcatgatcgctgcattttttcgataaagatttagagagaaatatgtttatatctagatacctggccttgtaatttactgcaagctgccacaatatgtttaggaccagcaagatatccaagcctccaacccgtcattgcgaaagcctttacatatcatatgatcagtaaagaagaatttgatcggtcgacattagaagccaactcaataataaatactttacctttgagaaaccgtttactgtcaaagttctttcatacatgtcaggcaaagaagcaaagcttgtgtgtgttgcaggtgcataaataatgtgttcatatatttcatccgaaagcacctataaaagaaatgaacgaaacagagttttgttttccagcttaaacagttcagcaaaaacaaactgacttaaaaagaccaaggaggcgttttatgctatataccagaagtcttggatgcttagcaatgatccgtgcaatctcttcgagcaaactcttggggtaaacagatccagtagggttggaaggagagcagagaataagaagtctagatttttcagtcaatttagactcaagatcctttggatccaacaaaaaattgttagaaatcttggtaggaataaccacgggcgttgcatcagccaatctcgcctgttctgtgtaactcacccaatacggtgcaggaattataacctagtgaaatacaattcattgttacaaacaaaatcacatcgaaagaattcaacaaaagctcgaaagacacggttttaattacttcatctccaggagaacaaactgcaagcactgcttgtaagagactttgtttagctccattactaaccaagatctgatcaggcgcataagacaatccattctcctctgaaaacaaccagaatacaaacaatttgactccgtttcgacataactgatttacaaagcaaaagcgtttctttataccttttagctttcgacatattgcttctctgagttctgtaatacctgcatttaacgtatacctagtaaaaccttctcgaatcgcgttgatcccagcctatacgaaacaatcgattcagaacaaaccacagagagagacagaacatggcaaaaccagtaggagaaatgtattaacctcagctacgactttgggagtgtcgaaatcgggttctcccgcagctagtctaataaccggaacaccggattgaacaagagtggctgcaagatcggttataaccatagtcttggaaggttttaaggactgaactcgcgggctaagtgacatatctactgatgatgaaagagtctcagcatcatttggtttggccatagcgcagattctagatgacatattccctgacttacagtacctaaccattacagagacctaagtcaactacattgaccagtgattggagcaatgattcagatttctaatcaaaagagtgctcaaaagtgacgaaattgaatcgaagattagaatagagacgaaactcacgagaaggagagacggaggggttgttggaaccgaactgacccgattggtttctttgaatctgggaatgattcacctctggcggcggcggaggaaatgacggcgactgaactctgagaagccattggagaagttgggttggtgagaagagagataaagagtcgacctttgaggtgggatttgtaaacgagagaggcggagagaatgtgggaggagttggtggaacaatgttaagaaaatgaaattaaaaatattttaaaatgacatttatatatgttcaaaattagccaccaaccaaccctttgaatttgcaaaccagagttagaaagctagtcgccggcggctgatgatgtcaccgggaaagatttttcgtttgtttcattttatcagtcacacacttgtataactatattattcaatcattaaaccctaatcttaatcctaaaaatatgggaaaatatatatctatagctataaaaaaagttaatattcttaaggcattaggcataatctagttaatagactccaatcttgggatcaagtaaatgcctaaaataaggattataacttagaagctttggagtgagattgctacgagaataaacaaggatcacaacaacagacactcgatgccaaacttacttaactcttaatttaacaaggagagaagagaaacgaaccagggatcagattcaggaaagcaagtaactaagcaagctcttttggagaagaaaagaaagacaaggacaagtttctcggttttgggattttacgttttaactttacaaaacaggattaaaccgaaattgaaccgtacaaaacctgtgcttaataccgtcatctcaaatattgaaccgtaataaatcgacaacaatataaaattgattttggttcactaagaggaccagacttttctctcggacttgagacactggagagactgaatacgaccatgtcctcttcgctccattgctcgggtaaacttttaacaagggttcgaaatcgaatacacgaatatctcggtttgttcaattactgaaaccaatcgaattttttaatctgtttcgattttctagttttagcatttccggtttagttcgatttaaattattcggttaccgtttttgtttagaatcacagaaaaaggtgagattaaggaggagcgaaacatg

SEQ ID NO: 26488 - DNA, 3003 bp, Unknown
  misc_feature (1)..( 3003): 2750-1469P.txt file - cDNA_ID_2714169; gDNA_ID_2213638; Annot_ID_132200
ctcattgtctgcaacatcaggacccactatttcaggtggacgtgctgcatcaaatggtcgtactggaccttcattgtctaggccaagctctcctggacctagagttagaaacaccccgcaacagccaattgtgctagcagacttccctcttgatacaccacctaatctgagaacatctctcccggacagaccaatatcagctggcaggtccaggccagttggtggtagcagcatggctaaggcaagtccagaacccaaaggtcccatcacaagaaggaattcatctcctattgtgacgagaggaagactcactgagacccaaggaaaaggccgttttggtggtaatgggcagcatctcacagatgcaccagagccccgaaggatttcaaacgtttctgacataacttcacggagaaccgtgaagacctcgacaactgtcacggacaataacaacgggcttgggaggtcattctcaaaaagttcactcgatatggccattagacacatggtacatatgtctcttctcactaaatgcaagtagctttataccatgcaatgaatatctcaacattttttatggtgtgtgtaggacataagaaatggaaagactaatggttgcgcactatcaaccacaacgctattccctcagagcatcagaccagcctcatccaagatccagccaatccgttcagggaataatcattcggattctatcagcagcaatggcacagagaacgggaatgaagcaaacgagggtagaagactgatggggaagttgagtgacatggacatgtatgagagctcaaggtatgatgcattgttgctgaaagaggacgtcaaaaacacaaactggttacatagcatcgatgaccggtcgtcagatcacggactcatgtttgacaatggaggattcgagctacttccagagccatttgccccactataacacacacacacacacaccccacaagtaaacacctttttttctttctaaaatcacttctcttttttttttttttttttttttaaattttatcttacacaatttgtttgcttgtcgatggtggaaagatataaggctcaagtggttcttggttctttggttattgattcttgattcatggctattgagtgaggtttgtaactttgtagttataatatttgaagagatggtaacgtataagagggtacctcatgttcactcttgttggaaacgatcatgaacgaaaaaacaattagaatgtgaaaagaggaaagagagggtcacacgactcacgcgcctaacgtgaatcaatgacagagctaaagttaataatgggtgacaacgaagcacacaaccaacaacaggccagtgtagttctgataaaagaaaaaaattaattccagaaattgactttcattaatgtcatatttgagatttaagaagttttaaatttttgttatttattttctcttttatgttaccccaaaataaataaataccctcattaatgtcacataccaaactcctcctcttcagggggtccatatttaagaaagataccctcttacccgaattaaaaatatcaaataaagtaagctcaatttgcaacatataataatttgttgaatattccccactcttgttgttttccttgcccattttttgatcttgaaatacttttatcttcttattgtttaacgaatatcacaatcatccattttcatttatacattgcatattttcaaaaaagaagccatatatttatttaatcaactggtgacccattcaatagaacattacgatgcttttaaaagaataaggaaattaaatgttgggaattcagtaaatgccgtttattaaaagctcttatgtataaattcatttagaataaaaacaaagagaaattaacaaaaggacaaatatttaattgagcttagcaataaaaaaaaaatctaaaaaattcggaagagagtcaaagggggacttaaagccaaagagagcaaagcaaatcggagtacagagaagaagaagagagattggaatctgaaactgtaacatcgagatttacgtttctccgtcggcgtcacgccgaagcttccatactccagaaaccccaaaacgcttatttctcaaaaatctccactctctctcttctgaatcttcaatcacttggggttgtgtcactgaatctgcatcaatggcgattccagattcctcactcttttctgcttttgactttagctctagcttcttcttcacgaaatgccgttgttgttaaaaagtgatttctccactatcccatttcctttggcatttattctccactctctctcacttgtcttcttcttcttctacgatcagctcaccaatgtcctgaaccattctcctctgaatcaacctctaaggtctctctcactttcgatctctgttttccctcttgttttggggtttattagcttcgttgtttattcctttaaaagatttcttctttctcaatttcaattactccgtttagcttagctggagaaaccctagtttgtagattgcagatctgggttaatcaagtatctgtgcacacatttatgtctaaaattagttactttcgtaattggatttgttttttttgtgaagatttattatttgaagtcaaacagatttcagctgattgaatcaatgtgtgcatatagcttccataatttcatattttgatttgagaatcgagtaatgttgctttggactttatcatcagcattcccactttggtttgagaaattacgctattgtatctttgtcattattaaggaagcttttcgttgtgttgatgatctttttactcatgatacctgtgatgtgtaggtgtcattcttggctactttatccatagatacatttctcatattgagtttagcttttatgtggctataaatcattacatgatgtgttttgtgttctcttgcagttgctgttgaatgagaaagctttgatgtgagcgagcctgagagtgtaacaaaggactgatg

SEQ ID NO: 26489 - DNA, 3003 bp, Unknown
  misc_feature (1)..( 3003): 2750-1469P.txt file - cDNA_ID_2714169; gDNA_ID_2213638; Annot_ID_181105
attgtctgcaacatcaggacccactatttcaggtggacgtgctgcatcaaatggtcgtactggaccttcattgtctaggccaagctctcctggacctagagttagaaacaccccgcaacagccaattgtgctagcagacttccctcttgatacaccacctaatctgagaacatctctcccggacagaccaatatcagctggcaggtccaggccagttggtggtagcagcatggctaaggcaagtccagaacccaaaggtcccatcacaagaaggaattcatctcctattgtgacgagaggaagactcactgagacccaaggaaaaggccgttttggtggtaatgggcagcatctcacagatgcaccagagccccgaaggatttcaaacgtttctgacataacttcacggagaaccgtgaagacctcgacaactgtcacggacaataacaacgggcttgggaggtcattctcaaaaagttcactcgatatggccattagacacatggtacatatgtctcttctcactaaatgcaagtagctttataccatgcaatgaatatctcaacattttttatggtgtgtgtaggacataagaaatggaaagactaatggttgcgcactatcaaccacaacgctattccctcagagcatcagaccagcctcatccaagatccagccaatccgttcagggaataatcattcggattctatcagcagcaatggcacagagaacgggaatgaagcaaacgagggtagaagactgatggggaagttgagtgacatggacatgtatgagagctcaaggtatgatgcattgttgctgaaagaggacgtcaaaaacacaaactggttacatagcatcgatgaccggtcgtcagatcacggactcatgtttgacaatggaggattcgagctacttccagagccatttgccccactataacacacacacacacacaccccacaagtaaacacctttttttctttctaaaatcacttctcttttttttttttttttttttttaaattttatcttacacaatttgtttgcttgtcgatggtggaaagatataaggctcaagtggttcttggttctttggttattgattcttgattcatggctattgagtgaggtttgtaactttgtagttataatatttgaagagatggtaacgtataagagggtacctcatgttcactcttgttggaaacgatcatgaacgaaaaaacaattagaatgtgaaaagaggaaagagagggtcacacgactcacgcgcctaacgtgaatcaatgacagagctaaagttaataatgggtgacaacgaagcacacaaccaacaacaggccagtgtagttctgataaaagaaaaaaattaattccagaaattgactttcattaatgtcatatttgagatttaagaagttttaaatttttgttatttattttctcttttatgttaccccaaaataaataaataccctcattaatgtcacataccaaactcctcctcttcagggggtccatatttaagaaagataccctcttacccgaattaaaaatatcaaataaagtaagctcaatttgcaacatataataatttgttgaatattccccactcttgttgttttccttgcccattttttgatcttgaaatacttttatcttcttattgtttaacgaatatcacaatcatccattttcatttatacattgcatattttcaaaaaagaagccatatatttatttaatcaactggtgacccattcaatagaacattacgatgcttttaaaagaataaggaaattaaatgttgggaattcagtaaatgccgtttattaaaagctcttatgtataaattcatttagaataaaaacaaagagaaattaacaaaaggacaaatatttaattgagcttagcaataaaaaaaaaatctaaaaaattcggaagagagtcaaagggggacttaaagccaaagagagcaaagcaaatcggagtacagagaagaagaagagagattggaatctgaaactgtaacatcgagatttacgtttctccgtcggcgtcacgccgaagcttccatactccagaaaccccaaaacgcttatttctcaaaaatctccactctctctcttctgaatcttcaatcacttggggttgtgtcactgaatctgcatcaatggcgattccagattcctcactcttttctgcttttgactttagctctagcttcttcttcacgaaatgccgttgttgttaaaaagtgatttctccactatcccatttcctttggcatttattctccactctctctcacttgtcttcttcttcttctacgatcagctcaccaatgtcctgaaccattctcctctgaatcaacctctaaggtctctctcactttcgatctctgttttccctcttgttttggggtttattagcttcgttgtttattcctttaaaagatttcttctttctcaatttcaattactccgtttagcttagctggagaaaccctagtttgtagattgcagatctgggttaatcaagtatctgtgcacacatttatgtctaaaattagttactttcgtaattggatttgttttttttgtgaagatttattatttgaagtcaaacagatttcagctgattgaatcaatgtgtgcatatagcttccataatttcatattttgatttgagaatcgagtaatgttgctttggactttatcatcagcattcccactttggtttgagaaattacgctattgtatctttgtcattattaaggaagcttttcgttgtgttgatgatctttttactcatgatacctgtgatgtgtaggtgtcattcttggctactttatccatagatacatttctcatattgagtttagcttttatgtggctataaatcattacatgatgtgttttgtgttctcttgcagttgctgttgaatgagaaagctttgatgtgagcgagcctgagagtgtaacaaaggactgatgatg

SEQ ID NO: 26490 - DNA, 3003 bp, Unknown
  misc_feature (1)..( 3003): 2750-1469P.txt file - cDNA_ID_2714172; gDNA_ID_2213638; Annot_ID_132199
ctcctcttgagcactcgagaatctttattctccgttactttcttatttctcaagaatgcattagcgtctttgtctgcacacaaagcaaaagcagagagatagggattggtctgtaattcccaagactctattttcagtactatcgattctcccggcgatctggtgagtgagatagagattcacgatgggctcagacagcactttgtctctcccttcttcatctcctccttgtaacaatcgctcctctgttcctccaactttcaccactcggtctgtcttctttctctatctctcccccgagttctgtattaatctctgttaagcttatctgtattcacttgttattatgaatgtaatggtttgagttttgtttttatgaaaattacagcatattctctgatgttgcgggtgacatcattgttgttgtcgatggagaatcatttctacttcacaaggttagtgcacacttttctggtttgagtttttttttttttttctttacagtttttagatcaaacgcatcagagaataataataaacattgcagtttccgttagtagctaggagtggaaagatgaggaagatggtgagagatctcaaggactcttcttctatgattgagcttagagatttccctggtggaccttcgacgtttgaactcaccatgaaattttgctacggcattaatttcgatatcactgcctttaacgtggtctctctccgttgcgctgctggttatcttgagatgactgaggactacaaagaacagaacttgatctttcgagccgagaattacctcgaccagatcgtttttcgcagttttcatgaatctgtcctagtactttgctcctgcgagacgcaagagattgctgaaacatatgaaattcctgaccggtgcgtggaggccatcgccatgaatgcttgcagaaagcagttagtatcaggtttatcagaggagctcaaggggagagattgtctcgagatgtggactgaagaactctctgctctcgggattgattactacgtccaagttgtatctgcgatggcgaggttaagcgtgcggtcagagagtatcgtcgcttctctggtgcattacgctaaaacatcattaaagggtatcatcgatcgaaactgccaggaacagaggaaaatcgttgaagccatggttaaccttttgccgaatgacgaaaaaggatcttactctttatcaattattcctctcggtttcctctttggaatgctcaaggtcggaactataatagatatagagatctcttgcaggctcgagcttgaacgtagaatcgggcatcagttagagaccgcgtctctcgatgatctgcttataccttctgtccaaaacgaagattcaatgtacgatgtggataccgtccacaggatactcacattctttcttgagaggattgaagaggaagatgatgaatgtggttacgattcggattccactggacaacacagttcgttgctgaaagtgggacggatcatggatgcttacttggttgagatcgcaccggatccatacctgagtctacacaagtttacggctattatagagacactacccgaacactcacgtatcgttgacgatgggatctacagagccattgatatgtatctcaaggtaaacaaaaacacaattgaacaaagtctttttatgttttgaaaacatctgaaactgataatcaaatatggaaattaggctcatccattattgacagaagaagaacgcaagaagctatgcaacttcattgactgcaagaaactttcacaagaagcaagcaaccacgtggcacaaaacgatcggctgcctgtacaaatggtggttagagtgctttacacagaacagttgcgactgaagaaagctctgtcgggagattcagaagaagggtcgtgggttttgccttctggagtacaaagccgagcggtttcgccaagagacacgtatgcagcgttgaggagagaaaacagagagctgaagctggaaatatcaaggatgagagtgagagtgagcgagttagagaaagaacataatttgatgaaacatgagatgatggagaaatccggtaataatggtggaacgttcttgacgtcactgtccaaaggaattggaaggatcgcgacattcggtggagaaacccggcaaaaggtgaaccggaaatcaaggtcggtgtcggagagaaaatcaagtagaagcggtagataaaaacgtcaccgtttatgtggttgctatctaaacggagacaagtcatgtgtaacaggatgaataatgggccgggaggagtgtgaagtaggcccattaaaaaacaaagaaaggtctcgttttcagcctataaaaacaaggaaaacatgggattaaatggggtccggtccgagccgtctttgtccatatttatcttgataagaaaagaaatatataaaataaagtatttttttaagaaagatattaagacagtaaaaatgtttataagtgttggtcgttgtacacggttaagttgttttgttaactagtgtaaaatttggttttctgataagtttccggaaatagtacgtcacctataactagaaaattataaaaagatttggttaaatctcaccttctaaaatttactaatatagaaagagaagaccacgtggtgtctaactcatacacatacataaaccaacttgtttatagcatactataatattaccaagaaattaggaaactaccttcacttctccgcctcataaataaataatttacatctaaaaaaagaaaaggagtatgattgatgaaagatgaacatgcatcgtgataacattagatggttacaatatcctcaccaacttggaagtgacacaaattatacattactactagttagtactagtagatctgaatctctctctctttcttcttctctaatgccgtaaattgtaagctaactcttcccacatagtgcctcgattctcgcttttgctctctctctctttcctccgacaatg

SEQ ID NO: 26491 - DNA, 3003 bp, Unknown; identical to SEQ ID NO: 26490
  misc_feature (1)..( 3003): 2750-1469P.txt file - cDNA_ID_2714172; gDNA_ID_2213638; Annot_ID_181104

SEQ ID NO: 26492 - DNA, 3000 bp, Unknown; identical to SEQ ID NO: 10220
  misc_feature (1)..( 3000): 2750-1469P.txt file - cDNA_ID_2714183; gDNA_ID_2213638; Annot_ID_132191

SEQ ID NO: 26493 - DNA, 3000 bp, Unknown; identical to SEQ ID NO: 10220
  misc_feature (1)..( 3000): 2750-1469P.txt file - cDNA_ID_2714183; gDNA_ID_2213638; Annot_ID_181095

SEQ ID NO: 26494 - DNA, 3003 bp, Unknown
  misc_feature (1)..( 3003): 2750-1469P.txt file - cDNA_ID_2714191; gDNA_ID_2213638; Annot_ID_132188
gttactgtttacagatatgtatcacgactagcacatcagctggattggatcagattctaccatggatgttctaccataaggttctaggcgtctcaacattcttccttttcgttgaagggaaagctgctactccgagtatttctaaagtgctcgagtctattcctgtgagttgaactacctctcttcgcgtccactgtttattttgttttggctgtatatctctagctctttagtcctgtaggtataaatttgtatttaaggtatgcagttttcgataaatgtagtcccatgtctcttgcagggtgttaaagtaatatacaggacgaaagagcttgaggagaagcaagcgaagaggttagttagttatcccattgcatatttgcgacaaagctatagctcttcaaggcactaaacacatgttttgttgtatattctgaaattgtagcattgttttgttgtattttctactactgatcattttactgtcattcttttttgttttgtttcatcagccggatttggaatgagacctggctttcgtctttcttttataagccctgcaattatgagttatttgtcaaacaatctctcaacatggaaatggctattgtcatggctagggtaagtatttcttttagaccttatttggttcagttttgactcatgtctcatgttacattctcatttttcttgttcttactaaatatcaggatgcgggcatggattggatacttcatcttgacactgatgagctgatatacccagcaggtgctcgtgagtactcactaagacggttgctgcttgatgttcctccaaatgtggatatggttatatttccaaattacgtgagtgatatctcattcacacttcttgcattgcttattttcagctagttttgtgagtctaaagtttcttttatgatctggcctttgctatgaataatgcttttggattttgttgtttaggaaagcagcgtagaaagagatgatatcaaggatccttttacagaggtataattcagtttattactgtctttacgtaagagagtaggtttattaatatttgtttgttatgttagtattacttctgagatatgtgtggtgcaagcaggtgtcaatgttcaagaagaattatgatcatcttccaaaagatacatattttggaatgtacaaagaagcaacacgaaataatccaaattactttttgacttatggtaacggcaaatcagttgctcgggttcaagatcaccttcgtccaaatggagcacacagatggcataattacatgaaaactcccaagtatgtctatcatatattcaaacataactaaattttctattggttgaggaacatgataggactttgttgttactctaatatagaaccatgtaactatcttaaaggagttagcagtggagtggagttccggttaacagcgtagttaattttttctgtttgtgaagccaatttttttttggaaatactaacctgatgattcttgctagtgagatcaaattggaggaggctgctgtcctacactacacatattcaaaattttctgacttaacatccaggcgtgatcgatgtggctgtaagcctacaaaagaagacgtgaaaagatgctttatgttggactttgacagatctgtgagcatcttttcttaaaatctctaaaagtccttagtcatttcttaaaatctctatatttcacttcctcttacccttttatgatgctgtatggatcaacattgtaggcatttataattgcgtcaacagcaactgacgaagaaatgctaagctggtaagagccttagcatcgttcttggttacttgtgaaatagataacttctgacactctttgaacaagtttggtcctattgtgattacaaaaatatctggtcttgatcaaaaagtaatctaccctgtgtaggtaccgtgaacacgttgtgtggggtgacaaagacgtgaagacgaaactccttaggaagggtattctgactcgcatctattcaccaatggtaagaacatactctgcaattcattatacaaaattccaaacacaagtcctggaatgttgagttcttgcaagtcaattgtaaaatattatatacatttgtggtaaaatgcaggttgttatacaagcattgaaagaatctggtgtcttcagctcggttgtctcatcagcttctacaaatctgtcaaagaaaaagttcttatcatcaattcacaaaagcaactcatccaggtctactgcatctgagtcccttccatcaaaggaaagcaagtctgagggcatctctgcaaggcaccttcttgaggctgaatcagccatccctcctttatcgccacctgggatggaacaagctagattttttacagaggattaacaggttttagcacggagctgatgcattcgcttttactgatattgatactggttgcaatatgagtgctgtgtagctttaggatggcaaatgaagtggaacaaagaagagtgaagaaagcggctttgtgtgattcttcctaatcatattgaaaagtcatcgattctcttgtctcattttgctctccctctgcaacttatgatagatgagtttgcagcatttttctgttgtcattgttacttctatgtaagtttattactatgtacagaacttcaaagcacagagccttggactcatttttctacttacatcgatcgccttataactacaccactactgtcatggcctcttcatgggcaagagtaataccaaccttattaattcaagtttaatacaaatcgattaacatgcacctaaccggtaatgactcaacacgtatgttatcatgaggatgacacaatctaggattccaaaaaaaggtatgaagaaagagtcaatggtccataaacgaagatttggcaccaaaaagcggagactcctcaagttatatataaaaagcagagtaagaaggaggttttgatgtgatgattgttgtctgagagagagagaagaagaagatg

SEQ ID NO: 26495 - DNA, 3003 bp, Unknown; identical to SEQ ID NO: 26494
  misc_feature (1)..( 3003): 2750-1469P.txt file - cDNA_ID_2714191; gDNA_ID_2213638; Annot_ID_181092

SEQ ID NO: 26496 - DNA, 2016 bp, Unknown; identical to SEQ ID NO: 10825
  misc_feature (1)..( 2016): 2750-1469P.txt file - cDNA_ID_2714199; gDNA_ID_2214450; Annot_ID_132933

SEQ ID NO: 26497 - DNA, 3003 bp, Unknown
  misc_feature (1)..( 3003): 2750-1469P.txt file - cDNA_ID_2714203; gDNA_ID_2214450; Annot_ID_132932
atgagtaatgttcgagctctctgattggccagccatccaagaaggacctctgtcttgagccatcagacctgctaattggttattgttgtagtctccacgatattgacctcctccctgaaacaataaacaagattacaagcagtgagacccaaaagcaaaaccaaaaagatgtagagtttccatttagatgatttattaatctaaagcagaacatgattttaacggaatcagaactagaagtctagaaatatgatgatagcttgacaatgaaaaaagatgagaagaattattgccagaagaaatcatttctcatatctgattaagaataacaatgatagatgtttgagagaattctcattaaagggtaatctctactcgttgaaggtgtagtgctcggaagaaagcacatagataaagcaacataatttcatactcagtctgcaaaacatcaaacatatcgcctaaaggtcaaaaagtaagagtatcaatacctgatatgttggctgactaggcagatgtggctgtccctgcgggaattgaggtccaccggaagcagggggtctgttgcctgactgcaaaattggctcaaataacgagttctagtcagtcaaaaacttcataattcacaatgagggaaataaaaggaaaccgacaatagctactcataagtcataactctgactcacatgatacatgggttgagaaagatgctgagtaggtgcgccatggtgctgaaatccagtgtttggaccagtttgagcttgtccatattgatgatgatatggtctagactgttgctgtgccacatgaggacctccaccagagtgcattggttgttgttgcaactgagtggaggaagctggtatatcaagatgatgaaaaggaggttgctgggatgttggatgatgggaagccggaggaggcgcgttttgaacttgagaagactgtggatgagacatagaagtgacagcaggattcagatgtccctgacgctggggatgcgaaaaacgaggctgtgattgagcactatttgcagaaacagaaggcggtggtggaggcataggcattggttgtggtgttgggtgttttcgaatcggggcttgtggctgcatcgtattggctggctcatgtacactgccaccgccttggaaagaagacatatgagcttgaacgtttggctttggcgggatagattgatgagattgttgaggttgttgtacagcttgtggctcaactttcggagtctaatagaaacagatttttgtaaaatttaagatgcttgaaatgaaatctattaacaaaatgacttaagaggacgcaagtacataccacttgaggaggctgaaccattccgagcatgatttgtgcctggcatttcaacaaacatagcatcatcatcaccatatacaaattctgaaatctatttgtaaatagaggcataaacctaaagattgttcatatctggaaactaacacaaaaccctaattgttaacctacctgcttcttcaacaatactaaacccaaactagtccaatcaatttactcaagtaagaagctccaaatcagaattcctcattgcttataagaccacacggattgcagatttagaagatggaaaagattagcgaagtgaagaagaacctggaaaagagccttcgtcaaaagagggttccgaatcagaatctccctcgcttgttgatggttttgatcaatcaacgtctgcacaattagattcgactgatcaaaaaaacagaattcgaaaaaaagaagaagaaatcaattgttctctattcaaatccgtaaaggatagtgttatagctgataatcggaaaagtatagaaaagaaagaagagagaaccttcatttgagacataatatcatagagctgacttttagtcattccggcgagatttgccggtaaacctccgtctccgccgatctgcttacccgccatggttctcgtcggtaatcgctaccgagcttaacctgtgtgttaaagacgcaacacaagagtacttgtgaacaaacctgggccaagtataatacgggcccaattagtataattccggcccatttaaaattctagacttattagtctatggcgcctgtagatcaactctttttttggtcaaaaatttaccatttttctcaaaacaaaacacaacaataaaatatagagatgcattagatatgtacgttaaatatatttatatgaaattattaatatgtttctttacatgtaccatgttaattgtacacgtaacatgcatgtatattgtataatatgtcttttggaaaagcaaaagcttataaacacaagtttacattagagagaagcgtgtgacacggttttggcctcttcactttcttgttgctccagaaatcttctttttatcttgtctccatccataattttcatacgaagatagttttctttatttcatccataatattcaatatatattggattcttgcctttggtaagtcggtaaacatcatcaactttatttttattctttcaggtaaaaatagagtcttccactacattcatcttccacaagttttgctaattttaagttttgggtaagaataactaacccatgtatatttcacaattcattcataacaaatcaaatgattatgagatatacttatgggttatatatctcaagggattcagtgatctttaaacttggcacttggtataatttcagcatgccctttaaagaatgagtaggcgtataatcttgtctcaagaaaattataagaagtccaaatttataaacatgtattgagacaattaaaagattagaattaaaaaaaagaaaaaaaaaagaaaaagagacgcactcaactcaactttctattttttatttttgtaaaactacaaactttgcttttgattttgtagccgaggtagtctctctctctccatttgataggaagaagaagaaagatacaaaaagataaaagaaagagagaaaaagagttttaattaaaatg

SEQ ID NO: 26498 - DNA, 3000 bp, Unknown; identical to SEQ ID NO: 10806
  misc_feature (1)..( 3000): 2750-1469P.txt file - cDNA_ID_2714215; gDNA_ID_2214450; Annot_ID_132929

SEQ ID NO: 26499 - DNA, 3000 bp, Unknown; identical to SEQ ID NO: 10806
  misc_feature (1)..( 3000): 2750-1469P.txt file - cDNA_ID_2714215; gDNA_ID_2214450; Annot_ID_182447

SEQ ID NO: 26500 - DNA, 3000 bp, Unknown; identical to SEQ ID NO: 10807
  misc_feature (1)..( 3000): 2750-1469P.txt file - cDNA_ID_2714219; gDNA_ID_2214450; Annot_ID_132928

SEQ ID NO: 26501 - DNA, 3000 bp, Unknown; identical to SEQ ID NO: 10807
  misc_feature (1)..( 3000): 2750-1469P.txt file - cDNA_ID_2714219; gDNA_ID_2214450; Annot_ID_182446

SEQ ID NO: 26502 - DNA, 3000 bp, Unknown; identical to SEQ ID NO: 10808
  misc_feature (1)..( 3000): 2750-1469P.txt file - cDNA_ID_2714223; gDNA_ID_2214450; Annot_ID_132927

SEQ ID NO: 26503 - DNA, 3000 bp, Unknown
  misc_feature (1)..( 3000): 2750-1469P.txt file - cDNA_ID_2714233; gDNA_ID_2214450; Annot_ID_132923
ggatacggacaatgacaatcagtggcgattattttggcgtttggggagttaaggaaagatttgaagttagggttcttcaagtactggcagatacaatgctgttgctccttcaccttgctgcaacacagatccgatggctcagaccctttcattatggtctccaagcatggactcagctgcgcaggattacatggatctactgcagcgactctgttttcttgggcaacaattaaaatgagaaggattgtacaagtgaaaaacactggttttgtgcaagaacccttcattgtctcactaagttatagaaagaagaagaagatatttggtttggagtttaaagtgggtttctctcgttctatttatagaagaaaatgtctttgagtgagtcacgttactcaaacgagagtttgtggttgcaggagatctcgatatgtctaaaagagattaacttttttctaaaaggctcggacaaagcataaaaacacctaggcaccattttggagaagttatgaaaccacgtgtaaccaaaatagatgtcagctttcggctacccccagtgaaggtatatgaatttgttgacacttaaacaaagtaatgagaacaccttcataattatatattttacttcattactattgtactaagcacaaaatatgacttaaatttctaattatattcaaaaggcagaacttacagccaacatggaccaaaaactgatctgtttccattcactaggcagttgcttcctttcaaaatcttcaatgtagtgcataagtctgtggcccaaaaccaagaccaattagagttcattgatcacaatgttaaacatatatcaggccatgaaagaataaaagaagataagctgcagtatatattaagtttactcagacacttttctagaatccatattctccatgtggtatcagccaccaaggttttcatacttagcacataatgaataggataaacaaagcccaagacacatgattaagcaagcaatcacacgcttaaagattaaatagtctctaacaagcacagtgttagaaaatctctaaagtactaaataatttgtatatccatttaatcaagttatacaagtagaaaatgcaaaatgtgacaaaaaaataagagactgtaaaatacagaagaaaatgttctctttgcgagtaccgtatggtgcgaaatccaaaacttaccatgtgttaatcactttcagagtaagaataagacgagcgattagctttcagggcatcagtcttaatattgacatcagacaagccaacatcattgaaaccatcaaactctacatcggaatcagacgaatcaccatctctcaagtcatcactctcaatatctgaatcagacgaatcaccatggccatcactctcaatatcagagtcaatatcgtcaaccttatgtgcatcgttaactggatacttacgcaccacatccatcacttcatcatcactatcatcgtgcttccctgataacttcctaatcatcaatgcctcaaataaatcaggtatagcatcctcatttccatcatccaaaaagctttgaattctttttttcagctctgaaataccaattggattaagaaagtaagcaaaattataatctttacatgaaaaattatgagctgatcagctaactctgtcattgcaaaattctcttccttttcattcaaaactgtacattttcttgagaaccaaacaaaagaagttgagttgaagaaatgtcaccttctttagaaagaacctcttcagttctgaaaccacgcgacgagtcggactcggaagagaagaagacgaaccgggaaatagctcgttcgaagagaggaacaacaacacgagggttgttgattctcaaatggcggaaatttgcgggtgagtgaaggatatttcgagccagtaaactgggaactctctgcagaaatcgtctcatgggattcgcctcaagactagggtttatcagaggattagggatttgaatcaagagccaatagtttttttttttaatctgttaacagattaaccgctcttcttcgtttccggttttcataactgatcagaccggatcggcccgagatgacctgtccgttttcattgtcgtttatggaacagcgcacatacaggcccagcccattctagcccaaacttcaattttcgctcaaatttggacgactaatcagttatgtgacgcaccaaatattttcgacgatttatcaccttttattattcctttaatctcgatccagcaaatccggaccaatattctttggatacttgtgtgtggcagactcttttatgtataaaatatacagatttataattttgtggcggtataaacaaaaatatactactaacctgtgacttgtgatcctctaatgtttctttgttttttcatacctcgaaataaataaaaattgaaatacctctgacaaagaaaaaaaagtaaaagttgacacatgagagcttttctatttatacaagcaaaagacaataaatatcctcaaatctatcttcgtttctgaccaaaaaagtgaacccaaagcaattttttttttttttaatcaagtcaaatcttgatactttgataggaagtaagaaaaaaaaacagaggggtccaactctacaaagaccggtgagaatctattatagctacaaatacctattttacactcacatctcaaaatttcaaacatagcaacagtgctaaaagcctaaaactctaaagtaaagtataaaccacacatttacatgtgagtatgtgacatgtgaaagaaaatatctaatttggttacttgtagacttcaaacacaaactagagaataaatgaaaaagtagaatttgattagttaacgtactaattacttaaattagtttcactaatccaacttaagaaagccctttcacttaccttcttcctcgccctgtgtctccattatcctctatctctcttttgttttttctctctctcacagagaaaaagaacacaatg

SEQ ID NO: 26504 - DNA, 3000 bp, Unknown; identical to SEQ ID NO: 26503
  misc_feature (1)..( 3000): 2750-1469P.txt file - cDNA_ID_2714233; gDNA_ID_2214450; Annot_ID_182441

SEQ ID NO: 26505 - DNA, 3003 bp, Unknown
  misc_feature (1)..( 3003): 2750-1469P.txt file - cDNA_ID_2714237; gDNA_ID_2214450; Annot_ID_132922
aggaaaaaaagttaactgatgaattagaaagttgcagcatcattgggaccagttttgcatttacggccaagagctacccacacgaccaccactacgattttcatgtactgctagtattgatttattagtagtttaatacagctcatttagtcacttgttaaaaaatattatactaatcttagtatgttaatctacacttaacgtgccttcaatacaataaaaagaatataattggataccaaaaattagagaaatggacccagtggctattaacttctcacactggagagagagtgacatcaaactacaaaccaattttattttattttttttccaaaacggaactgaaagttgtttgaaaatccctcattggctcttcttctacatttatatttcttttactatacaatatcttagctctctgatacaactattaaatgcttaatatatgaataatacgtggtttagagtaactaacaaacgtaaataaaataacaatatttctccctactcgtggcaacataagctgaacagagccaagtacaaacaagttgactttctgctacaaactttgactatcccgacaagaaaaaaccttaagattgatcaggaaggatctcatcggttcttctatcttgtctctgaccattcttcttcttcttcttctcaacaacacttctgataatttaacattgcatctcctactcattctcatcgtcttcgtcttcaatcttctacacgaatgtcgcagtgaaattttttgactctttcagcttcttctcgccatctctaatggcgatcccttccttcctctctccaaatttacacttttacccttctaccaaactcgttccgagtcgactcactctttcctcatcctccttcgtttgttgtttatcagtagaccgccaaattaaccattcctccgtctccaacgaaacctccggcttacgagttgtcatatccgccggaggcaccgccggacacatctcttcagccttagcgatcggagacgagctaaaatcagccgacccacttgctcgaatcctcttcatcggattcccaaacagtatggagagcacgacggttccatccgccggattcgatttctcaacaatctccaccgtcggatcatcatcgtcccgaccattcctctgtttcacctctttcctcaaattccctctccgcttgatccaatccaccttcgaatcctacaaaatcctccgcgaactaaaaccacaaatcgtcatcggcaccggaggacacgcctcttttccggtctgtttcgccgccgtgatctcaagaactaaattcgtaatccaagaacaagattcaatccctggaaccactaactggattctgtctttcttcgccgatacaatcttcgctcctttcaactgtacagtcactaacctccccaaacgagtcgccgcgaagtgtgtcgtctacgggaacccgataagacaaacgcttagacgatactcgtcgaaaggagcggcgcgtgtgagcttcttcggacagtgggctggagctgtgtcggaaccgaaagttgtgcttttgcttggtgggtctttaggagccaatgccattaacatagctttgcttaactgttactcgcagttgttgtctgaacatgagaactggttctttgtttggcaaactggtgttgaagcttttgatgaaatggatagtcttgttagaagtcatcctcgtctctttctatctccgtgagttatacaacaacatttttaactgtttagctgcttttgtattgactaataactcaaaatgtgttttattatgtggtataaggtttttgaggtcgataggtgtggcgtatgcggctgcagatttggttatctcgagagctggtgcaatgacttgctcagagattatggctttaggcaaaccttctattctggtatttgaaatctataagctgattcatcgaatttgctaatggagtgtgttgtttcttgttttaaaacattgaatgttcttttgttttgttttttaagataccatcaccgcatagcgatgaaggggatcaagtaaggaatgcttctttaatggcggacattgttggatcaaagttaataacagaagaggagctagatacgatcactcttagagctgccatggaagatattctaggtgactaaaaactctacaaagtagaaaacactcacaaatttcaactctcattatctcattgagttggttccaaatgatagggaatgaagaactgatgatggaaatgagcgagcgggcattcaaagctgcgaaagcggacgctgcatcagatgttgctaaacacattatttctattatcaaatccaaagataagtaggtatgttgtatgaaccgtgttacagattacactagtgttgtgaaacaaagtatgtgtatgattgatgagcctcttagtagattttgaggaaacattcttgattgtgttggctaatttggcctagcaatagagagtgaataaaaaaaaatccttatatttggaaatagttgcgtttcttcttcctgttatctttactacttgtatatgaatcaaaactgatcctttgcatcttcttcttaactcaattatctatccgagtccggaaccttctcagctacgcagagtctctcttgagaatgtaactggatcagtgtatgtaaatgaagttaagctattttaacacctagatcaacaacccaaacattgcgtataagttatctatttcgtggacagttatataaacaaaatgttagttaagtacacgctttggaatcgtaaagatattttatattttggataaaattgcaccgacattttatccaatttcactaatttaagtcattttttctccattttgaaattgaaaatcttaaaccacaaaaattagaaatggagcggaaagcgactgagtaagatctttcaccttctatataaaccttagttctgctccggcgacatcgtcgggataccgctagtgattaacggtggttatg

SEQ ID NO: 26506 - DNA, 3003 bp, Unknown
  misc_feature (1)..( 3003): 2750-1469P.txt file - cDNA_ID_2714241; gDNA_ID_2214450; Annot_ID_132921
atcatgaggttttcggtaaggaggactctggcttttaggcagaccgagtttcacccaccattcttcattccccgttggccaccaaggcggaggcgtccctttctccaacggatacttcctttgaggaggatcacaatgttgcatcaaagaagataacaaagaccctaaagtagcatcttgcaaatcctggagaacaaactgtgaattcctattcccatcagatttcccaaacgctaaacactcctcttcgtatttagcaatagcagcaggaccgttcttatcaaacttcactttctctttccaccaagctcttatattgtcagaggaaccactcacaggcttgcccttttccggtattataccatagacaaacccgcgaactttgcagacttccataagcttcaacatgtacttaaggataccatcttgagctctagacattttcttcctctgagcttgatcagagattttcttaggtgtctccttcgtttgagctccttgagagccagctttttgtcgctctttgattcttttaagcctgacacgatctttccacatccgtctctcaaggtcgtcagcatcaatctcttcatcactcacatcaatctcagcaacattatcactagctaaatcatcaggctcattctccatcctatccacaataagcaaactctcaaaaattaacagctttctaaagtttttgatttgataaacaaaacaaaatccatatatatcattatcttatgttgtcaatacagaggaaaacccaagtattcattgattcatcagctgattgagattgaactaatgattcatataaaccctaaattcacaagcatgaaagggaaattaatgaaattgaatcaaatgttcttcacctgatgtctgctacggacatagcaagatcgcccatttaaacaaaatcaatcaaaaacctttaacaacgataatctgaagcgccgaaattaaagaaatttagggtttttattctttctcctgtcgttctcaggggaagaagagagtaaaaaatggctgcgaattgtggagaggcaaagttttgatttagtcggaccaaagccaaagtattgttgtggcaataacccaacccccaaaggccaaatttttttttttttttttgttgttgcaaaaaccaagttgttttcttcggtttctgtttttttttttctttaatgtaaaaaaatattttgttactttatatctgttgtcgagtcaatctctctttctgtctctcgttttttttttctcaacacggatttttattggctcaacaaatagaataatagtatttattttgagtaattagttacgaggaataccaatgaagtttattgtatttaactgtccggattagtaaaaaaaactcaattttgccattaacctattcttttccccataaattaaagtcttttgggttttaatttggctttaaataaaaagcacattttcttaacttttttgggtttaaaatttgcataatgctaaatgctaacgtataccactcaatagcaaattgttgtcctacatagtgctaaatgctataactcaagcaaactgttcatcaagtcacttgacttctatcaaaacatgatgcatatggcagatagcacataggtaaacataattaaaattattttgaataaatttctattctaaacttttaattagacacacatttatatttttgtaatgttttttatgtttattttacaaacacactattcattttgaatgttttaatccaattattgtaagcaatctcaaaacaagaatagtttcatgctcattaagagattaagagaaatataaagataaaatttgatagctcatgaatgagttttattgtccaaggaaagaaaagaactttagattgtcaccaaaattagtaagactttgatgcaatcataaaatgggaaaaaaaggagagtagcctctttgacaactctctgagttaatcacattaattcacactataaatataagagattacttgtttagataacctaattacatgggcttctagacaatgataagcctttgaactataaaccatatgaattaaaccttttttatggaccctctaataattattacgttcaactttactcatttatcctagtcattttccacatccgatccaacttaaaaataatggtatcatttttctgaaccaccagtgtataaaggagaaggaaaaaaagttaactgatgaattagaaagttgcagcatcattgggaccagttttgcatttacggccaagagctacccacacgaccaccactacgattttcatgtactgctagtattgatttattagtagtttaatacagctcatttagtcacttgttaaaaaatattatactaatcttagtatgttaatctacacttaacgtgccttcaatacaataaaaagaatataattggataccaaaaattagagaaatggacccagtggctattaacttctcacactggagagagagtgacatcaaactacaaaccaattttattttattttttttccaaaacggaactgaaagttgtttgaaaatccctcattggctcttcttctacatttatatttcttttactatacaatatcttagctctctgatacaactattaaatgcttaatatatgaataatacgtggtttagagtaactaacaaacgtaaataaaataacaatatttctccctactcgtggcaacataagctgaacagagccaagtacaaacaagttgactttctgctacaaactttgactatcccgacaagaaaaaaccttaagattgatcaggaaggatctcatcggttcttctatcttgtctctgaccattcttcttcttcttcttctcaacaacacttctgataatttaacattgcatctcctactcattctcatcgtcttcgtcttcaatcttctacacgaatgtcgcagtgaaattttttgactctttcagcttcttctcgccatctctaatg

SEQ ID NO: 26507 - DNA, 3003 bp, Unknown; identical to SEQ ID NO: 26506
  misc_feature (1)..( 3003): 2750-1469P.txt file - cDNA_ID_2714241; gDNA_ID_2214450; Annot_ID_182439

SEQ ID NO: 26508 - DNA, 3000 bp, Unknown; identical to SEQ ID NO: 10811
  misc_feature (1)..( 3000): 2750-1469P.txt file - cDNA_ID_2714244; gDNA_ID_2214450; Annot_ID_132920

SEQ ID NO: 26509 - DNA, 3003 bp, Unknown
  misc_feature (1)..( 3003): 2750-1469P.txt file - cDNA_ID_2714248; gDNA_ID_2214450; Annot_ID_132919
gttattatgcagatgtatgtcaatgaaggtttagtcgtacaggcaaaagctctgtttgagaggttccagttggattgtgtgctttcgtcaacgacacttgcagcagttattgatgtctatgctgaaaagggactgtgggttgaagcggagactgtgttctatgggaaaagaaacatgtcaggccagaggaatgatgttttggagtacaatgtcatgatcaaggcttatggtaaggccaaacttcatgagaaagcactttctctcttcaaagggatgaagaaccaagggacttggcctgatgagtgcacttacaattccctattccagatgcttgctggggttgatttagtggacgaagcccagcggatcttggctgaaatgctggattcgggctgtaaacctggatgcaagacctatgctgctatgatagctagctatgtgcggcttggcctgttgtctgatgcagttgacctgtacgaggcaatggaaaaaacaggggtgaaaccgaatgaagttgtttatggttccttaattaatgggtttgctgagagtggaatggtcgaagaagcgattcaatactttagaatgatggaagaacatggcgttcagtccaatcatatcgttctgacttcccttatcaaggcttatagcaaagtggggtgtcttgaagaagctaggagagtgtatgacaaaatgaaggattcagaaggtggcccagatgttgctgcatcaaacagcatgctaagtctgtgtgcagatcttggcatagtttctgaagcagaatccattttcaatgctctcagagaaaaaggcacatgtgatgttatttcgtttgcaacaatgatgtacttgtacaagggcatgggcatgctcgacgaggctattgaagtggctgaagaaatgagagagtctggtctactaagtgactgcacttcatttaatcaggttatggcttgctacgctgctgatgggcagttaagtgaatgctgtgaactgtttcatgagatgttagttgaaagaaagctcttgctggattggggaacatttaaaacgctcttcacgctcttgaagaaaggtggggtgccaagtgaagctgtgtcgcagctacaaaccgcatacaatgaagctaaaccactggcaacaccagcaatcactgcaactctgttctcagccatgggtttgtatgcatatgcgctggaatcatgccaagagctcacaagtggtgaaattcctcgcgagcattttgcatacaacgcagtgatatacacttatagtgcatcaggagacattgacatggccctaaaggcatacatgagaatgcaggaaaaaggtctagaaccagatattgtcacgcaagcctaccttgttgggatatacgggaaagcgggaatggtggaaggtgtgaagagggtacatagccggctgacgtttggggagcttgaaccaagccaatcgttgtttaaagcagttagagatgcttatgtgagtgcaaacagacaggacttggctgatgtggtgaagaaagagatgagcattgcttttgaagctgaaagggagtgtagttcaagatctggagaagaagaagaagacgatgaagaggaaaattctgaagaagacgaggcattttgaagtgtagccacagatgtatgtaagaaatattgtagaatataggatttagtggaaatggactgtacagtttcacagaagccaaaggaaatatgcatacttaagcctcagattgatctctggtaaagaaatgtgtatcttaaaactgttatagaaagaaaaaaaaaggttccacagggtcaaatctataaaagcgagcacctttggctatggttttggtagaggaattagcatacgctccttacaacaatagattgatttgcatcatcgggttggtcttctgttggttttggtctctggattgaacatctttctcctgtcttgcttgctcttattttcaattgtatagcatcaaagcccatgaaaagagccagatgttctggaattgattccaatttggaatcttgtcagttactggtgatgaatatcaacatggaagatatgaaacagagtagccagcaaattccttccattcggaacaaagagtctctcagcttcagtcaaagtatatcagttattgatctcaagaaagtaatagtagtgagcaatgaagatgatgatggagctctagagttgaagaacagaggagtggaacgaaccagtggagaactcttgaagaccacagtgtcaatgtgtttattgttgtctttgtctttctctaaaagttgtaaaaaaaaagggtgtgaagctaaagctaaatggtatgtaagcaatgttttgcaattttaaatttacaaaataacactcggagtttctgaaagtttaattttgacccataatatttgatatttgaggcattgtcctggaattaaaaccaaattgaaactccttcgcgtgtgttttctgctgcatttttacctcttagcgtctccggcgaaaacccactacgactgagtatggcgctcgaaatcgaagctcgagagtaagatttcgctttctcttacaaaccctagttttcgtttagtgtcactgatatgaattgtgctccaagaaccatcgtttacgaatgctcagatggatcttaggttacatgtttggagaaaacatcttgaatgttggtttttttatatcctccatactaaagttgtggtttttaaatctacccataatttgttttagcttggttcttctaaagctaattgcttctgaatatctagattcctccgtagctattcttcgtttaaattaacgtcgtatacgaaaatttgagggagatcatcgttagagtgttttgattctttgcaatgcgtctcgaggaaaaatccaatttgtataaatttgaactcttgttaattctcggcttggattgaaaccattgacagtattattagccattttgttagtaatattggatggagaacgttttgatgctatatg

SEQ ID NO: 26510 - DNA, 3000 bp, Unknown; identical to SEQ ID NO: 10804
  misc_feature (1)..( 3000): 2750-1469P.txt file - cDNA_ID_2714260; gDNA_ID_2214450; Annot_ID_132915

SEQ ID NO: 26511 - DNA, 3000 bp, Unknown; identical to SEQ ID NO: 10804
  misc_feature (1)..( 3000): 2750-1469P.txt file - cDNA_ID_2714260; gDNA_ID_2214450; Annot_ID_182432

SEQ ID NO: 26512 - DNA, 3003 bp, Unknown
  misc_feature (1)..( 3003): 2750-1469P.txt file - cDNA_ID_2714264; gDNA_ID_2214450; Annot_ID_132914
tcactaagcttagtgcgtgaacttgaaaagatgatgacgaaacataattaaattgcaccaagacagacttaacgtcaattgaggcatttaaaacggttactttttgtttctataaacagcatagaatctacatcaatttattcattactatgtcaaaaaagaaaattctgagaaaactgtgagatacattttttgtccttaattcactaatatataaataaaaatacttacgggaatgttttctttaaaattttgcattagaacaataaaaaaactatccaaagtggtttaaagcaatttctttgattcattttaaacgctagcaaccgcaaactcaacatttgcatatggtagtaggagaaccaatcaagttctaaatcaattttcatttttcgatcaaatatatcaaaagtctttttggtcatataattaaaactgtatttttattttttttaataaatagtatagcgtttcgatcttttatacttgtatctcttttgggaataaaagaagaatagcaattgtcacggcaattaaggaccattaactttttatattttgagaatgactagaaatagcttaaggtgtcaattctaaagaaaagacaaatgagaatttaactgaatattcacttgaaaagcacgtggttaattgtatattgcagtgtccggtgaatcttactaagatagagctcaattaattaacgagttagataattagtactccgttatcttgcttttgatgaaactctattttcgtgaagagacaccgttatctcttcgatcattcaacatatctatcactatatacatatgtaattaattagtttatatagtggttacgacttacaacttacaatagagatagctatgtatgtcatatatgcacaaaatatatgagtttattatagtatatgattaatgtcaaaatatggacaaccacacgtatgcatgtatgatttatgtaataggtaatcattgtatcttctttgaacttattaaatggtgtgagctatgagccaatagttgaccaacacgaatatttatgatttttccagtgatcaactctatagtgtccacacgattgtgaggttcagaaaccatcaggtaatttttttttaatgtatcattaattaaggtaactctttatgtgtcttggaaattgttttccaccatagaagatgattatttgttgaaataatttatacgtaattttttttaaaaattaaactttacattttaatttttatatactggaatgataaatacggtaaaaaacaaaaatatactattaccgtggttttcatattcatccccccccccattcgacttaaatatgttatctacttttccaactatgacacttctcaaaaatctattttatagtataaaggatctgtattccataaaataaaacaagaaaaaaggaaaacgattggaggttttaagtgctcaagggtagttggctaacaattcaattttgggcggcttgagatttgtccgaaaacataagaaaagatttttgatttggaataaatcttatagtaacattaaaacatacaaaaaaaaaaaaaaaagtaaatggggcttgagttttgtccgaaaacataagaaaatatttttgatttggtataaatcttagtaacatttaaacaaacaaaaaaagaagaagtgaatggagagtttctatttactacacgttatgtttggtttaagccaataaaaaaaagcgtttacgtaaccataaaacatagcgtgtgtgattttgctcagaaaagaagagtttaataggccaaagcagcaagattaaaagttaaaagttaaaaccgtaaaagaacattcgtttctcccgggaggtttgactaatttgactgtaccacgtgaaatggacgcgcgaatgataatgcgtctagtgacgcatgccacgtcatagttatcctatcagaaagcaaaacaaaaaaaacaatctttcagtttttgtttttatgtcgtaaaaagaatttggtgcattccaattggtgacagccacacattttttttggtgctgggaccacttccccacctatcacttttctcctctatctcatactcctccttcgttaaatcattgaaaaaaatcttgctaatgtgttttaattagtttaagtttctatatctatgcacgctagtttaggaattaagtatggcattattttgttgaatgcgtcgaggtggttatccttttttaagaatccacttataattttttttctttaagaacccacttatacataaaatgatacgtgaaaaaatatatggtctcattgtctatctacacatctttataagtcgaaactcataaccaccatccattatgtgttgtctagattatttttttttcgctttcaaatcgcatggttaaatatgatctgagtaaataccactgaaaaatatttagaatgaaacatcctaatcatccacaaatttatttttgccttggtttcacatatactgtgcccaatctctaatacataatattttgatctgtttaaaatattttcttattgtccggatctaaaagggtatccctagtgttgatataggccaaggcccatttatattctatagcacgtgaacgcccaaagttagtggttcacaaatcacaaatcaaaccgcaaatcatgtaaaccacacatcaaaccgatttggtcaacaatatcctttctcttcccaataatttttgactcatcagagaataatttggtcttcgtctctgcgcgcgtctctgtctgtctctttcagattcaactggagcaagtacgaaacataaatatcaataaattaaaggaaaaaaaataacagtagagaagaagaacatgttttcaactcctcgggagcaaaaaaaataattcagcaagagaaacggcgaataaggtggaaatgatttgacgaagaaacgcttggctgagagtaaaatcggaaaaacaaaatctgtaatttattattatcagcctctaaatcaatg

SEQ ID NO: 26513 - DNA, 3003 bp, Unknown; identical to SEQ ID NO: 26512
  misc_feature (1)..( 3003): 2750-1469P.txt file - cDNA_ID_2714264; gDNA_ID_2214450; Annot_ID_182431

SEQ ID NO: 26514 - DNA, 3000 bp, Unknown; identical to SEQ ID NO: 10802
  misc_feature (1)..( 3000): 2750-1469P.txt file - cDNA_ID_2714268; gDNA_ID_2214450; Annot_ID_132913

SEQ ID NO: 26515 - DNA, 3000 bp, Unknown; identical to SEQ ID NO: 10801
  misc_feature (1)..( 3000): 2750-1469P.txt file - cDNA_ID_2714272; gDNA_ID_2214450; Annot_ID_132912

SEQ ID NO: 26516 - DNA, 3000 bp, Unknown; identical to SEQ ID NO: 10001
  misc_feature (1)..( 3000): 2750-1469P.txt file - cDNA_ID_2714302; gDNA_ID_2213359; Annot_ID_131834

SEQ ID NO: 26517 - DNA, 3000 bp, Unknown; identical to SEQ ID NO: 10002
  misc_feature (1)..( 3000): 2750-1469P.txt file - cDNA_ID_2714310; gDNA_ID_2213359; Annot_ID_180734

SEQ ID NO: 26518 - DNA, 3000 bp, Unknown; identical to SEQ ID NO: 10002
  misc_feature (1)..( 3000): 2750-1469P.txt file - cDNA_ID_2714310; gDNA_ID_2213359; Annot_ID_131832

SEQ ID NO: 26519 - DNA, 3003 bp, Unknown
  misc_feature (1)..( 3003): 2750-1469P.txt file - cDNA_ID_2714316; gDNA_ID_2213359; Annot_ID_180731
aatgctgatttggttggaaaatgttccaatctgtggatccaacatttcaaatagaacaactccataataatctttttcaaagtaaaaggtgaactcagagcaagaaaaagaaaataattccagtcaaccgaaggtgagttttatcaaggaaaggcttccacagcaaaattttgactagcgagttgcttgcgcctgtgtgtgttccaagagctgattcactaacttgtatgttcgtcctgataagcctttggtgtggtttatcaactgctcatgcctgcataaagcggaaacaagattagattgtagaatacgaatgatatcatagatttaagcttattctacttacacgttgggctgagtaggctccatgattacagttcctgactcagaatcaatcttggcatcaagctttgaggtgcggattaggttcacaatccatctctcggcctcctcatagttcagattcaatttttcagcaagtaccctgacaagggaaatataggctcgacatgagtacaaagttaaaccacaagaccgcaacaattcttctcaacttaaatagctggatatggcaattttcatgtgttgggaaagataaggaatagagaaaattccaaacattgagcaatccggagagcagagttatgtgtaaacatatacaaccaaatgtgagaacttaccccatgtcaatcctttgatgaattttgcaataggtttcaaagacgaataggcgggcattttcaagaaattcatctctcagtggtacagttgaaaagtttccatcctcaactcgcttgccaaggaatggatcattcacaatgacctacatcatgttaaaatgtcagagtattgattgcacagttctgcacaaacaaaaatatctatacatgtggatgagttacctcttcacactctttcatcttcttttgagccccatcaaagtcataattgacaaacacacatgccaggaactcgataattggatctttgtaggagtagtgctcttgctgaatgaccttaatgaattctttcaattgtggtcttctccttttgttgacaatgaaagcagttgccaagtagcgcagcaagtgtggagcactagtttggatggcattcagatacctgaaaaagtaaatcaaattagtatacagaactgcagcatgaaaacaaagtgaattatttttcagcaaatgcccatacacaaagcacaatcttaagaataggtctggatgaaaagaaggagaagactctaaaactagtgactgctaattacttgtaggcacatcaggactaacattaactataaacaaagttctacacacaaacaccacctatacataacttcatcgcatctagatcatgcttatcttaaaacgcaaggaaatagatggtgatgaaaggtataaagaagagatgcagataacagagaggtagaggcttacttgtcttggttaaaaagatcaatgatctgtgtccttccattatcatggttaaaaaagatatacagaccccaatgcatcaaccaaatcctgttctgcacctggtttaacggcgatgaaaaactctgaaaaaacaaatggtagttagcatatatactctcacatctatattgatttcaaaggtcgcaaactagaagaagttttaaatactaacctttgagtcaataatctctttgagacggttaagctcttcaagagcaatatcccagttttgcatcaatatttcagatgcgagctttccccacaaggcactcaaactcctctcaaggttagagcacagggtcctgtactggtaaagataatcagcagcaccagaatagttgccacattcaaactgaaacttggcgtactggtacaaagcctcaatctggtctggaccaatctgataagacaccaagccatataagatttgtgttccacaatacacaaacaaaaccaaatctggataacatttcacaaaattaaacaacttaatcatccaaatcacaacctggtagcgttccttgagcatttggagattgtactgcttgtcagctcttagctcctgcacagcgttagggttcaaaagaaaagacacgagtggtgcagcagcctcctccaaagatttgagcctagcgacaacctctgttcttctctccaccatttctatcaccacaaatttcaacattcatcatcaaacaaacaaaccagtacacaaaaacgcaaattcacagacatatccagagaggaatacacaagaataccttgaggagcgtcttcagtgtggtagagactcttgtgaatatccatggcgtaatcaaccatgttcgtctggttcaaaagctggattttagacttcaggatctgctcatcagggtaaagctgacgctcttgaaggaactcgaatataggaaacaccaagtgtctgtccaggttaggcgctattagtggcgtcaggtcatagttctgtttgctttcctccatcgtcgctaatctctcaatctccgccgcttcccgcactggcaaaatcttcttaagacggcagagatgaagtttcagagacgacgaggtaaaaaatcctgtatattgaaattagggttttctcgaatatgagctttcaatatttataaattcgcccctttacttcttatatattgttgtttaccccacaaggtatttttatctccaaaacgataacttagccgtcgttatctgatcggccggtaccggaggggttaagaaaaaataataattaaatgttttttgtggagaggcgcacggtaagaagctttattcgtttggcgtatgttagtagtctggacttctttctgtaccgcctgtgtccactaacttgcgcatgttcgtctttaacctttcgccctcttcctctatcatactggattagggttcttcttcgagacgaactctttttctttctcgtgacgaatgtttctgtctagaagcttttaaggattaagactctccaaaattttgacgccgtgttattctcttcccgtctctcatg

SEQ ID NO: 26520 - DNA, 3003 bp, Unknown; identical to SEQ ID NO: 26519
  misc_feature (1)..( 3003): 2750-1469P.txt file - cDNA_ID_2714316; gDNA_ID_2213359; Annot_ID_131829

SEQ ID NO: 26521 - DNA, 3000 bp, Unknown; identical to SEQ ID NO: 10011
  misc_feature (1)..( 3000): 2750-1469P.txt file - cDNA_ID_2714320; gDNA_ID_2213359; Annot_ID_131828

SEQ ID NO: 26522 - DNA, 3003 bp, Unknown
  misc_feature (1)..( 3003): 2750-1469P.txt file - cDNA_ID_2714324; gDNA_ID_2213359; Annot_ID_131827
cataatttaacccttgtggtctgaaatttgtactaattctttttgttcttactcattttctaacctgctatgctgtaagaaactatttaaacctaggtaagttgagataactaattttgtataaattttaagagtctgattacacacgacttcagttttaaagacaggaagtataattttacttgttattgataaaggcattacaattaccaacacgttaacagtaaagtcttgttttaatgaagtcattacttgtaaatgataagtcattacagtccctcaaactttatttattgtataatgaatgatagtaccaatatctatattagttttcaaatataaatataccattcccttgatagaatattggttcggctcaataaaagttaatatcatacttaggctgcttgttgggatagaacaatccccaaaacttctcaacataaggaggagtcggcttttgattctcgtcataaatggcaaataaatatgtctcgatttctttccctggtctcttcggtgtcccattcttcacatgcttaatcaaattattgttataaattctcgcattctctatgtttgtatcggttcctcctcccgttggccatccagtctccgccacaactatttccaatgatgcgccacccgatttctctagagccgagtacatcgcatcgagcatcgcatcaaataggttttggtaagatctaggagggtccgaaacgattcctgaaggagccgtgaagagagcgtaatcgagccggatttggcctacattgcccgcgtagctgaagtaagtgtagaggtttaagagtaaaggagagttcttgcttaccaagaaacgtatgattggttccattaccaccataacatctcccctaaacgaacctttcgatggtggataagactctcggagcactcccatgtctaccgatgtggatacctgttaaattccgtacaattataataaaacagagttgaaacttacaatttttgttatataaagataaaaagaataaaacgcaattaagttcttaaccaaatttacactaaaacattgaatatctcctatttttaataagataagttcgcaaatgttgaacttaaaatgaaattttgattaatgctaaaaagaatatttatcttatgaaaatacgtaatcgatatatatgagtaatgattataccttgatacgaccaccgagtccggctgctaaaaccgcccggtcaatgttttccatggcagggactaggaactgtgcgtaagagtcggagattttaacttcattcccaacagatatgtaacggaacctgacgccattcgcgtagttcatgacgtaggtttgtacccacgcgttagcttgtgattggctcgaggccacgctctgtaggtaagagttgggaagacccagcgttacctcgatgttggagccacgtagggcggctagaacgtcgtggtccggactgtatagcctaactcgttggatgtttttctgtttgaagagcgcaatggtttctgctggtgaagggaggttgttgccgtttcttccatagcaaacgccgacttgtccacctgttaaatatcaatccaatatttaatacattcatcacatgtggcataattcatgagagaattaatgtgttactaaatatttcatgagagaattaatgtgttccttcttttgtcatagaactaaaaaccttagactttactacatgttaatcctaatattttttatttctaatgaattatttacattcttagcaaaaataaaaaagagaattaatgtgttactaaaatttagtgactctattttttttcattgttgttaatcataaaacatatctaatcatttgaatatttgttttcaacttttattttcaagtatttgaaacatcagtataagtggtaaattataatttcaatatttaaataattttgttttaaagctaaaaataatagttaaaaaggtctcaaaagttcaagatattgacatggtttgattactctatgtcagggtgatattataatataatcacacatgttatattttctatatacataatgaaataaagaggtattaagtgacctgttggatttgtattgacgaagaatagaccgagaagaagggtcaaggacgccaagaatcggagatccatcgtcgttaggtgaagaaagagatgatttgtagaaaattaagagcgaggtggaaatcatttactgttatgacattgatcctagctagcataaacaatatatatagtaaattctagagaaagaacattaatatataaccaaatgtaaaatgtcaatatgaaactaaaattaatacacggaattaggcaacaagataaaataatgagttggtaatctctgaataattaatacaatggtgtaatatatggtaagctacataatcagagacagagagagacatttgtctttcttgactcttcataagtgcactcacaagtcaaacaacgcgtgtgatttatgagggcttagccgttaaaggtgtggttgaaatcaagtaaagaactttaattcagacaaaatcaaatgctggttgggctaaccaaaactactagtaatactaatggtctttaaacgaaatgagcccaataaagaacctgagacaaatctgagcccacttgaaagctaaaagccgcctaaaaaggaaacctaagcttaaaccagctaaaccgaaataattaaatggattcgttttttctcatctccgatccctaaagtcaaagattaaaccacactaaaccgaaattgtcatatgcgcgtaatttcttcgcaacattttgaccgaacaacttcaaaatcaaacgagcggacggtcaagattgtccgatcagtatcgtctttttagtcagtcagtcctgaacgccggctagatcaaccactccatctctcgtgctgaccacgctccgattctccatttctttcccttttgacttttcacttccaatttttcggtatcagatctggacgatg

SEQ ID NO: 26523 - DNA, 3003 bp, Unknown
  misc_feature (1)..( 3003): 2750-1469P.txt file - cDNA_ID_2714342; gDNA_ID_2213359; Annot_ID_131822
ctacaatgttgacaatgagctcaagcgtccgatcctcattaacgctgggcttagcttggttggattctttgtcacactcaagttgattcctgtagctgctagatacgttctgaggcgtaatatgtttggttttgatatcaacaaaagaggcactcctcaaggagaagttagagtgtatgtttttccttcttagatttgtctttgtttagttctcagattagtgttcagcgtttttctagaaatggatgtctcttagatttgattttttgtataggaggaaaactatgagatgtctcattttctgattgatgttctatggatgtttacgcttgatttgatctcaggggacttaaagtcttttgatgtgcttattttcagcaatcttatttctttgtaggcctgagtcattgggaattgttgtcggtattgtcttcttgatagtggcgattgtatttcagttctttaatttcactgaagattcggtggtaagtgtcctggtctcaaaagctcaagcttgatcatttatttattgtgaactatgaacttggtagctcttggctcatttactttgaatgcaatttatcaatctggctaaatgactcggtgcagtggcttgtggagtataatgcagcactggcgtctatttgcttcatgatattgcttggatttgtagatgacgtccttgatgtgccttggagagtgtaggtgcagttctcattttgttggattaaaaattcatgatttagttttgttttcttattaactcttgtcaatttgcaggaaacttctcttgccatcttttgcaacccttccactgttgatggcttatgctggacatacaactatcgtcataccgaaacctttagtttcttatattggcttggaagtgtttgatctaggtacaattcatcttgtatatagtgttaaaccatcaatagctattttgaaattcatttccttagttgtatatttatcgtggcaggacgtatatataagttatatatggcgctactggctgtcttttgcacaaattctattaacattcacgctggtttgaatggccttgaaatcggtcaaaccgtagttattgcagctgctgtaagttctgctgtcaaaatgcgtcgcaatgcttcatttttttggtcccatttttccttctgttggtttctcgtaagtaaagttatgataaatctcagtaacttgtagattctgatacacaacgttatgcaaatcggagcatctgttgatactgagtatcatcaagctcatgccttctcaatctatcttactcagccattgatggcaacatccttggcaatgcttgcctacaattggtaatctttggatctttcaagtcattttctcttaaatcaatcaggtaaactagcaaagcagaatgctttctctaaccacgttcatgtcccctctttggtgatgttaggtacccttctgcagtttttgttggagacacttacacagtctttgctggaatgactatggcagttgttggcattctcggtcacttcaggtatacttctaaccataccgtccttattgcaatgtacttagattcatcatttacatttaacttatgtgtgagccttcaattaactaactacttatgaaactttgctttttgcagtgaaaccctgttaatcttttttcttcctcaagtgttgaactttttactgtcacttccgcaggtttgatacctttctccatctcacactttctgttacttttcaatacatttgaaagcatctaacttgctattgtataactcttcagcttgctggcattgtcaaatgtccacgacatcgtctccccaagtaagctattttttgtccatttttcataagaggcaaagccaacaagtaaacaacacatgactcttcctctctcttttttaaaccaggtatgatcctgctacgggactgttaacaggaacaaaagatgggacactcgtgaacgtctacttgaggatttttggtaggaaaacagaaaagtctctatgtattcatcttcttgttttccaggtaaacttgttaatgcccatattatcatctctaaatacaagttggtttattctgagagagagaaatcacaagattggtgttttgtgtgttctattgcaggctcttgcttgcgcattttgtttcatgcttaggcattttctagctggttggtacaaataaatctctgcaacatgaagaaactctaaacctgttcctcttttcatctctctctctgccttcacaaatcatacaaacacagaacttgttttgcttcatgtccaacaatctactagaatcatcgttttagttcacttatatagagagttttcatctaaaggcgagtgtatctcaacaatataaagccaatgaaatgaatcagaacaaatttgtcttggaatttaaatttaactacaaatgctgatcttattttgataactttgattaataaactaaataatttttagattaaagttttgctaatatagcatgcattaaatgaagtgtccatttacatatatttttgaattttaaaaatgcgcttttaatattagacagactactgtcgtactagaataataaagaatgtaataaaaaaatagaaggagaatcggaaaagaaacccacttatagaatgccatgtgtcaaaacataacaagcgaagtatgtttatatagtaagaaaactcttttgccctaaatatcccaaattgtcatatgttctttccttatgtggctctctcttctctttctctttctctttcctttttctctttcgatcaacaaaaccacatctctgaactgaaccaatttctcttctcccccttccggttatcggattaccagatctcgtttcccgcgatctagtttattctttgaaaaaggtaaatgttcaatttttttattttattcaaaatctcccctggattcaggagatgatgatttgaaattgacgatgatgtttgtgtgtaaaagtgatagaagcagaaatg

SEQ ID NO: 26524 - DNA, 3003 bp, Unknown
  misc_feature (1)..( 3003): 2750-1469P.txt file - cDNA_ID_2714346; gDNA_ID_2213359; Annot_ID_131821
cgttttccgaaatatatagtcacagctcttggctatcacatgtaggcatttattattgcttcaacagcgagttcagaggaaatgctgcaatggtattaatatagatttaaatataatcactgctcttcatcccattttcaactgctgcaatctaaccagcttcactaatacaggtacagagagcatgttgtgtggactgatgaaaaattgaagttgaaactccttaggaagggaattctaacccgcatttatgctcccatggttagttccacaaactcaaaccacgctctttatttgacatgaacgatcagtgtttggttttccacaagctatcatctcttacaggttataatccaagagctaagagaagcgggtgtttttagctctgtggtaatcgcagctcacaagtctccttcgaagaactcttcaactgctgattcgacatcaggcattacccgagaatcatctcaggaaactggtaagaggagggtgttggaattccatcttgatgttgacggtgaatcccaagcatcagcggtaccaccacaatcgcctccaggcttggaagcaacccagatggaactataatatgaaacgtgtttacaaagggtgggattttttagaatgatttatgaacagttttgaacctgagctctggtgtacatttaggaaagttttcgtttaggttatacacacagatgattctacaggtgaagaggaatgtcatatagcaggggttgtatcatacttgatgattctataacttggaatacaaaatcattgtcttccagatcggactactagtcttcttttgtgctcctttatcttcatatgtacatgattgatcctcagcattacacacttgtggtttttctttcctctcgctctgttttgctaggtccttatcaattaggaaggttctgcaattacgtttccagaactcctgtcatcaagtatcaaattatctctctaccttccattcttcagatttatggttttcctgaaatgtgaagtttggtttctcaacatctttagcttcttatgagtcactcagctgatgtcacaaacagcttcatgttgacttaaaccttacagaaacttaatgtttcagactgagaacatgagcaataatttagaagagagtacttaagtcaaattagtagcaaccaggcattgacaagtactgataaggttgtggaccataacaaccaataagaacaacttaaaagaacttatacatgttggacgtatgatttagtagttactgcattgtttaaacttttcttgttaaaatctttcttacactttgatacaaaagaaaaagatggtcatattcttaaatactttatagtttgtgcctttttcatgtgatacataactctgaaatctaaaataaattcttattacatacagaaactattcaaggtggagacatttaggaaaccgtacaacacacagaaaccagtccacttaacattttaccaaattaataagtttaataatatcatctctaatccaaattttgaaccgccatggtttttgtaagccttgcgccgtcaaagtttagatatccgccatggtttgggaatgctgaaacgccgtaagagaagtttcacgctcagactcgtaccctttttgggtatactttcggatggctgattctatggatcttgttttgcgaagacgatgagccaagccaacgccatggtttgtgcgccgccgccgccatatctgccgtgatttgtgaattaaacgctgggacagaagtttgctactcgtagccttctttttgggtatgatatctgagctttgattccaaccgtcgagactaaagcatcccgtagtctcattgaaggtttcttctaactacagctatgcgatcaaggttctgaccacagcgagccttacaaaagtcaatgtaccttatgtagacagttgcattcttagcagtgagagaggactcactgggtggctccatagtttgaatggctactgacacaatcctcaagccggaaagatcatgatccgtggtggtcctatcagatatggcaacagaaagttccagatacagacgaatccagtcattggctcgcagctctgattcatcatccaccacgtaaaatcggtttctgttttcgaaagggttctccagcgggaactcaggcaagctacccatgcggtagaattctctttccaacgacgttttaatgattgtccctaaaatatacaatgatgaatgaaatactagttgttgtaataataataatgatgtgttaatgaacacgcctacccaagtaaggagtcacatgtagtataataataatttaattacctggacgacgtctttcagcaataaaggaggtcaaaacaagccggccacaagcttcttcataaacggaagtctgaaaagtaaaacgccttccactagatggctgcattgcaaccaaagtaatgtagaaacagcaagcaccagcagccagagtcctgttgtatctcttaacgtgagagagctttaagtttgtcccctgataaatcaaaaacgaaatttgaataaaaagaagagcaagagtggataaagaaagagaagaaaggaagacaagagtcttacactttgattaaaaaaaagatagtatagttagtaattgcctaattaatttcacaaagagagatgataatcaaagaagttaaataagtctatgggatgcattcttaatagtaatcttgttaacttctttcttacattatgagtctttgattatataaaaaaaaaagatattagtaatttgcctaatttcacatgaatcccatagacttatttatttctttatactttgcttttttgggcctttttgataattcataaataagtggtgttgatacgatgtcgtattgttgtgcgtgggcaagttgtaattaaatgctacaggctttgaagcttcagcgaaaagtggaagaagcaaatccagaggcggggaaccagaaatagccaacggatccgccatg

SEQ ID NO: 26525 - DNA, 3000 bp, Unknown; identical to SEQ ID NO: 10007
  misc_feature (1)..( 3000): 2750-1469P.txt file - cDNA_ID_2714361; gDNA_ID_2213359; Annot_ID_131817

SEQ ID NO: 26526 - DNA, 3000 bp, Unknown; identical to SEQ ID NO: 10000
  misc_feature (1)..( 3000): 2750-1469P.txt file - cDNA_ID_2714365; gDNA_ID_2213359; Annot_ID_131816

SEQ ID NO: 26527 - DNA, 3003 bp, Unknown
  misc_feature (1)..( 3003): 2750-1469P.txt file - cDNA_ID_2714406; gDNA_ID_2213624; Annot_ID_132010
tttcacaagggggaaactggaagagctatttagagattcgggatgtgttgcgaagctgaggatgaaaatcggatctaacggcgaagaggcggcgccggctgtgacggataataggaattatgtggtggatttgtatttggagagagatattggagatttagaggtggcgagtgaggcgatattgaggtttcctggagtagtggagcatgggatgtttctgggaatggcgactacgttgatcgtcgccggcaaatttggtgttaccgtcaaggataggtttggataaaagtgtcatttgaaaaccattagggtttatggtttgattttgattttcgatggattctctctggttctgtaaaccctttcctcctattggtttaaaactttgacttattttttaaaactttgtagaattttgacttttggaggctgtttactgcattgcccctgaccttatagtattcactaaattgccccggaactttttcaatctacaaaacgccaggaacttttacgattttcttaaaaagtccttgaacttctgatatataataaattgccccggaagttttgatatttaagaagtattactgttttgagtattttccagaacttctgatatatatactaattgtccgaaaacttttaatattcaccgagtctgtcccaaaatcaaaatgttcgagtctcttcattggtgtttcgggaatatttgccgtcactgtcaaatccattacgcttatgttactggactttgtggtgtagtttcgtgaaagtaaacgagcaagatacaaaaaaaagaaaagcataatgggcctttttatagaacaatgggcttttgggtataaaattattttcaaattgcatcgaatgcaatttgacaacaatctatatgttggcagccaaacctcatcaacaagggtatatattgctcaacttgcttcgtttgtgtaaagtggattcgtttcgtgtcagattttagtttcacttcagaatattcacgtaacatttacagacttatagggtaaaattttaagaaagctaattcatatgccattgtagaccagcgcgaagaaaacaatttaataaaacaaataacatgatatgatattatataatattcatctagatcttcatattctacatgaaatatgtggttaggtagactcgataacaaaagaaattgaaataaaagacacttttttcaaatattttaatgggagaacaaaatatcatgttatgggttgtttttggcacaaagcaagaaagttgcatcctcaataaaaacagatctcagacattttgggttcacatgatcctctcacatgcttcctctcacgcatttgaacactcttgactctaccaaataacccactccaatggcatgttaatattttatgaatcacaaccaaacatatatcgactttaaaaacaaattagtatcttactttaatgttagaaagaaaaacttttcatataagagatacacttttttcttttcgtattaaagataaaagtagagacgtatatcaaataccaaacccaccactcatacacattaaagtgattttggtataaaaactgttatcagcttctttgtaatatagctctttgttggttgtaaaatgtcctagaatagtttcataaaaatgtaaggcattggagtgagacactttaatagtttaattgcccacgtcaaaagaaaacttttatttccgtcgatgtggagaaaaatgttgccgtcactaggaagagtctaaaaagtcttaagatcacataacccaaaccgcaagttatggtaaaattcaaagtcttaaagtcaggtccgaaagcaaatacttatttaaaaataccctcttttcctgcaaattactttgaaaaaaatatatataaaaattctatctcacgtaactcttgaaggcaacctacaataacactactcatgtgatagaaaaacgcaatccatgtgaaaataatcatgtcctaaattcaacctatatcagtaaaaaatttggtcaaaattaagaaaataaacgctattttctttaatcaaacaaacgccacacatccaacattagttactgataggttgtagtggcgattgttaaacttgtaatggcgattgaattagatattcaggtgaattgtatagactatagacacaaaacaatgcatgattgatagaaactaatacaaacttatggcaaaatacataaacccatagtaaaaaaacaaaacacatgactctcgaataataatggtccaatcaatgtagcagcgtcccgattaaaggaccacgtggctacagaagatacagccacaagagacaccgagacggaagggagggacgccaccaccacgttaagtttatttagatccatcgagtcgagtcccctagtgggacccacttgtactcaatgtgcataatcaaattaattgaatcttaatttttaaacaaccatgctttaacagaattataaccaaatcattaattgtcaataaaaatctttatatttttattttaccattttaatttttaaaaattaatttctttatcttctctcagatttcttcctatataaacccaatacattaccagtttaatacctaacaattactcaattagtacaagttgttatacaactaaatcttcatttgttaaatcatctttactcaaattgaatagtagtgtgcgtgtgaaaacaagaaaagtggaaaaggacaaaagagagagtaaaggacgcctcctaataaagcactcttcttccttttcactttcctcattgaagagagagccaaattcagcttaaagccccataagcgtaagcgtaagcgcggggataaatctctctcttcctcacctgcgttttcgtggagcatcttcttcaacaatggctgcttctccgatctgatcatatcctgatttgaattttgctatctctcatgcctcgaactcgttttgtcgacgtagcatcctagtgactgaggaagaagaagaagatg

SEQ ID NO: 26528 - DNA, 3000 bp, Unknown
  misc_feature (1)..( 3000): 2750-1469P.txt file - cDNA_ID_2714424; gDNA_ID_2213624; Annot_ID_132003
gaagaaccaactatagctagttgtgtaaaaatttcaatatttcaaaataagttagtggaatgtgtataatcaatgtgtttaatatcaaagtattttcgggtgatttatgtttttatttacgattatgcaaattattatattagtggaattaattgaagttatttaaaaataaatacgaaaaaaggaaaatcggttaagtgctcaggttggttaaaaattaattaagagaaaataaacaaaaagctacgtgctgttggagttttgttggttttgtgaaggcaaattagtcagcgaaaaaagtgttgtgaagtggttttgtggtaatctatgcggctgtgccaagtgaaatccatacatcatcagataataaaatatcaactttttatctctatattttatcttccattacgtagtttttgacacatagaagatccaacagcgtttaactagattttcttcggagccattaaatatagtttgttcctcaatcgaagtagatatgcggctgatgatgcagccataaaaaaagaaaggtatttgtagtcataactttcttagtaaatgactttaggtttagaaaatgacgcgtaactaatcaagaaaattagtagtaaccgtaattaacttggaacgtaaccatagcaaaatatttccgaccactcgcaaggagacaagtcaatttgtaagtgaaattagaaattgtgtttcttacgaaacggttaatttattgcacaatttggtctgcttcttgttttctttataactattttgagtatgtttgttacatgcatggatgatcagaaatgtaatatattattcttcgaataaaactgtggcaccgtgcacatatccaaccttaatacattatagtctaatcttaatatatttttgtagttcaaaccttgctgtgaatttgtatataatatactgggagattttattcttgtacaactcaaaacaaattaatgcctcacgtaaaacaaacacctgtttaatccttagaatgagtgatctttaaataaaatcccaagaatattagaatttgaaatttcataatattatggtgcttatgatgagatgacatttaagtatctcgctggatatttcaaatcaactgtttgggacgaaactgatatgactgattattaaattatgacttcgcataactcgaaagttgaaacacaaaaatggatatgttagatttgaaactgtgaaaaggacgcaaacaaatggagagatgagaagcggcacacgaagggaaaacgcaaacgcgcgtttgaacatatcaaggtgggacttaaggtaaaatcgtcgtttgatggcgacaaccgcatttttagctaggtgggagatgggcttttggataacctccacgtgtacagtaccccagacatcgacggcttccagtcattttgactaggaacaccaaaacatagacaggctcaaaagtcaatagtactagcaattatctgtgaaaccaaaaacgaaccaaacctgaaatttgtagaactggattgatcacaaaatctgtatataataggaactttgtatatataatggttgattttgttttaaattttgttgattcagagtcaaattgattaattttggtttaatttgatttttttcctcacactcttcaaaaagttaatttggtgtattttcttgttaaatttaatttttaggtttcttggatttgtctgaattattttttaaaagcatgaatatatattgtagttgtataatatatgatgtgtattcaaatgaaaagcatagagtatatatatatatatatgtataaccactatttgcgtgttttttacgttagaactcatgctagatgataatctttggagtagcatcaagagaagtttaaaaggaactatagttccaacttgtaacaaataaagaatatgttaggtttttgggctgtttttgattctcccttttgaaaaattatttgttgatgctgggttcattttgggcctggctaggtatattttatattgtcagtcttttatagactgatgggttactttttcgctactttcaatattaatgaagaaaaagtttataaaaaaaaacagaaaaaacaaaaagaattagttttagagaacattaggtttgctagatttcggctaactcgcagagaaatggttcgacctttaaggcaaacataactacaaatttcaatggttgaaatttggtgtttggacatgcgaataaagatctgtttagtgaaggaatgtttgtgagacctcccacaagcttggatgataaccttagctttaaccattataggtctgcgataatgcatgttacgggaggctgaaggagctaaaacgataacatggttaagacaatttttgagagattggaaaaactcattctaattttttttgtaacgcgtaagttagagaaaatatcttaataacgggacgaaatatagtggacgaactaggcccaaaagtttccatggtttctttcttgtattagttccattagaagaatgttgattttttcgtaaaagatccatttgagaagacagaactattaaccttgttattcacaaaaagaattatgaagtatgaaccctgtttaattttcagttaatttttgatagatataaaccatataattaatggatatattatatacgtatatatatatattcattttttaagaaaaatcaatactcttgtcatgtacatataatattcaaattctagttttataatgtagaagcttactaattaaaaaaaaaaccattcctttttggaagataaattctaggaaagtagcgactcaatagtcaagagaatgaaagcaaagaacaacaaagttatttgacaccacacactcgtatgcataaatacgcaaaaccccaaagaacttcttcaacttctctcctcaacttttaagtattccacacatacaaacacacacacacacttgacttttctcatataatttcgacagctcgtgaaggacaaagacatg

SEQ ID NO: 26529 - DNA, 3003 bp, Unknown
  misc_feature (1)..( 3003): 2750-1469P.txt file - cDNA_ID_2714428; gDNA_ID_2213627; Annot_ID_132088
agaccgagtcatttacaagcaaatggaatcacgagagaagttaccaacctcgatcatagtttcatcgaaattgagaggaccatttgaaggaataataacagggttgaattcgttaaccgtcttcaagctcccaatgaaagaggattcaccactgtaaacctcatcgatgttgaaatccttggccagctcagtcacaatctttgactctgcatgtccaccctggtccctctttggcggcattgtatagtatgggattttacctgcataaccattcatattagagacaatgatgagttaagaaactggttttcaaaaatgcttttacgcttcaagtttacgaggaacaaaaaaagatccgcaccttcattccagtcatgcaaaacaattctggcagcagcatcaatatccacaagaccaccctttttaagtttaccccttacagtggcgactttgtaaaggaaatcatcaactgcctcgaagctcgggattttgtagagagtcaccagcatatctttaggacaaagcttgagaatttccttcactatttttttcacaaagcagaagatttccaagttaggtcactcagattataacctttaaaagacaaagcacaaaaataagtgtgattctatcttgagcttatatccaattacctggactaactgggtcatccaacttctcgattcttttacaatttcggagagctatggaagcatcatttcctgatgatttcaacatcacaactccaggacaatccagcaacttcacgtttttgtccaagtgaacctcttgcagagatctagtcagtccaggagtggcaccaacattgacaacatgcgctctcttcagactgttaataagactactcttgccgacattaggcagtccaataataccaactgtgatagatttttttaactgccaaagaacaacaaaggaagatttaattgaaactgaatgatataacttgatgctaaggtaggatgattaaagtttaaactatggaaccaacctcatgacttcttgagtagttcttcaacaatttgataagagtgtctgctccaagacaatcactcgtctgcaacatattgcttggttttgatgccttagatgatttccaacccaagtttgatctctgttcctgggtgctacacttgaaggcaacagctggaaattcttccctaaggtacataagccatttctcagcagcctctcggggaacaagatctggagagagtgaatcagttacaaaaattaattacaccacccagagtaaacaaacaacttattacgtccacgagtaaagactgaatatatgaacttaccaatcttgttcagcagcaacacaagatgcttattgggaccggcttgcatcaccatcctctccatgtcagtacaacgagtgccaagaggatcacgggcatcaagaacctccaaaatgacatcagacaattcaatgactttaactagctccttgtagaaagccctctccgagttatctgtgaaacaaaagacattagtgcatgtaaaggcagagagaaagcacataaacgcgtgaagaaggtatccaaaacaactcacctcgaacattgacaactttaggtaagtcctctatggtctctccttctgtcttggtatcctcatcatcaaccaaaccaagtttcctctttttggcctgaatagatttattaggagagatcagaacacaagcaccactccaaaatacgagtaaatcaaacagcaagacatgaaaaatgcaatcttttatcaatcaatcaaaactcagaacacaaaggaaatagctttaagaatttcgacctgaacttaaagttatatgattactaaatatctgaacatgtatcatagctgtgagttacaatgttaaaagaatgagattaccctttctttgcgagcttctttcttctgttcaatctcctcaagagcacgggcacgtcgaacttcaagggctttaagctcttgttccttgaaaggccagtcattgggtatacctgggtctttctctactcttggcttacggtgaaggccaagctttttagcatcctttgccttcttcttgtggtgctccttcacctttttcaggaccttatgcttctgcttcaaggtcaccctcttactcttactctctgcaaaaaaccatcaaaccaatcaataaaaccccagtaggaatcctgaactgaatgatatgattcaaattcattcaataagacagatccagaatatcaatatgattgaaggatgtatcttacttttactccgtttcaccatctttctcgccctgggatgagagcgacgcaaacagaaaaactgagtaggttaaaagaaaagggtttatggagaaggaagatggacatatcggcgccaaattagggttttgctattagatgtacttggatcattacccgacccgttatagttgacccgaatcaacttaaaaatattgaaaaaataattggggtgagagaggctcgaactctcgacctcaggattactcagatagctatgagacctacgcgctagccaactgcgccaccaccccgatgttagtaatctttactgattatgtaattaacttcaattgacattcgttatccaaagtcataataaccttgacttggaccagtcacctgaaagtcttgagtttttttcccttaagatcccgccgggctccggtgctggcggttaaacccttccaaaacctgaaattcgtttagcttaggacaaacaagtgaagcccaccatacagaaatgtctaacagaagcctccatttgaagaaaatatcatggctttcttctcggattctctcaggtttccgaattttgatcgtcttcttcgattctagctttctgggttcccactgtttaagcgttcttaacgatcttttttggttgtcgttttgctcactagacaatgttcacggtcgatttcgccgatcaatcactactccagccacttgtttagctccttcactcgatggagacatg

SEQ ID NO: 26530 - DNA, 3000 bp, Unknown; identical to SEQ ID NO: 10157
  misc_feature (1)..( 3000): 2750-1469P.txt file - cDNA_ID_2714432; gDNA_ID_2213627; Annot_ID_195924

SEQ ID NO: 26531 - DNA, 3000 bp, Unknown; identical to SEQ ID NO: 10157
  misc_feature (1)..( 3000): 2750-1469P.txt file - cDNA_ID_2714432; gDNA_ID_2213627; Annot_ID_132087

SEQ ID NO: 26532 - DNA, 3000 bp, Unknown; identical to SEQ ID NO: 10156
  misc_feature (1)..( 3000): 2750-1469P.txt file - cDNA_ID_2714444; gDNA_ID_2213627; Annot_ID_195921

SEQ ID NO: 26533 - DNA, 3000 bp, Unknown; identical to SEQ ID NO: 10156
  misc_feature (1)..( 3000): 2750-1469P.txt file - cDNA_ID_2714444; gDNA_ID_2213627; Annot_ID_132084

SEQ ID NO: 26534 - DNA, 3000 bp, Unknown; identical to SEQ ID NO: 10155
  misc_feature (1)..( 3000): 2750-1469P.txt file - cDNA_ID_2714448; gDNA_ID_2213627; Annot_ID_195920

SEQ ID NO: 26535 - DNA, 3000 bp, Unknown; identical to SEQ ID NO: 10155
  misc_feature (1)..( 3000): 2750-1469P.txt file - cDNA_ID_2714448; gDNA_ID_2213627; Annot_ID_132083

SEQ ID NO: 26536 - DNA, 3000 bp, Unknown
  misc_feature (1)..( 3000): 2750-1469P.txt file - cDNA_ID_2714475; gDNA_ID_2213627; Annot_ID_132075
ccgtgcaactagaggatgggtaagaaccatcttgaaagagaagttgaaagccttcccagactacaagcccaaggatatcgctgaggacataaagaaagagtatggtattcagttgaattactcacaggcatggagggcaaaagagattgcccgagagcagctacagggttcttataaagaggcgtatagtcaacttcccctaatctgtgagaagatcaaggagacaaatcctggcagtattgccactttcatgacaaaagaagattcgagcttccatcgtcttttcatatcattctatgcttcaatatctgggtttaaacaaggttcccgccctctcctgttccttgacaacgctatcttaaactcaaaataccaaggggttatgcttgttgcaacagcttctgacgctgaagatggcatatttccagtagcctttgctattgtggattcagagacagaggagaactggctttggtttttggaacaactcaaaactgcgttgtctgagtcgcgaataatcacttttgttgcagatttccagaatggtctgaagaatgcgatagcgcaggtctttgaaaaagacgcacatcatgcatactgtctaggccagcttgctgaaaaactaaatgtggacttgaaggggcagttttcccatgaagcaagacggtatatgctcaacgatttctactctgtggcatatgcaacaacacccgtgggttattaccttgccttggagaatataaaaagcatatctcctgatgcttacaactgggttatagaaagtgaaccacaccattgggcaaatgcgctgttccaaggagagagatataacaagatgaactcaaactttgggaaagacttctacagctgggtttctgaagcacatgagtttcccattacccaaatgattgacgaatttcgagcaaagatgatgcaatctatttataccaggcaggttaaatcccgggaatgggtcacaactctaacaccatctaacgaagagaagctacagaaagaaatagaacttgcgcaattacttcaggtttcatcgccagaagggagcttattccaggttaatggaggagaatcttcggtcagtatagttgatatcaatcagtgtgattgtgactgcaagacctggcggctaactgggttaccttgtagccatgcaattgccgtgattggatgcatagagaaaagcccgtatgagtattgctctacgtacttaacagttgagagtcaccggttaatgtatgcagagtcgattcaacctgtcccaaacatggacaggatgatgctggatgatccgccggaggggttagtttgcgtgactcctccacccacacggaggacaccgggaagaccaaagataaagaaggttgagccgttggacatgatgaaacgtcagctacagtgtagcaagtgcaagggactaggacataacaagaaaacatgcaaagctacttagttgttaggatgttttggttagtttaaagtagtagatgattttggatctcttctcttcttgtgtgatgaagaataaagatctcgttcgttttcagatcaaagcgagcttttttttcttcgcagaacttgttggttgatgtatgacattcacattcgaactttttgatctatgaaattggtttaagaattaataaatgtaacttacaatcctatcccataatcatagtaaaaattacgaaaatgccaccgtttcattactccttttggcggctttaactcttctccctctcagagagttcggaaactctcagcagaaaaaccctaaaattcttaagcttcgtttacacacacatacagagactgtatctgtacattcgcatcgttttgtaaaaatggaggtatcttctgtgaaaaagcttgagcagctggagtactctttagagtcagtcactgatctctcttcgtcttccgtttcgtcgtcctctccagctgtagctacgttttcctacgttgatggagtcacggagctccgatttctgcaatcggattcgacccattgtttcaattttgatctcgcttccgctcaggtgaatgtcgattcacatgcttatgttactgttccgctggttcttatcggttttgattattttttcccatctcgtttaaaacgtttgtttttgctacatgaagatgacgaaactctgttatttttctgtaactaatctgagattgaagatggttttcatactaatttttacaattgacgatatattttaattctgaaagtttgaattttggtaaaacttgttttgcttatgttttataatcttattgggtcttgttgtatctgagaatgcgtgcattgatcgtattatatctttgtcaatgtttttcccctcagttattcaagttggggccagtccatttcatctgtgtatctgatggttcaagttcttcagaggaggtacgttatgtttgagtacttgggagcaggatcaatttctttagttattctttaaagtgaatatcttgtctcgccttctttattaatccacttttcttcataatgaaatgattttgtgaaacagaaatcattctccaaaggagtcaatataaaattcaaaaatgagaaggatagcaaggatttttgtgagtcctttgaagagtggagaaatgattctgttgttcaaggtgcgccattgtatcaatttactttcttggaggtgttatagcatgaatgccttatgtttgcttttcttctggcttttaattaagaaagtattgaagccccattatagaatagttttatgaaaatctatgtttttttctcagactgtaaagaaccaatttctctctgtggctacttgtgcattcactgtcattgcccatttcaaaatctatgcataatattattgcatactcctttactgtcttctcacttttccgtttctaggatcatccttgcaaaatggaacagtttcagctaataaaagcaagttcgacaataagatagaggcgtcatcggcaaaaatg

SEQ ID NO: 26537 - DNA, 3003 bp, Unknown
  misc_feature (1)..( 3003): 2750-1469P.txt file - cDNA_ID_2714479; gDNA_ID_2213627; Annot_ID_132074
aatctttaaacaacaattcgaatttcactatcaagcctgatcatcagagaaccacattgttacccttttctatgtacatcaaattatcaaacacgtaaagtgtgcatctaacttgctaaatactatctacatgaagaagaagaagaacttcaaaactattctttaagagtttccttattatgctggcatcactcggctttcagttgcagaatctcctttgctgtcctagcccggaaatatggcatttgttcctgtggaaatcatacaaacagtttcaattataagcagtcttacgtctttcaaaatgacactcacctactaaagacaatggcaggtttagtatctttctgctatttacctgagtgaaacaaagatccagacctctgctatagaagtcgatgtatttcaccataaacattccacaatcgaatctacaaaaatcggagacaaagttattatgaatgtatgaactagtagtagctgacatcttttttaggaagacagtacccatttctctgcattggaaggtcctggacaaattcttgtctccatcgacttacatcaaggtctacttcactcttatccctcacttcatcgacaaagtatctagcctgacaaatgaaaaactacagaatcaggatatatatgttatgacacaaaacatggtttccttactcatatattaccagtgcatcgaggattttaggctcccttcctttgaaagagtcaagatactggaatttctggtcctttatattaattacagccaaagtccagtggatgttcatatggatagggataaatatctgaaaacaaacaaggtctcttagatggtaaaatgaaaaaaaaatgtttgattatctcaaaaaggagtttaatacagagagtggtcgcagaagaagcacacaacaagtttaccttgtcacagtctttgagatggtagcccaacctcttcattgaagtccatcttctcactgcaccatagttgtatccagtcgccgaattaactaactgaggtgtgatttaaggtaatgtcttcttgttaatattcatgagcatatataggggctaaaatttaaatttcattagccatagaaatgggtataaccttagtgaagaaaaatgtattgaaaaaatgacatttaagaaacttctttggttctctagcttccctttctttcagcaataccatataaagattaatgacctacatagaacaaagtccaaggtttttaccaaatcatagaggtcctaattagacaagaaaattatattcaatctctaagaagaaatcacgtgagatttagatgcgtcgactaacctcatcgttcaaccatttgcctggtttaaggcacctcaagattttcccggtaatatcaatatttgagttcttatgagtaaccaagatgtttctgcagcgagagacgttcatacaattacatcacaaaaacaaaaatgaaatctcagagcaagtaaacaagagagcaagaatcaaaatcatacgaatcattagctgagaatgcacgcctgactgctgtctcctcctctctagaaagaggtacaaatgcctcacgttgtacaacctgaaaatcaattatagaacaatgaggcaccccgatttcacaaaatctaaagaaaccgaccgattcatatcacaaagcatacacgcttaaactttagccacacctctactggttcttcatcttgtctccaaaaggaagacaagcttcgtagtaaagcacgacctctctctttaaaaaaatcaacaaagcctctgtctttcagtttagaagtccggttcacagcactctcaagaacctttctgtatgcttcaaaacttgtgacatcagtcacagggcgattcacaacgagtgaactactattagctttagaacattcacccaccctcaagctcccatttttcagactggcaacctcagaaaacaatccatttcccatctccgccttctcttccacctcgtccacctccatagccacgttttcgacaccctccctacttgtatcatcagatatcatttcaacatctccaagctcatcatcaacatcaattacttctctatccgttctatagcgtaaagacgaatcaagtgcatttcttttccacatgtcattgttccttgtgagaaaggttcccaacacattaccagaaccttgtcgtgtgctacgatctcgaccgctattgagtatccgcacaggcgcatgaacttgtctccgcaacgaagatttcacttctgggtaacggtaaattcctggagccatgggtcttgatgaatgtgagaaaccggagtgtttacaagggtttaaaccggcgctccgtttgtggtaaccatccatatccattggtctgaaacagtaggaaccataaccctcgaaattcaaaatttgatcccacaaaactgaaaggtcaaaatcccccaattcagagttcaaaaccctagattggtttttcatgaaataactctcgggaagcaagcaagtttcaacttttcattaaactcactggcgtttccgatacacagattcggacccggacatgagacccgggcgggttttgttttggaagagataggtcaaactcaaatatgttgacttatctcataccctctagccgaaagggaggtttctgggtcatgttgtttcttactcggctaaacctatgttttttcttctcgttaaaccctctctgctctctgttctcctgaaagctgggcttttcacttcagaatttccttaaaaataaaagctttgatctttttagttattatcttcttcgatcgtgttaaattttgagacaaatcggtgatttggaacaggaaaatcaggaagatgcggatgctattaagaccaggtaatctgtgtatgcgcatttcagtttctgaaaattttcagtgtttaatctgctcgattttgagctgaattctggtcgtttcttcatagtattgtagcctggaggttgataactcccatatgaactattctatg

SEQ ID NO: 26538 - DNA, 3000 bp, Unknown; identical to SEQ ID NO: 10147
  misc_feature (1)..( 3000): 2750-1469P.txt file - cDNA_ID_2714491; gDNA_ID_2213627; Annot_ID_132070

SEQ ID NO: 26539 - DNA, 1021 bp, Unknown; identical to SEQ ID NO: 10146
  misc_feature (1)..( 1021): 2750-1469P.txt file - cDNA_ID_2714499; gDNA_ID_2213627; Annot_ID_195902

SEQ ID NO: 26540 - DNA, 3000 bp, Unknown
  misc_feature (1)..( 3000): 2750-1469P.txt file - cDNA_ID_2714499; gDNA_ID_2936587; Annot_ID_195129
atggtggaatctgtattgttctctttgaagaactgcttgagctccacaagtgagtcgcagtttatctcttcaacaaaatgaaaatgcggtacacttgtagccatagtcattgtcttgaccattgctcggctgaatcccctgagaataaggatatagcttcaggtggttaattcagatacaagatgggttcatgtacaatgcaaattgccaacaaaggcgtaccttagaggaactgttttatcttcaaagttactactagctttagtggaaaccgagtctcctcctataacagcatgctcagaagaaactgaatctgttacaaatcctttctggtcactaaaccggagaacatcctctttcaaaactctaccatctttaccagttccagttataacattgatatctatgccaaggtcttttgcaaggttacgaaccgcaggcgttgagagagctccaagaagattttctgttccctgctttgaacctcccagagttacaatttctgaactatcagtggttagaagcgaatcctgcgagtcttcaaccgccaacctaaccagagtctctccaaccttgcatcaatagattttgccacatataagtacttataaaagtgaaacatttgatacctgatctatcagaacctttaaacatatatatatagataacacaaaagcttaacatgtcaaaatctcttagtgttcatggtttacaatagagtaacatgctcaaacttagcctctaacaccataaagaaagaaaatgtatctaaccttaataatgtcacctggagaatgtgaaatcagagccactttccctttaaaacgacttgtgatctctatagttgctttatcgctctgaacttcacagagtggctgaaactcttccacagaatctccctgcaaaaggaaaaacaccaaaatgtctatatcataacgaaacgaaacagaacaattgaaaaaaagaaactttgagcggagaaaccaaagagacctctttgacaaaccacttgagaagctcacattcagcaataccttccccagtttgagctagtggcacatcaattaaccctgaatttgaatcagtggccatggcttcgttcgaaaaccagcttctacttcctccaccccatttcatcaactgtgaaaaatatgacaaacttgtttgatcctttgtccaaaaattaccagaaaaaccacacattctaagcaaacagagttttccaagtttaagtctctctgataaatttattttctttctaaatttatacagtttcgatgtttctttttccgcctagaagagcttctcggaagctaatgtcatgcctcaaaattaatttgaaaaaaaaaactgaaaaaggaaggaaatttggtgagaagaaacatacagtgggagggtgaacaaagaatgggcgcgacgccggagaggaagacgactgagaaagatactccggtacccggaacggcggagagcaaacagatgacgagctgaatgggcggagaaaccggtggcttcgccagatccgtcgcgcgatcattgttatgaacggttggtctttggtaaaaaacaaaaaacagtacaagggagaagaaatagacaaacagattgagttgatggaagatgtttctaagaagagagcttaaaaagataaatgttacgtacccgtgtgtttgtttctgttcgagtatccggattaagactaaggtactgattagtattaataactatttggattagtaccaaaagaaaaagagaaaaaaaactatcggattggcttatctatgccacatcagcaatatcacggagaggatcaacggtacacgcgtatcctcatgtacatcactttttttttttccttcagatggtgggctatatatatcgacttcaaaaaaagccttttacaagcagatccactaaagccgaaaagaaaaatgccaaaaggccagacttacaaagtggacacacttttctcatagacagaattcattaaagcaagaaagataaccttaaccaacataagattgcacttgattattctttgttacactttgaagtttgaacaattaaaaatgaacaaacaagttagagatgtgaatgtgaggctacttccaaaatacaatctatttcatcactaaacgcctaacattatctttggaaagtgagctacctaccaacccaaaattacatctaacttacgtcttttgtcttttgagttttgccaaccgtctttgatcttggaagatattcgtttacgtcctttaagttttaagcaaatccatcattgttagtgaagtcttaagttttagacgttttattactgttatggttaactgtatgaaagttgatacttagtcatgtgaaaagatatttcaccggaccataaatagagagaataaaaaacaagttatggtttgaatacttgtctaaaactattgattgcatttacatttgttttttaatctgattaaacaaaaaacggatgtcatggtagaattaacatatattacaagatataatattcagcatgatcgattatatgtcataaataaatcgcaaaaaaaaaaaactaataatgttaaaaaaaaaaagagatactctttctagtaaagtttatttacaactgtaaaatcctatatagggtcgcttagttacaaatccgtagtatcaagataagatccgccaagtttggtagtcgcaggactatgaccagccaaacatatttattagtaataaatccgcagagtttaaatgcaaatattttgttcctaattcgtgattaattcaacttatacataaattggatacgaataacaaataaaaattcacatatcgaaaacattatcaaagtaccgttgctttgaggagtgtgccactctaccatattatcactgacgtcatcatcttttgcaattatataatcatctgatttctcacgtctcctctctttttcattaattccgaaaattttgactcgcaaaatctcaacgaagctcgaaaatg

SEQ ID NO: 26541 - DNA, 1021 bp, Unknown; identical to SEQ ID NO: 10146
  misc_feature (1)..( 1021): 2750-1469P.txt file - cDNA_ID_2714499; gDNA_ID_2213627; Annot_ID_132068

SEQ ID NO: 26542 - DNA, 3003 bp, Unknown
  misc_feature (1)..( 3003): 2750-1469P.txt file - cDNA_ID_2714503; gDNA_ID_2213619; Annot_ID_131957
acgtaatctgaatattaagaaaaaggataaatatgaaaagatatgatgtaaatatgtaatcgatgcatactcttaattatgcaatgtaattctttttttgtgacattaatacattatatatcctttatcttataaaacacaagtcacttggcaaatcatgttttgacatgtggcaaatttatcaaaaacaaaatccacaatgtaaaacaaaaatgaatttttcgacaaaactcaaaataaaattaaatgtgaaaacagtgtacaaaattaaaacattatcgtcaattttcccacgatcactctcaaaagaaaataaaaatcaacccacatattctccatactcccacaatttctttttcttctattcaaactatgtaactcttttttttcaattaaaacattcaaactaactattgggaaacaaagacagatacgatctcaaacctatatatacaaatctcggtatcatctttctattgttgatattggtttttaaaagaaggttgagagtaaaatcatttaggagcgagaccttctttgtaacaagagtcttcaatctctaatcagttcatataaggcaatatggccagcgtatgttatatttcttttattttattgattgcgtttagatgagtatattaatgctttctgtttttgaattatcttttattatgtatgtttaatatctttttgcttcatagatcaaccactaaaaataaacaagcaaacttgatcgatagaggataaaacacaaacaaagtagaagacttgagcaagaaaaacaccaatggcaaagtagtaggaggttgaagacgaagtagaagtgtacaacattaagacataaatgatatcatctatgtattgagtcaacttcactctggtaacttttttttgtctatgactataatctatgtttgtattgagtctttgaataccatatgtaattttttattttatagcttttgtatgtattctagaaagcattgaagttggaagctaattctctatatttggaagactaataattttgtgatatcaacttcaattctccattatatatcaaattatcatctgaaaaaataaaatccacaaatacatgaaacgatatatttttccctacacgattatatactaatctatttataaaattaatttttcatgtataaatatcgataatatgtaacatatcataacatttaaattcaaaaaaagaatgtatcataacattaattttcggtgctatgcaccgggtataatactagttacaaataaagtataaaaggaattaaacttttatatagataattaacacaaacaaaatattagagacgatttcaaataaattatgaggatatagatgagaaaaatactatatagaataacaatagtaagaaattaaaaataaataaatcaatttgtacatataaattagaaagaaaaatatagataaataattaaacaatattaatagtatcacataggtcaattaaaattttatatacaatagttaaagagtattatatctcaaaactaagttttgatactgcgtagaacaaatcatgtttcaagcaaaaatgatcaaattcctatgatgctggaaatgcttgacgatccacatgagactggctatgtgcatgtatggagaaaaacgtgttgttcgacaacgcgtgcatgccttcttccacctaagtgacgacgcatcacaaaaagttatctagtagtgttaatagttcatgttccatctgccgaaattacacacaatataacgtattcgattatttgttatccaacaacttaaacgattcgaccaactcactcaaccttttgtcactagttccagtcatatatttcttataaatactcgttcactacatctgtacagatcgaaagaatctcttgatatattacaacacacccataattcataaagactagctcatatacctttgatatatgagatttgatctatatgtcgttctccttaactagatatcgctaattgggcttgcattcaacaagcaacatatatcgcttattacattcgacgatactcagcttctacatcttaagtctctctttttttctgagctcaccatcaagtataagaacacaattctacctcttatttgtctactcccaattttttgtttttggtttttcactattctgacatcttatcgtattatgattaacgttaagaatgtcgtctcgaaaatcacctacctagctattgtttcaagattcgactcccatgcgcgtcccatcaagaacaaaccatccagaagcatcaacctccaactattagagaataatgtcccattcgcccctcgctggtcaaatcgcttccatttgattcacataagtccaacaacaacgatgatctctggtgtactactaccaaaactcaaccttgagacagattctcaaaatactatatgttctattaactattttaacttgaatcaagttgataattgtagagagaaattttttgttcacttcttattaatttgtaaaacatttattttaaaacccattaccgttaagctttgatacaatgatacatgttattttctgattaaaaatggttataaacttgaacggtataagactttagtgtatagagaacaatttagagaatctgtatttatgtaaccgcgacctttcggaaacgtagaaggtggtcgcacaaacaaaccaatcaaacccttaatcgatggcactcttttaatgtctaataaacttcggttcgtcactcgaccggacaattaaatatgtgattaaaagtgtgaatttccggttcggtagagattactggtatttgttaatccgggccggaccgggccgtatctgaattatgaacactttcctaatgtcatagaatcgttcgtgccgtcgtcgctgcgatctgaccaaaatcaaaagtgttacgattcggtatcatcgtctctctcatttgtgattttgtcaaaccctgctctcttttctccaagtgctctcatg

SEQ ID NO: 26543 - DNA, 3003 bp, Unknown
  misc_feature (1)..( 3003): 2750-1469P.txt file - cDNA_ID_2714517; gDNA_ID_2213619; Annot_ID_131942
gccggaagatgcaccatctcggttccgactctcccagtagctccacgtcacttgatcgtccagctgagatagatgtggaggattttgcgatgaagcatcacaagatggcattgttaaggggtcgaatcgaaattgagcgatgggaagctcattctcaccggtgaggcaatttttccattgggattgtttttcaatgttccagagattttgtttactcttgccatgtttctaatgttctctatgtcagggtttctcagtgtcgaatgaagaaaggtttgcttcttactggtgtcggtgataaggttaggattttttttagtatacaattcgattaggtattgtatgtgttatctaagtagcactggctaagttaatctgactactttgatcaggttatgcgcctctggtcattaaaaagctacaaatgcatggaagaatactcccttcctgatgcttcttccttgattgacttcgattttgatgagagtaaggtaaaccttctctaaaggtcatggatattacttaaactgggaatgagctaaaaatggatttaatgatcaatgatgatacagaaacctcagtcaagtcactgacatgaatttctgaaaccaccagtatagcagtataatctgtttccatgtcacagtttgcctcacctgttgtagctgaatatttccttttggctaaatcttgctattttctatagaaattggaagttgtatctctagcatgggagtattttgattctgttgttgttgttgttgttgagattgttggcttggttggtacccgcattagcatatggaggagaaatggacaaagaagcatttttccatctcgtgcaggcacctttcctaaaggcctttgtatgcggtatgtcagaagatactctcctgatatcaagttcctgagaacctatctgtttctatagaaagatcaactgatattccatgttactgacaaaagtcggtgtgatacttcaacatggctacctagcccctctgcccctgtaaggttgttggcttctctatccacactgataagttgtatgttttctttttcaaccagttacattgacccagaagctgtagttggatgcgaggatggaacagctcgtgtatttgatatgtacagtaagacatgttcacagatcattaggtaagctatgtattatgtgtctgttgtgttatggaacaacacagtgaaactggaaaagaacggtttttcattatcaaaattgtttacaatttcttttgagaaagctaaatcacaattttcctatcagattggttaataactatgtatgtaattgcaggactcagggtgggccaataacatgcttatctctaagcgataatcaactatttcttagtgggtcgtcactcgggagagtaacagtatctgaccctttgatggatcaaccagtggccactcttaaatccacgataactgcaggaggtaaactcaaactcaatgtcagattgcatctccagtgacatttcttaaagcaacctccattctctacaggtatacagacaatctgttttaaccaaggcactaatctcgccttcattggaacaactggtggatatgtttcatgctgggacctcaggtatgttaaaatagtcgtctaaggtttttttcaaagatgcaagttttaattcactatcttaagacgttataaccaactattatctaacaggaaaatggatagattgtgggaaaaacgagtgagtcctaatgtcgtgtactcaatacaacagctaaggaatgacacatcggttatggtagctggtggaatagacggtgtgctgcgtatgattgatcagaagagtggaagggttttatctagagttataatggacgataaattctccacaacatcaacaaggaacaaccaagtggtgatagagaaaagaagaggaaaaagagtttctcaagacatggagattgataaaatcgaaaggaaagttcggcctcaaatcagttgcatagcaatggggatgaagaagatggtaacggctcacaatggtaaatgcataagtgtatggaagttcaatctctcgtaaagtaacaataaacttgtttgtaagtgacgaaattggtaacaatagcattataaatgattgatttaaagacaaaaccgattggattgtgtaagagctacaaaagttgaaacactggaaacaaaaaaagaagggtttgttgtctatttggcggatttcttggatggctcaggttgagattcagctttgatgatattgagttgaccaccttctttacaagctgcattagttgctttcacttcattgcaatggtttatgaatttcgtaagctcctgctccacacaacaccaaccaataactcacaattaaagatccaatcgattcagaatttagggagattgaagaatatagaaattacccgatcagtgtccatctctttcgtcatctttgttggtttcacatttctcttccctggaacaagaagatgataaaatctgagaaatcaaaatcgaaagggatttgtgtgaagtaaaaaaaaagtgaatacctttgcgagtttgaatggatttgccatggcgattaggagcaatagtcttcctcttctgttggcccttgaactgattgctcttctgcgtcatctttggatcgtcgtttctagctagggttttctcttctgtcgaagggtttttgttgtaatagaagaagaagaagaacaacaatcaaaagcctatataatgggctcttaaggcctttatttatatgggctgattaattattgggcccaatttggagttttctaaattcaactctgctaaatttttgggaggcagaagattttgttccgaggaagacacggatacgcagaaagcggtaaaatcctccttcttcgtcgtccttgtaaaaaccctttctcatttttggaaggttctttcaaaatcctttcttcgattgctttcggattctcgctcgcttcttcgatttttggttttgattcatg

SEQ ID NO: 26544 - DNA, 3003 bp, Unknown
  misc_feature (1)..( 3003): 2750-1469P.txt file - cDNA_ID_2714521; gDNA_ID_2213619; Annot_ID_131940
tgtgtgagatctgtaaatttggtcactctttttgttgatatgtatattgaatttgatcattcgtgtcttgcagttaaacaaggtcatggcggaagtctaaaataaagagttttccgtctttgttttcttaaataaaagaaaaaattagttacaaaaatagagaattctgttttgccaaattttaggaaacaatttttctgaaaactttttgttttggtttaacttttaagggttacaaaaattgaaaaaagcaaagcttgtttggagtagttacagagggaaattaattgttaagttgttacaaaaggttatgtgtgattaaaatagttgtcaataaccaaaaatgtatccataaaatcagttcattcattgtctcaattctttcatacaaacttcattctgctttctttcataaagatccaatcaaacataattgaatgggagaactacaagactggtcggtaaccacttgtctcctccttttattgtttcaagcgtcacaaatccattgcacgagccaaacacatgttttaaaccgtcttttgtaccgctcgaagcgagggtttggttcgtcggttgacacgaaccatttaaatgccatccgtcacttaagcgtgtcttcaccccaaaacaccagcggtgttaaccaacaagagcaaaaggagagagatctaattgagaatctgcccggacagccttcagttagttttagacaatatggcggttatgtgaccgtgaatgagtcagcaggtcgatccttgtactattatttcgtggaagccaccaaaaccaaaaagtctttaccccttgttctatggctaaacggaggtatgtatctaccatctagttctacttttttttgttttttcctattcgttgagaaatcatacaagtaacaaaattgatgaattttgtccacaaaacataaacattcatacacaattatatatatatctatttttaaaatatgcaggacctggttgttcctccctatatggggcatttcaagagcttggtccattccgcatatatggcgacggcaaaacactctataccaatccttattcatggaacaacggtacaaaccttcttcttatggaatctttcgtctatcttcttttttttggatagtactatatttattattagaatctcccgcaaaatttaaaagtattatttacgtgtggattcgcagtggcgaacatattattcttagaatctccagtaggaacgggattctcgtacacgaacacagagtcggatttggagaatcccggggacatgaaagcagcagctgataaatacatcttcttggtgaaatggctggagaggtttccggaatataaaggaagagaattttacattgctggtgagagttacgccgggcactatgttccacaactcgcacaaaccatccttgttcataacaagaaccaaaacttcatcaacctacgtggcattttgattggtaacccgactctgaacgacatagtcgaaacaacgggttcgtttgattatttagtaagccatgctttactctcacaagatagtctccttagctacaaggaaaactgcgcaactgacactccaaaaatggaggtggattgcatcgcattgagtatgaaaatcgacgacgacataaaaaaaatgaacctatacaacatattgactcctacgtgcataaacgccacgttgaccccgttgactaaccaatccaaagaatgcaccactgtgctgcagtatgaaccgtgcggaatgcaatacatagcagcttacttaaaccgggaagacgttcagcgttccatgcacgtcacgaaattgccgcacacgtggatgctatgtaatgaagccacaggattcaattggaaccagacggattattctgcatcgatgctacctattctcaaagagctgatgaaacatgatcaacttcgagtctgggtgtacactggcgacacggatacggtgattccgttgacagttacaatgcacgctctgaagatgatgaatctaacggctgttacggactggcttccgtggtttagtgaaggacaggtgggaggtttcacagaggaatacaaaggcaattttagatacgccacagtgataggagctggtcatgaagttcctctttacaaacctaaggctgctcttactctttttaaacattttatccgcaactctcctctccctcttaccccttgatcatctatacactttgtaacaacaccacaacactcttttttcttttttctttttcacattcatgtaattattatataggtaaatgttaattgtgattttcttggataatctgcaaaactaacagaaaaaaacggatttaaaatttaagtaactaaccaaaaaaattgcgtattttgtatatcataaattttttggatcgttaagtagatctttctactttcacatgcatgaacataaggtgccaacaacaagctagatataacatttttttaccgattattccgacatggtgaaaatggtgtttccccttataaaatagccaaacttttttgtttatttggagtaagtttataaccacaaagatgaattttatttatttattttcatgtttgatttgcgacgaatgttaaaacatataatttaacactaaaaatttgtactgaactgcaatacattacatatataaacaatattttctaaaaattggctcatttattgtaattctattcagttctagaaaagaactcgtagactcaacgactagtaattttaataaaattacgttaatttcgtattttttcttttttcttttgtcatcagatattatttagggccaatcttttaggaatcgcgtcatatttcgttaatttcgttcaatagcgcaaaaaaaggtttcgatatctaaattattgatacagttcaaatcataataaattcggaattcagggtttaataaatttcggtttacatagatgaataatcggttcagttgagagtcgtgttttgtttaaaaaaatg

SEQ ID NO: 26545 - DNA, 3003 bp, Unknown
  misc_feature (1)..( 3003): 2750-1469P.txt file - cDNA_ID_2714528; gDNA_ID_2213619; Annot_ID_131938
aaaggacaaagatctaattcagcagctccccggacaaccttctgacgttactttcaaacagtacggtggttatgtggccgtaaacaaaccagccggtcggtttttgtactattatttcgttgaaaccatcaaacccggtaacactactcctcttgtgatctggttcaacggaggtatgtacatatagagaacatgtattccctctagaaactcctttacttggaactagttatatattttatttttttacaggaccgggctgctcatctctaggtggggcatttaaagagcttggtccattccgcgtacatagcgacggcaaaactcttttccgcaatccttattcatggaacaacggtacctagctataatttctaaaaatatattattagaaaccaacaaggtatattctcaagacatattgagatcaactaagtatgctattacatatggaattgcagaggcgaacgtgttgttcttagaaacgccggtagggacagggttctcatactcaaactctccaataaatgggaaacaaggagacaaggcaacagcagaggataactacatgttcttggtgaattggcttgaaaggtttccggaatataaaggaagagacatttacatcgccggtcagagttacgctggccactatgttccccaacttgcccaaatcatccttcaccgtaacaaccagaccttaatcaacctgcgtggcattttgattggtaatccatcacttaacagggagatccaggatgatttcggctacaaatttatgtttagtcatggtttgatatcccaacagcaaatggacaattataataaattctgcacggactccgacttatatgattgggacaagtgccatttggcgtcccaaaaaatagaagctcaaaaaacacacttggacatttacaacatatacgctccattgtgcctaaactccacattgagcagcgaacccaagaaatgcaccacaataatgaaggctgatccgtgcagtgggaactatttgaaggcgtatcttaacataaaagaggttcaagaagcgatacatgccaacaccacgaaaataccgtatgagtggacctcttgcaatacgaaactactttgggaatggaacgaaaaagataggtatgtctcattgacacctatccttcaggagctgatggggaagggtgtccgagtcatgctgtacaatggagacgtggacctggtgattccatttacatctacattggccgtggtgaagacgatgaatctgacggttgtaaaggaatggcgtccgtggtttaccggaggacatgtgggagggttcacagaggattacaaagggaacttaacctttgtaactgtgaaaggagcaggtcatagtgttcctacggaccaacctatacatgctcttaatatctttacaagctttatccgtaacactccactccctcaaacagcctgatttctaacttgtaccacccctataaacttaataggacactttggtccattgattgaatgatctaatgataagtatgatgtgtatgcgtctgtgatacaacactcaacaaattatacttaagttaattattgtcaaggaaataaaatttcgaaattatcaagcataaatttaatacagcagtagccactttacataaacaaagttcaatcccaaaaatgcattgtttctcttccaaacataacttgttcaaatctataacattcctgttgttttactgatcatcattccaagttagcagatgaatattcccatttccttgatattctcttaataggccaaaattgtgtcataatgtctctagttagattcggttgcttatctcttgtaatgcaacgcttctctcggaacggcattgtcgaattctccggtgaccaataatctgattgcaccagcagggaatctgttattttgatctgatccttcaattggctgtgagagtgagaacaatggacgatgattatactagagagatgatggatctcaagaccttagacactcgaaccctagagaagaaagatgttctcgctaagatccgggtaacttttttatagggttcctgcttccagatctttggttagtggatctaatgtctttgatatattctcgatgatgtatacatttggaatcatgtgaattctcgtacttagaaattgagtctggtgaaaaagttataatcttaattggattctttaacgttttgtgtgactactgtaaatttggtcactctttgtgtgttgatatgtattgaatctccatcaacattcgtgtcttactgtcttgtggtactacaaggtcttgctgtcacgtgagtaaccagagggtccagagaggaggacgggagagatgcccccataattattttctgaatcgcgacttcaacttaagtttttcgattagtcaagaaacgtaactacacatttgatagcattattacgtctccaatagtaaagtcctctattgctacttcacacgaaaaaaatgtttgtggatctcttgaagtaactagctaaatcgtgaggatattgagctggaaattgtctaagatttgagaattattagacggtttctaaacgctcaaaagggacttgaagaaattcgacttttttttattggaacctaggcaactatatcattatttacaaagaattagtttcatttgatttataagtttgttacagttaaacctcgaaaatataacgatagataatggctgctaaaaaaagataaaaaaaaatgtggattcaatgtttgataagaaaaaaatattgttatattttatctacggaggacaggtagttattatgttctggccttgtcggatttgttgttaagtttctacaaaaggttaaatgggttattaaaatagttgtcaaaagccaaaataaaacctataaaaatgctgccattcatattccaaaccattcgtctccatttcttttcaaatccttctcctaattctcataggattccaaaataagagaatg

SEQ ID NO: 26546 - DNA, 3000 bp, Unknown; identical to SEQ ID NO: 10049
  misc_feature (1)..( 3000): 2750-1469P.txt file - cDNA_ID_2714531; gDNA_ID_2213621; Annot_ID_131977

SEQ ID NO: 26547 - DNA, 3000 bp, Unknown; identical to SEQ ID NO: 10047
  misc_feature (1)..( 3000): 2750-1469P.txt file - cDNA_ID_2714547; gDNA_ID_2213621; Annot_ID_131973

SEQ ID NO: 26548 - DNA, 3003 bp, Unknown
  misc_feature (1)..( 3003): 2750-1469P.txt file - cDNA_ID_2714551; gDNA_ID_2213621; Annot_ID_131972
actttgctcagtttaataacctgaatgcttcttcccgccagagaaaacctttgacgataaaggtatactaattaagacgtctttcattgactttagtactctatgaaaaatctccatttagttgttttcctcttatcagtttttgttctgtctatattctataggatgctcaagctttaaacgagtggcggtttacaaagctaaaagagtacagagacagaaacattgaagtagaaaatgaagcttttgatcggtacatgagtaatgtgaatttactcgaagaagcattttcatttacatctgttcctgatgaagagagtcatggaacagcagctcctgagcaaaacaaagaggaaaatattgtttcagagcttaaactgaggctgagatcgaactctgcaagaacagagagctttaagaagcggatcgcggagacagtcaaagccggtttggtgaagcttaagagactggatttaggcagttcttcagatgatcaagatgatatcaaaaggcgggtcaaaagaaagaaatgggaagagaaaggttcagctttgaatgaaataatcgataaactgaacaaagcaagaaccgaagaggatctcaaatcttgcttagagatgaaatcaaagctctgtggtcaagtttctcccactgctgcttccgagaagaacaagatctttccgggtgtagtccgaaaagttgagatgagtgaagaagcacttcaaaaaatcgctgagaatctccaatcttttgacaaagttggaatgttgtgaagtcgagaacatcctgtggatgaactgaaaagtttgagtggcaagaaaatttctagatccttcgtgaccacggtattgtacaatgatcaaacatccctcaaaactgatcctgaagactccaaagactcaagagattcttgtaaagtagtgttgagcatcatttagatattagaactcagccatggataaagctgttgattctatctcattggatttttttcactgtgtgttgttgctttgttagatttgaaattgctcattggattacctttgacttaataaatagttggtttggtttggtattggataaccgctcagtctaattagaccggtttgtttttttggaaaaaaatgaatccatccatccataggccactttcaacacgtatatttgaaaacgactaaaaccaaactcttagattctagttttgttttgctgccccaattccactattgatcaaaacatatccaaaagtttttgtggaactaaaaagtaaaaataacgtttagtttgtttccaatttcaaccatatatatcttattcatatatgcatgttgtggttgtctcgtgtgtgtagtattcatttacattatgcaaaccaactggaaacatgttgaatgggttatgggttggtggttgggacttgaggatcaaacaactcaaatgagctcattataagttaagctctcaataatcattaatttatttttgttaccacctaatatttctacgaagggttggtgtaacaatttttaattgtaagataattgtgtaatcattttcaatattaatttttattatgtatttattttaaaaagttatataatacgtaacacatttagtacttggttttggtagcttcatcaatgtaccatccgaagttccaaaaaataaaaaaaaatgtcgatttcaccgttggtgaaaaagaaactaaattgatatgtattattcattttttagaagagattatgggtttaaatctgaaacttcttagttaaatttttaattaatttatttattttgcatgctttattatatatttgaaattagaatctacatgattaatgatttttttctcagatagaataaaaaatatatttactgataaattattcttttacatctttccggattcgctactaatgtgtttttgttaactttaaccagattgcttatggattatgatatatagtatccattacttaaaaagtaaaagagatgaaaaaccaagaataattaatgtcaccaaactatcaacaacaacaaaaagagagtgtaatattcaagataaacgaatcctattatataaaaaaaggtgggaagaagttgctgtctaatgatgtaattatgttaactagtgtgctaaggaaagaaatcaagcaagtctcacacatacacatgttatgacttatgattagcgacaagcatttcattttattttatttttgctaagcaaaccttttgtttagtaaaatagacaatgtgcaaaaaattccaaacttcttaaattgaaaaaaatactatatttaaatttacctttttaagtaagaaattaaaagattttgtagtacactacatgttttaaaacaaccactatccaaacaaaaacttggtcaccgaataaactgtagaaatatcgatttccgtcatttaaattcactttatttttggttgtttttttcttggaatatgcaagagtaatggcgtggttgaagacacgagagagagagagagaatcctaaagaaaaagccaaagcatattaagaagaagagaaccaaaacgaacaaacccaaccctaaagaaacactattattaaacctatatttatagacatttaaagagagagtgaaaggtgcagaagaaaacagagacagagttcaaataccttaagatcacatcatcatatagcttttgtatcattaaaatggcagttcaagctcaacaccattcctccaatctcctcttcctcaataaaaggttcattttctctctgtaaattcattatttgcttttagttttgcttattgattacggttttatgtttctttgtgtgaacagaaacgggaaagagaaagaacatagtaattttacattacaatcacaagcagctggagattttcttgatcaaaccaatatgttattcaacaatggaagttcgtaaaagttctcttgttttttccattaaaatttaccaaaattaggagacaaaatgagaatgtgtgtgtatg

SEQ ID NO: 26549 - DNA, 3000 bp, Unknown; identical to SEQ ID NO: 11070
  misc_feature (1)..( 3000): 2750-1469P.txt file - cDNA_ID_2714595; gDNA_ID_2214478; Annot_ID_133154

SEQ ID NO: 26550 - DNA, 3003 bp, Unknown
  misc_feature (1)..( 3003): 2750-1469P.txt file - cDNA_ID_2714599; gDNA_ID_2214471; Annot_ID_133086
cgatcttacggaggagatcaatggtgggaacttcatcggcggcagtcaatatctcttcgtctgacttgattagaaccctagctctcgtcaaagcgataagccctttgtcaacgacggatccgatcggattcgcgagagatgccaccgaatcccaaaaatgtcggagaggatcagcgacggtgtgaaatttaccgccgtaaaacaccttagctccggcgtagaatctctgcagatccagtgcttcataatctagaagctttttagcttcggggtacgcggtgatgaaaatctgaaatcctctgtcgagaaagaagccgtcgacgatatctgtacggacgcgtccgccgacgccatcggaagcttcgaggagtaggaaagggattcgtttggaggtgagctggtttgcggcggctaaaccagcgagtccagcgccgatgatgatgacgccagtttgattcttccgaatgtacggatcttccgtggaagattgagctccggaaaagcgttgatatcggtgatttgcatggccgcggcggcgagggaagaaatgagaagtagatgaggttgggagagagatcgccacgggcattttaaaagtttggataaggtttttctcattcctttactttattttccccgggaaaattatttgtctagaaaaaataatatatatatattcaaataattatttaaaagattcgaataagtcttgttttcttgattcttttccttattaatctgaacaaaaacaaattatgaagaccagagtcctagtcccagagaggaccgttgtcctagagacggatacagcccaagagacgaccttagtcctgcggaagatgaagaccaatgaagagtaggaagactggtgattgcttataggccgtctattttggcttataatgattttaaataagtgtaatggattttgttgcttaatacttcgtctgctatcttgttttaaatatttaagaaaataaaacgactttcgggattgtctttttctttctgttccatgtcttcttaactgctatgagtaaaagagctctcccagactcttcttctatctccaaaagcttttatttttgtttgtttattttggtactgataatatctgagtatatatataatatagtagaaacaatgagcaaaagtcaatatgtccgagtggttaaggagattgactcgaaatcaattgggctttgcccgcgcaggttcgaatcctgctgttgacggaattgtttttctttttagcttttgttgggttgtgaaaagtataacaaccttaataatttcgtttttttaatctaaaaatatacggtagttttctcatcatcaccaataagaattgtttgatatgaaacaacagaatcaggaaaatttgttaaaatgtcagaaaatggaaaaatctctaactgaacaaaagtaacaaaaaaaactcccttagaaacagaggaatcatgatgagagacaaaattatacagagacgtggagatgtctgtaacgttgtctcatccatcatcatgtcttcttcttctcttccttctcttttccggtcatccctccgtcctcggaacctccatccccgacgcggtgaacacggcggcgcgtttggtaaacagagcgagaagagcaaaactgtcgagagaatttctacaagcgcacaacgatgcacgtgtttcttcaggcgtgccaacgctcggatgggacagagacctggcccgattcgctgataaatgggctaaacaacgtaagtccgattgcagtatgatacattcaggtgggccttacggtgagaacattttctggcaccggcgtaagaagacgtggtcgccggagaaagtggtgacgagatggtttgaggaaaggtttaactacgacgtgaaaacaaacacgtgcgcaccgggaaagatgtgcggccattacacgcagatggtgtggagagagaccacagccgttggatgcgcacgtgtgaaatgccataacggtcgtggctatcttgtggtgtgtgaatatgatccacgcgggaattacgaaggtgaaagaccattttgatcaaaacagttaaaatgaaaaaattgttagagattcaaaatattttttcttcttctaatgtaatgaagatggtatattattcttggtccttacatatatacagccatgtattgaagaggtataaattcaaatggttcggaatcttttaattttatatattaaagatcaataataaaaaaaaacgtcgacagcagggttcgaacctgcgcgggcgaagcccaatagatttcaagtctatctccttaaccactcggacatatcgacttgttgtatttgtttcgtaagatttgaatacaaaaccgaattctctgttgcctaaatcggagcttttcatcccttgactctctaagacatctgaagcagctaaagtgttggatgtttcacataacgacatgggcggcaagcacccagtggacacaacaaggtacctttgttcttggccgccctctaattcgggtgaaattggaagagaggtgcttggtatatactaggatgcgtatttggtgcttagagatttgatgaaactgaagcagttagatattagagacaacgacctaatatttgcaggtgaagagttcagctcttttgtccgccaggtttttccaaagcttgtatggcttgatggccacaaactcgcaagttaaagataaatgttaggccacttgttttaattaaagtataaaactctttcgtttttttggattcattttcatgaaatcaaaagactacaagtctacacgtgcttcaagcttgaggctctaaatgaagtggtaggaaagaatgaaataataataaaaaaagtcagaaaaatggatggtctgagatcaaagtgaaacctactccacatacacatcccaacttcttccccgccatgtggacttttctttttcctactttctctctctgcattctctcttacacctgtctttatctgaaaaataaccgatg

SEQ ID NO: 26551 - DNA, 3000 bp, Unknown; identical to SEQ ID NO: 11007
  misc_feature (1)..( 3000): 2750-1469P.txt file - cDNA_ID_2714606; gDNA_ID_2214471; Annot_ID_133082

SEQ ID NO: 26552 - DNA, 3003 bp, Unknown
  misc_feature (1)..( 3003): 2750-1469P.txt file - cDNA_ID_2714610; gDNA_ID_2214471; Annot_ID_133081
aacgtgacttgtgtccgctcctattaacatagttttgttgtggttcatgaaatggcatctgaaatatttgtttgaaacataaaaacatgaacacaatgggtagtcatagtatatgtaatctgtaaaaaaaatcatgtttaaaacgatttttagaatatcttttcaatacaaacatagactcaaaacaatataagatttaacttacttagtaccataaaagatttaagagacaaaccttgagacagtgatgtcagtgctttctcgtgtgatatcaatcaaaccatcatagtaattcttgagactacaccgatcaatccaaatattgtgcgattttggtttgatctgaatagcgtctgcgtctggtcccacaccgccttcaaattcaagattgcagattataacgttttcacactcttttagccttaacccttttcccgttatcttcactttttgtcctctcccgtccaccgttgtgtgcgatgatacgttgacaaacgaagacagattgatcgttcccgatacatcgaacacgatccataaaggttctggcctcttgcaagcctctcgcaacgatcctggaccctcgtctgcacataagattattcgtttttatatgaactaagactcgaaccgcacaacatcgtactgccactcaattttaatatgaatttgaaaccagaggtgtccaaatttgactaaaccgacccaatgcttagacatcaatatggtggatatcagaattactttggcgtaaatgagtaagaatattttaaaaagacgtaagcagctctgatccaatgataatttcatttacattaccaatttgaacatggttaggatatcagccaccattttttcttaagatatatgcaagcaaaattcagaatccaacaaatggttaatttgcttttttttttttaccacagaaaaacaaattacgttgcttttaagattttttttttttgtttttaaattactttggaagttttgttcctatttggagtatttggctgacatatcacttgatcatattttttttctatttggagtaacaaaacagagaactacaaattaaataaaaaaaatatataaatccaagaatttgagggataaatgaaggaaaaaggggacttttgaaatttaccagctaaagaagtgacgtggcaaatcggaccatttagaccaccaacggcggcgcggccgaaaccttcggcctttccggcgagagagcggaggctggagtctacgtggcaataaggtcccactgtcatgtggtgatcggatggcgatgacggagctggagctggagctggagcggctgtatatggtggtgggaaaggtgaattgggagcttcgccgggaaaattagaaccgccgtgatgggatctgtgaatgccatgtaagtttcccatatctaatttatataacaaatgttgaattcaatttcggacagtttcagtttttgtatttttgggatataattgctctttgtttcaactgaaccatattgatggtagctttgttggaactgtgccagaatattgttctttttttgtcggaaaaaaaaaaactttttcatttttttttgttgccgacacaaatctatttttatttatttgaataaaatgttggaaaatgtttgtctttttgttaagacgatttcaaatttatagatattttcgcatgataagattctttaatttttatagagtccctttttattttgaatttacattttcatatcaccacttagcttaattttaaaaggaaatgacaaaccaaaataaaaatatgacaaatttttttttttggttattggacagaagtttaagaaatgtggctaaaggcttaaacatgatttagaaataatttttcaaaagtatagatatccttaatgaagcccaacacacatgtttgagactcgtcacaagtgttgacaaaccaaaaactaaagcccattgctaactaaccaagtttttttttccaattttcctaaaccgtatattgaagatatatgtacagtattcggtgaatttaaatcggaatgaaatgctgacgtgggaaacatccctaactgaagaagatgaagaagaagaaaaggcaacccaaaaaaaggtaattcagctgcttctcctacaaataatcagatcgcaaacccttgccgtgacactgaaggcaccggtggccgacggcttattcatctttctccaatcggagagtcgtcgttttttacaatatcatgatcccgctttgaaatttctctgttttctaatctctcaaaatgggatccagaatcgaagaaggtacaatgatttctccttctccttcattttacatttctgactccaatcgttacgaaaattcgttgcggaattagacaatgcgtgttattagggttaggtcttgaaatatctcttagggtgttatttttttttaatcattttcttcaacggatctctagtttacgtgataaacaaacaaacattgtgtaatcaatctcactctcgcagagaaggaactggaaccaggtatggagaagggtctggcgacggatccaacgagtcctacagggagtactgtagcggacctgtcgccaactccaaccccaaggaagactctggttctgtccaattcgggtaaggctttaatggtgtctaactcgagcaagtccttggggctttcgaattcagggaaaaggtttgatccaacggggaagaagaagtatgttaaacaggtcacgggacggcacaacgacaccgagcttcacctagctgctcaaagaggagacttggcttctgttaagcagattcttagtgacattgattctcagattactggtaccattaccggagctgattttgatgacgaggtagctcaaataatgacatccgtagtaaacgaggtgaatgagctgggggagacaccgcttttacagcagcagagaaaggaaacatagatgttgtcaaggaattgttgccttacacgaccattgaatctcttatg

SEQ ID NO: 26553 - DNA, 3000 bp, Unknown; identical to SEQ ID NO: 11005
  misc_feature (1)..( 3000): 2750-1469P.txt file - cDNA_ID_2714614; gDNA_ID_2214471; Annot_ID_133080

SEQ ID NO: 26554 - DNA, 3000 bp, Unknown; identical to SEQ ID NO: 11005
  misc_feature (1)..( 3000): 2750-1469P.txt file - cDNA_ID_2714614; gDNA_ID_2214471; Annot_ID_183019

SEQ ID NO: 26555 - DNA, 3000 bp, Unknown; identical to SEQ ID NO: 11003
  misc_feature (1)..( 3000): 2750-1469P.txt file - cDNA_ID_2714633; gDNA_ID_2214471; Annot_ID_133073

SEQ ID NO: 26556 - DNA, 3003 bp, Unknown
  misc_feature (1)..( 3003): 2750-1469P.txt file - cDNA_ID_2714639; gDNA_ID_2214471; Annot_ID_133107
gtctgcacaaagatttgcataccacctctcaacctcagaaccaagtggagagttgactctttctggatgttgtaatcagccaaggtaaggccatcctcgagctgtttaccagcaaagataagtcgttgctggtctaaaggaatgccttccttgttctggatcttagccttgacattatgaatggagtcggaggtttcaacatcaagtgttatggtcttttctgtaagagtctttgcgtagatttgaattgtcatctgtaaacaattttttttatgggagagaaaggaggattctgaatggtaagaaccaaaaagatcaggcgaaaaaagatgatgagaagagatagaagaaacaaataccttgagagagagtagtagtacttcacagaaaacttttgcagaacgatcgatttagggtttgagtaaaagcgtttctcagtttatatagaagaggaaaagttttggatttaaatcagctttcgataattataaaatattcgacttaatctgttaattaaataattcgaaatttagtattatcttgtttatcgctttgatttttttataaaatgcgaaccaaaacaattcttgctttgattatttttataaaatacgaaccaaaacaattcttgctcttstgatatggcgtgcacctcaaaatagaaggttctgaggggtggcactttagtctttcttcaccttacaagatcactagcatctgaaatcgcttggaaaatgaaatattcctgaattgcttagagtttagacttcaattagagtaataaaattccactctccaaaaacattcatgcattgcacaaagctatatatataatcaaacctttactaccaaactttaagagtttgtttgcagaattcaattattagagactttcaaaccgaaagactcaaaaataaaaagttgctcaacatagaaattgaagtccatgcttctattattgtgtcgccatgatggaactcatgtaagcagacttcttgccagatgctcccgagctgttgctagcgcttgtgttagtgtctgcaataccgaaatgtaaacagagggttcaaattagaagttcacgtttgtgtttatagccaaaccagaccaaagttatagcaaaactaaatcaagactattgcttttccacagggagatgtaacaataatagtcaaaagtgtcgttacctgttcagagagtgaaccactagcttctgtgctctgcattgctactttccccgcaatgacgtttggatccgtttcaagaaccacccttaacacatattccataataagccacaatcagacaatagctaactgctaagatatatgggacaagcttaaaaaaggttgagcaaatctttagcatgcttaagacttttatgtaattgtcgtgtagggctaaactattaaacttgcatacccttgatcgaccatttcatcaaggcatagaaagatgagatccaagttctcaagggcttccatcttttccacattgctcctggtaaaaaaaaaaagggatgcatcatactttagttgtggagatggttgatcaataaataaaggcatattcagttgtcaagtcaaacaaatacctcagaagaagtgcaacagcatcaaaaaagccttgaagaacagaagctaagatgagctcgttttcattttcacctccagtaacaaagaagtgaaggtcctgggcaaacttatagacaataatattgctgtccaacagtgtgatctcagctgcacataaaacatcgatatggctatttgaaagagataagtatataagcatacacgaagtcaggaaacatgatagaaattgtgtagatgaaaaatgttatgtagtcttaccttctgtacgagcattggtcttagaggtctttgagaatacatacttctcaaaacttaacttggcggcattagttggccagtcatccgagtaatacttgacagccacacgctttccttcagagtctagaagaagaatgttctttaccaaaggacaagaatcctattcaatgtacattggaaagtcagtaattaagttccagtccaaaaaaagagtaaaactcctacaaagctgtatgattgcggcaacatacacacattctaacagaatacgaaatacaatcatataatgcatatgtacttacaggagacattgttgtaagacttgagatgtacctgaaacagtgacaaaaacaaaaccaagtagtatctgagtcaaaaactttcgattttaacaagatattaaaaacttcaacccacactcacagttgttctagtcactggtacaaaagagtacatatactaagatcatatgtgacattatgtgtgtagtgtagtaaatgtaatgttgatgatctccatgacaagatagctattatttcaaccagggattacaaatggagattgacgtatttaataatagacaacgaatcaccaaaattcggattgatacatacatgcattaatcacataactaaatcttatcggagaatcacataactaagcacagatgagaacgcaaacaaatgattcaagactcaaataggcagcaatggatctcgataatcataatccaaaggatcaccggaataaaagatcggagaagaagtaatggattggaggattcaaatgtgaaaagcgcaagatcgtcgagacagaagaaatcgcctcggagtgagagagagctcctttcgctgtttcagtgtcacactgcttatcgggatctgaatgcttaatttcatctgaccggtttttataatttattgatatccggttcatttgaccatggccgtttaagaacataggctgatgccgtttcttattttcagacactaactktgtgccgttttatttcatggaaatcgaaatgttctctgcttctctgctggagctagagaaggtataaaagtaaactttttcaggtccaacgcagcaaaaagtctcctctttcctctctttctctctctgcgtccttctgaggctggaagcgatg

SEQ ID NO: 26557 - DNA, 3003 bp, Unknown; identical to SEQ ID NO: 26556
  misc_feature (1)..( 3003): 2750-1469P.txt file - cDNA_ID_2714639; gDNA_ID_2214471; Annot_ID_183047

SEQ ID NO: 26558 - DNA, 3000 bp, Unknown; identical to SEQ ID NO: 11010
  misc_feature (1)..( 3000): 2750-1469P.txt file - cDNA_ID_2714662; gDNA_ID_2214471; Annot_ID_133098

SEQ ID NO: 26559 - DNA, 3000 bp, Unknown; identical to SEQ ID NO: 11011
  misc_feature (1)..( 3000): 2750-1469P.txt file - cDNA_ID_2714666; gDNA_ID_2214471; Annot_ID_133097

SEQ ID NO: 26560 - DNA, 3000 bp, Unknown; identical to SEQ ID NO: 11011
  misc_feature (1)..( 3000): 2750-1469P.txt file - cDNA_ID_2714666; gDNA_ID_2214471; Annot_ID_183035

SEQ ID NO: 26561 - DNA, 3003 bp, Unknown
  misc_feature (1)..( 3003): 2750-1469P.txt file - cDNA_ID_2714670; gDNA_ID_2214471; Annot_ID_133095
aatgagtaattggtaagaatataatttgattactcattcaaaagtagatgtcaatctaacttacattttcttcaatgtagttcaaacaaccatcattggggacaaaggcagcaatctttttaccattcttgatcaactgaactctagcacacttacggatagcagagttaggctgcttagcctcaataccactgcataatcaaacacagagtctcatcaaagtcaagatctatactactaacaaaatcaagaaatggtaaatatatatgtttatacaaacttacattttctcaagaacgattcctttagcgtgagaagaacaagcaaaaggcttcttccactcgttgcctcgattagacttcttgtaatgcttgtccgcccacctctgagtaatccgaagctgcttaagcttgcgaccagctcccataccacgtgtcttactgaagatattcaaatagaagataaaagaaattgagaaccaaaggacatttcatcagatgaaatcaactcactcagaacatataaaacaaattcggagttgataaagaacataaagttataatctaaatcacaaatacttaacacaagaggagagtgtagtaaggaaaaaaatcaaaaatcataatcataatttccacatttcagaccaaataactccaacgtttataagaaaaaactacgaattatagcaacttcgtagcttcaacagggtgattaacaaagtattactacacgacgtatgaatgtcattcaaatcccttaattcaaccatcccgacccgagataacgaaaacggcaaggcaccaaagagaaaccggaataaacaaaaaaaacataaaacaaatcctaaacccgacataacaaaaacacgatcacttataagcggagagatgagactgaaacataaagagtctaagagaggataccgtaccccatgttgacgacggcgcgagtgaaaaagtcgagagatgagctgaaactgctaaaggcgcgacgttttaagttcgtgagagattgaaaaaccctagtgataagaaaataggtatatataggcttgggtcaagactcgtgagagccctggtttaggcattaaccggtctgcaatgaaattgattaaacggcaaatgattatttttatatttgggcttaacaagaaggcccatcacatgtcaacccaaatattatgccaactccttaaggtaataatacgggaaaaatgtcgttttatacgtgaactttaaaaaatggccatttaatacgaaaatttttgtgtggccaaataaaacataataaaaacgttgaccggccgtttcacacaaatattattgttgactacgccaaagtctccatgccgttatctttcattaacggatccgttaattccgttaacacatgttaattagtttccgtcaatactcaaaacgacgtcgttttattgaaatcaaaaaatcaaaattcctaaaattgatttcaaaatctctaaattccaaaaaaacaaatccttaattcctaaattccaaaaatcaaatccctaaattctaaaaaccaaatccctaacagcctcttattttcagcaattggtcgtcgtaatagtcatcgtcgtaaagatcctcaagagagctaaagaagggccttcgctttgatgtttcctccttgttcatcatcgatcttgttcctcccccttcgtgaattcaaacgaacaactgctgtcaatagtcgaatgttattattcatattcaaattggttctcatgtgtgtgtgttcgtaacattttattcacaagacaacaaaacaaaaacagggaaacttccaacatgatgaaataagattatgagagtgagaaaagaaccttggacaacgggattgagattcctaaagaagaacatgatgttgccatgtgaagcagatggattgaagaaaaatgaattggattccattttggaatttagggattttgaaatcaatttgggaattttgattttttgatttcaatgaaatgacgtcgttttgagtattacaggaaactaattaacgtgtggtaacggaattaacgtatccgttagaaaaagataacggtatggggattttggcctggtcaacaataacatttgtgtgaaacgaccggtcaacatttttattatgttttatttggccacacaaaaaattcacgtattaaatggtcactttttgaaagtttacgtataaaacgacatttttcccgtaataccgtatacgctgcattgaaacattccagtcctagtcacgtgcacggtgcacctactagcccacgactcccacactatccgccacgtcagaaaacgaaaccggttgtagcaggtaaaaggcacacaaagctaagcataaggaagcgcgcgacacgcaccggttcagccggtactctgcgtcgataaacgacatgcaagaccgtccattttcttaaaaaagcgatcttgatctgacggtccttatttgtttattcaaccggtaaaatacaaaaaaatcaggaaaaggatcgtggatcgtcaatggcggactggagtaaatttctttgacaataaccagtcctaaatcaaggtagaatattgcaaaaatgttcaatggaagaagatagattggtgaccatgattatcaacgacgtctaagctgtttctgcgtcatttggtaagtgaagcttttgtctctttcgatttctctaatgcaaaaaaaaagggagaaagattttgattcgttattgaaattattctctttgagttattttaattagaaagaagtaatttttatatatatttgtcaagaaaaaaagtgagcttgaagttcacgcttgtaaaggtgtcagttttgcagctcattatcgccatgttcttctctctcgcgctctttgtgttttcttctctttgctcataagaacccactttaatgtatgttcaggtcttcttcttcttcgtcttgttgctctgaagagttggtcctgacttgggatttagggatttcgttttgataatg

SEQ ID NO: 26562 - DNA, 3003 bp, Unknown; identical to SEQ ID NO: 26561
  misc_feature (1)..( 3003): 2750-1469P.txt file - cDNA_ID_2714670; gDNA_ID_2214471; Annot_ID_183033

SEQ ID NO: 26563 - DNA, 3003 bp, Unknown
  misc_feature (1)..( 3003): 2750-1469P.txt file - cDNA_ID_2714682; gDNA_ID_2214471; Annot_ID_133090
agcaaattttcactctttaacgctccatttcgtacattactttgatcatttttctttttatctatttttttcgtcgaccgttttctttgacgatgtttgttatatgattctaaaagcatccacaatggtagactcttagcaaaactcttaacaaatatttaaaaaattatataatttaaatattagataaatctcttaaatttggtaaaacttaggtcaattgtctcttagttaagagacaaatagtcgggttttattaggcccactagttcgttaaaggctaaagcagtgcccggttcttatagcggaggtaactttaaatattgggcccttactgaaaggtaaattagttgggtttattgggctttattataaggcccactaattcagcagtaaccctaacgaaaccctagcatatattagttcttaaacttcagctgagagaaaaccctaatttctcaaagagtctaaagagacggagagtgagagaagagagaaacatttcgagacaaatggccgccgccgctgctcgtcctctcgtcaccatccaaaccttggatggtgacatgtccaccgatcaatcctccaccgtcgtacttcccgacgtcatgacggcgccagttcgaccagacatcgttaacttcgttcacgcccaaatctccaacaacagccgtcagccatacgccgtatcgaagaaggccggtcaccagacctccgccgagtcctggggaaccggacgtgccgtgtctcgtatccctcgtgttcccggtggtggtactcaccgtgctggtcaagctgcgttcggtaacatgtgtcgtggtggtcgtatgttcgctccaaccaagatctggcgccgctggcaccgtcgtgtcaatgtcaacatgaagcgtcacgcaatcgtctcagctatcgctgcaactgctgttcctgcgcttgtgatggctcgtggtcacaagatcgagaatgttcctgagatgcctcttgttgtgagtgactccgccgaagctgtggagaagacctcagctgcgatcaaggttttgaaacagatcggtgcttatgatgatgctgagaaggcaaagaacagcattggaatccgtcctggtaaaggtaaaatgaggaaccgtcgttacatttctaggaaaggtcctctggtggtttatggaactgaaggatctaagatagttaaggcgtttagaaaccttcctggtgttgagctttgtcatgtggagaggcttaatttgttgaagcttgctcctggtggtcaccttggtcggtttgtgatctggaccaagtctgcctttgagaagcttgagtctatctatggttcgtttgagaagccatcagagaagaagaaggggtatgtgcttcctcgtgcaaagatggtgaatgctgatcttgccaggattatcaattcagatgagattcagagtgttgtgaatccgatcaagaaggatgcgaagagggctgttcttaagaagaatccattgaagaatctcaatgtgatgttgaagttgaatccttatgctaagaccgcgaagaggatgtcactgttagctgaagcacagagagttaaggctaagaaggagaagctcgccaagaagaggaaaaccgttaccaaggtaatctcaatacttgacttgttctcttatcaaccgtttttggattgtctttgtttagttactgattacattttgatctgtggttgcatttcatttgacttaacttatattgcaattgttctaattgactgagtttgtgtatgttaagctatacaataatctgttcccctctggtttagtctatgactatagtagtctttctttactagatcttaccttttctgttctgaattgtggtctagtagtttgtcttgtaaatctgttgtgtacgattctttgtcttgatattgattttaggttgagctattaagcaattgaatctcttagcactttcttgtcccttgtgaaaattgttcttcatatgtcctcttttctaactccactttgaaatatctatttttcttacatcaggaggaggcgttggcaatcaaagcagcaggcaagtcgtggtacaagactatgatctccgacagtgattacaccgagtttgataacttcaccaaatggctcggtgctagccagtaataatctcgtctgctttggaacactttccatattttagtcaaaagattttggtttttttaatctgttttgtctttgggtgtctggatatcaagttgaattatgaacaagtttcacttttttacatctccatttcttacttcgcctttatcagtttcatttatttatctcttgctccttcgtttcctatgatgatgcttgttatgttatgaacctacttaaaaacaagctgaagctttctttggtttaccccagcagaaacattaatcaagttcaattgatcaatatgtcgattgatttactgtttaaaggcatagtgtgtctatcaacccttaagtctttttggtggatagtgaagctcaaacccaattcaaatgtcgatcaaccctaacgtttttgtgctcgatagtaaagcatgagtataaaaagaacgtcgcttcttcctacaatcacacagatcatttgaagctttgattagttggtacaacatactcgaggaatacagaatgacacgtggtgtgtatctgttggataaatttgtattattcttctttactatggatggtttctggaaggcgcgccaagagtccttctttttccatctacaaatcatgaccgtccatctccaaaagaagactgaaacagtgaaactagaagcttcattttgatcatcagccagttttataaattgatccgtatactaaagtaacaactactagcactttcttctgtgatcgatcattgtgtttaaactaaaggtttgtatgttcttgtaatcttattgatctcgataggttctccattctctttaggttttaaagccttcaacgatttccagaaggaagcgaatttgaaaaaaatg

SEQ ID NO: 26564 - DNA, 3003 bp, Unknown
  misc_feature (1)..( 3003): 2750-1469P.txt file - cDNA_ID_2714694; gDNA_ID_2213622; Annot_ID_131999
tttcgtagccatagatggacagatgaagctatatcagaaacgtttggtgtcgtctgtttggtgtcttattaagctgtaagtaacggaaacgttttattttatttataggtttatgaaacccttgctggaattaaagtcgaagggagacttcctgttctgaagaaacaagacctactgaaatctcttccagctgaatggccttcagaccctacaactgacatacatagactaaatatgggaaactcgaagacattggttgttcttgatgatgatccaactggcacacaaactgttcatgacgtagaggttttaactgaatggttagccttgcatctttctctatgaaaaactgaacttatcgtgtcaacaaaaaagatatcatgaatctttcactgaaataattggcaagtcgctagcctagaaactaatggaaggaattgataattgcttattgcttttccctacattttgacaggagtgttgaatctatttctgagcagtttagaaaaaagcctgcatgcttcttcattttgacaaattcaaggtccctgagccctgagaaggtcaagacaatttttattttgtgtaatctacttattgcagagtcccaatttcatggaacaatgaaactttatttttacatcaacttcaccaatgccaagctctaactgcatatttcatcaacaggctagtgaattgatcaaagacatctgttccaacctatgtgctgcatcaaaagaagttggcaatgctgactacacgattgttctgaggggtgattcaacattacgtggtcattttcctcaggcaagtttggtaaccctatcatgaaatagcagactatcatgtcaatgttatgatttcagcttggcatctgtttctgtcataacttgatattatgatccacacacaggaagcagatgctgctgtctcaatacttggggaaatggatgcatggattatttgccccttcttccttcaagggggacgttatactattgatgatgtgcattatgttgcggattctgataggtatgtctttgtgagcaacgtgtgtgtgtgtgtgtgtgtgtaattttttcaaactttcagaatcagggaaaagttcccttcagaggatgaagattgatggtcttcattttgaatattgcaggctcgttcctgcaggagagacagagtttgccaaagatgcatcctttggatataaatcctcaaatctccgtgaggtcttaattcttccaacaagggaatcatcttatgttatttgaccctttaagaaattaatagtaaggaacaatttgatatgatttcagtgggttgaggagaaaacagctggcgtcattccggctaacagcgttcagtcgatctcaattcagcttttaagaaaaggtggccctgatgcagtgtgtgagtttctgtgcagtttaaagaaggtaaatttttctaagcagatttcgcgacgacttctggatgttgctttccgtgaacttttggtcttcatagttgtggaatcagttagtcccagttgtgtagaaagtcttaactctatttccatttcatatgtaaatcaggggtctacatgtattgtcaacgccgctagtgaaagagacatggctgtatttgcagccgggatgatccaggtaagccgcccaattattcttctagtctttttagtttttgaggcatattcaattagaggatacatttatttttctcttatattcttggtcccttcgttcgattgaacattatatttggcaggcagaactgaaagggagatcctttttatgccgcactgctgctagctttgtgtctgctctaatagggattattccaaaagatcctgtgttgccaaaagatttcgaatctaacaaagaaagcagtggtgcactaatagttgtaggctcatatgtcccgaaaacaacaaagcaggttagattatctactaacaacactaatttctttgatatcttctcaatgaaataaaattaaagagccctgagtcattttcttctaactaacaggttgaagaacttcaatcacaacataaccagaatttaaggagcatcgaggtaagagaagtagatgtaacacgggatacttatattagtatataccacatgttatgcatgctttgtttgctaagttctagcaatgatcaacagatctctgtagaaaaagttgctctcaagtcatctgaagtgagagatgaagaaatcagaagagcagttgagatggccgatgctttccttcgggctggcagggagactctaattatgagcagtcgtgaactcatcacgggaaaaagttgttctctatctcaaatctttatatatttgtgtcgttggtataaaatcatgactgaggaatatcatcattaacgggtctatattcattttgacagcatcttcggaaagtcttgatattaacagcaaagtgagctccgctctggttgaagtagtgagccagatatcgaccagacctcgttatattcttgctaaggtatttagcttctatatttatctttccatctcataaacttcctgacacactctgtcaatccccagttgaaatggtaactgttctatgatccaaagcctttcgatttttttttatgacactgtaacgtcattgtttagggtggaattacgtcatcagacacagcaacgaaagccctgaaagcacgacgtgcacttgtgattggtcaagcccttgctggtgttccagtatggaagttaggtccagaaagtagacatccaggggtcccctacattgttttccctggtaaatcttaatttgtattcaaaacatttaactgaataaaaataggtattcttaatcaactctttttccttatatgtaacaggtaatgttggtaacagcacagcgcttgcagaagttgtgaagtcttggtcagtggtagcaggacggtcgacaaaagagctgcttctggtgagtatccttctcgttctctagcttcatatatctcttctcatattgatg

SEQ ID NO: 26565 - DNA, 3003 bp, Unknown
  misc_feature (1)..( 3003): 2750-1469P.txt file - cDNA_ID_2714698; gDNA_ID_2213622; Annot_ID_131998
ttttcttttctaaacttgattgagacatagtgcgattaaagtgtagaatgtgattaatacgatagagtagagtagagtagagagaagaaaacgcacatggacgaaggatgggtctgattgtgaagagctgggcgatagggcagagctcgagtcacgacgctacctaactcatcattagacatggcttctccctccgttttgtttttgtttttcatttttatactttgacatcataataataaatttatagttcatctgtttttagaaattccaaaagccaaaaacaaagattacataacataagtcggtaccatgaaacaaacaatatatcatatcaatatatatacagctcaatagttgtctggaactctggatacatttattcatttaattaaaggaaaatttgttagttgccacttttttatacagtatgttttttaatcaaggttttctattgttaaaacaaaagcattataaaaaaacatgccatgtataatcattactgtagatttggtattcagatgtagacagataaattcatgttactcaatagattaacgttataaatttaattaataatttgtagtcgattaagaaaattatatagacttcatatgtgtacattatacgtatacagtaacacacagattagtatcaatttttaggctttatagatgtaagaataactatatcaaattttgttgaacattattagtttttatgtctggtgtatatgtctatatatgtggctgtatgtttacttgcgtatatgtatttgtcgctgtcagattttaaaacagttcaaattatgtgatttgatttgtcaagtgccctggactttggactctacttgttttgttgtttatcgctcgttttgttggattaaaataaattaaatcgaatccatttgatgaactgtcatatggtttagtatatcaataattttacaacacaaagtcactaacactcggataacattattattatactaacacatccattagctagaagcctagaactaaagtgaaaaggggatcttaattagctatcgtcaacatatttaaatcagggaattattattaattacattatctgggagttggaatgtcaaaatcttgacaggaactaaaaagctagcttccaaaaacgttagctattaaattctagctaaggagtaacatatacattttaacagtctttttaaaaatatataactgagatatgtgtatcataaactggagtttgcaaactagttgttcgtattgtaacgttatagttaaaatcttccatattcaggtgcactaatttacatgtttatgactaagtagaagataaaaatgaaaattaagaaccataatacgaccatttataaatctggagattagacaatatgttggtaattaaagagttgttggaagttattagtactattatttggatttcatagtacatatagatcagttataacctttagttgaaataaaaacgttaccgaacatggtctgattaatttccaacaaatgaaaacctagctgataaagacgtgaaataaatatagtagatcatcagaagaagagtgttgccacgacagccgatgcaaagctaagtccaccgaagttgatggccggggctgagcttgttggcttggccgtcgaaggagctgcatttccggttgatccgcttcctgttcctgcgttttaataagaataaaattacattaataatccaaaattttaaaaacttagttttataccacgaaaaatataattctcgtataaaaccctcgcaattcgatttaaatttcaaatatttaaacttctatgtattcataccggtactggtggaagatgccggaggagttttcggggttgccggcggtgttgaagacgaattagtaccttcgttaacacaaaatattgtcgcattaattaggctagatatataagaaataaaaacggcgtgacattaggctaaattaagaaactaattaaaacgacgtcgtagtatggtttattcaccggcgctggttttgcatagtgacacgtcagctttggcgccacaagccttggggagatcgagagcgttttctttagtgaggttaagcgatttgagcatatcaacgttgttaaagacagcgcagagacacgtggcgtctttggctacgatctcattcaacggcatgcaacacgtcgccggcggcggagtcgccaagtgaagatacggctgacacggcatcagtttctgaatacacggcagtgagtgtgcgtctcctcctgcaccgccgctcggtggtgaagtcatctgagcattagacgacgtaacgtagcaaaatacaagaacgacggcgacggcgaatctaacagcctccatttcaaaacgttaaatatctctttgtattatgttctttctatctttagttggttgtgaagatgtgaaagttgtaaaacatgcgtgtggtttatatatgtacacaaggtggttataatttttggtttttgaatttaatccagctcaccagcctgatttttcgagataatcagtttctgatcctatcattatgcattggaaacgaagactaagctctggattaattagaaaatcgttacatttattattacaggagttgccaattttaagagtttagatgtttgttcatatagaaagtgtaatgatatggtaccttaaatggaatgatatcatatatgttttctcacctaacacaatacaacttcttatcatttttttttaataaatatgtataatgtacgattactatttctttttgatcaaaaaagttttgcttttggcagataagttaaaggctaaaaggctgttggatatggacttccacgtaagagcctacacgatgtaacgttacattaatctcaatttgttaaattatagtatcatatatatatatatagagagagacagagagatgcatatgaaattggtttgttgactgtaaattacatcggagaattgtagtgatcggagaaaatg

SEQ ID NO: 26566 - DNA, 3000 bp, Unknown; identical to SEQ ID NO: 10065
  misc_feature (1)..( 3000): 2750-1469P.txt file - cDNA_ID_2714705; gDNA_ID_2213622; Annot_ID_195754

SEQ ID NO: 26567 - DNA, 3000 bp, Unknown; identical to SEQ ID NO: 10065
  misc_feature (1)..( 3000): 2750-1469P.txt file - cDNA_ID_2714705; gDNA_ID_2213622; Annot_ID_131995

SEQ ID NO: 26568 - DNA, 3003 bp, Unknown
  misc_feature (1)..( 3003): 2750-1469P.txt file - cDNA_ID_2714711; gDNA_ID_2213622; Annot_ID_131993
gaagggttctatgggtctgattggcctatacaagcaaaggtgaagcgtaaggagatgtcttccgctgatgcacattatatctttgtgcgtgagctgcgttttggtaaagcctatgagacatctactcaaagaacttgcatggaagggtgtaatcagatagctggatttgtgcattaccggtttattttagaggaagagatacctgtcctttatgtgtatgaaatacagctggaatcccgggttcaaggaaagggactaggagaatttttaatgcagttgattgagctcattgcttctaaggttgattccaaaattagtctcttatattcctatttttcgatattgatggcattagcttctgttttcagattcatagcctgatgataatattgttatgttcgttttcatcttctcagaatcggatgagtgcgatcgtgctaactgttctaacatctaatgcattggcaatgactttctacatgagcaagttagggtaagaggtacaccttttggaagatgatcttatttcatgtaacaactcagatgatattttttgcaagtgttcatgggttcctaatatttctgtttcttgctgtagtcagtcatttctatttctcgactctttactgatattggctcgtccaaacatctgaattcccattcgtttttatacagatacagaatatcaagcatttctccctcaaaagctaatcttccggtacagaatcagtagtcttatttttcattattttgtataaggcattcactaaaagaacttctacaattttttgtgtttgcagactctctcggtgaagtatgagatactttgcaaaacttttgattccgaagctaaatctgtgttggaggtttgccctttcgctgcaccactcacatttatgacaaaactgctgatctaatataatatgtgagtgcttcttttgctttttatcttggtattgtattattaagactgctatgattgctttattttgcaagaagaatgatgaagaacctaccaaagattgagtatcaagcatggaatagcacatatagattcactgtaagtttccactttggtctactggagatatcagcaatcgtttattgtttagttttctgaaaaatctgttgcttgaatctgacagaccacagaggggtgtgataagatgcatttagaaaacagacgaatccgatgaagacttggttcctccaatgacttggttcacaccagaggcagatacagaactccaacaatgcctagcaactgccaaattgaccattttgaaacctgagtcctcgcaacaaaccagtcgtttgcaaccagcggagactaaatttggtaagctgtgagtacttctaggctttcttaaccttacggggagattgtgcagttatatactaggactaggacttagtagagtgagaacaattgttgaatttggttttgatataatgaatcagagagatatcttttcttttacaaaattgccaaaagtattgaatcatgagtgcttgaaccttaatttattgtagatagacaaatgtgagatagaatatgaattgcgtaacatagaaggacttaaggacctcattatcatataattaaattgaggaaaagatcttgttcttttttcatagtttggggtcagaaagcgatcattttaatttaaaacatataatgtatatatcaaaaatgaaacaaaaagataataataaagagaggaatggggtgatctgtccgtatcaaaattgtggctctaatagtttgtgtgattaagaaatatagttgtcacatccgacaccatgtgatgcgacttgatttgcccattatcccaaccattttataatcttttgtcatgaacttttctttcatacagttttataagactaaagagatattttgaaatcgaattactacataatacatatcaattactcaagtatcaaatcatctaattaatcaagtgatttttttaactcaagaataatgtatttttccctttacaaaaatcgaaggttacaacttacaaaactgaacaatgagactagttttggcctttttgggggcaaaccggcaaagagtaatatcacgaaagcaagtggaagtcagagacggatcggaaacacacaaaaaaaggatatcttccaaataatcacaaaaaaatatcttcttcataatttgctaacgtttcacattttttatccacagaatctttttctgtacggattagagaaacagatcagattctttgaagaagacacagcgcgtggtgtacactagcgagagtgagtgttagctttgttctgagccacaagatatctctctctcagtgtcaaccttctcgaaatttccatgaacattaaataatgataaaaatctgaatctgacgtggcacatctctgctatttaatataaaaaattggtcacttgctatttctagtaccttctttctttcttcactctctcctgtctcctcttctcactgtttcctatttcgtaattttctcgagaaatcgtcttttcttgtttacgctaatttgatttctcgagaaaaaaaaaaggaagcagaagaagattcttattttatctttacactgttcagaaatcttcggtggacggataacttgcagagttctgattgaggtttctttttcttttccctgttttctcttggatcttgtttcttcatgtgcggactatacaaaaaactgattcggtgaaattaatcagctttatgctctgttttgttcgctttcaggctggttttgtgagaattatagttgcagcaagaaagcgtttcagatattttttaatggccgctgaggtaataattgactagagattgatgaattaagagtagttattgacgcttatagaagaagtagattctatatgaagaaagtttctttttttggaagaacttgaagtaaaagccatttaatttcatttcttgtttccacttcaggatcgaagtgaggaactaagcagcaatgtagaaaatg

SEQ ID NO: 26569 - DNA, 3003 bp, Unknown
  misc_feature (1)..( 3003): 2750-1469P.txt file - cDNA_ID_2714723; gDNA_ID_2213622; Annot_ID_131990
atgttgaacaatcaagaaatactctatacttcgccaaccgagccaaggaagttacaaacaatgcccacgtgaacatggtaatgatctttgttccatgcttttggttcatcttagtgcccttttggatgaaaacaaactaaaatatttacttcctgtctattatctacaggttgtctctgataagcaactagtgaaacatcttcagaaagaagtggctagattggaggccgagcgtcgcacccctggtccatcgacagaaaaggatttcaagatccagcaggtttctgtccatttcagatcaccaaaatatataattgaaccaaagctttggtacttagtttatggctattttgtgacattctcagatggaaatggaaatcggagagcttagaagacaaagagatgatgcacaaattcaacttgaggagttacgccaaaagcttcaaggggatcagcaacaaaataaggtctcttaatctacctctctgtctatctactgtactaaatatattcacaagcgttggctgaagtttaaactaaaccttttgttgaatctcagggcttaaatccttttgaatctccagacccaccggtcagaaaatgtctttcctattctgttgccgtaacgcctagctcggagaacaaaacgctaaaccggaatgagagagcaagaaagactacgatgcgccaatctatgatacggcaatcatcaactgctccatttacattgatgcatgaaatccgcaaactcgaacaccttcaagaacagttaggggaggaagcaacgaaagcccttgaagtgttacaaaaggaagtagcttgccatagactagggaatcaagatgcagctcagacgatagctaagcttcaagcagagataagggaaatgcgtactgttaaaccatctgcaatgcttaaagaggttggagatgtcatagctcctaacaagagcgtaagtgccaatctcaaggaagagataacaaggctccattcacaaggaagcaccattgcgaatctagaggagcaacttgagagcgttcagaagtcaatagataagttggtgatgtctcttccgagcaatatcagtgctggagatgagactccaaagacaaagaatcatcatcatcaatcaaagaagaagaagcttcttcctctgacaccaagcagcgcatccaaccgccagaacttcttgaaatctccatgctctccgctttcagcttctaggcaagtcttggattgtgatgctgagaacaaagctcctcaagaaaacaacagttctgcagctagaggggcgacgacaccacaggggtctgagaaagagactccacagaaaggagaagaaagcggagatgtctcgtcaagagaaggtactccaggctacagaagatcaagctcagtgaacatgaagaaaatgcagcaaatgtttcaaaacgcagcagaggagaatgtaagaagcataagagcatacgtaaccgaactcaaagaacgagtagctaaactacagtaccagaaacaacttctcgtttgtcaggttagataaagatcacaacccataaataaaccttttttcctccttttatattttctcatcagttttgaacttacgcaggtgcttgagttggaagcaaatgatggagctggatatagtgtagagaacgaggagaacacgataatggaagatgaagagcagaatcaagtggcgtggcatataactttcatagaggaaagacaacagatcatagagctgtggcatgtctgccatgtctccataatccacaggacacaattctacctactgttcaaaggtgaccaagccgatcaaatctacatggaagtcgagctaagacggttaacttggttagaacaacatctagcagaagtaggaaacgcaactccagctcgaaactgcgatgaatctgtggtttctctatcatcaaggtaatgaatgaatgaataactctcacttggaaaaatgttgttgtaaaagtttcttcaactaatatggtcttgtttcgttttcagtataaaagcattgagaagagagcgagagtttttggcgaaaagggttaactcgagattgacgcctgaggagagagaggagctgtatatgaaatgggatgtgccattggaagggaaacagaggaaacttcagttcgtgaacaagctatggactgatccttatgattcaaggcacgtgcaagagagtgcagagatagttgcgaagctagttggattctgtgaaagtggcaacatctctaaagagatgtttgagctcaatttcgcagtgccttcagataaaagacagtggaacattggttgggacaacatctctaatcttcttcacctatgaagacttattgtgtgtttatgatttgtaaaagtacacgacacttctttgtctcctctgaatttgattaaataagctttaccagactcgtctgattatgtttaatatagtggtctagatttcttaaaccttgtgaggacaagcttgctaaaccctcaagtccaactgctaaccaaaagttgtccaaaacactgcgttttattggaaacaacgatgtgccaacgtggcatatttggaagactctcctcgtctttttcgctggacaaccatataattatctcagctactaaccaacaaataaaaaatcaaaatattatttaaatgttaatgttgttctctcgaatcattccttaagaaagattttcactttccaatttgcttcactgtcttgtcgattctgcttctccaaaaaatttcttctttagttctgagtttttctctgttctgaaaaaccccaaattttgttttttttggccattcaaaatttcagaagaaggcgatacaaaatcgtctttgaattctctttgtttatgatctgttcaagtaaaggaacggtcgtaattgctactagaagctcatttcccagattactaaaccggattcaaaatcgaaatgatgttccgattagtgtcatagctactcgacgatcatcaatg

SEQ ID NO: 26570 - DNA, 3003 bp, Unknown
  misc_feature (1)..( 3003): 2750-1469P.txt file - cDNA_ID_2714727; gDNA_ID_2213622; Annot_ID_131989
taaagattattaaaagttttggtcaatgacgataacaattctcgaccaatttggtcaaagtatacgttctggagtctgacgaaactaatcttaaatgttaatcacatcaagaacagaaattggtactaatcttagaagaaaagtggtactaatcttagaagaagtaaaagcttgaatctaaatgataaacgactaaccttggttagtgttatcgtcgcaggaggagttgtgaggtctgtccgcacatagacaccggaaactctccgaatctaacgccgaaccacaaatcccaccggaatcaatgcatctccggcaagctttgtcttccatgatgtacctcaaatcgaatccttttctcaaagcttccacaaaagttagttcggaccgttgaagctcgtccttagcagacctcagcatcggaatttctgcatatttcatacaaccttcgtcagaatccgacgatcgcaagacatgatatgtcaccggatcctcgtagctttcttcgcaagaaatctgcaacggagctacgccggaacagttgacgaatacatcgatcgtctcggtgttggagtctaatgtgaactgattcttcccgttgaagttccaaatgtttaggcaacctccgtctagtagactatcatcggcaacggaaattttatgatcctccagattcgcagaaacaacgcgaagagtgatgttcccgatcgctagggttaggttttgatcaccctcgcaggagagtttgaatgacgaatgaccgcagaatttgggtttattgaatccaccccagaacggatacgtggtactctcgaataccctgtgtccagatccacatgtcagattacgtgagcgacactcctcgtactgttgatcggctgagaagcacgacgggaggtcagcgacggagaagacgacgaagctgatgaagaaaaaaaagatggacattgggttttgacaactaaagccttctttttttttttttggtgagaggttttggggattttatggaagattggtcaaaatgatcggtgacgacttttattaattacagtccggcgaatttaaaacagattatgatcgctgattagtgattacattataactacatcctaaataaattatttatgtatatgaacggtcagagattcatacagatctttaatggttatttgacttgttggaaactatagtgtgtttttttttggacagactgaaagcgacttgatagttgatacctataaatatcgacttcatagttacatacaaatgcaattgttcgactaaggttaattaatgacttatttgtaagttataaacattttaattctttgacccaaaagaacatttttaagtatgtcaacaatttttcttgaaaattccactgcgattttatgcttccaatatataacaggactgcaaacttataaaattgatgaatataagaaaacattatatatataaaggaatgaagagaactgatgattatacacaaaaagaaaaaaaaacgttaatcgaattacaaaagagtattatgtgaaaatttatgttagtatttcattaaacctcactaaggacttcaatcataattttgtaaaagaaattgcagactggtgaaatagtccaatagcatataattgcatcaaaatctgagtgaacatggttttgatatactttattatgaagtcaactgaatgatagacttgtgatccaatcaaaaacacaccattgaataaatagcaaagagatggagaattgattgttttttttttttgaagtttgaatttttgaccaaggaaaatgagaatacatgtgttatcttttgagtttatttatccatttatgttgttttcttaatatttgtatacacatattcaactaaagttgctataaaaaacgaaatatacaggcttgcagatatttcaaaatctcatgccgaagaccttgactccacacctcaaagactcgtataataatattccaatcccacttgctgcaatagaggggaggttctgcctagtgaagtataatgagggtgtaaacgtagtttactatttttatacgccaaattggttagtagttactatttcccgcttgatctgcaaataaattaaaattgtagaggatgaaaaagaaaataacaataaatgaccgttttgtgttaagggccaataataattacaagaagacaaaatacatcaaaattggcagctaagaaaaaaaacaaaataccgaagtaataattaaagatgaaatgataattgacagaaaaaaaaaaaatctatagagaaaatttgcagaaacagtaaatgagaaaattatccatggaaaaaattgaggtaaaggtgatttctagaagaaattaaaacgtggggagagcttttgaaataagctaaaaataaaagcccctcaaaagaaacgtggaaagaactagccgttagaggttcgtcagattcaaaatctcactctgcacgggtttccgtaaagacaaaagaacccccaaaacccgttcttcttcttcatcatttctaccacaaagatacacgaaacccagaaaccgctctcactatcttctcctctcaatattcttttattcttttaatttatctctatcgtcgatctgagacgattctacattcttagctgcctgagatctctctctttgatctgagagtaaaactccgattcatttgttcgtttttttctctgtaagtgtttttgatctctcttaactattgtttttgttagaactatttagtgaaatgacgtttttaggaagttttgaatataacatttctggatttgatgaaattaatctgaagaagctaaattttccttttatgagcaaaaactaaagattacctttttatggattaagtctgcacaatgttgccttatatgaacttttttccatagatctgatagatttgggggagaatttaagcttagaattaagttgatctattagatctgatgaaaaaattgggaatattttgtagggaaatg

SEQ ID NO: 26571 - DNA, 3000 bp, Unknown; identical to SEQ ID NO: 10068
  misc_feature (1)..( 3000): 2750-1469P.txt file - cDNA_ID_2714731; gDNA_ID_2213622; Annot_ID_195746

SEQ ID NO: 26572 - DNA, 3000 bp, Unknown; identical to SEQ ID NO: 10059
  misc_feature (1)..( 3000): 2750-1469P.txt file - cDNA_ID_2714731; gDNA_ID_2213622; Annot_ID_131988

SEQ ID NO: 26573 - DNA, 3000 bp, Unknown; identical to SEQ ID NO: 10057
  misc_feature (1)..( 3000): 2750-1469P.txt file - cDNA_ID_2714743; gDNA_ID_2213622; Annot_ID_131985

SEQ ID NO: 26574 - DNA, 3000 bp, Unknown; identical to SEQ ID NO: 10056
  misc_feature (1)..( 3000): 2750-1469P.txt file - cDNA_ID_2714751; gDNA_ID_2213622; Annot_ID_131983

SEQ ID NO: 26575 - DNA, 3003 bp, Unknown
  misc_feature (1)..( 3003): 2750-1469P.txt file - cDNA_ID_2714755; gDNA_ID_2213622; Annot_ID_131982
aggcgcatatcttcctcctttaaacccgttaatccaaccccgaacctcctcgttaatcctctccagtccatactctatatgctcagctaaaagaccaccgtgaacaaaaaccgaatcaccaacaacagcaactgtttgattcttagtcaagaatctctttgcaatcggaccatcaggtctcaatgcagcaatcctagctctaattccttcaaaacagtcggctctcatacgagggaagctcatcggaatcccttcgtaaggatccttaggtttatcaagaccactgcataaagtcttcatcttgttccctaaacaataccaatcagcccaaatctgaaattcctctaaacctttcttagtcacatatctaaagtcaccttctatattcatgatctcatggttcccattcatagtcagaatcttacctccagctctctcagcctctcgtttcaatttctctaagaaataaagtatcttcaactcctctccacctcgatctagtacgtcgcccacctgaacaaccatcgttgatccaccagtccatctgtccgacgaatcaatcagaccagcgatcttgaatgcttctctagacttctcgagatcgccatggagatcaccgattgcaacgagtcgctccggcttctcgaacctcgtttgcagaatctcattttgtgagctaggatcttggggcaggaagatgccggagacggagtaatcaacgaaagtgtcgacgaaggaagagatgagcttgggaatgcttttgcagattccgctagggttttctctgcttgacattttccgtgataaatggcggccaagaacaatgcgcctttataagtttccttattaagcagtttattaaattaattcattgactagccaataaacgaagccaattagtgagtgactctttttgtctgtgtatcttctagatattgttcaagttgggctttggatctcctacaaggccacgcccattgttttgttgctcatgaattaagtaggcccattaacccagatagttggaaatgagttgaaccagagtattggactctgagcagcagagcagcccagagttgagaccagacgagatcttccaagcttagttgtataaaccaacgatgagtgaccggtattgaagtccctttactacaatttgcgagctgtcttatgtctattttatatacaagagttacagtacacaaatagttttttactaaaagacaagaaataagaaaacaagattcattctccttatgacaacaaaaaaaagaaagaaaacaagattcattcatacaaaaaggaggaagttgtgtcagaattgcaaccaatttaaatacatttagaaccgtcaacgcctctattgtttgttgtgactcttccaagtatgaaggttattgtattaatttatcctcaagttttttataacattgatatgataatggttttaaacgctttatgcgttattgtaaaatttatttaccccacaatagaaaaagaaaaatgcaattgtttagttttcataagtcacaatcgtagaaatattttaatataaattgaggtgtttgttgtatgtttatttgttctctttggataagtcacgacttgccaagaagaaggagcgtgagagatcgtgttaatgtggggtctttcttcttcaattaattacgatctaaattgctgagtttttttttttaataatgatttgactttcttttcctactattatactaaaatgatattttatcccaaatgtagtaaatttaatagcgatatctaatataagtttcagctaaatttaattcaatactcttttttttttttttttgaaaaacagtaacactgttatttgaaaaaattcaaaagcatttaaatatagtggaaacaaaactttatcctttgaacttttttataaagaaaaagtttagattcttctactgtttaaaaagaaaagaaccattaagtacgttaatgcggttaccgaacatgacattaagctttcgtttccttaattatccgagtggtccaattctttaattacgaaattatgaaagcgaattaataattagttaacgaaagtgacattgagaacgcgtttgcgtttcagttatggcgtgcaaacaaagctaaacaaaaaattcagagagattaaaaaaaaacaaaaggaatccaaaggaaataaatgattttgtttgcttttgcttgcaaataaaaatcattaaaaaaaaacgaggcgtaacaggaaggagaagaagcaggggtccatcatcaaatacaacattgtagcaattgcgttttcgactttatagagatattttcatagagatggtctcgaagctaacaagttgacaaatttcttcgttataagagagatagatgagttgcaggagagtgctgaagtcgatacaagccttggcggctcatagtttactcttctgtttcacgcttttattggtgcttaaactcgatcacaccgtctcttcctcatggtggttagtctcttttctctctttcaattctcttttctctgaaattgactgcatgattcaaattctttgcttctgatttgttcaatttcgattttcgtttttggtgtggaggagaatcatttccctgatttcataatttggggattttgaatttgaggaccttgtctttttgccccccgttgaatttcgaagctaaagattgtctctttttgtttaggcaaagtatcagtttttgtttttgagagaattgaaaaagcagatcctttaacaatttcccgattcattgtttctatttgccgttaatagcaacaaaagcaatcacgtcaatagtttttactgtataaagtttttgcaaattttggtaagtcatgtatgcattttgtatcctagtgtgttaaaaagttacatcctttagaggtatgcatttaccaatgactttcacgaaaccaaaaggattcagctttttacttgggtctgataaaaaatatttctgtatttggggttatgcaggatg

SEQ ID NO: 26576 - DNA, 3000 bp, Unknown
  misc_feature (1)..( 3000): 2750-1469P.txt file - cDNA_ID_2714759; gDNA_ID_2213622; Annot_ID_131981
attgcatcatcagttatgctgtcgtcgtctcctggcatcaatgctcgacacattctgaagataaagcttgcagtcattaggatctttagatttatatgatttacatttggtgtgtgttcacgagacacatagatcaatacctcaaattgtctaccagtattgttaattcaaaagccaacaatggtaagaaagcaatcttcaaactgacagctggtggccaacgagctgcatttaagatagaacagtccacaatcagatgaaatgggagaaagtgcaaaaagaaaaaccttcatacagaatcaagaaaattgtaacacaagaactacttttagatgtcctccaacttaaccatccgtattatccgaaatacaaacagtagcaagaagaaactttgagaatcatagccaatgtttatatttagtattgaagaaatcagtgtgttcgcatgccaaatagtaaaaaactatcacccaaaaaacctatgaagtgcaaaatctgtaggttacaggatatttaccataagaactctcgaggtatatacagaggagtaattcaaatgctacaagtaacggtgtcgcgacaacagcatggcaaggagcccactgtaaaccaaacgggatcataaacacatcagtacaaatcataggaacgacattgagtgatattttgctaaaagaggtaagaaagtgaaaagggacatacatgacggttacgtggagcaacaggagcaggaagagagaatctgccccttgcaacaactgcatgaaaagcccacagcgggaaaaacaccatcctgcataaccccaaatacagaaatattttttatcagacccaagtaaaaagctgaatccttttggtttcgtgaaagtcattggtaaatgcatacctctaaaggatgtaactttttaacacactaggatacaaaatgcatacatgacttaccaaaatttgcaaaaactttatacagtaaaaactattgacgtgattgcttttgttgctattaacggcaaatagaaacaatgaatcgggaaattgttaaaggatctgctttttcaattctctcaaaaacaaaaactgatactttgcctaaacaaaaagagacaatctttagcttcgaaattcaacggggggcaaaaagacaaggtcctcaaattcaaaatccccaaattatgaaatcagggaaatgattctcctccacaccaaaaacgaaaatcgaaattgaacaaatcagaagcaaagaatttgaatcatgcagtcaatttcagagaaaagagaattgaaagagagaaaagagactaaccaccatgaggaagagacggtgtgatcgagtttaagcaccaataaaagcgtgaaacagaagagtaaactatgagccgccaaggcttgtatcgacttcagcactctcctgcaactcatctatctctcttataacgaagaaatttgtcaacttgttagcttcgagaccatctctatgaaaatatctctataaagtcgaaaacgcaattgctacaatgttgtatttgatgatggacccctgcttcttctccttcctgttacgcctcgtttttttttaatgatttttatttgcaagcaaaagcaaacaaaatcatttatttcctttggattccttttgtttttttttaatctctctgaattttttgtttagctttgtttgcacgccataactgaaacgcaaacgcgttctcaatgtcactttcgttaactaattattaattcgctttcataatttcgtaattaaagaattggaccactcggataattaaggaaacgaaagcttaatgtcatgttcggtaaccgcattaacgtacttaatggttcttttctttttaaacagtagaagaatctaaactttttctttataaaaaagttcaaaggataaagttttgtttccactatatttaaatgcttttgaattttttcaaataacagtgttactgtttttcaaaaaaaaaaaaaaaagagtattgaattaaatttagctgaaacttatattagatatcgctattaaatttactacatttgggataaaatatcattttagtataatagtaggaaaagaaagtcaaatcattattaaaaaaaaaaactcagcaatttagatcgtaattaattgaagaagaaagaccccacattaacacgatctctcacgctccttcttcttggcaagtcgtgacttatccaaagagaacaaataaacatacaacaaacacctcaatttatattaaaatatttctacgattgtgacttatgaaaactaaacaattgcatttttctttttctattgtggggtaaataaattttacaataacgcataaagcgtttaaaaccattatcatatcaatgttataaaaaacttgaggataaattaatacaataaccttcatacttggaagagtcacaacaaacaatagaggcgttgacggttctaaatgtatttaaattggttgcaattctgacacaacttcctcctttttgtatgaatgaatcttgttttctttcttttttttgttgtcataaggagaatgaatcttgttttcttatttcttgtcttttagtaaaaaactatttgtgtactgtaactcttgtatataaaatagacataagacagctcgcaaattgtagtaaagggacttcaataccggtcactcatcgttggtttatacaactaagcttggaagatctcgtctggtctcaactctgggctgctctgctgctcagagtccaatactctggttcaactcatttccaactatctgggttaatgggcctacttaattcatgagcaacaaaacaatgggcgtggccttgtaggagatccaaagcccaacttgaacaatatctagaagatacacagacaaaaagagtcactcactaattggcttcgtttattggctagtcaatgaattaatttaataaactgcttaataaggaaacttataaaggcgcattgttcttggccgccatttatcacggaaaatg

SEQ ID NO: 26577 - DNA, 3000 bp, Unknown; identical to SEQ ID NO: 10054
  misc_feature (1)..( 3000): 2750-1469P.txt file - cDNA_ID_2714763; gDNA_ID_2213622; Annot_ID_131980

SEQ ID NO: 26578 - DNA, 3000 bp, Unknown; identical to SEQ ID NO: 10095
  misc_feature (1)..( 3000): 2750-1469P.txt file - cDNA_ID_2714779; gDNA_ID_2213625; Annot_ID_195835

SEQ ID NO: 26579 - DNA, 3000 bp, Unknown; identical to SEQ ID NO: 10095
  misc_feature (1)..( 3000): 2750-1469P.txt file - cDNA_ID_2714779; gDNA_ID_2213625; Annot_ID_132032

SEQ ID NO: 26580 - DNA, 3000 bp, Unknown; identical to SEQ ID NO: 10096
  misc_feature (1)..( 3000): 2750-1469P.txt file - cDNA_ID_2714783; gDNA_ID_2213625; Annot_ID_132031

SEQ ID NO: 26581 - DNA, 3000 bp, Unknown; identical to SEQ ID NO: 10097
  misc_feature (1)..( 3000): 2750-1469P.txt file - cDNA_ID_2714791; gDNA_ID_2213625; Annot_ID_195831

SEQ ID NO: 26582 - DNA, 3000 bp, Unknown; identical to SEQ ID NO: 10097
  misc_feature (1)..( 3000): 2750-1469P.txt file - cDNA_ID_2714791; gDNA_ID_2213625; Annot_ID_132028

SEQ ID NO: 26583 - DNA, 3000 bp, Unknown
  misc_feature (1)..( 3000): 2750-1469P.txt file - cDNA_ID_2714801; gDNA_ID_2213625; Annot_ID_195828
aagcacatgtcatgaagaatctgcagaagagatactagttagactatctgtaaaaggatgcttaatttgataagtacgttgtgacaaaacttacacgacaagctttttatttttgttctcgatcaggagatgcactagttgagatgacttttgatctgcttcgcatttcaaatactgcagaggcacgaagaagaaataaacttactatcccgaaacacatatacgtatataaatattgaccttacaataataatacctcacaatacagaccagaaggcgttttcgactttgactcatctcccaatctaacttccgtaacgttcctaagctcccgatctaactctcacaggattcctaaggccagccttggccaggtctgcaacagcttgtgtttgtgtagctgaaaagaggccagtcctacgttgctttggcaagcgagatataatgtaattgacctgcttctggaaccccatatccaaaagtctatcggcctcatctaagataagaatctcgagatttcgaaaatccagaaactccattcgtttcatcatatctgaaagccttccaggggtgccgatcaagagattggctccttcttcttcgagagtattcatgtcagcttccacctctcgacctccaacaagcaggacagagttcacatttggcaaagtcgagacgaacggctcttgccaccttatgtatctgcgctgatagctctctcgttggcgatataatcacccccattacctgagattgaaattgttaacatatagcataagctactactcttgatattcggctaattctccttacctggtgtggcttcggagggtaggagttggatcgacggataatctctatgaagggaaggaggaaagctagggtttttccagaaccagtggctgcgtcgacgacaacatccttgtggctgcagaggaaagggatcgtctcggcctgaaccggagtgcagacctcgaaaccggaccggtcaagcgcctcgatgatatcttctgagagcggaggtttgagttcagagaaacgcggcggcgcctcctcgatgatagtgttcggtggcgatgaatccatgacggccgccgcttgcttgttgctcactccagctttattttttagacctacagcaaaattttgttcgaattaggtagtttttggtccagtttctactaaagcccactaagagaagagatacatctctcggcccattgttaaagtaaagctctagtcattgcttaaaagaatacctctaaacattgacatttgacagtaacaaactcggagagcattcagagatctacaaacagatattctgtcacggttacctctgaaatcattggtgaaatgtatcttgtctaaaagaagttggcatctttaatccgctcgagagcattcagagatcttacttgcgccgatcgatgacgacaaggcctcgattgtcgttcatcaacttccccgttcggacgtgatggtgtgtttcactctgtttatcaagaagaggaaccactgtgtaatatcacagtacggagatggtaggcgttctagggaatatcaggtatacacaatgacggtgggatcaggtgaagaatctaattcttggagagtgatcacatgtaagcatgatcattcaccagttactgaaggactatgtaaaggaggtttcttgtattatggagctgatgagtccaatagtgacaaatctgtggtagtgagcttcaacgtgagttctgaagagtttagcgtcattgaattgcctgaggaagtcaagattgatcatcgttggagattggtgaactacaatggggaagttgccttagtagatgactctgagtttgactttggtattgtgaaagaaccgaatggcaatggagtatttgaattgtgggtaaggaacgaaactgatggaacttggtggagaaactgcattgagattcctcattgggaacaacatgttggaaatatggagtttttcttcaaaggtaccattggaactggagaacttgtgttcgctcaagactctgtgattgagagatcattctatgtggtttattatgatacagtcacacaaaatctcagaagatttacgattgaaggtgtagctagagatcagcttcatgatgttcgaaccttcttggatcatgttgatagtacttggcttatgtgaagaacaagagttaggttgttatatatatgcgagaatcagattttgagtttttacaaaatctattaaaatttggagatcttaacttcttttttctcgacaatatctgtaagaaaataaaataaaaatagacatttgttggtatcacaaaaataatatagacctccttggtatttgcgtatcctctcatctatatcgccagtggctccgtggccttcaaatcaattctcaaattttgtatatatatatactaagattaagatttgactattgttataaccattggtgtttctccagaatttgtacagcaacatgcccactaactcattggtaagctggcacttcgttttcgctctaaatttgatttgctgagttctaaagccttttggatcatgatgttattgttatggttgttttacttcttttgcgggttcgatctctcatcgaagtttgggtctattctctttgctcttcctcttctaactaaaaaaacataacgttaccatcgactagggtttttggtgatttttcgtttttctcatgattaagattggttttgaggtttttcccttttcaattaggatttctagtaatgatatattgtaaggctttaagttggattgttccttgtctgtatataaagtccctttatgatcaataagaaatcaaacaattaaccctaactctctctaagagcgacttgcgttaaaaggaagcttgctaaaatctttctcacgttaacaaactgcacgaaaccgaaatcacaggctcatatcaagtctcttatcgaagtttgtgtctatctaaaaacatagggccaagctatg

SEQ ID NO: 26584 - DNA, 3000 bp, Unknown; identical to SEQ ID NO: 26583
  misc_feature (1)..( 3000): 2750-1469P.txt file - cDNA_ID_2714801; gDNA_ID_2213625; Annot_ID_132025

SEQ ID NO: 26585 - DNA, 3003 bp, Unknown
  misc_feature (1)..( 3003): 2750-1469P.txt file - cDNA_ID_2714805; gDNA_ID_2213625; Annot_ID_195827
ttcgtcgactggatcaccagaaaaagtgtagtaactagaagaagaaagacaagtttttctgttgttttgatcatctctagaaaaagtctccaaaagaaaagttattgagtttgaatattcttcaacaaaattcgctgtaaagtgttgactaatatgaagaaatttcatattaggggttggtaagcctgtacgaatgagtcgtttgtgggaaaagtaggttgattcgatcatcgatgtccatttttttgataagactttgaatctagccagtgattttattggaagatggtgaaagatcccttcagctatatcatctggtataaatattgtcttgggattattatgtttatcattctccattcttttcctacgatgatgattcttggagtagatttgtgtatctctatatataaagaaaataatgatctaatgttggatttttaactttagatttaacattaactgtggcgaaaaatatataacactattaatttatattagaataataaagagcaaataaataaacatgtatttgtttatgctataaataataaatgttgattaatatatgtttatattattcctaaaaataatgaaaataaattaagacaatttatgattaaatatgctttcatttaattttctttagcaattaatcccttagaattaattctttgatagattttaaaatttcatctacaaattcttgaaaaaggtttggtatctacttttttaatcctaattaactagattagaacatgtccgatgtgcaatagaccgtggtatataacgatgcatgtatcatccattctttaacaattaatcaccttcaacaatgcaacactctaaagtcttaacactctaaaaaagatttaacactaataatttagtttacaattatgaattagaaataataaatatgtataataggctataaatatatataatataatcttacaataatttaaaatatagaaatgaaaatcttacaataaatcttacaatttgaatactgtaaaatgattgtaacattgatctaataacatattgataatgtgaaattgccgagctttttttcttctgcagaccgagggatagagaggagatggagaggcttcaggagagaagggtgacatcaatacgcagcgttttgaaagaacctaggaattaaatttacatttaaccaaatcaatgtaataaaaccattggtccggtctgaccaatttaccgctccctaactaaaccgactacgtaccgttttgaaatccttccctaatcagaatcttgagattacagagagagcagcaaacgtcgtcgttttaggtcttatctaattaacctaatcatatatatgaaagttggtcaactctctcccacaatttgacacatcagcacatgagagcttggcacctagacttcataaaataaataatacataattagtaattaattcaacataataactaaaataggaggatataattaatcagaacttgaaccatcactctttctacattttttaattcaatatattctctttaattttgagatccaaacatgttacacatactaaattttaacccgcggtataccgagggaacaatttattttttaaatttagtatatataaaagtttataaattgtatctatctataaaataattttattttatagtttacaaatgttattaagtaacgtcctgccaaacccgtcctctaaaaaaaaaaccatttattttattaatgttgatcttatttatgatatgtttatgaatcattgtctaaatattttgtaattttgtagtaattaaatgctatcagattatatctctgcgctttgatgattataatcgaattgttatagttatggagagaagcaatatcaaaaatgataattttgtagtaattaaatgatattaaatatgttggaagtaatattttagtaaataatcgtgtagttaatgtggagagattttgggaagattgttaaatgtcaaatatttaattcgaagattttctttttaattatcaaaaacaaacattaaaatccagtggcaactattgtaaataagtccaactacaggatttatttcacaaaatggctgcaaaaatgtatatatagattccttgcctaaaaattagacgattattatgaaagaaactaaatgaatatgcaaattaaatatatctaagctttttgagatttatgctaagaaaacaagtaatttgaaagatgtttaaggagctatccttataactaatacaaattatgacaagaatttaactaaatttttcaagaacatcaagttgaatatgattatattggatatgcagagacatggttaataaagacatgttatatttttaatgtaagaattaaattttctaaaatttcaccgtctcacaaactaaatatataactaaaagaacaaggatatataaattaaaaaaacaacggagaatctagaacaacaataaaaaacaattcaagcactttcgttttcagatgaactaatatagttggactttttgaaaacaattacaaatcatatttatgtttaaaaaaacagatgcattcaactttactttatatgaacatacattatataaaacaattagtaaatagtaatacataaatccgtagtgaagattaaataaataaaaagtctaattaaaggaagcgggacgatgatacaaaccgaagtgaagattagtgaccctggatgggccttcgtgggcttctatttgggtttagtgtttaaagcccatttcctctttattgtcgtgtacttaagcttttcttcttctctgtaaacgagtatcaaaaagatcaatcaaaatcaacaatcatcttcttctgatttctcacctctttcttctacttctcatcataattctgttagttctttgataagcccatttcgtgcctatcagacgacaactaaaccctacacgcttacataaaaacgcgacctttgagaattttgtccggcgacagaaatg

SEQ ID NO: 26586 - DNA, 3003 bp, Unknown; identical to SEQ ID NO: 26585
  misc_feature (1)..( 3003): 2750-1469P.txt file - cDNA_ID_2714805; gDNA_ID_2213625; Annot_ID_132024

SEQ ID NO: 26587 - DNA, 3003 bp, Unknown
  misc_feature (1)..( 3003): 2750-1469P.txt file - cDNA_ID_2714812; gDNA_ID_2213625; Annot_ID_132022
tctccgacatcggtggtttctttagcaccgttggtcggcttcgttcttcaaatttagtttttgcctttcaaccttgttcgattctattttgcttcggttttaattggttttgatttctctttctcttcatttcgatctaaatttgtaatttttcgatcctcccttctttaaggggcttaatttgttcttcaagcttattgagttttcattttaaaagatcaaatttttagttacggattgaagtttaatttagtgtcttttgtttgattttgatgaaattagagctgttgtttgtctttcttgttgccgatgcttgttgaatcgtttgggtttatgttgtttttcctttaaatggcagaagtcgaagtcgatagtttgtgagctatttctttcttgaaggttttaaattttacagtcattgtcacagaagatttgtcaattgtctcatcggatttgtagctgcttccgatttggcgtttacagcaattccggtgaacttaagttttttgtggttatgattctccacctgcgacattctgcaactcatcattttctgtttccacgtgtcctctttaccgtgtctctagtgccatgtgggctttgacttattagcacattagctttctcttcttcagaaggtggtctttgggcttttgtccgtttatggcctgttatatggctttgtaaaatatggcttgttaaaaggctttgtaatataaataataaaacagttgtgacaaaaaaaaaaaaatatatagtttgatggtgattggtgaacttcttttttttccaagattgcagtaaacgtcgtctttagctccaaaaacaacctttgtcttgttcagctaatggcgatttttgaatggcggcacagaagacggccattcgacggcggaggaactcgtcgccgtcgtttcttcagcccattgtattcgagaaatttcaagagaacgattctcttcgctgtgattttcttagctatcttccctcctctctacttccatttcaagctccgacgaattcgtcagattgtcgcgcaaaagtgcgattggcttcaccatcctccacttgtctgtgctcacggcggcgattccaccctcgctttcccaaacactgtacgtacactctcgatctcttcttcttcacactcttgctactaacctttttaaaccttaatctcttggactcttctcaatcgtagatggacgcttacagtttcgctatacgttctcgagttgattgcattgaagtcgatgtttctcgttcctccgatggtgttttattcgctcttcacaacaggttacagactctgatccttgttgtatcatcttcttctaatgtttctgtgtttggattctcatcggtgttcttcttattcatcttctgatcacacgcacagtcagggatctgcagcgtattgctcgtaactcttctgttcaagttggagatctgagtatgaaacaggtctcatctctccctctctctctttaccagcttttgggatatgcttttttgcatccatttttcataaaccttttgatgatctttttgcagatcaaggaactcgatgtctcggagattgttaaaggaaccttgggaagtagtaggattcctactcttgaagaggctttagcggtaatgcctgtttttttaattactatcttgtcattgctttgctttgtaatttctgcttagtaacaagtggctgaagctagttttgatcttgaatcatctagttgatatcgaattcagtccggaaagtgatccttgatgccaaagttggaccgccaatgtatgaaaaggggttagcacaagacatcctttctattgtaagtactatgtttttgttagctcttgtacttgtaaagctttagtacaatgtgctcgagatttataaacatgttttgattccttaatagcgttgcttaatcatttatttcctggtatctttgtacacaaagctagaacagcttactatagatacttgaaaaaacaagagtatggataaattgttgatgtttcaatggtggtatttctggctttgctcacatgaatcgccaatcctctgttgttagattgagagagcgcagtgcaataattgcatcgtatgggccaaaagcgacactttggctagggacataattagacgagcaccagatactatggtaaacagaaatggattgtcttgtgaggatcagatagagaagtttcttgctcatttcctagtgattttggcaggtgggatacattgtgatggtagatcctttgactggggcgagaaacagcctgctgagaatgaagggagctagggttgtgggagtttatcatcccttgatcgatgaagaattagttagagttgtccgtcggtaagcaatcgatttcaatgttttcaaataaaaacacacctgctcatgtgtttacaaccttgctcgatctgatcaacaggagaaacaaagaggtgtatgcatggactgtggatgatgctgatcccatgaaaaggatgcttcacttaggtgtggatgctgttgtgacgagcgatccatctatgtttcagggtctcatggaagatcttagaactgagtgtcttgaagaaggtttttcaatacggacgtgagaatttctttttcgagcattcttaatgactgtaataccaactcagaagtttttggcaaagatctttctttatgttgttttgctgatccacaagtttttgacaactacacactacgacgccttgatacacagtaagacgagtctttctcaagaaaagcaaagtatggccggttcttgatgaagccattgcttctatcgatacagctactgataatctgatccaggagactctgaggcaacacttttcggactgcacagtgaaaacaatctcacacagatatcttcttttatacataacgatatgagcctgctcctagaacaaggtctaatacacttgtatttaagtttaaataatcagatgactgatattaagtctgtttatataatatg

SEQ ID NO: 26588 - DNA, 584 bp, Unknown; identical to SEQ ID NO: 10117
  misc_feature (1)..( 584): 2750-1469P.txt file - cDNA_ID_2714819; gDNA_ID_2213626; Annot_ID_195883

SEQ ID NO: 26589 - DNA, 584 bp, Unknown; identical to SEQ ID NO: 10117
  misc_feature (1)..( 584): 2750-1469P.txt file - cDNA_ID_2714819; gDNA_ID_2213626; Annot_ID_132067

SEQ ID NO: 26590 - DNA, 3003 bp, Unknown
  misc_feature (1)..( 3003): 2750-1469P.txt file - cDNA_ID_2714825; gDNA_ID_2213626; Annot_ID_195880
agagattgcagacagaattggcaacttcgttaaggagaagggagctcctttggagctgttgtctaaactgagacaagaagggagtgagttcttagataaccagtcatcaagagaagctcttgatgagttgagtatcatgtttgaagctcttaaaagatcaaagtgcagtgagagaatagtctttgatctaagtctagctagaggtcttgattactacaccggcgtcatctttgaagctgtttgtataggagcagaggtaaaatcccgcattttggcttcctgcaattcaattaaagaaattgtagtgtatggcctttgaattcttctttctgcaggtgggatcaattggtgctggtgggcgatatgataaccttataggaatgtttggaacaaagcaagtccctgcggttgggatgagcctgggaatcgagagagtgtttaacataatggaagaacttaacgagaaacagaaacaagtaacttgccaaacccttatgctgtttgtcgaccttgttttaaaagaatggtttttgaagtttgtgttatttgctatgaatataggtgattcgaccaacggagacacaggtgttggttagtataatggtggataataaactagcggaagcagcagaactggtaagtcagttatggggtgctaagatcaacgcagagtatctagtgagcaagaggaaagaaaagcatttcaatcgtgcaaaggaatcagggattccttggatggtgatggtaggcgaaaaagaactcagtggaagttttgtgacattgaagaagctcgagaagggaagtgaagagaaagaagatcaaacatgtactagagatcgtttcgtggaagaattgaagaaactactctgagtcgttgaaaagaaatgaaaggtacacacactcactcctggttcgatgcccagacaaaaggaatcacagtgttttgcattcttttttgctgttttccttggtttgtttgataatggtgttttgcatgactcatgattgtggagacaagaacttagagattttgatgttgatgaagttttccgtatttaactaattagaggagatatacgtaaatgttaagccaattatcagaattacgtttctttcaaaaaaatccttatccctgataacctaatctgcgatcttatcagaaaaaagaaagaaaaaataagtaggaaatgaggtggaagaatataagaccgaaaagagaaaataaaacacaacaggtaaggttgtctccaaaaataaaaaaagtgatctgcagatctgtgtgatcgcatttgcatgagatgagaggaagaaagatggtacgtgttggtttctgtacctctctgccgacatgtggtggcttcaagtaactaaggtcacttgtgtattcacatctcacgtttccattgactattgtctctactcattttcgattcaactactgaaaatatttggtaagaaacaaacaggcgatttaccatcccctactgatcatttatataaaaaaacaatgagttctttggttccttaaataagaagaattcacggtggttattcttttatatacaatagtttactaagcgatacaataattaaatctgataaagagtctcaccctcatgggatgattgactgattgtgagaccctaaatatgattttgatctaaaaataaatgatctgttttattgaattttcacaattttaataattcttcatattatatattgatgatattctagtggatgtcggaaaattatgtgtaagaaacgtcttatccaagcccatgttaattctgccagcctgaaacaaaaaaaatataaatattttcatacattaatacgtaaaaaataataaaataatgattcatcagaaagaaaaaaatctgataacataatttttggatgtattattaatatagtttttttattattagagagagtgacccatctccattactgtttctatctctctcttctccattctctctctctatagagacacacaaaagtagaaagacgaagaagaagagagaacgggtttgtagttggtggttgcgtttctttctcgtttatattcttctttcttttttgttttcatctttcaattcctttttttcttttttgtttataatctaatcgacgcacgaacagagcaatctcaagctcttcttcttccccacaattgaatctgattctgagatcctcttaccttctgtttgatctctctgtttcctggtgagtctcctttcagctcgaattcgaatttggcaattcgatattaacaagtttagttttttttttctcaatgattcttcttttgattggttgcagacgaaggagatattgtagagaaagaaaggggttctcatgattctcgtgttttgagtctctttccagtataaattaaaacttacacttgtctttctttttctttttggtggaaatctacgtagatctgttccttttttctcataaaacttttgggtttaaatttctgtacaaataaaatatttgtaagaagaaaaaaacgtttttttaaacaagactcgaaaagggtcagacccagaagtctcatcttttaccttttttcttggtcagctttgaaaggcttcatcttttttttattccgttttttttttcttcattcaattttgacgatttgggtttaaaaatcactgcttgtgtatgtatgtatactggttgttgacgaattagattttgctcaaaagggttcttgcacaaagtagctggaactaaattttgaggtttgtttcttacaaactaaatcatcatatcatcctattactctttgtggtgatcattgggatctaaagacgggttttgtcttcttacagagatctcttttgcatagtttgaatcatcattgctctttccggtgagaattgtgatctaaaggttcaatctttctcgctggaggaccgtcggggtgattgtaccattgttggtctggagtgcctgctcaatataatcagggcccttaaaatg

SEQ ID NO: 26591 - DNA, 3003 bp, Unknown; identical to SEQ ID NO: 26590
  misc_feature (1)..( 3003): 2750-1469P.txt file - cDNA_ID_2714825; gDNA_ID_2213626; Annot_ID_132064

SEQ ID NO: 26592 - DNA, 3000 bp, Unknown; identical to SEQ ID NO: 10126
  misc_feature (1)..( 3000): 2750-1469P.txt file - cDNA_ID_2714845; gDNA_ID_2213626; Annot_ID_132056

SEQ ID NO: 26593 - DNA, 3003 bp, Unknown
  misc_feature (1)..( 3003): 2750-1469P.txt file - cDNA_ID_2714854; gDNA_ID_2213626; Annot_ID_132054
taatgactaatgcactttcctcttcttgttcttatctttttcgaataattttcttagtagaaggcttttggtttaggtgctagttatgtggatgccatgcttaaaggctctagtcttaggttttttgaaagattgatgatagtttcattcgtcaatcgaaaaaaaaaacttattgatcaaatatatgtgcagcagaagtagaaccagcaaaatccaagaatttagagcaatcaaagcacactataggatctgaaacaaataagtcaaagggacctcttccagccggattctttgataatcagaaaactgattcttcaaataccaaaaccaccagtgaacctaaacagagtcagacacagaccactggtccagaaacaaaaccaatggtgaatggaaaccttccaaccggtttttttgataataaagaagctgacctgcttgcccatggaatcaagctcgtcaaaccagatatcaagtgagtttcttctctttttttttttgttgcttttacttttccagatgcagaaaatcaaagtgaaacctcattgttgtggaccttgtgatccagttactttcctacattctcaatttgaatggttcatatgatcttatgggtttgtacctaagaattctcttcgtgaacttatataaacatggatcttcttacagggatgaatataaagaatttgagaagttgatacaagatgatttgcaggtagtggatagccgcatggaagaagaagaggtcagataactttctgtcactatgataaattgctgacagtatcataagctctttcttaaacttaaaatcgcttttctcgcactctaattgtcaggttgatgctgcggaaactatagaagaggaggaacaacgagagcaaaggtaatttgattcattactttgttatagcaagaagatggaaatgttgagacttgtttaagattaagtaaacacttggcttctccttttaatcttattctgcagatcatacaaagagaaagtagagattctgaagaggaagaaaatggaacttaaagcggcaagattagcgaagcgcagtaaaacctctgaggggtctgttaaaaagccgaagaagacagaagaagaatcgcccagcgatgaggaggatgacgaggattctgctgttgattggagagctcaacatctttgaataaactagaaaagactgtttaaaaatctgtaccctggtaaaacatacaatgttctatgagaatatacagtgaaaactaatcaatctcatatatatacaattatcagtttcagaggatcaattggtatttgaggtatagttatcggttaatgggtataattcaagaacgtaattttcataaccagagttgccaaaaaggccgaaatatctggggatgaaacctgaaactgtggcagttccgaccagtttcaggtgataaactaaaaaaaaaaaagtgattatgactggtggtcgtatcattctagttttgagtgagaatgtttcagatattgatcatttggtggcacaaaacataatgacgaaagtggtaaatttaacaatcatctttaaagttaaaactcttattattgttaaacaaatacatgtggaataataaataattgagacaattccagaaaccaattaggggtcaaatatgtcgagaaactaattaggggtcaagtattgaagaaggaagaagaccactaactaaacatattcatatttttttgtgaatttttggactatttgtgattaccaaccatatgcttatataacttataaaaaaaatgcattaggctttccactataaaccattgacatttgaaatatttaaatcaagatatatgcataaccaaaaaaaaaagggttatgttatcttgtttataacttgaaaaggagtccacaaaacaaagagagagagaacagccaaagcaaaggtcggttaatgcacaatcgatgatataacaaatatcccattagaacataaaattagttaactaattacttctgacctaactgaatgcactcaatctcctataataccttaacattatctagcttgactaatcatataaattgtcacgtgaattttctaatggtaaagtgtttcacaacgggaatcaaagtttagggacatttcagtttagagtctatccatcataacacttgtatcccaacttggtttttccaaatttgttttagataaaataccatttttcgaattcatcgtcttcatgtgaattttaggaaaaaaagagtgacaaaacacacacacgcacacacacatcggcttcgacctacataaccaaacgatatcttgtaaaataccacacacaatcacaagtgtttaatcttatgatctctaatctcttatgcatgtttaaacgtgataaaggagaaatcgtttagcattagaaagaaagaaacatttacgaataaaatgatcgaaaaagtgacttcctcgaactttatcacatcacgataccttatcacatgtacgtaacacgtaatgacttattgtttatcttgtggttataaaagactctcttatcatttatatggtgctcttcataggtcattctaaaaataaacccatatctcactggttcaccttattttttaaaacatattattattcttttacactacgttatcttttattatgaccataaaaatattaatatagcatgggctttttgaatcacaatttgaacttttaatgtaaaaaataaacaacagcactaacaaaaaaaaaccgaaaatttgtgtataaatttcgccgattccatggtgttgttcatcgaattaacttgagttgctatttttttctctatctgataagtttcgaaatttgaaaacacaggcgccaattttaggcatataactgaaaatcacaaaaaggaaataagagagaaagagagagaaagagaaagagagagaaaaacagagaggttgtcttcttcgtcaaatatccgattatctggtatcgtgattcggaggtgtaatg

SEQ ID NO: 26594 - DNA, 3003 bp, Unknown
  misc_feature (1)..( 3003): 2750-1469P.txt file - cDNA_ID_2714861; gDNA_ID_2213626; Annot_ID_132052
agaatcttagaaaacactaacccacatcgaaatgagttttaattgcagggcacagacagaatcattcaaaattatacatataaattgagtgaaagagaaaaaagagagaccttgatgaggtgttttgtggtttgaagaagcttagcagcaccaagaagcatagcaacatgagtatcatgaccacaagcatgcatctttccatctactttacttttcgattcccattccactaattcctttttttgtccccattttttcaaattcattagtcaaacaaagcaatctaaaaatcagagtaaaaatcggaactttgattattagatttcaaacctgtaacggaagtgcgtccatgtcggctctaagtccgaaaacaggtttcgaacaggatccgatccaagcgacgacgccagtcttcgccacaggatacttatacttcactccaagcgagtcaagctcgtctcgaacgagttgactcgttttgaactcctgaaaccctgtctctgggttctcatgaatctttctcctaattcctctcatccactcgaagaactcaggatccttggctgaatgaagcatcccgcgagcgagtgactcgagacccgaaccagaatcgtagctcccagctgaagacagaggagggagaaagaagaaggtaacgaagatgacaaagaagctccctgagaaatccattctgatttcttttgtttgtcgatgtaaactggcaagtgtcaatgaaagaaaggacaacggtgaatacgatgatgatgaaggagaaggagttggatcaccgatccatttttaatatttatatagtacgtaatttacacacgtttttggaaactcttttaatcgtttttaaatacgtatacgcctctaatgtgaaattcataatttatggttgtaatgtgaagaaaataatgaaataccaaagataaaatatgaaaatgatacaatgtagtatatttacggtataaaaggaatatttacttgaaatgaattagtacgtttaatacacgattttaccatttatgttaatgaaaattaacacttttaaaataaaacatggcatgaattagagttgtgagaatcacatgtaggcctttaaggttcttaaatttttaattccttataacataggcccatgtatttgattgacatataggccattgggttcttcgacttttaaattacttataacaaaggcccacctatttgaagcgcattgttaaacattttgtttatattttgattatgatcgaaaattctctagaacaattcgtacaaaagaagctgtttacgaaagtagctgtacatgcgaacataatcaataaaaatgtaaatgactaatgaaacatcagaatatccgtacaaaattgtgactttatattatttagttataggtacaaagttgtggagagtaaaaaaataaaaaaggtaaaaagttgtggaatagacctatgaaacaatcacaaacatacaaccaaaatgcaaattgtaattacgcaacagaggctttcttttcaaggaagtcaagtgtaagatttgcaaatgccccaattattatttgagagaaaaagggatattgctaatcacaattaacggtcacattacaattcccttttttctctgttatttcctcttctttcacaattaagttcttaacggtcacataaatattttgttttttatataatgagtttaattaagttgaagaatcaactgataaggttgatgatccgatcctcaaaagtatactaaccacaacactgtctacgttcatgttagtacctacttcaaagtccatgtacgttgggactggctgtatcttccgccgagagcagcagagagcgtcatcgctgtcttggaacgagagaaaggtcgagactatctctaaggcaaccaaaagcttagctatgatgaagacatctttctctctctctttgcctatgaatggagaatacaacaaataatataaagtgatggacatttctatgctttgcttctcttctccaaagagaaatagatgaaaaagattgttgattttcgtttctctcgaagaagaagaaagaagaagaaggtgaatagagacttttgatttctcaagaatgaacaagtagattgtagagtgttagtgtttagttctgttcttaggttgcagagattgtgtatgtgtggcgtttgatgtctcgtgttggagaggtggtctcgtttagagtgttagtgtttagttctgttcttctgttgatctgtgttttttttaaatgtaaattacacaagtatgcaaaacaaatctcttctcagaaaggggctactgttatatcatgagatttataagacaaaatgtaaaatatcggaaaaataaaacaacataattttggtgttgaatgagtttttcttgtccacacaacggcagaagcagtagacgattgttcctttgtctcttgatcacaaaccgatttcaaagtgttcttcgcatttttctcatcaatgtaagtgaaccagccagagaaagacaagtatgcaccaatatcattccggccccatattcagaataaattagaacatctttttccttccgtgttatgcacttgttctaaaaaaaaagaattccggcccatattcagaataaggagtccagtccaatagtctcaagtccaaacccgactcgggtctgtccgacccggaaaagagaactgattacagaatgcgggttttgtcaagagaaagttggatgataaaattgaggtgaaatctaatcttcaaatgatcattggttagctttttgtataacggattttctgaaatcctcttatttcccatatcggaccgtgattattgggtgatttcggatgcctaattgggtaattaatataatacagtataagattagatgcctcgaatattcgctctgtgcctaaccacaaaaaccgtaacttttggttttctctgaaacacatcccaaagtaaagaaagcatcactcttttcgtcttctctcgaaaatg

SEQ ID NO: 26595 - DNA, 3000 bp, Unknown; identical to SEQ ID NO: 10115
  misc_feature (1)..( 3000): 2750-1469P.txt file - cDNA_ID_2714868; gDNA_ID_2213626; Annot_ID_132049

SEQ ID NO: 26596 - DNA, 3000 bp, Unknown; identical to SEQ ID NO: 10114
  misc_feature (1)..( 3000): 2750-1469P.txt file - cDNA_ID_2714872; gDNA_ID_2213626; Annot_ID_195861

SEQ ID NO: 26597 - DNA, 3000 bp, Unknown; identical to SEQ ID NO: 10114
  misc_feature (1)..( 3000): 2750-1469P.txt file - cDNA_ID_2714872; gDNA_ID_2213626; Annot_ID_132048

SEQ ID NO: 26598 - DNA, 3003 bp, Unknown
  misc_feature (1)..( 3003): 2750-1469P.txt file - cDNA_ID_2714877; gDNA_ID_2213626; Annot_ID_195859
agagcctttgcacacttgaagtagcatcttgctccttctttaaagcctgggttttctcttcattcacagtttcaagctcattcttcagtttctctgcttctttttcactcttagatgattcttcttctgcaatacctagcttctgttcagatttctcaagatcaaccttttgactagcaactgtcatctccaataactcaattttctccttaagatcagtaatttcagattccatatcgtgcaatctactattgcttacttccagctgctttgtcacagataccagagataccgaagcacatttctccagcttgttagcttcttccaaccgtttctccagttctttcgctttgttttgccactcgtcagcaaagccatgcgcataagattctgccatttttgcagcttctaagtcaacattaagctgctcaatgatcatctctagttccttgacctttgcttccaaacttctcgcattctcaaggtctctttttagatccactatctccgcccctagctttaaagcaatctcattcttggagatgatttccttctctcgagttgaatcaagcaaagccttcaaccgtattaactctgacgacaagatttcaactttctctgcatgaattgcagccatcttactagcatcatctgcacgacacaaagccttactcttggcatctttagcattagccaattcttgattgacattctccagctcctgtgttaccaaaagaagagtagctgattctgaagcatgttggttcttgacattctctagttctttcttcaactcttcttcttttctctgaaccgcctctatccctgcctcaacaacctcaaatttctcaatttcgaagttctccagggactttttctgagcttctaaagcctcatctagtttctcagatgcctcttcagcttctttccgcgcttctttaagttgatcaagtgctttagctttttcattctcgagcgatgctatcagctcattggctttctttaaatcttccttgatttgaactgactgaggttgcgattctgatactctcacagcccgtatttgagttttctgcaaacaatcataagacaacaaaacaatggatatcaacatttgcagcatagtgtgtcaaaactaaaccaagttaagaccaggcaaactattatgaacacacttacttctggtggggttggagctttgggggacctcttatcagtactaggctttgagttagaagaagggcgctcgaacgaaagccgtgactgttgttgagtcggtgaaggagaattagaatcaggtttagtcacaatccgagtgagtctaggcactcttagagatgttgaagatgatttcctcaaagtagtgtcagataaaccatttctgcttcagaaaacaacaaaggtctctcatcaagcaagcaaaacaaaacaaaacaaaacaaaacacgtgagaattgattacacttgccaaaatcattaaaaaaaaaaaactaagaactctgccatggagccttagattaactaaattataaagtagaagagaagacaaataaaaatcaacataaatacaacatcacaacaacaactaagaactctgcaatgaaattattattattttttatatataagtgaagctgcttgtaagattaaaaaaatcacagaaacaggaacaatcagacaaatgtgttacaaatagaatcactaaaaaccaggagattaaaccctaaacccaaacctagtcagatctaccacatcatcatagacaacctcaagatagacccagatcggaatttgaatcgacgaaatattccaccgacatcaaaaaaaggatcggagaatgaatcttaataaggaaaaagacacttacttaatcttagaagccatagtcacagcctctgtctcgttgctgcggatcagtgagaagtaaattacgttagaggaggcgaccaaggaaaaattgagacttgatatacattattaaattatggaacctggaaactcaaatttgctcgaactctaactgggttcccatttttagcgtagagatcaagatcaagagagagagagacaatgattcggattaaggaaacgactgatgaacctaacgtagaagaaaatgatactcctagttggtgaggttttgtctcacgagtggccacactccccaaaaagtgtcaaaatgcaaactataaaataaattaaatgaattaaaaaaaatccgattcggtttcctacgtgataaacgcaaacaataacacgactaaataatcgcttgaattatcatcataaaactaaaacgtgagattagggagattaaaagactagtcttccccatagctaatgcggaataatatctgtataccgttactataaatattcgatatgtaccaaacttttttgtttgtttttttctagtaacaaaaagaagagtatatatatgcaacttagggaaatttctgaaatatgtaaaagatactatttgattgattgataactaactttgttatacatcgcattcgcaatatcttgttgaatacaatatctctacgactctaccattaggcaaactttttatcgggcccagtggcccatatttattaaggtccatttattaaccgcaagaaggactgggagtctcaaagttgacctggctccttccataaaagcagtttagtaaataaatggactgtaatcagattgatatttgaaaaaaaatgcttctgaaaacaaaaattcacttggaaaactttaaaaattagtcgcgggaaaatgagagagatttttggcgggatctctatataattttccattagttattaattatttattttatgagagtaacttgagatttgagaataagaaaagttgaaatttgtaaaagatatgagaaattagtaaattccagaaacttattagaagcggcggatcgaattcgcgacgagcgttccattagggtttcgaatcaacatcaacaaacgacgagagaaaactttttaaaacatg

SEQ ID NO: 26599 - DNA, 3003 bp, Unknown; identical to SEQ ID NO: 26598
  misc_feature (1)..( 3003): 2750-1469P.txt file - cDNA_ID_2714877; gDNA_ID_2213626; Annot_ID_132046

SEQ ID NO: 26600 - DNA, 3003 bp, Unknown
  misc_feature (1)..( 3003): 2750-1469P.txt file - cDNA_ID_2714898; gDNA_ID_2213626; Annot_ID_132040
tctgctgagaaaattggtttaagaaacctggactttggacagcctttgctagaaaggacatcatctgttgctgcctctgctccatcacatgaactttctgccccacattctgcagatgatgttcggtaacttgttgttgctgcctcaaccttacaagttcctgcataaggacgttcttatcgcgctgaagtctttccacttcctcttcgagtccaaatttgcccacttcaacgcacgcacccacagatgagtgctgaacttgaggttgttgtggaggctgcacttgtgcaggttttcgccggacaatactctttagtatttgcttttggcctcttaaaaagccctcgtttgcaaactcccagcggtctggatcaacttttctaaaaccctgaaaaaaagaagcatggagaatggaacagtcatcaaccgcaagaagttacttggattccgttgcaataggaagccaacatagaagatttgtataaacataaagaccattaaatacgttaataacaactattctagatatggtatgatacgttcactgggtctagctgcagcaccaaactaccatggtccaaggaaactaatacagttgttagtgtatcggcatgtacctggacggacaaatacaaacgaatggaaagctaacatgggacaactgatagaaattttgttttgtgacttaagaggccagaaatggaagtgctgaatcaaccaatcgtcagacacatatgagcacatgtccaaataagcctgcaaagttcgtggaaccttttggtaagtaaataagaacaggggaggaacaagctacgcaagagtatacacttgttagttttgcttgacctaagaaaattcattccagcctcacagacacggatgcaagctcagatacttagaaaaacaaaaacatatatgcctgcagttcacagggtatacatgtacaaaaaacaactgaagaacaatacaaatatgtgaaattatcttgcacgagtttgtcagaacccaaaaagatccaatcttaacagttagtgcaactaaaatcaacattaacacaacctactagacgtgcatagttcaaccaccagcgtcaacaactatataggaacatcaatcagtagcatcatactatacactaaataggagtcgacttctcaaagcaccttcttgcaaccttaaatcattcgtgagttttatcaataactaatgcttaattcaaccacaaaaaaaacaagagagtaaaataaaaatgaagcacataaagtaagattccctaaaatcgaactacgaaattgaagaaaatcgaatcaatgaagagaaaaacaaataaaaaagaatcgatcgaagttcactcacataagtattgagctgtctgacgaagctggagaaattgttgtgcttgaaatactttggtagaaactgtttggcgaactcaggcacgttccaaaccacgaagctgttgtttccgctgctccaagacaccacgtcgtccgtcaatggatcgtcaaccatatcgtacgttttgctcagaaaaggcggaatggagctcatcaccgccgtcgaagatttcgccgtcgctacagattcgcaaaccgttcccataaatcaaaatcgcaattgattccggtgtaccgtcttcttcaacaattccgagattcactactccggtcttcgcaaaccttacagagatttatattcgaagatcatctcttagcgacgaagagaagaagaaagaagctctctctctctctgtctacacttatattaaactctggagatagcttttacctctgctcttttatttatacactctgatttttttaattccagaaagcggtggagtttcgcagagtgatataacgtgtcgtaatctctaccgttgatctgattacctctgcaacgtccgattattaaattaaaaaattagttttgttgttaagataagaaataccacgtgggctggactaacgtgcttggcctttttaaaaaaacattaattaacgtacgtacctggtctttttctgattaacgtatctggtcctaagctctttttttcatacgtggcactggactcgcgttacttttctcaattttttccatttgcgtttcacgtttttttttggataattttctgctactcaaagttttgttgttacgaaaacgttgagtctctctctctctgcttgccgccgagacggccaataattttttttttaagacaatatttataaatctgaaataaacatcgatccagatttgtggattatagaaatcttatcaaattttataagattatttctttctatgatatctaacggctcatcatgtaagactaatctaaatttgtaacgaagaaaagtggaaaacacataacaagtgtattggcccgcctaatcgagttaatagggcaaggaaattctcctttactgcctaactcttctccagtttgatttttattttttgttgtggaggggaatattttaaggttctcttaccatagtacagacttataacgaataataataaaaagcagattatgaatcgaaagtacgaattttttcaaatccatttttttcagatagaaaaaacagtacgaatttttattgttaaaaatggttatattattgaaaatggaacaatttttcatttaagagaatcgaatattccattcataaatagtacattagtactctccttctaaaagaggcacgtgattggttgtcgcaaagcacacgagccaagatgcttcacttggaacgagaaaaagccccaagagacagaggagagggcaaagcaagcaagcacctttttctttcccatgctcgaaactcggttcttgattgattccttcgccgaagattaaccaatcaaatccaaacaaacccactcagatccagattcgttaaatctatccggatccatttacttcaacgggtcggatccagtgatctggcacttcacaatgggaagtggcttttctggttcttcggataccaaacaatg

SEQ ID NO: 26601 - DNA, 3000 bp, Unknown; identical to SEQ ID NO: 10109
  misc_feature (1)..( 3000): 2750-1469P.txt file - cDNA_ID_2714901; gDNA_ID_2213626; Annot_ID_195853

SEQ ID NO: 26602 - DNA, 3000 bp, Unknown; identical to SEQ ID NO: 10109
  misc_feature (1)..( 3000): 2750-1469P.txt file - cDNA_ID_2714901; gDNA_ID_2213626; Annot_ID_132039

SEQ ID NO: 26603 - DNA, 3000 bp, Unknown; identical to SEQ ID NO: 10108
  misc_feature (1)..( 3000): 2750-1469P.txt file - cDNA_ID_2714911; gDNA_ID_2213626; Annot_ID_195849

SEQ ID NO: 26604 - DNA, 3000 bp, Unknown; identical to SEQ ID NO: 10108
  misc_feature (1)..( 3000): 2750-1469P.txt file - cDNA_ID_2714911; gDNA_ID_2213626; Annot_ID_132035

SEQ ID NO: 26605 - DNA, 3000 bp, Unknown; identical to SEQ ID NO: 10107
  misc_feature (1)..( 3000): 2750-1469P.txt file - cDNA_ID_2714915; gDNA_ID_2213626; Annot_ID_195848

SEQ ID NO: 26606 - DNA, 469 bp, Unknown; identical to SEQ ID NO: 10275
  misc_feature (1)..( 469): 2750-1469P.txt file - cDNA_ID_2714915; gDNA_ID_2213640; Annot_ID_132264

SEQ ID NO: 26607 - DNA, 469 bp, Unknown; identical to SEQ ID NO: 10275
  misc_feature (1)..( 469): 2750-1469P.txt file - cDNA_ID_2714915; gDNA_ID_2213640; Annot_ID_181211

SEQ ID NO: 26608 - DNA, 3000 bp, Unknown; identical to SEQ ID NO: 10107
  misc_feature (1)..( 3000): 2750-1469P.txt file - cDNA_ID_2714915; gDNA_ID_2213626; Annot_ID_132034

SEQ ID NO: 26609 - DNA, 3003 bp, Unknown
  misc_feature (1)..( 3003): 2750-1469P.txt file - cDNA_ID_2714938; gDNA_ID_2213633; Annot_ID_180933
acccactcttattttccagagagagaaggagatttccggttaaccagaaataaattccggcgacagcttgttttttgttttatacatagtttccgacgtttgacggatctctctttccaattagtcggattttaataattttttgcttagcttggttcgttttccggctaagatcggattatgttttttgtttttctctcctctttctacatgatttcagtgtaaatcccgcttgctgtcaattggtttatttcatgttcatctgttggcttgaatcttctccaaagttagagaaatatcttcgccgtaatatcttcatcgttatgcgaagtggacctttctttaggtcttgggcggagattcttcctttgaagttggggttgagatgaagatctacactatctcctattattcaaggtggaaacaacagatccaatttgatatgcggcggtaatatctttaggaggatgtctccaagagcgtgaattgaagctttcacctggtggttacgaccgtcgtcggacgtgacagcaaattgaagatttggcggtgagcaaccaaaggtgttccggcggttttctcgcttgtgccacatgaatccattaggttttagcatcaaacacgtgtctcttacgtatcttctttgtgtaattgagtttattttaaaattaggcttcaaaagactttgtatcacgtatcttgtaatctgtcctttatgagtttcgtttttttttaaacgatttatttcattagttgaatcaagtgtgattacaatgtaaagcagataaaatgaaatatggaacaaaataatgatattggaatgagttgtcatttgttattctgtgttataaaacgaaaattgccgacaaaaaaaaagaattttcggttacgaaaatataaaatcttatagatatagaaaatgtaaaaggtcttttgtaagaataatacttttctactaaaatattaagaatatagcatattatatatatcaattatgtaaataacatcaaaggtatgaaaaatgactaatggtggtggtggttattccggtgatggtagtttcagcacgattccggtgaagattccaacggcacaagttcaggcgatattccgaccatagattttcatcgatgatattccaacgatatagatatcagcgatggtggttgcgaagattacggtggtgattccagtgatagtggtggtgactttgtgatggtgatggtgatgacgtggggatgatggtggtgccgttgtggttgtgatggtgatggtggtacagtggtgatatgatatccatgataaatagtaacagtgtggtggttttagtagtgagaacgtggtggttacgatggtggcggtgatgacgttgtgatggtagtggtgactgtggtggtgatgacatagagatgatcacgttgtaataccggcgtcggtgatagaggtgactataacgtcggcgagttaattggtttggcttaggatcaattatttccaaaataccgaaaatacacattatatcattaaaccatttttttggttagttacataatataatatttttatatgttatttatgcaaatttcccaaatgtaaatcacttgggcacgtgtcaagagaaagcgcgtaatcatcacgtaatcaagcgaaagggttttgcttacaaaatcctgagccgtctttcaaagcccaataactggcccaaacattctcagtaatatttcgacctaaatccttatttagacgcatctttattcgataaaagataataacaaaacttatctctttgccttgtctgctttttcatccaaaggtccaattagcttcttaagcccaaatctctctctctttctctctttctcttcctctctcaatctactcgccggagatcggctcgattcctccgtcaccaccgcatccgaccggagatttccttccgttttctttacttcacaacgcagagcttcaatttctccctcgcaggtattcttcgcgaaaccctaaactctcactaatttcccctggatctaattggggatttttgagttttgcctcgattgtttgttaaattgttagcttttgtttgttaagtttaaatgttttggtttcactcatggaggcaaatcaattttgaaaaaaacttgaaattgttgtttgtgtttgtgtttgtgtgatataaagaaaaaagcccgatctttttttttgtttgattaaattctgtgttttgtttgaatcagtttcgttgtgttgaaaactttgtaatctgggctctagttttctcaagagacatggaataatcacaatgtcaacgaatcagttggctaagcgatttcggttaggttagtttccggttaacaaaaactaatccgacccgattaagtcactcctaggccttacccgacccggctcatcgattagtcacacgaagcttgactttaccatttctttcgagtttctctgttgagtatcgagaatcgagaaaagaactttgctcaatctttgtttctcgtttggtaatcttcgtttctaagaattggaatggtctttttcataggattcatgatagtttttggctgcaattttgtatctttcttctgattatgtgaggaatttgattttgttgtcgttgtcgttgtttcgtcttagggatttgcgagaatcattgaacaatttttcaactttgacaattaatagcacgaaatgagcttcagatttatgtgtttgagtattcaaagatatagcttttatatttgcctttgtgggtttcatggagctgaatctgtatacttatagctcattagtaaagtctgttgttgttttcccatcatttgcttctggtttgacattgtgttgagtagtaagattagagctttcttgctttacatgaagcatttcatttgtggaaagtgcttcaatccatttgggtttctctctgatttggaagatatgtctggtgaaaactttatctgggtattgcttcttttcagtgattgatcaaagatg

SEQ ID NO: 26610 - DNA, 3003 bp, Unknown; identical to SEQ ID NO: 26609
  misc_feature (1)..( 3003): 2750-1469P.txt file - cDNA_ID_2714938; gDNA_ID_2213633; Annot_ID_132090

SEQ ID NO: 26611 - DNA, 3000 bp, Unknown; identical to SEQ ID NO: 10172
  misc_feature (1)..( 3000): 2750-1469P.txt file - cDNA_ID_2715000; gDNA_ID_2213634; Annot_ID_132113

SEQ ID NO: 26612 - DNA, 3000 bp, Unknown; identical to SEQ ID NO: 10172
  misc_feature (1)..( 3000): 2750-1469P.txt file - cDNA_ID_2715000; gDNA_ID_2213634; Annot_ID_180978

SEQ ID NO: 26613 - DNA, 3000 bp, Unknown; identical to SEQ ID NO: 10180
  misc_feature (1)..( 3000): 2750-1469P.txt file - cDNA_ID_2715010; gDNA_ID_2213634; Annot_ID_132110

SEQ ID NO: 26614 - DNA, 3000 bp, Unknown; identical to SEQ ID NO: 10173
  misc_feature (1)..( 3000): 2750-1469P.txt file - cDNA_ID_2715026; gDNA_ID_2213634; Annot_ID_132106

SEQ ID NO: 26615 - DNA, 3000 bp, Unknown; identical to SEQ ID NO: 10173
  misc_feature (1)..( 3000): 2750-1469P.txt file - cDNA_ID_2715026; gDNA_ID_2213634; Annot_ID_180971

SEQ ID NO: 26616 - DNA, 3000 bp, Unknown; identical to SEQ ID NO: 10175
  misc_feature (1)..( 3000): 2750-1469P.txt file - cDNA_ID_2715040; gDNA_ID_2213634; Annot_ID_132103

SEQ ID NO: 26617 - DNA, 3000 bp, Unknown; identical to SEQ ID NO: 10175
  misc_feature (1)..( 3000): 2750-1469P.txt file - cDNA_ID_2715040; gDNA_ID_2213634; Annot_ID_180968

SEQ ID NO: 26618 - DNA, 3003 bp, Unknown
  misc_feature (1)..( 3003): 2750-1469P.txt file - cDNA_ID_2715052; gDNA_ID_2213634; Annot_ID_132099
gccatatagagaaatagaattgttatttttgttagtcaagtgtgggttaacccgaattcaagttccacttgaagaggaaacttcgtatcaaaagacaaaaaaccatgtttggtccggaaaaagttttcttataaaaaagagagaattttccggtaaacaaaaatactgtagaaagtacacaatatataaaagaaatcatctagtaggaggagtaatgttttgatataccaaaaacaaaaaggaagggtaataatgtttgcaaactagtcattatataaaattgaaagtggttgcctatgaatacaaacatgttcatgcaagtgtacttccatgtgcttctcctctcattctcaatccacccaattctgcttcacatgtgcatatgtacatatatgcatattgtggtccgtacgtaacgtttgtttttaaatattattattgttatacgatttacaaatacttatttttctagcactcttaaataaataaaaacaattgcgtaaaatatgagataattgaaaaaataaaatatatatataagctaaagatataaaagtgtcaaaatttaaaaaggttaggtcaccattctctgtagattttagggcgagaaatcaagtcttagggttaagtttaagagttagggtttatgatttattttttgaaatcttaatttgagtttaatttccagggtttatgaagaaatatatacagatactttacagtttataatttggagtttggattaggactaattttaacaccttttaactctcacaaaatctaaactattttcttaattttgatattaattttatattattttcataaaatttcaactattaatcctaggaatatcttatgtttaaaaataaaagtttaacatgatctccgtgtggatcttttaatcaatattcaagtaagtaagttatttttacattcacatagaagtcagaccattataaactaaatccattaaaaaaactacatatggtaaaagactaaaagatggtcttatttccaagtattatggaaaaatgaaaaatgtatttagcttagtaaatatcttgagaccagcaaaatgattgagcattgggaatcggaattctgacaaaaccaatcaaatgtgacagattattagagtataactagtaattaatgtaggcttaaggcttcatgacaccaaactgtaagtaataaatttgggtattagtacatgagtaattcattacaaaaccaatttcagtatcttgtctttagattttttgttgaagccaaatacgttctcgcaaatcttccatctaaaatgatactaacaaatgatcagaagcataacaaaccaacaaaataaaataaatttccagcccataaaattggaaaaaaaaaaaaatatatacggaatcttccgtaacgattcgtacatgttttcactgtcatataatgtcacaaatcacaagactgcatttgttctgatctaatttatattcaattactaccaaaaccataattatttatatggatcacacgtttattttttatacgtctgacattaacaaatacacatggtaaaaactgttggaaaacaacaagtttagttaatagtacagttttgctatatagatcgtaccatttgttttcgtgataataataacatatatgaatctatataattcttaaccgataattaattaacacggaacttacgcgttcataggcacatatgacatagaagaaaagcatcgaattttaaaatagttcaacttgtgactaatcattatgcatgttactgtgttttggtgaattggaaaaagcttgatctgaaagaataataataaaaggcagtttgtataatgataaaaatataacagtatataataaggtgggagcataagtaacgtgaaggcagtttgatctgtcgggaattttttttgtatactttatgctcctaattatggtaattagataagttaaagtatagttttaacttaactcgtgaactcatcattttttttaacaagaatcccgtttctgaactcaaacgcaatcacaaaaacaaatacgtattgggattcataaatgccttaataaacgaaattttgtttttttttcttcttttcttttgaattatagtattgggctcacaacataattcaaaagtctttaatttacttattagatccaacaaacagaagtgatccgacccaatactttgggccgtagttgggcctaaataatattctccgtcggattatttgcgatcacttccttcctcattctcgccgtcgatcagcttctaacggcgcctcatcggtcgtcaagccttaccttctcatcccagctttggtagattctcttctttggtttagctgtttcagtctttgattttacttagcttgatcctccgaatatgagaataatgtttctattatgtttatcttcattcttcaatgtgaactcatgaatctggaatttgggcaaacaaagagtttcttccgaatgtgaacttgattgcttacaaattttgaaacttttttgtttatttgtttgctttgttcattgttgaaattgaacaaagtctttgatctgctcagtgcccacctaatatgatttatggtgtcagatggcatggcttgtggtttctgtttctctgattgttatatggttggcttctttctgcaaaatattcttccgagcaacatctatctccggagctgctattcttgatgatggcaagtagcccgatgatggtttccaccatctcaatagcttctttctttcaaaagctaatctttttttctttctacagaatttgatatctttttgtatttgatttcaggtaaaacccctcagaagaaaaatgtactgtttgttatcgcacatcctgatgatgaatcgatgtaagattttgagaatgtatctctctgtctgttgttggaatcaatgaaatgtcaagattattattgttcttcttcttcttcttatgattatgctgagagattagtcatg

SEQ ID NO: 26619 - DNA, 3000 bp, Unknown; identical to SEQ ID NO: 10202
  misc_feature (1)..( 3000): 2750-1469P.txt file - cDNA_ID_2715060; gDNA_ID_2213635; Annot_ID_132150

SEQ ID NO: 26620 - DNA, 3000 bp, Unknown; identical to SEQ ID NO: 10202
  misc_feature (1)..( 3000): 2750-1469P.txt file - cDNA_ID_2715060; gDNA_ID_2213635; Annot_ID_181020

SEQ ID NO: 26621 - DNA, 3003 bp, Unknown
  misc_feature (1)..( 3003): 2750-1469P.txt file - cDNA_ID_2715067; gDNA_ID_2213635; Annot_ID_132148
ttaatgaccataaggaggatcgagcttagctaagcgtagtttgtcgttaatttaaattattgatcaaataattagaaaaccagatattgacaaaacaaaaaataagaagaacaaatattgaaaaccagataatagccacccatacgtggtttatttgtcgttgtatatttagtattagggatcattgtgtttatttactctattcaattacaaatacctttagaccaaaacagaatatacaatgtgatatgcttagataaataattgctagaactatatgtttatttttaggtgcctagatcgttgtagtgtgtgaaactctgaatgattcttcaaacaagtagttttttcagtaataaaaaatgtctccaactccacatttgaataagttattagaacgaatagtttctcctttaatataatgtatatgacccagttattgggtttgcaactttgcatgtatatgttctatatatgtgtgaatatttttaacaaaaactaaaattaaattgacagatactgcagagtttacgactaataagttaacatcgtcatttggtgaaatcttcaagtgaccaaggcaaaagcatcactggaaaaaaaatcgatttcctacgcgattacgggaaacttttccgcaacagtgcaaccatttctcattcatccacagtgatcgtgaaatatagcacacgtcaccttcgaatcttacaaatgtgggtccatgttcatccagcacagcaccaacaataattaaggccttgagaaagaaattacgagcatcacacttccattaattttcttaacaaattattaaacttaattatagataaagtgtgttccccaaacggagggaaaaggagattttctcttctttttttttcccttctgtttttgtctttccttaattatttctcctttgttttgtttctttgaacccaaatcttgttattttgtttactgagtatgatgaacttaacaattaatttagtgacggtctaagaagatgtcaagtgccgtaattaccagctaattaagtactcaattccatatttgaaatgttatgttactcaccatttcctctttgtcgtttttatgattgggtcaaatgttgcggccaacaccagtacaagtatcacagatttaaatttagcttatgggatctttcaactagtgcctcacttctacttgggtgtgacttttttcgatgtattttttggagtgaataattcgatatttgagtttaaaatgttcattattgttagagtgtgaaacagtgaaaggtgtctctcggtcaatgatttttttttttttagtcggggaccaaatttttattttctatttcttatgaataatgtacttgatatttctatttattatacttgctattttgggtcaaggtttgaaaaaagccggttcgattgatccaaaatttggagacaatcatgtcacggaccgtccggtatggagaaattgcccatatcgtcggttcggcgggattgggggaccgctttcataatattccgtccggttccgttaaaatgtttattcggcgtgcttagctggcaactgtagcgaaacagctggcatggtcactctcgcacgtggccagcgtcgtcctatatttactattttacccctatatagcgctttcctaatatttctgttttcttcgttctacatccatttattttagtaagctacggaaccatagagtatatatagaaatggtaaatatatcagaacactgattaaattttgataaatgaatatttgtgttattaatccaagaaagaagataaaaattagcaggctttttcgagtgaaatgccagctatgcatcagtaaatgagccttcacttctcttttgctttattttccctatttttctgcttttcttttctgttcttttgccctactctacatataaaaatatgttgtattttcccattttcatgtgcaaacgaatataatttttaacttagatcaatgtaagtgtatatatatataataatttctatgagcacataaattgatagtcgtatgtagtgggaaaaaaaacacacgcaaacttcaaaatccaaatttattttatggcctaaaagttgactttacccttttgaggtctctgactctaatacgaggggtcaaaatccgaggtggcattttcgtttcaagctgcatatactcattacacattacaacagtattaatttaaaattttgtaataaatacatatgacgatccatttattttctatgcgttacataatttgattcgttttccatcatttgctttcacaaaaagaaaagaaaaaaaagagtgattcttaatggaagttgtccttatgtagtatttacaccgaacatattatatggttgcatagtaattgtttgaacctagatacaacaacaagaagaagacacttctgagttttttttttcctttttctttcctgactgtgcttcataaacatgtaagatctcgtatttaccgcaaaaaaaaaattcaagataacattttattttgacttttatgaattccggatttttttgtggtcggcaaatacaagtttcaatctagattctgttcaaacataaacaaactctaaagtcaaccattacatacagacacagacacagtcagtctctatagtacatgatatctaaaatgattatattttttttaataaaaattttgcataaaattaccgaatttttagcagacaagcagccgtgaaacacacggaagtcggggaagataagagaagctcgtgatgaacactaagaaagatcaatgtcttaatctgacaattagtcgttttacttaaactaataatatttttttaacggtaatctaaaattatttttgatttcaacatcttcattctcattcttctgcttcctttttatatatatcacaacaatctctcttctctctcttcaccaattcttcttcttgattctctgtgtttattgattctgaggctttggtttcgagaagatg

SEQ ID NO: 26622 - DNA, 3000 bp, Unknown; identical to SEQ ID NO: 10205
  misc_feature (1)..( 3000): 2750-1469P.txt file - cDNA_ID_2715075; gDNA_ID_2213635; Annot_ID_132146

SEQ ID NO: 26623 - DNA, 3000 bp, Unknown; identical to SEQ ID NO: 10209
  misc_feature (1)..( 3000): 2750-1469P.txt file - cDNA_ID_2715082; gDNA_ID_2213635; Annot_ID_132144

SEQ ID NO: 26624 - DNA, 3000 bp, Unknown; identical to SEQ ID NO: 10200
  misc_feature (1)..( 3000): 2750-1469P.txt file - cDNA_ID_2715086; gDNA_ID_2213635; Annot_ID_132142

SEQ ID NO: 26625 - DNA, 3000 bp, Unknown; identical to SEQ ID NO: 10185
  misc_feature (1)..( 3000): 2750-1469P.txt file - cDNA_ID_2715090; gDNA_ID_2213635; Annot_ID_132141

SEQ ID NO: 26626 - DNA, 3000 bp, Unknown; identical to SEQ ID NO: 10185
  misc_feature (1)..( 3000): 2750-1469P.txt file - cDNA_ID_2715090; gDNA_ID_2213635; Annot_ID_181010

SEQ ID NO: 26627 - DNA, 3003 bp, Unknown; identical to SEQ ID NO: 16316
  misc_feature (1)..( 3003): 2750-1469P.txt file - cDNA_ID_2715094; gDNA_ID_2213635; Annot_ID_132139

SEQ ID NO: 26628 - DNA, 3000 bp, Unknown; identical to SEQ ID NO: 10197
  misc_feature (1)..( 3000): 2750-1469P.txt file - cDNA_ID_2715102; gDNA_ID_2213635; Annot_ID_132136

SEQ ID NO: 26629 - DNA, 3003 bp, Unknown
  misc_feature (1)..( 3003): 2750-1469P.txt file - cDNA_ID_2715106; gDNA_ID_2213635; Annot_ID_132135
taatgatttgaccatttttatccctaaggttggtaaaggcttatcaaaggacgagaaagctaggaagttggctttgcagcactggcttgaggcagtaagaatattcttttacaatttgtctttctctgtggctataagttttgtgtaaagccatgtgatcttaattttctagcttaacagattgatcctcgacatcgatatggccacaatctgcaattctattatcatgcttggctccactgtgacagtaaacaaccctttttctactggtaagattgctattacacaatcaaaagtatgatagtatcaagcgtacaaatttacgagctaacgtccaactttggacatgtaggcttgacataggacaaggaaaagaattgaaccacgaaagatgtccaagatcaaaactttaccaacaaagcatcaagtatcttggtccggtgagttttaccctctagtttctgtgcttggttgaccaattctgtagaaccttagatctattttcagaaaaacttggtagaccaatattattgacatgcttgttagatacctttttgtaatccttcattctttcttacaaacagacagaaagggaggcatatgaagttataatcgaggatgggaaactaatgtataagcaaagtgggatagttctcgacacaaaagaaggtcctcctgacgcaaagtggatctttgtcctaagcgtatctaagatattgtatgttggaatgaagaaaaagggtaactttcaacactcgagttttctagccgggggagctacattatctgctggaagaattgtggttgacgatggtgttcttaaggttaaagaaagaaatttactcgcttatacttatgcaaaagaagagatgttataagacactgcaaaaacgttttgtgttgagtttgagttcgttggatgatattttcaggcagtttggcctcacagtggacattatcttccaacagaagagaattttcaggcgttcatgtcgtttcttagggagaacaatgtagacctcgccaatgtaaaggtaagtccattctggtctgagttttaagtcaccaacatctcataggtttggctctggtttgtttttaggctatgattacatactttattttttatattctgtagaagaatccagatgaagaagatggagaagctcctgctaaggtcaagaggatgccttcaagaatcaaagagaccgaagaagaacattgtgactttgtggatgctgagaccggttttagtcccaacactaagcccaacaatcatgcagagctacaaacattatcaaggttccattcaaaactttcaagactggatgagattccagacgaagacgacaacatgatcgaggaggaacaggatgatgaagaagaacctgaaaccccttcagaacaagggtatgagacagcagaggagacattcatagctgaggaagagttcacatatccaaaatcaaacctgttcgatgaagacattgaagattacgagaagcctgtcctgaaggagaagataatgagacggatagattcacacaaaggaattaaatcttaccagttagctgagcggctacattcgagatggagtacaggtgcagggcctagaatcagttgtatgagagattacccttcagagctacaatttagggttcttgagcaagctcatttatctccaagagcttcttcaaattcttctaagatatctccttttgccccggttagaacacgaggaacaagtcttgggagaagtcctttggccgaagaacttgaaaatctttaggtcgatttatatacatgtgacgcgaatgcccatgtcatgaagtaatcggcttgattcttttttgttacgcaagataaaaaaactagggcttcatggaagaatggttttcttatgtgtgttccttattcttcaagtcacatattcattgttcttttgttggtgtagtaatttctgcaactctgcatatttggaaaaacagaaaatcaagttttttttggttcatatttttgtcatataattattttataatccactgaatcatataatcttcactaatttaattgtcgtctaaaaaatattcatccgaatgtaaatccaatctgaagctaataactactgtaattaggtttaaattagttcaaaatttaaacctaaagaaggagatatcgtaagacttggttgttctctgtttctgactgctctaagaacaaggaaaccttttttttgttctgttttgcttttccggattccttattgacgcttgtagttgactctcattctttctgaggtctgcttcttcttgaccctttgtattttttatttcttctccttaaatacacaagttaatctcgttcttttagggtcaatgttacatggttcttggatactaatagctggtttcgtttagttctcgtttacactaaacgttagttactttttttttttcctgttagcacacacgaattgtttgtttaatatgtgtcttctacgtttcattttaatttcttaaaagtgaaacttttggtagcacaaaatcaataaattggcagcaatcacaaaatcacaatcagaaagaaaaagatagtaattagactaaaattgtgcgttgagtcaaattaagtcacgcaaatcacacgtagacttcactttcaaaaagcgctgaatcaaaactggtggctatgaatttttcccatctctcaaaatctttataacttggtctcaaaatttaacaaatactaatttattaataaatcaatctctgtctctctctctctctttctctctgccagcgaacatccattggagctcctcactatacggcccaagagatagagggagagagaagacatcataattcccaaacaaaagactttgggtataaaattgggtttattgactttgtgaaacctacccagaaaatctaccaactgtctcgaagtctctctcctctttcttgaaacgggaaagagggagggaagaacaataagaagatg

SEQ ID NO: 26630 - DNA, 3003 bp, Unknown; identical to SEQ ID NO: 26629
  misc_feature (1)..( 3003): 2750-1469P.txt file - cDNA_ID_2715106; gDNA_ID_2213635; Annot_ID_181004

SEQ ID NO: 26631 - DNA, 3000 bp, Unknown; identical to SEQ ID NO: 10191
  misc_feature (1)..( 3000): 2750-1469P.txt file - cDNA_ID_2715114; gDNA_ID_2213635; Annot_ID_132133

SEQ ID NO: 26632 - DNA, 3000 bp, Unknown; identical to SEQ ID NO: 10184
  misc_feature (1)..( 3000): 2750-1469P.txt file - cDNA_ID_2715116; gDNA_ID_2213635; Annot_ID_132132

SEQ ID NO: 26633 - DNA, 3003 bp, Unknown
  misc_feature (1)..( 3003): 2750-1469P.txt file - cDNA_ID_2715135; gDNA_ID_2213636; Annot_ID_132178
aaaccaccagatccagagctcgacttcccagcggaggagtctccgccacctccaccaagtcgtcgactgccgctttctgtcagtcgcggtgtagcaagttttctcatattcacaactttctcgaccttttgattccccttagccgcatgacttatcaatctaccatcatcgttgttagtctttgctcgttgtccacgtaacgaaggaacagcaccatttacgtttccattaggagctcggcttctagaaggcgaacacgattgcctctttgcaacatcgcgttctgtggacgctgatcttgaactacttgacgcatcaaaggctctggttctgctacttgaagcggtttgtggcctatctggtaacgtagttctgagattcgatggcgcttctactgagaatccaggcatctcgtaaggttcccatggccttgatctcacgatcggagaagcttctaaagacagagccggtttactcaaaggcttagttggtttacttctcagtacagtcgatgaaccgttcggagttgatggacggcgagttggagtacttgacctcgatcccggttttgaattaggagccgacatcggcctgttattggatcgagtagaggtggctgaaccggtagtttgttggtctgttgaggtggtgggcctggttgcacgtgcagcggttaaggtaacacgtgaggttccagttccggagctagaggaaggtctgctccatgatcttgttgagctagtagtagaggacgaggttaatgtcgcacgtgtagttgttgaggtggcacgtgaggtcggcgttgatggccttttggctggagttttagactttctggttggcgtgggaggtctactcgttgatcttgagctactagaggacgatggtcttctgattccagaaacagaggaggaactgtgtaacgacgtcgtttggtgctcggactcttctttgctatagttctctaactgcacataaaaaaaaaaaaaaaaaaacagagatgagcaagagtgtgacgtatatgcagacacttaaaaacaaagagattgacgagattagaccacgagatatactgagtccgtacccgagatataagagtcatcaggttatcatcgggtgcgttgaggtggttcgttacgtttctactcggtgagcctggtggcgtgaccagcctgaacaataagaacaatcaataaagatcgatggcaacaaatatataaatcgattatgttgaaacattggcaaaaggtccaattttgaaaaatatatatttgagatatgtaacatcaataaaagtgattgaaaagtacaaccataactagttaacaaaaacaaataaaaatccatagctagtgaattgttttttagaatgctttaccaactcaaattctgatgaacaagatcagacatcaaactactgtctagcaagaagaataaccgagaaaattgatcaaatttactctctttttgttcggtggaatgtgtgctacgttctatacgaacacaaatatttttaatgcaaaaatgtaacaaaacataataaaaaggggggaaatgtttcaaggcaagatttttaaatcatgatcagacttttagagagcatgatcaaattaattaaaagggggaaatgattaccattcgtaatcggacttctcgccatcggagtacaataagttctccccggcagttctccggacagggtattgttgagacgacatcgccgtcgtactactagtattatcagattctgccaaaaagataaatcagaacaaaaaagaagataatttttcgacaacatatattaacacatatacgaacacggacccattaaaagcgtaggtcggtgacgtttctcgcaacgacgcatctccaggaacaaaagaagctcttcatctttgttttgggtcaacattttaagacattttttaaattaaattgctgatgctggaagaaagtggtgaagatgttcttttacgtgttttttcttcttcttattatttgaaaatgtcagattatcattcacacccctactaatgatatatgtataagcaagtaatatttattattaaaaagtaaggaaagtaattattgttgttttttacttatatcatattaatgtattttggctactactaagagaatttttattattttctccagcaaaaatttaagagattttttttctcaatgatattattagtttatatctttactttaaaaaagaaatacaagattatttctcaatctccactaaatttctggaaatggtattattaaatttcattagattttcttaaagcattcaattttattatatctttagaaaaaaaaaatgccatgctggaaataaaactaaaaatttacaatacattaatccaaggtgccgaaaaaattctcacgagtaaaatcaatgcatctgtgtgaaatatatgtgaatctcgcgtatagatgagtttgtcttacattgaatccttccaatgttgtgatatatttttaagtttagcatgttaatgcaaaaatgacttatcgatctcccccatgtcacaactacaagcctcaactctgctaataagaaataaacgaaggattccatggaggatcaatatgtcgttatgtgtccaattcccgattctacttaaatgaagttggtttgagagacattattcttatttaagtggatttaaagctcaaggcccaatacccattttcaaaggcccaaacattaactaggttctaggtatccccccccttatgtttttattcagcaacagtttcgaatatgtttcgtctagacgagcgagactctctctgctaggtttcgatttcaatttcgatatcagggaccattttcctgattcttcgaattctgcatagagaagcgaaattgggatagatctcgtttactttgatttgtcaatttcctgcattctattatacgggttttgtgtttcctcgcaaattgatacagactgttgctttgccattgaattatttgctgcgatg

SEQ ID NO: 26634 - DNA, 3003 bp, Unknown
  misc_feature (1)..( 3003): 2750-1469P.txt file - cDNA_ID_2715147; gDNA_ID_2213636; Annot_ID_132175
agactatgatgatacagaactaatttcacagattatgcaatgctctgaaaccagtttccacatggcacttccttgttcaatttcgtatttcctgctaaacttattccacagatgcaaaccataaccattcctctgcatatgaagaagcttggttttgacccatttcgaatctttctctgttttaggcactttgaacaacttcttaatctcgagccagtttaccgaatagaacacagatggtcgcatgacggtgaagttatagccacttgatccttctacagctctagccactcgtgaaacaaggtatggtccgttgtatccccatatgtttccgttgaaagttttagcgaactcttccatgaatttgagtaacagaggatggttcttgtcgaatattagtaccgcgttgtttagtcttgtccaattcgttgatgaaggatcaagtgtttgtgcaccaatcacgtttctcagacctttgaagctttttagaacaatcatgtctgtgtctaagtacacacctccatatttgtacaagtaagcaagcctcatgagatttgagagattctgagctaaagaaatctttccgggatctcttttaccgctctttatttcgtcgagccacaactctcccgcggttcctttgagcagaaaaggcaaatctggtgtgactgcaagaactttgtaaccacgatcaataaacggcttcaaagttgcataaccttgaggagaatccatggttgcggataagatcatcaagcaaccatacggatgagacttaaagacactttcaatagctaaaacctctctattgccaaagaaatctgctggtgatatccatgtcatgacgaagttgacttcgcatccatcaccgacaaactcatttaccctcttttgaaacttgtcagacaagttatctccactgaaaacttcgataacttggagcttctcgtttacttgtgtctgttgtttgagcagatcacttctttcaccttctctctcagaactcagaggtaagtgtggaatcactctcttgatctctatcttcactcctgagaaatctctatgcggttgcatcgagaaattagaaattagagtaaacgtggtaaccacgatcagagttacaaagctgatagcgaaggcggtgaaaagtgatgatgatcctgattggtttagtcgtctgttatcaatcaccaccgtgaatctcttttctatatcatgacgatccataataaacacagaactgaaatgttctgaagttggaaaccagaaaagaaaaggagatttagattgataagaaagaaaccacttttgagtttctctgtgtctgttttatttcttgtttaacttgttttgaccacgttcttgtctttgggggctgtctagttttgaaaagttaaagaactcagacatagacatttttgacgtattaccgaaataattaatattgatgaaacgaataatgggaaaataagtaatttcaaatttctaacaacacatatatttaaagttttaaaaggattctttttcattcatcctaaatggaaatgttctaaatatatatttttttggtttaatgtgaatctaaatgttctaaacagctaataatatttttgttcttttcaattatttggggttatcatcacatattttgtagaattctctagtcatacccttaatagtactacactaaccaaaaactgtttcatatgaaaacttgtacatactttatttgtcattctttattactaacattttctattattgccttattggtcaactttttggctaacacggaacataataactaaagttcgatgtgtattcttcttacgaaaatactgatttatatcgtattgatatttctgtttgaactcttaatcaatgataagtgttaatatattgttatttggttgatgcaaaatgatatttggaaaaagacgtgtgtgtattaaaatccaaattatcaatgactcattgtatttcaatctctaggctttctagtttctagctttgataaggttcttattttattataatactatttaaacaatgttagttggattttaatattattttgaatgaaaaaccctgctattttacggttgactaattaagaaatataaaatattaagacatttgaactatgcaataacgacaaaaatatgtaaactcgaatagatagaattggttggctggattttggtttagctccaaattcagttttcactattagatccttaatgtttactataggttagaataagatgaattgtgaattagtaaatgaatgtatagaatataatatatgtattttattggttctataaggcatgattagggttatctttgtttatctttatattggaaacttgattggtccatgcataatcagtttcctccacacgacttgtcaaagctatgtaagcattttgaccgtaacaactgaaagcaccttatagaattaaattatatatgtatcacattactttaaatctcattactgtagattgataatatcagctcaacaacaactagagaaatgcaacttatgcagcagtataagtttgttgtattgttcctccgatccttccaagttccaagcctattcattgacatagacaacgtttctaaagctaatgaaagattgcatataaactttgtgtaagatccaccaaagtcaaaattaatggcaatggatcataatttggcccatgggctttaagtgaattatatggaatgatctaatgacatttatgcccctaaggttttgaccgtcacgcagaaaccaaggagttagttccaatcacgtgggaaacaatcgcgtaaatcggacggtagaaattaaatgcgggtgagcaccgagctgtgagtataagagaattccaatgttcagacaattgccacgtggacttatgctttgctttcgtttccacacagtacattgctcccttcccactcacacaaaccaaaaaccaaaaactcttcttcttctgatgaaagatg

SEQ ID NO: 26635 - DNA, 3003 bp, Unknown; identical to SEQ ID NO: 26634
  misc_feature (1)..( 3003): 2750-1469P.txt file - cDNA_ID_2715147; gDNA_ID_2213636; Annot_ID_181066

SEQ ID NO: 26636 - DNA, 3000 bp, Unknown
  misc_feature (1)..( 3000): 2750-1469P.txt file - cDNA_ID_2715159; gDNA_ID_2213636; Annot_ID_132171
ccagagtttggacccgattcaacctccgatcgcaccgccttataaacgagctcttgagctcaagaaagcttcagcacaaagcttcaactcttgaagaaggtgataccaaaaaagaaaaaggaacaaacttttcattggattctgtagcctgtcgtaatgatatattcagggacctacaatttctataacgcttaatgtttttgttatgatgaggttatattttttatagaataagagattatattattacttttgtttaatactgctaggaagaaatcaaatattgggtcaacaaaagaagaagctttttcagtcttatggtcctttgatttcgacccttctttttgaattctaaattggcccacttcgtttttcgtttttagtttgtaacgaaacttgaaaaaaaaaaatggattaagatttgaggaattataacttttagtagtcactagctagttgaataattgaatcgataaacataagactttaatcaactgatcacctatgcaactctcagtgtcaactcttttacattacaaaggaaacaataaaaatcgtttagcgagaccaggtagagatcgagtttgatctcgacaaagaagagcaagagtttaagaactcaatgcagtcctcaatggcttctgcacggtgagactctgatccgtttagagactttgacttcatcaaataaagagacgaagaaacgttactggaagatgacggtgtcgttttggtgttcatcctgccgaatgatatataacgaaacgttttgccaactctgtctccaatactgcggagtaatctcttcgtcgttgccggcgagtcactgaagctgaaactgaatattccaacaacgaccctcctgcgaccatgccgtgatgagctgtgtgttgggaagatcagttcgtcgtttgcttctgggtccggactaaagcgtactcttttggatgctcttcgagacatattcttgtctgaaactttatcgagagagagacagagagaaaaagagaaacaaaatggagacgtgagggattttgaagatttatttatgggggcaagtcatgtataatgtttggggaggaattttattaaggaaggaaatttgaacaagttacttgtttatacatgtacaactacacgtaagttatttaaccaattgatatgaaatggtttccaatatctagatttgtttaattgattcttgatttttttccattatagcttgtagaatttctacgaagatgatgcgatttgtaaaaccaaaattatagtcaaaagaaaagacaaggaaaaaggtttgaagtaaaagagtaaattgagtacttggaataaatctaggtttgaagtcgaagattcaacaataacaatataagtaattaggtagataaattctcatatgtatgatgaaataaatcaataagacaaaaaaaaaaaaaaggttgattctcttcttgtcactgttgtgagagctttgtttttttaggtgaaatattaggggtcctacccccaatgttccccattcattataatactttatgtgtaaacataggcatatatatagagaagttttgagatatatatcaggcccggctcttgggaggtgctgagtgtgctagtgcaccgggtttcacttctttattcagttttttctttatattttagggtccaaattttcaaataattgcaaaataggatttagtttttaaatatttagagttttaggtaaagaaatttggagcatagcacaaggtccaataatttattgggccggctctgatatatactaagacactatatagaagtttgattatgtcaaacaagaaaatttgaatgagaagtttgaatatagagagacttatcaatatcactttagttcaacattagatgtaataacagttaaacaattttctaaccaatccaaataactcaggttaagttcatctcaattatttgtttggaagtttcatttgaagtacattaatctcaattgagacgaatgtcatagtccatatattttgtgtacctcgtcatctttgggccgaaggaacaaagaaaacttagcccgattaggatccattcatatatgggcccatataaggcatttagtgtaatagatttttgcatcatcatgtcttgagattttctattagaaaagtcgaaacaatcaaataaaccaagagaaatattgaaagcaatcatgttggcattgagtaaattatgtaagatttgaattctccgaggaacacactacgtttgtatgttgcgttctaactttagaaagattaaaaaccataaaatattggtaatcgagaaaatgaagttagatctttcacatgcaatgatatgcatatgggacagccaagcagtttatatgttgtgttgtgttgtataatataagacaagatgctttataattatgtgaagcgaatattcattggaatagatttccgattccacatttctttctctttttttggttgtatttataagcaatataaaaaaaattattatataaatatatataaagaatatatataaggttgtcttggcgtaattatttgagttttatgttatatcgatctacaagtaattagcgcggctaatgatatgatacgtaacgaaaagtattttgaccaaataattacaaagtcaatttttttttgtcaggagtacgttattgtgattgtgttttttttttttttgtagtaattgttttctcaagtgtttaaacccctaatgtatgcataaaccattataacaacaacgatttttctataacttctgtaatattaataaaagataaattttagcatatgctaaaacgagtattaggatgcttatctgtctctgcctcacaaagaggatatacctctctttcgtcttcttcagattctctctgacggttgttaaaaatccgattataacgacgacgacacccaaatcctcacaaatatataattattaatttaagcttctctgtcaaaataaaaaggagtcatg

SEQ ID NO: 26637 - DNA, 3003 bp, Unknown
  misc_feature (1)..( 3003): 2750-1469P.txt file - cDNA_ID_2715166; gDNA_ID_2213636; Annot_ID_132169
aaagctttacaagcttccatataattcgacggtgcaagttgttttgcaagacaccggaaatgtagcgccggagaatcatccgattcatctacatggatttaatttctttgtggttggtttaggaactggaaactataattccaagaaagattctaacaagtttaatcttgttgatccggtggagagaaataccgtcggtgtaccttccggtggttgggcggcgatcagattccgagcagataatccaggtttttatcttattatactagtacataatatctacaacttttgtatagtaatatatatttttcaatttgtaacaatgactatttgaaataatatatatgtatatttgtgtggtttcaggggtttggtttatgcattgccatttagaggtacatacaacatggggactaaaaatggctttcttggtggagaatggtaaaggccctaaccaatcaattcgtcctcctccaagtgatcttcccaaatgttgaaaactccattattattttttgaatcgattaattcgtttcttgacattttaaaattttgatatgtgtatgctcatgtaaattgtcaataaagtcattgtatgatttgttacgctttaatgaaaggttgaaaagaagcatccttttaattaaactcaccaacttttttttgagctgaaatttttttcggacttctgattgatccatagtttgtcctaatttgtttttatcacttgtttaatacatgtggtagataataaaaaatgttcaaaacgcaataccatacttgaaaaaaaaaaatgttagacctagttataagacaagactgaactaattaagtgatcggttagttggtaaaacaaaatagtatttcgaacttaattttcacctaaagtttaaacgtgtctactaatgactcgataaactaaaaaaaacagtcttttttttcttccaaaaagtcgttatcaaagcagaattcatctgtcgtcgaattttgaatgagtaggtgcaatgtcacatttccaatattaaaagaaaacgagaaagaaaaaaacaaaatactcctcataaaacgatagaaatgaaataaaacgaagcaagagtaataaattcgacagaaaaaggagtaatttactaattatagtaagagaatcttgctaaatatagaatccaagaagaagtcactctctgtggaacagaaaccttgtgtctgctacaaatcagcagatgacacttacagtttacgtttcatcatgcatgtgagcgacactatagggagaattcggtattggcttcctttgttgtccctaccttatttaattactcctgataactatttttctgtgtatttcatcgtatcgaaatatccaaatttcattcttcatggctgatttaactagtgtttaattataattatactttatacttttttttggttcttaatcacacatgctttcgggatcttgaatacgaaattttaaaccgtctatcatttgtttcctgaaccgggtattgcaaatagttaaatcttagtcaactattttttcgagttttttttaaaaatagttctgaaagacaaaaatacatgagtttgtgaaaatgtttgacagttggctataataattggttgcaatgctttatacttttaccaaatttaaattattcaattggctagaagtggagctgtggtaccgtccacatgaggtggtgtcgtggtgagacattaatatatgaacttttgttacgatatgaaagcacccgacacatacattcttcgtattatcttgccttatatgaataaacataaaataaccaatactaaatttgaaactgtgatacactaaagaaaatatctttggttacatccagctctggcttctgttcaaagtttttcttttgaatttatttaaaggttaattaagatcaccacctaacccacttgtacaacggttctgcagtttttgccatcgaatcccattgtttaattcgcatatttgtatgatctctactttttttttaaagttaaatagattaattaacaaaatgaagtttatttacaacaaaataaatgaaaagtacaaatacgttaaaaaacaaattgtttgccagccaaaaattaattaaatacgtaattttcgaaggtgtaatattccaacttgtttttgtatatttgtttagcttatggagttatggttgtgttattatatattgaatgggctatttcgtgttgacaaataagctctttagttaaatattattatgttcttgattaaacaacaaattaagaaccggccaaaccattgaacagtcgttttctggtctttttcattttattggttacaccttctttgtcataaaatagaaattatgttatactttctttcatgtatcgacacgtgcatttggttagtcttaatcccatttcaattttatatgatttatcatattagcagaaaacaaatatgctaattatcacatagataagccatactaaaagtatttatctgaccttaggttaaaaaaaatattaaaatatagcttataagaaacattcactactgagttgtcatatttctactggccgacttagattgcaacaactaaaatatattttttataaatcatttgacataggcaaaacaaaaacaaatatctctgtaactttttcctcaattttttcttttaaaaaaacacttttttatacaccttttcctgttgaatgtattattattcctattgatcatcacgtgaaatatagaaaaataaaataaaaaagcaaaatccacttttgtgttttccttttcgtttacgaccaaagagatccactttatgctctcttcattttctccatgtaataatttttctcgagagatttctgaaaataaagtcgtttctttttttttttgccttggtcactcaagactctcttcttcactctctgttttttgtcctcttctaaaatttagagaaaaaaacgaaagttttcaccaaaaacagaggaggagctatg

SEQ ID NO: 26638 - DNA, 3003 bp, Unknown; identical to SEQ ID NO: 26637
  misc_feature (1)..( 3003): 2750-1469P.txt file - cDNA_ID_2715166; gDNA_ID_2213636; Annot_ID_181058

SEQ ID NO: 26639 - DNA, 3000 bp, Unknown
  misc_feature (1)..( 3000): 2750-1469P.txt file - cDNA_ID_2715173; gDNA_ID_2213636; Annot_ID_132167
tctggggaaatcgcccaaacagtcgaatatctaaagaaagaattcgaaatgaaagacttaggcaagacaaagttctgtttgggattgcagcttgagtatgtagataaaggaatccttgtgcatcaaagggcatatacagagacaatactcaagagatttaatatggacaaggctcacccattgaccagcccaatgcaggtgaggagcctaggattggatagtgatccattcggtccaaagaaggacgatgaagaaattctcggtcctgaaatgccatatctcagtgccataggagcgttgatgtacctgtctagccacactagaccggacatatgttttgccgtgaacctcctctctagattcagttcttgtccgaccaagaggcactgggaaggaatcaagcatttgcttcgatacctacaagggacaattgattttggtttatattatactaaccataacaaagaaggtttagttggttttgctgatgcaggatatctttcagatccgcacaatggaaagtcacaaacgggttatgtgtttactcatggtggaaccgcgatatcctggagatcaatgaagcagaccatcacggccacttcctctaaccacgcggagatattggcaatgcacgaggccagccgcgagtgtgtgtggttgaggtcaatgactcaacacatacgagccgattgtggaatggtcgaagacaaggagccgaccatcatatacgaggacaacgcggcatgcattgctcagctcaaggaaggatacatcaagggagatcggacgaagcacattctgcccaagttcttcttcacgcatgacttacagaaggatggtgaagttaaggtggtgcaagtacgttcaagcgacaattcagccgatctattcaccaaggcattaccagcaacgacattgaggaagctcgcgcatcaggttgggatgcggaggcttaaggacttatagagatgaccaattcagggggagtaatgcgtgctgtactctttttcctcactatggttttgtcccgaaaagggttttcctagtaaggttttaatgaggcagcattcccctagcgtattactgagatcccgttggcatctacacggttatgtcatccaagggggagtgttgtaaaccacttgttggatggactccataaccgtggcccatgtctttggaggataggtccgtcagcccattggtgtgacggcccatcgaccagtcggcccatcagtccatcggtccatcggcccgtcggcctgtcggcccggtccatggagagaagccacagtcagtccggcccgtaggtccggcccatggagactatacttaggtcggtcatatacttaagtagttatgggcttttgtaacctagcccattagacatgtaacctcctcaagtatgtatatatatgtgatgtaacctcattatgaatcaataagaaacaagttagttcttcacagcatcaatcgtagaaaacaatctgagaaaacataacagaaaattatatcaattttttttcttaagtactattaaacttattttcatagttctatagtctctcaacttttgttttttgttttttcgtggttatattaacatctattacaacttgtttacgcattttgtttattccatatataggtcacagataatgcgtgtgcattaagttttcaaacaagtttattagttctactaatcaggatattaacaattcttttgcgtggtaggtttgtttaacctcttgtgagtttatggttaaaaaagttaatctttctctaccacttaacacttcttttgtgtggtaggtttgttttgactagaagttgtagaaatagaaaagttgtacagagattctcaatctgctattctcttgagtcgttgaaataaatttcaattctatgatcgatgtgtcatgtaaccgttccatgaatctggacacaatcacaaaaagaatccataagttatttggtgtattaattatccgttttttttttgttcacaatattgattatccgtttatagatatgtttccttttgatcaaaaacaaaaagatatgtttccataactatttcaattttttgttaggaattaggtaattttgttataatttttgattctttaacatataaatgaaagggattcaaacctacacaaccacaatctttaatgatacattactatgaataggatttagcatccccacatcttctcaaagattcaagaaagttattcaaaattcaacaaaataacaaagagaaagataataaatgcgaggacgtaactggtaaaatcacgaaactgcctgattcaccttcactattcagagtgtttccttataaatatctatcacacggcgcaaaacgaaacgctcaagccctcaagtttatcttcctcagccgtgtagttcaaatcccggcacaaaactctgtcgtcgcttccccgagaaaaggtaaacgaatctttcaccaacgattaaccgtttctaaatattaaatctggttatctttgatctgtcttttttttgattctatgaacaatttctgttactagtaatcacacattttcgggaggagtgttcttagatttattttcattttcaaacgaaatttgcgattgtgtgttttcgagttttcagatccgtagctttcttcgacgaaattatatatgtatgtatggcttccgattttgtcagtttgtgtctagaaaacgcgttatgtttttgtcatgatgcatgtaatggacattactttggctattgctcataaaataaatcgatgtttttcaattctgtttcttcgtggagtcacacatatatatatatggaggcttatctgtctaaatccgataattagtcgtagaaatatcgttgtgtagattttacttggcaaagaagtcatcttttgtcctttttctcagtaaatcaggtcaaaaattctcacattgttgaaaactcaggggtcacacttaaacttgtcgaaaccaaacaacaatg

SEQ ID NO: 26640 - DNA, 3000 bp, Unknown; identical to SEQ ID NO: 26639
  misc_feature (1)..( 3000): 2750-1469P.txt file - cDNA_ID_2715173; gDNA_ID_2213636; Annot_ID_181054

SEQ ID NO: 26641 - DNA, 3003 bp, Unknown
  misc_feature (1)..( 3003): 2750-1469P.txt file - cDNA_ID_2715181; gDNA_ID_2213636; Annot_ID_132165
tctttgtacttcaatatcaggctttgaatctgttgggagcttcattggtgacatcctctgctttgagctctgcttttgggaatttgattgtgaagaaaccgaaggaagagaatgtttcatggaacccggtttcaaagaaaccaaaggttgagacttgaagaaacacaaagtggagagaatcctgagctactattgattggtcaacccaaaatttcaattgcttgctagaattgttaattttttttatcatatgttcttgacttgagttgcctacttggtttatttgaaacttaaaacacatttcaagcaaaatcataaacttttgtccccatctagttttcttcttgtcctctttctcagtcaacgtgaaagggaagctctaagggttgtctttgtctgtgtctattgggttttgatgacccatcaatattgttcattcatggggaagctcaaaaggtagttttgttgtttgtttagagttaagtaaaaagtttgtaaatttaagtgcaggctacagtcctggggaagctcaaagggtagggtttttgtttatgactcgttattattgttcattcaatgtcagactttagaccctcttaaaatgagagttgatgcttcagtttcttaacgtgtcgcttctgtttctgagtgttttagaaaagttttctcatctatcttgctttcgtctttctttcatctattacgctaatggctaaaagtagtgaggagcctaagttttctttgagacttattgttgatgaagagaaaaacaaggttgttttggctgaagcttgtagggattttgttgatgtactcttcagccttctgacacttccaatgggaaccattgtcagattgcttgagaatcatcgaaaatctgagccagtaactctgggctgttttaacaatctctatagaagtgttgtggacatgggcagtgattgttttgagactgaagcttgtaagcagatgcttgtgtatccgaagagtgtgaaagacctccagtgcaaaaggcttaagctcaacataaaccctactgaggacatcaagtgttttaagtgctcaagttactgcggcttgtacagtaatttcagcacctctaaatgtcgttgcggaaaatttatgaacgaggagattcagttagaaaacgaggaacaagatttaggccggtttcaagatgatgataatggagtatttgtcagcggtaggtgttcattcgtcttaaccgatgacttggaagtgtcagtcaagtccactgaacttgtcttgaataagctcaaatccttaggttgtgctgatgttggtaagctcggtgaaaggcttcttgatattggtgtgaaagaggtatgttagttagtttattcttcaagcgtttgtgttatcattactttattagttctctcttactatatctgaatcttggactaggtactgactctgctgggatgtatattctcctcaaatgctcccttaaaggacattttcttgaacaagaagattacacaaggtgcgacgaagttttacaaatcgcaaagtccatgtttggagaaaaaagaagatgaagcagaacctgaaaaggtagtaactttgaaagcatttgtgaggaagcaggacatgaagattttatttgttgaatgcggagaggaatttgttgagcttcttttctcttttattgctgtcccgcttgaatctgcatgggaaatctctggcagcagtatctccttaggttgcataggaaacatgtgtagaaccttcagggacttaaatgaggagactcaaatgtcaacttccacatgcgcacttccgtctttctataatttccagatgcaactgcctggtattatcactcaacaacctccggtgtactaccgttacaggctctacgattacaggcaaatgaactatggtttgactacaaacggtaatcgaactacttattaccgcaaagacagaatcgttcgggtggatttgaaggatcccaaatcccgtggcagcgataagtctgctcaggggttcttgaagaaagcgacaaagtgtactgtattagatgatctgaccattacatctatgaactcctgctccacagtttgtttactaaagaagttgcagagtcacgcagacgatctagaggtgcaagtaattagtatcagcaatgcagaggtatgtttctgtataccctttttgatcctgtattcttgaaaggaacttgactgacacttgattttgaattaggctttggatttgttgagagcttccttggtgacatcctctgctttgagcacgacattatggaatttgattgctaagaaactgaaggaggagactgatttatgggacacggtttcaaagaaagtgaaggaagagacttgaagaaatagaaagctagtgagaatgaactctaagtcgattgttgattatgtttttagaattccgcaaaatctacattacattcctcatgttttcttccaagccttatctttctttgtaagactaatcaaattattgttttatggaaattcatcttaatagggttttttaaatgcaggcaaaaacttgcacatctttttgagtttataaagcaacaagcctaaaatctggaatttcctagtacgataagactgaaatatacaaccattaccaaaaaaaatgcatccatatacaaaagtttataataagatccagttggtatatagtaattgggaatgttgaagacatatgaagtgttgatcagaaaaaaataagacttgaagttaattaatggaaaccctctttctcagccagaagacttgaaggcttctattctcctccgttgcccacaaaaacaaaatttgcttcgccgttttcggctccggcgtgattcttgagaagaactgaagtagagagagagatctgaaatctcaatctccgatttaacttggtaactagagaagcttttgattcctattctttcttttgatttgtatttcttagggttccgttcatgtaacttttacagcgacaatg

SEQ ID NO: 26642 - DNA, 3003 bp, Unknown; identical to SEQ ID NO: 26641
  misc_feature (1)..( 3003): 2750-1469P.txt file - cDNA_ID_2715181; gDNA_ID_2213636; Annot_ID_181052

SEQ ID NO: 26643 - DNA, 3000 bp, Unknown
  misc_feature (1)..( 3000): 2750-1469P.txt file - cDNA_ID_2715213; gDNA_ID_2213636; Annot_ID_132157
ttggcagcatcttattttatcttattagaaatcaagtttacagtgagttggctcaggaaacaattctagattttcgatattttaatggtaaaaatattgaaccatggtttatttaaaagtatatccatatatcgtcacatgcagcctaataattaaataagcccaataatgtgagtggaggaaggaaggaaatcaatgtttcatgatcactggtaagagttttagtatcgtccaaacataattaaataagcacaatctattgttatgaattttaacgagattttaaattttaactttatgagagatcatttttgtttgggttacaaactttatgagagttcatataaaggatgtttacgagagatgcatgtagtgtaaatgaaatactgtagtttctcactcttggtaatggttacgtgtgaaatgtggcaaaacaaaccggcgaatataattaaatgcttggtttgggcaaatgaaaatatataaggataaaaaacgagagactcaatcaatactcaaagataaatagaaataaatttgggggtgcatttatttcaaagactgacaaaagtactcgctgacactttgtgcgttcaatttaatgtttttaaaccatggaccattaatgctctgtcccgactcttgttacattatgtcttccacaaataatctaatccataaaatctataccgaccacacaaaaacaacaacataaacttttagttctcccaaaagattcttaatttaacacttcgattgatttcagttcaattctaccagattttttttaattgaaatagtatagtttgaacttttaagatgttctgtaggattaatttttgaatttaagtttgactttgaagctacgggcttcagttcgaattgttcaggaatgatgctacgggcttacaattttgatagatacgataaaagcccatactgcggccaattcgggtccatcaagtataactatatattaatgagtatctatcgaaattgtaagtccataatgctgccaatttgacaaccgaacgttgggcgccgaaagaaaatatgaacgtgtttagaaacaattaagattttcttaccgttatgaatatgaatttgaattttgtttctaaattaaaaaatgtggatcatgaccccttacatcttcgttcaaagttcaaaattctttccattcattttttccttttctttcacatgtctaaaactctgctttttgtttcttaatatgttattccacttgaatatccaactcaaaactctttttagttctctcactttctcagagacaaacataaaggcatcatcatcgtagaaggtaagactctggttccatcattttttttttctgtttagctatggtgtttggcttaattaatagtatagtttttggaaccatgaccatgttttagtcttttagatactgctcttatataagtgtgttaaaaaaaagtgttcataagatgagggcttgaaatgttgttgtcttcataaatgttgtatgcgatgtgttaagatggagtagaaaagtaaacaaattggtttgatatataatgtcctctatttatgcctaagaaaacatttatgttatgatagtagaacaattgttagttttaattggaaaaaatttatcaaactgatatctgaaatgttttgttttttgtttgtgttgtagaggctggagaaaaaaggaggaaaatggattgtcacggaaattgaaattcgttccatttggaagatggcggtggaacgagagaacgttgattcgtttatgtatagtaagtacgtgtcttagtctagaatttccatctcttgctaaactggtgcaagagactagattactacgtatatagatagagggtatgaatgatgcgtagatgtatgtatagggttatcatgtgtgtataaggttattatgtgtgtatagatgtatgtataaggtatggaagagatcatgaatgacgtgtagatgtatgtatagggttatattgtgtgtgtattagatgtatgtgtaggttacaaaacgtagcgacaaattggaaaatagatatagccccctaatgcaaacagcaaaacaaaaacaagtaacaagatacctacacatataaacgaataactcaaacgtaaaaacccgtgaactctcccaagcacgaaaatcgaagacatcctcatgaatctattttccgacgccggtggagcttttgctcgccggcgtcgggatgtacttaagctcctccaattctcttgtctcagttccgcatctcgcaaactctttgtccccttttgtcactctcccgaccaccacagcgcttcctttttgctttcggttttggtggtcagagatccacttttcaggctgcccagaacctcttctcccatttggtcctctaatctgctggatactcttgatgaaacctatcccgttgtgctattggcgagatgcttgaagctaaatctgcgaaaatggttgatctcgagcttaacctgtcacctgcgcctagatccatgaagcctagctgctccgctaccctcatcgaccaacgttctcattgggttttagaatcgttggtcccagtgacgaagttgtcgacgaatggatcaaccctaatccatcaaaccaattggtaccgttgtctctcgcctttatctcctccagtgccacatccctcggcgataactctttcaactccgatcttctgctcgccgtcgtctagccgccacactcaaagtctcatcgcccacgccaaaagaaaactagggttttcgattttgggcctattccagttcggcccatcaagttccttgtcttggcaaattcatttatttgggcctttaaggtgtttgaagcccaactccaataggtgtgatcctaatcaatttctgcaaaaatccaggtttgatcaaaaatcttatttgtccattattagccaacgttggtgtcgatatttgaaaccagtttttcatggacaacaattggaacatattcggtcaatg

SEQ ID NO: 26644 - DNA, 3000 bp, Unknown
  misc_feature (1)..( 3000): 2750-1469P.txt file - cDNA_ID_2715222; gDNA_ID_2213636; Annot_ID_132154
agtccaaaatgcaactaaaaatttgccactattgttacatggtttggaggaatatgtctgccgctcataagatccaataacaaggttccaaagctaaatgtgacgctctccgctatcacagtaccaaggcgcaaatactcgggaggagcaaaagctaagttggtgctataaatcttcccttcatggctattcttcatgagaccaaagcaagaaagcttaggaatccctgtctatcattcaacaacttgaagattaataaagatttgctaaaaattaagagaaacacacaaatcaaaacagagtttagctttcattaccttatcaaacataatcctgtaaggattaagatcatggtataaatcaattcctttatcattacaatactccaaagctcttgcagtatgcagagcaactttcaacctcatttcccatttcatgggtcttttctcccctgaaacacacattaaactcttaatcatcaaaccaaaagatatcatcaatcatcaataagagaaaaaaggacaaagagatattttacagtgaaaaagatgttttgctaatgttccattaggcatatactcagcaacaagtaatctctcgttgtcatcacaacaacaaccgatcaaattcgccatatgttcactcctcaatctcccaacagcttgtgcttcattctgaaaaaaggtccaccattgatagatatcaaaaacttgttagcaaaaccaaaaacattataaagatcaaaaaagactaacgatgaattcgaaaggatcaggccaagaaagtctttgaaaccgtttgacggcgatgcgacgaccatcgccgagttttcctttgtagacgatgtttggtaccgaatcgttgtgctccgatacgatgtttccggcggagaaaccgtcggtggcgattctcagctgttctaaactgaactcacggaaaatcaacggataatgtcctccgtcgtcgtcggcatcgtactctctgacgttttcgagatcatctatgaccgttgacgtaatcgacggtgaagaagatgatcggcgccaagacttgaagcaaatgcatcccattatcgccggcgatataatgctcagtcccccgcgccttcaaaatttcctttttttttttttttatgaaacaaaattcaaattatcaaatatttattagcatcttttataatggtatgtaaatttaataaaataatttaatgctatactatattttaacaatggcaaaagatgtcaaaccggagaaattttagttacttgtgtcgtttggtcatgaatcatgctttcgtaaaagctttaaccaaatgctatagtttctactttctagtattattattgatttagtgtggttaattagttaatgggacgctcgtttcgggaatatatatgattttttctttcttaaaaaaagagagtaaatgggctataagcctagaagtacgtttttggacctaaatgggctaaacagctggaatataaaataattttattcttgtttaatattttcctatttataattgaaagagtattataatttttgaaaattccgtattaaattacaaaaagtatgtttttcacaaaacaaaaaataaagtcatacaatgcataaaatggaggtagtagtactaatactagttttaacatgtgacataataaagaaaaatatatattgacattgtaatacgagatctcgactttacgactttgccaagcaacataaatagaatctaaaataggagactaaaagaggaacatcagatattttataatccaataggaaagtttgctagaatacgtggttggggttgtattcaatttcaaccttgtttattatatggtgaacctgacgaaactcgatcgtgattatatgttctttacatgctcttatgtatgtatacacggtctggttggaggttagtggcgatttacttggggcttcagcaaattcgacattattacctttatactcactagattagcattatattcaaaacaacaataggagaccgagacaccaaaatgattctagtcatctagtctgtaccattgacaccaagacagtccgtacgtaatcgggttatttttactataccgaaacttgcagctctcctccaacgatatggttcaaggttcttgcttgaaattatggttgcatttgtaaataacttttctttacgatccaatttgtaaagatgagaaccttatgttcaagtaaacaagagatgttaactagagttaaatgtaattcatctcttgttaagttaaacatcttttggaagcacaagaaactggccaaagaaagacaatttgtctcgatgtgaattcaaattaaaactggagcgttttggagaagccctagagctatgttgtgagcgcagctaagaggggagtaaaaaagagagagatacaatgtagaaagtaagctagagaaagaaatagccactaaaaagtgtaaacttttatgtttctcttgagagtgtaacagaggggatacggagaagagatctcaagtgtgagactctttctctgagggattatgtcttgtaacttacttattctaatggatccccagctgtgacttggcccagacatagtatctattgatgtgaactggggtaacaaatgttatgtgttctctcttcccttctcacatttctctcttatcttaaagtctctgttcttttctctgttttattaaaaagagttggtgttaatcacaaagcataaaacttgaggtgttgtagaggttaacgacatctcaacacaattcatttaatatttcaattgacagaaaaaagatattttttttgtcaacgtgtgcaaacgcgtttgagattgccatatctggctgattaataatttaatatttttattataatataaaagttttgcaaacttcatcaaaactttgccacatctctacaaatacgcgtacgagtctctgacgaaatcaacaagtagaggaaattatcatatcctgacatcaacaatg

SEQ ID NO: 26645 - DNA, 3000 bp, Unknown; identical to SEQ ID NO: 26644
  misc_feature (1)..( 3000): 2750-1469P.txt file - cDNA_ID_2715222; gDNA_ID_2213636; Annot_ID_181041

SEQ ID NO: 26646 - DNA, 3000 bp, Unknown
  misc_feature (1)..( 3000): 2750-1469P.txt file - cDNA_ID_2715226; gDNA_ID_2213636; Annot_ID_132153
tgctacgtcatcatcatcgccaacaaagccgtggatgcctccggcgaatgacatacccaccgctcataggttctcctcgaacatcactagcctcgtgggtggacctcactggacgccggtgcctcgtcacgtggacgagaagatgttcataacgatggggcttggcttagacccatgtccttcgaacgccaagtgtgttggaccgttagatcaaaggttagctggatctctaaacaaccgcacttttatgattccggagagaatctctatgcaagaggcttatttttacaacattactggagtctacactgacgattttcccgaccaaccaccgcttaaatttgatttcacaaaatttgaacagcatcccaccaattctgacatggagatgatgtttccggaaagaaagactagcgtcaagacaattagatttaattctacagtggagatcgttttgcagaacacgggaatactaaccccggagagccaccccatgcaccttcacggtttcaacttctatgtgttaggttatggatttggtaactatgatcctattcgtgatgcaagaaagcttaatctatttaacccgcaaatgcacaataccgttggtgtaccaccaggtggatgggttgtcctcagatttatcgctaataatcctggttagtaacatttctatatgtttagtatttacaccaattagatattaatcgatggattaataagaatatgaaattgtttttttgcaggtatatggctgttccattgtcacatggatgcacatttaccattaggaattatgatggctttcatagttcaaaatgggccaacccgggaaacgagtttgccatctccaccgtcgaatcttccgcaatgcactcgggatcctacgatctatgactctcggacgactaatgttgatatgtcttactaaaagtagcaaagttcgtttaagaaaataaattacatttactgttgactatcaatcgtagtcattgtatccacatttttcgaaatcattgtttcttaaaattcagtatatttcttgtgtttatttacgaccatgcttccatttctctacacgttcccaatccaagactccgagtctccgacattcaaaacattactctgaacgctctcttcacctctatccatacggagataacctgccaacttggacatatatttcactggctatgatacgaaaattaataagattattatttatatatttaacaatggcaaaaaaaaaaatgtcaaacggatataatatctgttggttacttgtgtcgttaggtcatgaatcatacttgctataattttattgttaatttaacactattttcgaaatatatcgtagtaataattgttcacaaaaaataataataataataattgttcacaaaaaaaaaatcgtaggtaatagttaacccctttttttgtttgttcgcgattcaatgtatggaagtttttttcattatattctatagtggttaatgcattaatggaacgatcggttcagagatttatgtataaggttttttttttcataacaataaaaaaaaaggataaatgggctacaaatacgctttagacctaatgggttaaactttatcatctagcccaataatcttcaatcgaagcaactgtggcgaaaaatgtcgttatagaaaagaaaagtaattattttcttatcattagctaatccattgttttcgcctggcaagtcatacaatataattgactgattcttttgattaataaagctaatgagtaatgacaagtccatcaatatttacatgaaaaaatcaagtttttattctttacatttatttataaattaatatgtaaggggtgggtaaagatgtgttggagtcagtaatcaaatgcaactggcattaagtatattagttttcctgatttatattgatctcttaagtcctgagtcttactaagcacgcacaacggtacacatgacaatttcgccttttaaattaaatcgatctcgtgattcacatggcagagttacttagctgtataatgtttatgtgtgccgctgactcgagaagatttttttttaaaaaaatatagaatatggtaatgttaattactaaatgtaagcttcaaatgttttcatgtaagaacgggaatataaggttgaattagttcgaaaacaaagaaatttggattaaatttgtagttatatatttgttcgtgatcagaaaaacaataaattagattttagaagcaatcattaggggtggacatttgattatttggttccgttcgggcataaatgattacacttttgttatataaaaagggatgatcctttatcaaaaaagggatgatcaaagtactttttcatatataacctcttttcagatggagtatattttttacaacactgaaagtgcaatcaaatttgtatataaactaaaaacatagttgttacaatataattataaatctaacagcttcttttgcaacgaattaccttatttttggggtgtttcataaaaaaggtgtttaactttatattatatcatctatttaaacacttatgatgagtttaattgttcaattcataagttttgtccaattaactagttttcttttttgataacctccaatttataagttgaaagagagaattacaaattttgttgaaaattctgcattaaaaatacaaaagcaaattttataaaacaaaactaaataaatttgaggtagtattaatactagttttaacatgtgacataaccctaaagaaaattacagtatataatgactaatccctgagggaagtttgctattttttttttttggttggtcaacgacgtgttcaatcgtgtctagattgccatttctggcaaattaataattgaataataatatagtattttagttttgccatctctctctattagttcgttctataaatacgcgtacgagtctctcacaaaatcacaagtggggcaaattatccttacattaacaatg

SEQ ID NO: 26647 - DNA, 3000 bp, Unknown; identical to SEQ ID NO: 26646
  misc_feature (1)..( 3000): 2750-1469P.txt file - cDNA_ID_2715226; gDNA_ID_2213636; Annot_ID_181040

SEQ ID NO: 26648 - DNA, 2309 bp, Unknown
  misc_feature (1)..( 2309): 2750-1469P.txt file - cDNA_ID_2715230; gDNA_ID_2213636; Annot_ID_132152
gaattcgattacccgttttgaaaaccctaattgcaatggggaagacaacgaagctctcctcaccgcaccactgagactggggagtgctcttctctctgtctttacagttttacaggcaggaaattcacagtccactccatgttgccggaaccaattgggccattttataatatgggcctttttagtggatactaggcccattatatccataaagtttataacccaatggaacgcagcttgaagaataaataccatcatgtggggatcatggcgacaagaagaaagagtagccgaaagagagatgaaagggtttgtttagggtccctacgggatcttggtgagatgatatagaaaaggaacggtaggtaggtacttcttgctatgttgtttggtaagctcgtctacttgatctctctttcgacagcaactcaaacacgcatcataaagaatatatagcatcaaggaaatggccaaggttcatcccaagtcactagaaacgggcggggacgcgtctgtgttaccagtttggaagaagttatttatagcgatggtgagattgaagatcgagagagaaaagtttgttagacaatttctcatcttatttgataaaacaatctgtacacagtatagtatatatacaattggtataatgttaaccggtctgttgaaataaataatattctgcataaccaattaaactggtgaatactcaaataaagtttacgtgtgatatcataatagtaagagaaaagaaaacaaaagtagagtccttttgctttattgagattattgacaatatctaattggatcacagctcaaagtgctcttttttttttttttgctaaaaggttaatatcatataaatgaaagatagttttggatttacattttgattaccataagaaatagacccttgccaaaaaaaggtaaaaaacaaggaaatataaagatggaaaagcagaggagtgaagcttcaaacaagccaaagtcccatgagatttctgaactttttccggtgccgcctcgccgtgatgctgtttagtcaaacaaattacaagctcctcgtgcagaaaaaaaaaacatgatttgtttatccatcaacaattagacatgtaaaattgtggtggcatacatgtgcaaatagcaacagaaagttatatatatacttcataatcaagtaaagattagcatctatgatctaacacagattatttttttctcgtcgtcgacatagaaaaaaacttaaatacagattaatattgtgtttatttttgtcatcacatattaccgaaaaaattattgaagtttctaaagccgtaacggacaaaataacaaaagtagaaaaagtgaggaaaagataagaaacttattactgctgatgtcagcactaatttgtgtatggggattcgtaacgaagagagaaacaaaacggaagtctcctaataggccccacctctttcaacaaataaatatcaaccacacgattaatcttacgtcctcaacaactattaacgtagaccgtacgattctcacacgaaggcctctctttctctttctttcttcctctaataagcggcgaaagagattctctgcaacttgttcgattccttactaaggctttctcgatttacgttaatctgagaagagattgggtttagtgaatcttgatttccgtggttgtgtttttcgattttgcttctactccacgttcttgttgttgttcccttttagctccagattatgcttttctttttgttttcttctcttcgacgatatctgccaccaactcgagtctcagtttaatgaaatgtttgtggatttttggtaaatagtactaatgggtatgtttcttttctcctctatattcgttttcttttccgagaacacaagtagtgtctagtgaggcttgctttgatttggtgaataagaaaggttaggattagagcagcttaaatttagggtttttcgagcttgaatgctgtttcctctattactttatcggttgtgaaactgtacgacatttgtttcgaaatctttgctaataaaggtttcatttttcattttttttgtcaagagttggaattgaattagtcttttctacattgtggtcaataatatccgagtctctcgtgatttagtttatgcataaatctgagagtgtgtacgtaatcatagtgaaagtttctttatttattgctatatttgtttaatggagataagtttcattgcttcttctttgtagatcaataatggctacaagaattgagtttagagatattctgtagcagggctaaagaacatcagagatg

SEQ ID NO: 26649 - DNA, 2309 bp, Unknown; identical to SEQ ID NO: 26648
  misc_feature (1)..( 2309): 2750-1469P.txt file - cDNA_ID_2715230; gDNA_ID_2213636; Annot_ID_181039

SEQ ID NO: 26650 - DNA, 3000 bp, Unknown; identical to SEQ ID NO: 10214
  misc_feature (1)..( 3000): 2750-1469P.txt file - cDNA_ID_2715238; gDNA_ID_2213637; Annot_ID_132184

SEQ ID NO: 26651 - DNA, 3000 bp, Unknown; identical to SEQ ID NO: 10214
  misc_feature (1)..( 3000): 2750-1469P.txt file - cDNA_ID_2715238; gDNA_ID_2213637; Annot_ID_181083

SEQ ID NO: 26652 - DNA, 2528 bp, Unknown; identical to SEQ ID NO: 10252
  misc_feature (1)..( 2528): 2750-1469P.txt file - cDNA_ID_2715249; gDNA_ID_2213639; Annot_ID_132236

SEQ ID NO: 26653 - DNA, 3000 bp, Unknown
  misc_feature (1)..( 3000): 2750-1469P.txt file - cDNA_ID_2715253; gDNA_ID_2213639; Annot_ID_132233
catagatgtgttaattttaaaattttgccataattaggtttaggtgttctgatcgttggttaaaatttggtgtttaaaaagagttttgttttgttggacacattaattagcctatagtttataggatgacactcaccataacaaaaacaccttcaaactctaataatcaccaaactcgaaatgattgatgattttggttgtttactggtgaaagaactcaagaggtttgtttggttcagctaaatccaaaccgggatagaaataaaaccaaaaccttaaaccggcttggaatttctctatccatgcatttgcatgatcataacatatacaatattaaaataaataaataaacatttggggtcaagaacgtacaaaattagatagaatatgggactcaataatatattcataaattttcaagattaaacaaattccatccacaataatgtcccaagtaagtccataagatggtggctgaataccaactaagcaaattcccaaaacctcttattcaattatacaaaaacatgcatctaagcacgtagatggtgtaatctcttgattatttaattaacaatactgaccaaacacaacctcaactgcttcaacattattccaatctgtcatctctgtttgtcttcacatgtttttaataacttcttctcttccttcttcattcctttaatccatttttctcgatcttggctaatccatcatgactgtcaaggtaaacatcctagtactagttccttttcaaatccgacaccgaatgtttgagtttttgttgtggttgtgagcagaaagttgagatcaaggtggatataaactgtggaaaatgcaacagcgcaatcatggaagcagtcacagagatagaaggtaatgaacgaaaaaagactcaagaaatatgtgctcttaagtcttaacatatcatcttgaacatgagatttggtgcaggtgtgaatcatatttcattagatgaaggaaatagtatacttaccgtggtggggacaatggatccggtctgcgtagcaacaaggctgaaaaagattaaacagaaacctgtgatcattagcgttggaccaccaccaaaacctcctgagccaccaaagcctccagagcctgaaaaaccaaagcctccaccagcacctgaaccaccaaagcatgtatgcaagccaccttactgcaacagttgtgatgttgtgtctgttactacctatgaaagtggaagcggctgcaccattctttgagtcatatatcgcgtaccatagccttcatgttaagtcctgtatttagccaatactaattcatcatgttctcatgcttttttgtttatttctttttctcaaatatgaatctctgttgtttgtccctcccctgtttataattagtcgcttctttgacacaagaagtctcatgagttcatgctaaagaaaataaaagttcaaattaaaacaccaaatgtttgattaatttccataaacctgtgaagcagaaagttagtcatgttgacctgaacagagcttaggaagtccttgaaggacatatcttcaagtgctattgggtcgtagcactcttaggcccattaacttcattgagcccattaaattatgcaaaacaagaaatgagacatatggaaacattagggttcttacaggaaaaaataggaaaaagcagggacaactaaacaaaaattcagaaacaagaggcaagtggacgaccacggcgtaagatcaacatgtggtgatgtgcatgagaccaagaccattttttctcgttcttcaacgcacacttggtcttttcttatgtttgttgcatttctttattaggcagaccctctctcttttttaataggatagtaaaaaatatatgattttattttgttgaaacattttgagttaaaacctaaacttatagtaagcatttgtagagtgaatttcctatacgacatctatcaacatgacctctaaccaaaaaaatattgatgaaactactttaagtagtaaaacctaaagcaattaaaatttcctttaaattagtagtttgtgtaaattaattgacatgattgcgtcgaaagaaatcaaaacagttatatcgtgaacttaggagaatgttttatatcgtgtttcaacacatgattgctagcatatgtgtaggtgtcgtagacgttacataacaatcatcactcgtaaatatcaaagtggtttctgagagaaacaaagggttatgattttcccaactgcactagttgtgtattgtttctttcacacgtatgcttctgagttctgcccaaagtggaaattaaagcagagttgggagagatcataatttattagggttcgttatgctcaagtcatgacgtaaaatgaaaatttgtttttattctttcaccaacacaaagaatagctagttatctctttttttatatataacaattcatgaagttgatcagctttatacacatcatccaatcgaattgctaatctagagatggaaatatcaggatagagccaataagatatcaaatccaatggacccattttctccatgtgctaattcatacaatctgtttttgtctgctttatttgatgatgatgctgagcgtttttaagtgtgaactaagatctagctaaccaaacaaaagatggtctcttctgtctttgtcgtataagagcaagagagtggtttgattcaatttttaaaattctaaataaaactccaaccgtgaatccagccatgaaactctttttagaaaatccttttttataacaaataattcctctgcttcttcttcttcttcgtttatttcaccttttttggtttctttagctcagaaaaagcccattctttttttctattcttgtttattttaatcatactgtgcgtttctacaaagtttgttcctttcttcttcaactctctcactcacagtcacagagatctgtttcttttctttttttgctttcactcttctcttccagtgagagagagtgagagaaaatg

SEQ ID NO: 26654 - DNA, 3000 bp, Unknown; identical to SEQ ID NO: 10250
  misc_feature (1)..( 3000): 2750-1469P.txt file - cDNA_ID_2715260; gDNA_ID_2213639; Annot_ID_132227

SEQ ID NO: 26655 - DNA, 3000 bp, Unknown; identical to SEQ ID NO: 10250
  misc_feature (1)..( 3000): 2750-1469P.txt file - cDNA_ID_2715260; gDNA_ID_2213639; Annot_ID_181155

SEQ ID NO: 26656 - DNA, 3003 bp, Unknown
  misc_feature (1)..( 3003): 2750-1469P.txt file - cDNA_ID_2715264; gDNA_ID_2213639; Annot_ID_132226
tcagcttgatgatctacagagaggtctgagcttgagagagtgctcagaaaagcagcttagagaagaagttaggagaatcgagcgtgaggttactgaggccattgcaaaagcgggaataggtggcatggacagcgagctccagaaacttctagaagatgtgtctccaatgaaatttgagaggatgaataggctagttgaagtaaaagacgaagagattacaaaactgaaagatgagataaggttaatgtcaggtcaatggaaacataagactaaggaactcgaatctcaggtacatccatctttttccatttgaacaaaggccattgcacgtttgtgtttgatttgtctaaattctgagtgaaagtttcattctttatgaaacaacaataacagctggagaaacagagaagaactgatcaagatttgaagaagaaggtattgaagctagagttctgtttacaagaagctcgaagccagacaagaaagctgcagagggtaagtatacaagtccataactctaacattcgtgtagcttcttgtttgtgaatcaatagtgttcttatcagttttattgttgttgctgttttgttatgaatggagcacagaaaggggaaagaagggacatggagatcaaagagataagagatcttatatcggagaagcaaaaccttaacaatgagtcttgggataaacagaagttctgggacaattcagggttcaagattgttgtatcaatgtctatgttgatgttagtggtagtctccaagagatgatgaattttgtaatgtataaatttagttgcagatagttgatgaggataatctaactcatgtatgtgtcgtcttcaggtctaatataacagccatgtacttaacataccattagtatatgagttactctgttgacataacagccatgtactttaaatactctgtgacgttatatgtttcgtattcaattctagtataattacataaacggcggacgtatatcaaacagctcccgtagctcagttggttagagcgttggtcttatgagccgaaggtcgcgggttcgagccccgccggaagcatttttgttttgttttccacaaggcccattttgaagctcaatttcaatttaacaaagcctaactctaacatgtaaacgttttcttctcggtagatatgtttcgcattcttataaatggtcggcgaaaattttcaaaatgtttactttttttctttccttgcatctcgacacgtggccccggttcatcctgtaatctttttggaatattccgatatcatatatgtgtatgcatgtatgtatgtatatttgatttctctaattacaaaactacccctactttgtcgtgtttcttactgtccccacttcacagctttgtccaaatattcaaaatgacccatccttctttaattattaatattcggttctttctttcgattaatttaagaactaattataaactatatatatatatataaatatttggctggaaatgtgattatatttatggctgttggttgttgaactagatactcataattttatagcagacaattgtatgacatttaggaagtaattattggacctatgtaagaagttgttcatttaacaaaagcacagattagaaaaaaactgccaaaatgtgatgtaatcaataaaaaataaagttcaatttagtccatttagctaagcaactttgacattgcgagtattgacttctttatttaaaaagttaggaagaaaatggttctgcgaatgtagctactaaaaagaatcaataattcccactaaaataaatgaaaaattctttagattagagtggcataattgctaaattatttatggttaatacataatatgtcagtccaacctataacaacttagtagataaaaaaaaagcagagaagaaaaacgtttaagtaggtataaaaatacgaataaagtgggagggggggggggcaaaagaagtttgaatggtcaaaactcgaaaaagaggaaaaaccaaacccaatgtactttcaaactccaatttactaactcccaagccaacactatctaatctatccccttttttattttattttatttttagatttaattttacgatatgactgtcaacagcgcattatagcaaacgccactcttctcatcaaaaagcagagccacatacattaacattacattagcttcctcatttttattcttattattattattcatcagaccaacaacaaaaaggagataaagagaagaggattcatcatcatcaatcaatccttcattttatggatctactcatatcttgattcttccttctatctctcccttttcttccatctctttttctctgggtttccccggtatgtttcagcaatctcttttttgggtcttcttttaaattctgggtccttcaaagttttgcatacaaaaaaattgtttctttttggtattttagtctcaaatccgatttcatgttagatttttcctctgtttagatcggcctagatttgtttattggccaatatgagatagatagatttctcaatgctctgtgtttttaacatctcttatcttttgttgtttgtgttgaaatttgctatcctctatggattgttccatgatttttttcttatttaggatgctataattttaaattttttggctgtctcctgctttttttttcgtgataattgttttaaatgtctcgttaaaatccaaacttttgcatgttgatagcttcaatatgagttctgggatcacctttattgagtttcaaatctgtgtaattgcctcagttaaactgattgtcttgtaacaaccaagtaattgtaattacatatgtatggtttatgaatcaagagctaacgcttactttgcttatggttaatgttgctgcaggattgagttttttaatctctgattgacagatttgaagagcgtgacaaaggaagaatcttttattaaaacaaattcttctgttttaatcttgggatg

SEQ ID NO: 26657 - DNA, 3003 bp, Unknown; identical to SEQ ID NO: 26656
  misc_feature (1)..( 3003): 2750-1469P.txt file - cDNA_ID_2715264; gDNA_ID_2213639; Annot_ID_181154

SEQ ID NO: 26658 - DNA, 3000 bp, Unknown; identical to SEQ ID NO: 10245
  misc_feature (1)..( 3000): 2750-1469P.txt file - cDNA_ID_2715276; gDNA_ID_2213639; Annot_ID_132223

SEQ ID NO: 26659 - DNA, 3003 bp, Unknown
  misc_feature (1)..( 3003): 2750-1469P.txt file - cDNA_ID_2715292; gDNA_ID_2213639; Annot_ID_132218
ctttttatcgactttgggttcttgttcaatagactcaaactcttgtcttctttgtttgtatcagaaggatcaaagcaagagaaacaaaatgctcaaaacccctcaaagtcatggccctctctggtaaggcttctcaatgatttcagtgagtgacaggatccaattgtgttttatctgatcttttgtttaacagattgagggagatgagattggaaagaattcaacttacaatcccagaagtgactcgagttgttcaacatccactcccactagtgatgatggacaaggttccaaagctccaagtgttgttgcgaggctcatgggtttagagtctatacctgtaccaaatgccttggagccccggcgtaatcctgattttgatccatacttcctcagatcctcacgcaaggcaagcacatgggatgcatatgagaatttgggttatgtaaatctccgcagtgactatgatggtatttcttgggaccatttggattcaagaatgaacaaggagtgtaaccggcctatcgaccgctttcaaaccgaaacgttacctccaaggtcggctaaaccaatccctgtcacccacaataggctcttgtctcctatccggagtcctgggtttgttcagtccaggaaccctgcttctgtaatggaagaagcttcgagaatgattgaaccaagtcctcgggtagttgctaaaacacggttttcatcatctgattcctcttcatcacttccaatgaaaatcagagatttgaaagagaaactagaagcttcacagaaaggacaaagccctcaaatctcaaatggcacttgcaataataagtgcttcagaggaaagcaagatgaaaagagaactacattaccactcaagacacaagagcgaaataatttattgggagaaagcaggtttggtggttcgaagggtaaagtgaagccgccctctgtatctgcacatgcaaaggccaatactattcacaagcgagacagttcaatgctctcaaatggctacagagaccaaaagaagaaggtggaaactaagaaccgcatagtaaaaagtggtcttaaagaatcttctgctagcactaggaaaaccgttgataagccaaataaccagaaacagaaccaatttgctgaaacgtctgtttcaaatcagagaggcagaaaagtgatgaagaaagtaaacaaagttttggtggaaaacggaactacaactaagaagcctggttttacagcaacatcagcgaaaaagagcacttcttcatctttgtcccgcaaaaagaatctttcccgcagcaaaaaaccggcaaatggggtgcaagaagctggagttaacagtgataaacggatcaaaaagggtgagaaggtgataaaatgtaacatcaccgtcgatggcgggttgaagacaggggacgatgatcgaaagaaggacatggatgtgatttcgttcactttctcatccccgatcaaaggtttatcatcagattcgcaatactttttaaaaaagaatgatcaagatgcagagtcagcactttgtttcaataagatagatagtgattctctaaattttctgttggagaaaaagctcagagaactaacctctaagatggagtcatcttgcagtagtctgacccaagaagaagagtcttcgggttccattacaaaggattgggtgaatgggacaagatcattgccgtcagatgatcaggataacggtttatcagaaagcgaatctgattctgactatagtagttcattctacaaaaagaaaatattccaggttagttagtcatatggcaaattcctttctccgcacaaggatatgtctacttttagtagcttatcaatgttctataattcgctatatatgtttccgtaaggttttctgactccactgacctttgaaaatttcatattttctatgacgcaggcagaagatgatgaggaagttaacagtttcagcactgccgaaaatctccaaatctcctgcagcacgagtttctcaagttcacgcaatgattatcaccataacattgaagaaaccgaactctcagaatctgttgctttatcagaagctgaagaaggtcatgactgggagctcgagtacataacggagatcattgcctctggccaactgatgattaaagaattctccttggggatggctactgatatattacctctgagcttattcgatgaaaccgaaggcaagagagatgctcggggaaagatcgagagaaaaacactgtttgacttggtgaatcagtggttaacactcaaatgcgagcagatgttcatgggaacctgcaaaggagtgttggggaaacaagacatttttcttgaaaggagagagattttggcagaccaagtgttgaaagaggctcagggattgaagaagatgagagagatgatgatggatgagctagttgacaatgacatgagtagttgtgaagggaaatggcttgattacatgagagagacttacgaagaaggaattgagattgaagaagagattgtgtccgaattagttgatgacttaattaatgatcttatcatgtgttgttgacaccaatcctttggtcttcttctctccaacatgagagtgaaattgttttctataggataaaaacaagattaggctgaactaaattctgtcacaggctgaactaaatttttatctctgaaatcgaaaatacttaaaagtcttctgatagcacatgaacataaaagtgtcttatactaaaaataaaaaaagatggggtgttccgagaatcgaactcgggacctcgcgcacccgaagcgcgaatcataccactagaccaaacacccgatttgttaaatcgatagaggtaaacatatttatacggataacatatcaccaccgtctttatagggagagactctagttgtttgttcatcggagacggaagaaaattcgaatcatcagtgtttgtttcctcctctcttaaagcttagcccttctcaggtcattgttcttcaatg

SEQ ID NO: 26660 - DNA, 3000 bp, Unknown; identical to SEQ ID NO: 10267
  misc_feature (1)..( 3000): 2750-1469P.txt file - cDNA_ID_2715304; gDNA_ID_2213640; Annot_ID_132263

SEQ ID NO: 26661 - DNA, 3003 bp, Unknown
  misc_feature (1)..( 3003): 2750-1469P.txt file - cDNA_ID_2715312; gDNA_ID_2213640; Annot_ID_132261
ggtaaagaaacttcttctctttaaatagattccttacatagaactaaactataactttggaagaacaatgtttaacgagagattccccacatagctcgcatacatcttgctagttccttcttatcttctggttttccgggagagattattgaacttttgaggtcttaactcacttggtattgtttgcaggagctgttaggagctggaatactgttctgtgcatttggagtgatatgtgtcgtgtctctcttcttcatatactacattgtgccagagacaaagggtctcactcttgaagaaattgaagccaaatgtctctaaaaggttactcatcttagctccactttctgtgctgcttcattgcttgaggatctaaatcgcaaacgcaccagccgcatgtgtagtcactagtcagccatttatcgcggaattttcactgtttggatatcttttaaagaatggttgtatctagcggcaaaatttggtgcgttggaaaagttttaaaattcgaaagtttgcttaatttgtattttaaaacacgcattcaaaattttgtgattgtatgaaaataatgtgagattcaaaattttatgaaacaatattgtaacgtcgtcagtgattattattacacgaaacatattatgacgtcataacaagaaacataaataaggtcataaggaaatcaaatcattgtacgattcacaaaagcctataaatacaatcacgtcctcaacgtaggaagaacacaaagatcatcttttgtggtaaaggaacctaaaccggagagaaaaatggcaacctcaggcaatgcgacggtggccaataagcaggtcatactgcgagattacgtcaccggtttccccaaggaatcagacctcatcttcaccgattccaccatcgatttaaagattccggagggatccaagacggttctggtgaagaatctctacttgtcttgcgatccttacatgcgcattcgcatggggaagcccgatcccggcactgctgcgctcgctccacattacattcctggcgaggtacaaaaacgacgtccatagttcacgcatgttctagattgttacggatcaacacgattttgttacgtttcgagcttgtttgttacccacgttttgtgcaaaacaatatcactattaaaacagagatgaatttggaaacgttgttttcaaatttagaaacattgcaatgtttcttttgaatactgtgtgatctaagaaattgtacctttatgattagaagtgattttctcttacttacagtctctggtgctaaaggttttgatgttttgtttgcagccaatttatgggttttcagtgtcaaaagtgatagattctgggcatccagattacaaaaagggagacttactttggggattagttggatggggggagtacagtcttatcactccagatttttcacattacaagatccaacacaccgatgttcccttatcctactacactggacttctcggtatgttatctctgcttctcttttgttcatgtatgtaattcacttgatagtgagaaagctggctatatacaatgcttgatgtacctctctctatgattattggcatgatagaatggtcttagaagctcctaatcatgtagaatagttgttttggttgctaacatatctaataacttggtcaaaactctacaagtttcagtagtttactggtagtcttagaagcatcgctctgtttctgacaggtatgcccggtatgactgcctatgctggattttatgaaatatgttctcctaagaaaggagaaaccgtattcgtgtcagctgcgtctggtgcagttggtcagctcgtgggacaatttgcaaagattatgggctgctatgttgttggaagtgcaggcagtaatgaaaaggtaaccagaattttcttggactctagctattgatccatttccttatcaagagattcacttgtccccttttttctttctccgttgagttttgttataggttgatcttctcaagaacaaattcgggtttgatgatgcattcaattacaaagcagagccagaccttaatgctgccctgaagaggtcagtatactttgagaatgtaggagacaaaatgtgatatagagatctgattcaaaactatgatatctttcttctcacaaggtgtttcccggaaggaatcgacatatactttgagaatgtaggaggcaaaatgctagacgcagtgctcctaaacatgaaactacacggccgtatcgcagtatgtggtatgatctcacagtacaaccttgaggaccaagaaggtgtacacaacctagcaaacgtgatctacaagcggattcggattaaagggttcgtggtctctgattacttcgacaaacacttgaagttcctggattttgtgcttccgtatataagagaagggaagataacgtatgttgaggatgtagttgaaggacttgagaacggaccttcagctttgcttggactattccatggtaagaacgtcggcaaacaactcatagcggttgctcgtgaatgaatcagacgtctttagttggagaatgagttacaagaatttgtttagttgtgtcggaagtttattcttacaacttgaaaataaagcctcttttcataggcgtaactacaattgcatttttggttgtttattttgattctttcattggtctattctacaattttgtacctatagtaaataatataaactcacaatttttatacggatattctgagggatgtttttttttttgaaaaacaagttcaaaatatttcattattttcgatcagaatcaaaaatattttcaaaaatgttcgtttttttttgcattttccaagaaattaaaaaatcgaagaatatgtgcttcaaataagtgggcttatatgtactaaagcccaaataaatgcgttgtttggtacagcttcacgaacaatctctctctcgatagattcttcttacctctgaatttctcgttgttggaacaatg

SEQ ID NO: 26662 - DNA, 3003 bp, Unknown; identical to SEQ ID NO: 26661
  misc_feature (1)..( 3003): 2750-1469P.txt file - cDNA_ID_2715312; gDNA_ID_2213640; Annot_ID_181209

SEQ ID NO: 26663 - DNA, 3000 bp, Unknown; identical to SEQ ID NO: 10277
  misc_feature (1)..( 3000): 2750-1469P.txt file - cDNA_ID_2715324; gDNA_ID_2213640; Annot_ID_132257

SEQ ID NO: 26664 - DNA, 3003 bp, Unknown
  misc_feature (1)..( 3003): 2750-1469P.txt file - cDNA_ID_2715332; gDNA_ID_2213640; Annot_ID_132255
tcctggtaagttgtttcattaccaaagtaatcaattgtctgaatatatgactcggaggaaccatctgctaagacttcgacttcgaccggatgcccaatgattgctctgccatttaacttactcataagggagacaattgggacaggccctttctgatagcttcctcgcacttctaaatccacatccatcaatgaagaatacgtttttctgccaaaatgtcgttcagaaacatcaaactcctgacctaaaccttcgagtttttcctcccctcgcttcttcataccaatccggccttcccaagggtcatcatcccagtccagcatatcatggctgtagatgttcttacatctagatgcaaccacatttgagagctgataatcatcacctggtacaatcattctgtcaccgaactgcctttcgttgggatcagtgtcatcagttccatcgctcatatcatttatcccattaaaatctaacccataacccataggcttttggccaaatgcccttctcttatattcacaatatcttccatcttctagacgattacggtgcaattttctcttccgtgcagatcttcttggaagagtccggaagtttctttttcccttgtgctgccagttggaaaccgtactagcctcattattaggattttgggaataaaggtaggaagagtcgccagaaatagatgactcataatgatcttcctcactgcttgtactttcatcttctcctgacgtatgtctactaaaagtattgcgtcgctcggaatgacgcccagctcctgaaaggagaaatttcaaactctagttagggaataactaatacctatgcgacacatagaaaattgtggtctacgtaatcaaaaacattaattggttttagtgcagaggcatgatacaaattccagtcaaagaagaatcaaatatgaatatagtgttgacacaactgaaaaccaattttcgcaaaagtagaaaacatttagatgataagaaaaactagcttttagctgtccagaaatactttacctgacagcaagggaatgtcatcatcagtatcctcctccatatcagaagaatcagtttcagattcagaataatctgattccatatcttccaaaaaattaggagggtcataatctgaataacgagtatcaccaccggcaaaggaggaatgcattgcgtccctgtggcttagcaaattctcatgtaggtctgaaacatcattagattcacttggtgtaaacatatatttagtccttttagcctccgccctactcttagttttctcctttcctgaaacagagccaaaaatgcatatgaatttcatgtcaaaaagagccagaagccttaagtatccaaccatctaggaacaaaaacttggaagtttaaaagtacatcttaccgagggtataaatgggcctctccatgctatgatccccactggaagaagctgaagaattgcttctggcaagatacttaaaggaagtatcaggaccattggaacatgaaatctttcgctttgaagaggcggttctaagtccaaagtcctgcaagcctctcattcgaggcacagcctcatcctcacaacttggttgatcttcctctttatctctcagcaaatgcataacatcaccaacatggttggtccttagataatctgtggattcccgtgtcccattagaggtatcctgaaccctaactatagccattctctccttggttgcatcaagagagtcatctctagccttttcagggactagtttcccttctcttttcagcatttccttttccagttcaagggcatggagaatggcatcttctctccgagcatacttctctctcttttttattatcatcgcttgcgaagattctaccctctcaatgcattcatcaaaatcgccacaccgaaatggcttgacccgcttggatttctctaaattgtaccaatccctaagcacattaaaatacgaatgctttcagtaatcaatccaaaagaaaagagagaagttcacacagataaagaagagacttacacacttgcatcttctctcccgaggagcttcaccggagttccagatcgtggcgacgtgatatgcgtagagtcaagatcttcttgtccaagtatcctccccggccaccacgagccattcctcctcctcacccacacaatcgatcccacagtccaatcaaccgcacctgatcctggacttgccatccttgtctctccctctctacactcaagatcacactttctctacgggtttcttctacgtcactaaccacacacaagcctcaaaagtccaccattctccaagaaaaatctttctacggttgtgtattgatctacctgaaaatcagctccgccgccggtaatacagacgaatcccggcggatccaaaaccacaactgaaacagacggaagagaaggaagtgaatccggcgagaactaagctttccattcagatttggaaaactcccataaccctacgctctttaacgccggttaggttaaaacctttcctctctactttttccaccgtccctctataagctagctacgtaagcgagttctcgtcgtcctcgtctctctcgttctctctgaaacctccgcgtcctcgtctctctctcgttctctctgaaacctccgtgactctttcgccttctctctctctctctcctccggatgatggtgattgcgagcttcgcagttcaattaatttacacgcgctcctcaagagcgcgtgctttctacgttaccgaatcataggcccatcttacgatccaaaatatgggcttttatattttaggcccattaaattcaaaatttacgctgcaacggtcacttgtgcgcaagggagttagggtttatgttcgcctaatggtataaatatccttcatcttcggatctttagagacatagcagaaacgtcttgtttttcaactgtcattttctcaaccagatcaaactttttgttttcattttctctaattcgtcgccatg

SEQ ID NO: 26665 - DNA, 3003 bp, Unknown; identical to SEQ ID NO: 26664
  misc_feature (1)..( 3003): 2750-1469P.txt file - cDNA_ID_2715332; gDNA_ID_2213640; Annot_ID_181201

SEQ ID NO: 26666 - DNA, 3003 bp, Unknown
  misc_feature (1)..( 3003): 2750-1469P.txt file - cDNA_ID_2715340; gDNA_ID_2213640; Annot_ID_132253
cttcttctctttccttattcctgcgtaaattaaatgaactaattttctactgcttcaactggtaagacacagagttagaataacctgttctttactctaataatattcctctaatcagggccacccaatcatataccctaagggtagattgcaaagccagatttgtgggctaggaatattcctatttcgttaacttaatacatagatgctaacatattgttcatgttccaaaaacaaccagatattataatttgtaaatcaaaatcacctttgatcactgctcagctaagtatggctatgtatctcctcccactaagatactggacatcaatctcaatctctacttcaagtccatacatttcgaaagtaagagtggccgaagttcaaacattttaaaagccaactacgagaactcagaatatgtgaaagccaaagaaaagaaaagaaaagaagtgtttcacaacaaggttcatggagaagcaaatacatgatcatcagtattctttccctaatctatctaaagcaacttaggatgtaccccacgcttaaactcaattatctagaacctcaaggacgattgattactctattctacgctaatcgatcatttagtaaacaaatgccgattgcttggtatgggtcaatctatggttcatgatcggttcttgtgtctaacaaagcatatcaaaagcacatactactagttcagatttcagatgcatcagtatatttgtataaaaagggaaatgcacctatgagacaatttggatttcacccggaaatcaataaccagacattgaacacaactaaacaaaagggttccctgattaccaaatctgtatccacaagctctaattcatagaatgcataagagaaatcacagtgggtgtggcacagaatcaattcaataaaaccatcaatcatgtgtgtgtcattaatgcataatgcctatcctgaagagaagattatagagtcaatcaaaattcaacaagaaacaatcacaatctggttacaaataagaatccaaacatagaaaagtaggataaaatccttcaatctccacaagataaaagacacatatcagaaacgttgaaaaagagaaaacctagccaaatgggaaagataaccaaaaaaggcattacactaattgaacctgagacgagacgatcaatccttgttcctgagcctctcgatcctctggttaagatgctcgatcttgacaaccaaattggtgactgagtaaaggatccagtagaacacaagtgcagccgcaatgagaagcgcgtttcgctgggatttcatcatggacttctggtgacgaagatgctctgacggtgtgcaggaatcgccatcgcacgaaggcatagtttcgtatttccagtagatgtccattaagaggaagagacagaaaggaactatggagagaaacggtttgaggagattacgcgtgacggcgactaatcccttgcggagtccgtcgagtcctggcatcgtcaatagcaccaccataatcgcttcagccgccgccgcgtaacctaaaaccacccactcgagcgccattatcaccggatcaagctagatctgaagtctcttctcttcctcgcaatcgcagcttgaattttctattttgcagactcattttttgctggggaagaaaagagaagatgtaaggaacgtgatacacgtggcggtcaacgcgtgtcgcacgtcgattaagagggaaaatgggcttaaatgggctgaatttgctaaaactcggcccaaaagaaaagtatagatatattaagtagtccgtttctttaaagtcggctttagattcacacagtgtcgatttgtcaagtaacggcgtcaaaagcgaaacggcaacgtttggtaggtgagacacgtggatcagatagtgttttgtctcctaatccaatctctttcaaagcatacataataaatgcatatatataagcacacattaaacggagttaaactcatcatacattactgactaaaagaagcaaaatcttgagtagaaacaaattttcctgtatctctctctcttgtaatctccgacgaagaaacacagttttatggcaaccaccagatcgaagagctttcagttgatcaccagcttaaggaaacacctagttaacacacgcgcttccacacgcgccaccgcctctgctctcttcccttcacggtatcaaacactatttctctttctactttccttcttccaaattatttgatgtttcttaacctaagtaagcaacaaataaagagagaaaatactcatttttctgtggaaacaataattaattcccatgaaatggattagcctatagtaggaccttgattataatgaaactgatatgaacatatatatctgaaatttttaactatcactggctcgttggtaaaacaattttgtattttccacttgattaagtacaagatgatattattcccagatctagaaagttcagaaatcagggtttcttctaggactacggattcagatcagttaagttatataatagttgtgtattttatgtattcaatgtcatatatttgctgaattcaaacgcaatggatctgaaaagaaccctttgatgtttgcaaaagtgtattttagttttaagtctgaaaaaacttgtttttgaaaatattaatatagtttattgaagataaatatattcgtacagaaagcataagcaatgtactagtgtacagtgcacaaaaaggcatatgccattaggcgtaaatggataataccaaaacaaatccagttcaggttttgacacgtggtagtttagtaagtttacatacatacccctgtcgaaaactcgcaggtaagagtgttattagcttgacccaaaactcaaatctcaaaactgtaaccaaatcatgatttttcatcttcaatatgaagccacatttagttacatgctgtgtagtccatcttttcgtaacagtgtaacacattatttttcatttatgatatgagtagacatg

SEQ ID NO: 26667 - DNA, 3000 bp, Unknown; identical to SEQ ID NO: 10265
  misc_feature (1)..( 3000): 2750-1469P.txt file - cDNA_ID_2715342; gDNA_ID_2213640; Annot_ID_132250

SEQ ID NO: 26668 - DNA, 3000 bp, Unknown
  misc_feature (1)..( 3000): 2750-1469P.txt file - cDNA_ID_2715346; gDNA_ID_2213640; Annot_ID_132249
tcaagaacagatggagtctcttatgttgggtgaagaacgcagacgcggaaactacaccagagacgtagacgcggacgcagatgaaggtgttaactctccctcttcttttccaaactcccctgatgattcggaccgtcgcagttcttcttcttcttcaaggtaatgagaatcagaaagttccgcttttaacccctggctttagtaattgtcagaacaaaccccaatcattagggtgtattcttaaacaatcttatagtttaggggtataattaatttctgagatctttttcgttgtaaagaaactttttaatcttcctaccacgaatttatgtttgggaaattttgataacaggagaggattgtcgaaacattacaaaggtaaatcacaatcgttcacaacgttggcagaagcgctaactgtggaagatctcgcgaagcctgagaatccattcaacgcaaagctgaagcagcgacgagagagccctcactgtcgtagattatcaggatgcggcggcgcatcggagcgaaatttaagtgtccacgacgtttttctcgctgggaacgatagaccgccgcgactttccggtaacagaccgcctccgagagcccagacgctctcggcggctcatatttcggctttgctcactcgaacctaaaccggaagagaaccgggtttcgtttgggacgatgtttttcaaatcttttgttttctaatcttgtacaagttgttgttactttaaagtgttttgactcttttgataattttgtaagtttcagtttaatttagagagcacttaacagtatatatacaagtaactgaccaattgaaaatgttctgtatttttagatgtgatgaactaagaaaattaaaataatgttctgtatttttagatgtgatgaactaagaaaattaaaattgatgaattaagaaaatgaaaaatctaaattcttagagattgatgggctggactagaggagtcgcagttatctatattgggcctacaatgggctttcttaatttacagcctcttttttttgcggcaaatttacatgtctcttagctttcatatttacaaattttacccacttatactaactagtacaaattccatcatgtattttctttgtcattaaaatacaccttactttttgttttatccaattcatggcagaaattatatgtagaatgctaaagtctagaaatgttttggggtgtattccgaaataattaatagttaggtggttcttttgaaatttcttaatgattattgtataatgctgtcaagatgacgtggagacccatgggatgacgaagttttcactggcacgatccattcttcatcgattcaaactcttggattgatttcagagatcaaaagataacactttctcagatcttaaatttgtttgaattcctgctcttaaaggtttttgattgtgcaattttttcggtaacaatggcttccttggagatgaatgacctaaaaagtaagtgttccaatcataaactctttgaatagggatgtgataatgaactagtatccattgatcttgaattgctgaatcgttaaggaatttgattgatgtggcagagatagggctaggtttgactggatttggtgtgttctttacattcctgggagtgatatttgtgtttgacaagggactcatagccatggggaacgtaggtctatttataccatctttggtgtgtgttctttacgattttagcaaggctttttaagggtctctgtggtctctttggacagatcctcttcttagctggtgtgactctaaccattggaatcaacccagcaatccaattctttactaaacggcagaattttaaggttctttcatgaatcccttgtgcttccaatttgatgactattattaatacaataatacatcttcttgatatacatacagggtactatatcatttggattgggtttcttgttggttgtgtttggatggcctattttcggtttgcttcttgaatcatatgggttccttgtgctcttcaggtgggttttcttctcctcaacaacatttaatggttttactaattcatttctagttttgatttgctgactcatgtctttcctttattcttctgtaattttaaagtggtttctggcctacacttgccgtcttccttcaaaggatacctctattaggctggcttttgcagcaaccatacatcagatcggtacattcattgcaacttctctctgttttactatttagacttatttgccttatccaatcaaacttttaccaactatatatattggtcactgaatcagttgctggatcgctaccgtggaaggcgtgtccctgtctaaaccttctttgcctttctttctttctttttgtgtgcgaattgaccactatccaattatgaagcttaacatggcatttagagttcttaacactctctagtctcttgtatcatatttgacataattggactgtacaaaaacaaataccttttgtattttattttaaatttacaaaattttacatatatgtaattagaaacctgatttagcaaattagagcaatcagaaacattcatgaatgccaaaatatatacgcaaagtaaccttcaaagtttgtttcacatcgacacttattataagttaactgtaattaaatgttggttcgtctactgtacacatctccagtactatagtgaaaaataattcacagctcttgtaaacgttattattcacaattttaattagaacaacaacaaaaaacattttaaaaatcaagaattccatgctaaaagcacgtttcatgatctcacctactcaaaggtccaacggatttgaaaaaaaaaaaaaaaatgaccactgattaatatccacagcagacaaaggcactcataaacattttataacttttgtggcctataaatgcatacatccacattcatgtcggtatttacaatttcatatcaatagttacgtataaacatataatcagaaaatg

SEQ ID NO: 26669 - DNA, 3000 bp, Unknown; identical to SEQ ID NO: 26668
  misc_feature (1)..( 3000): 2750-1469P.txt file - cDNA_ID_2715346; gDNA_ID_2213640; Annot_ID_181195

SEQ ID NO: 26670 - DNA, 3003 bp, Unknown
  misc_feature (1)..( 3003): 2750-1469P.txt file - cDNA_ID_2715356; gDNA_ID_2213640; Annot_ID_132246
ccattttcagatgataacaaagggtcagttcacatttggtgtgcactcgaagacaaacaaatttcgcatgaggttttactctacttatgtgataagcttccatggataaagcttcatgaagtccctgatgctggacatcttattatccatgagaagcagcattttgaagacattattaaagccgcttgtagttgaaggttaaaaaaaaaaacttaattcaatagtttgtgtgtggactggatttgaaagttgatattatataaaatatatgttcaatgtcacatatatatattttgttacaattaaattcattttactactaaatccagattttatatctgagtgtttttaatgtgtaattaataatgatatattatcaggtgttatagtttgtgtcaataaattttacttagcgctggagatatatacaatcatggttgacaaatgtgggtcaccgtgcaagaaagtctataatcttttgctttgaaactgctaccaccgtgccacgacacttggatcaaagttacaaagcagtttcttaaaatctatgaagataagtttgtttttctttctcttacagattctaaaaatgaaaatgtctaataaatccaaaaaatattcaatatgcaatataaataataaaggggagttacacaattgatataaatgcaaaaggacaaccaattcaataatagtaatgcaagataagttatcaagacatgtgtaacaaagagagaaggacaaaaagaaatttgtaaacaaaagtggtcatgctttacttgccaacaaaaataaatagtactacattattaagttgcttggaccaaagataccattacatcagcgcatttttctctctaataattgttgaaattgttaaacatatattagttcctgagtttcttcttctttcattttctttaaatcaattctagtcttttggttccaagacttataggctaaataatggtgcttctacttgtgattgtgggattaataagctattatgtctacaagtccataacaccgccgccaccgattccactgccggaaaatgtttccgagatatctccaagaatcaagctcaatgatggaaggcatttagcgtacaaggaattagggtttccaaaggacaaagccaaaaacaaaataataatcgtccacggaaatggaaattccaaagacgtcgatttatacatcacacaggtacacaaggattgaattaagaacgaaataaagaaagagaccgcaactattttaatactttttggtggtttatttgtacaattaatgattgttatgtataatgaataatactatttgcaatgataacgctcctctggctttcaggaaatgattgatgaattcaagatatactttttgttcttcgatagagctggttatggagaaagcgatcctaatccaacacgaacgctgaaaacagatacatacgatatcgaagaacttgctgacaaattgcaagtcggtccaaagttccacgttataggcatgtcacttggagcttaccctgtttacggttgcctcaaatacattcctaataggtaaatatatcaatcggttatctcttaagaacattatcaaaaaattgaaatattatttgtgatggtcacttctcaatacttatcaaaacaagttcttacgtaaaagacatttgctttatccatttgtgataagaattctcttgtttcatcctcatcgtttaattaccataagtccataagtgacgttatactataagaccaagtgaccgacttagatatttcacttatacaaataagattataatgtagtggtttgtatattagccttaattgtttttcttataacatcgataggctcagtggagcttcgttggttgttccgttagtgaatttttggtggagccgtgtgcctcaaaacttattgaatgcagcgatgaagaaattgccaattggatttcaattgacacttcgagtcgcacactactctccatggttgttatattggtggatgactcagaaatggttcccgaatagtcgaaatcccaaagatactatgaccgagcgcgacctagaactcgcggaaaagcataccaaacactcttatatcaaggtatatatattacgaactttatgatccactctcttttttttttttttttgaaagaagtaaacattcatgcatgaatgctattattactataggagtctgctttacgacaaggtggatatgtgaccacacaacaagacatcatagcgggttacgggaattgggaatttgatccaaccgaattgaagaatccgttttcggatagtaacaaagggtcggttcatatgtggtgtgcactcgaagacaaacaaatttcacgcgatgttttactctatatatgcgataaactgccatggataaagctccatgaggtccctgatggtggacattatattatccatgagaagcggcattttgaagccattatcaaagccgcttgtagtgactagtggaagatacattataacaaaaaaaaactctaaaagatttgtatctaaaatcagtttaagaaaaattatggctatgtaagtttcatgtgacaaagaacattatctaacctatttacaataatttatataaatctggtatgtcagatagtacagtttacaaaaaaaaaatcaaatgtcaaattgatccaaatgaaaaatatcatgacatacttttttgagcatgggagagagtcggatggagacacatgaacgaaaggtaaagttgacccaaaattgttactgaagtcctcactttgatcacgagatttgggttttgtgatttgggccttaccctaacccatttcgattgagggcattttagtcattttatataaaccgacaaaccggtaaaagcaaaatgttttcccactaaaagactgaaaaaaacactaaaccaaaattaaatcatcaaaaatcaaaatctctaaaatcaaaaattcgcattttctctctcgccggagagatg

SEQ ID NO: 26671 - DNA, 3003 bp, Unknown
  misc_feature (1)..( 3003): 2750-1469P.txt file - cDNA_ID_2715363; gDNA_ID_2213640; Annot_ID_132244
ggagtatagtaaatgccaaatttgttaaagaacaatagaatgtgaactgtagacttttgtttgtgtcgtctttctgtttgcttcaacttgtatcatctgcttaaaagagttgttgcattcgtgttttgatccttgtggtaggtcaatgagttcaaatcaattgagaagttcaagatattcaacacaaacaacctgtaagtagatcacgtccctaatgatagtaaaacaaaataaacttatttgatacacactaactgtgtaagtttacagatgggttaacttgaaggccatcaaaaagcttgtggaagctgatgcacttaaaatggagatcattccaaacccaaaggtgcctgcgtggctaatgcacagttttttatttctgcaattttttcattcattattatctaaccaaagaaaaactgcaaattctattcaggaagttgatggagtcaaagttcttcaactggaaactgcagccggtgctgcgataagggtatacatgcctgtcctagtggcacgttttgaaatatagaatgcaaactctaatcttttcttaactcctttttcgtgtgattctgtctcaaaacagttctttgacaacgctatcggtgttaatgtacctcgctcacggttcttgccagtgaaggcaagttcagacttgctgctcgtccaggtaaactctatacaccacgtttaacaacgcaacagagtaacaaatatcttttgaaacatttgattaatgatttaagttttctttcttccacagtctgatctctacaccttagttgatggctttgtcactcgaaacaaagctagaactaacccctcgaacccgtcaattgaattgggacccgagttcaagaaggtaaatgaagaaaatgatttcctgacaagtcccatttgtcatttctatcttgactcttgagcctcacttagtgtgtctgtctaacaggtggctactttcttgagccggtttaagtccattcctagtatagtcgagctcgacagccttaaggtgtctggtgatgtctggtttggctcttccattgttctcaaggtatatatgtaaattgttcattagttcacaaggtggtgttgatatttatatatgctcagaatggtttcttttggatttaaagggcaaggtgactgtggcggcaaaatccggtgtgaagcttgaaattccggacagggccgtggtcgagaacaaggtaatgtaacgaatcatggttatgttcaaactccggatgttttctttttcgccacaattatggttgaccgtttgattatgtgttgaaaaactaataaatttatcactcaaacttgaaatttggttttaggcggttatgatcttggttcaggattttcagagtaatcaccaaaatgaaaattaggattgaatttgaggttttatcttttcggctaaaccgaattggcattctacatctttagtttaaacctaaattattttgaattaaaacttaccattgtgttttttttacagaacatcaatggtccagaagacctctgaataaaacaaattcaagtcttcttccctctctcatggaagacacatcttgatactcctttaattggtgtgaaaagatcacaagtggcacagcaaagcaagtttatgaagaaagaataaataatgtttctttttctttttgcagcttagcaaagtcttttcctctttggactttattttaattttgctctttgaattttcccaaaacatcacatttatatgttcgattatatttgggttctatccacaatcatttttctttttgataatccactctttctttccacatgctctttgcttggaaactgatggagtactagtttattacatttatgtcgtctactaatttagattatgtcactgatattcatacagtgtgacatgtttattttcggttttcgtccgtttgatttgtagaattaagttggggactaattcgtatactaatgaagggaactaacacaactactacttatgaaggaaaatgcaagaatgaatactaataaataagacgaatacaactttaattagagttctcattggctaatttgtagaataatcgcaaattcaagttacttgtgtagaattactacatcaccaagattcttattcaaattaattgtcgcgctcccgtgtaaaattattctacaagattcttatgacttctagtatgtaataatttttgcttacgagttttggaaacaaatagatttaattacaaaggtatcattcaaatgaaatagaaaaccacatagtagcctaccaaaaaaaaaaaaaaaacatagtaagatgttcacatgcatacactacacatacgtgtattgaatcttattggtaatctaacatcgtagattcttaattgcactttttaattattgtttttaaaattttcctacttttgtttaaacatgtcacgatctaaagcatgagatagctgtcggttacttgaaaaagtggaataaaaatattatgtgtcattgagataatgagatgttacgtacgcgtccaatttattatgatctaatacatcttatcagataagctcttctttattttccatctttattcaaatcttgacaccaaaaggaaagaatattttttattcaaatctataactcatagattgcatctccttcttactttgtttgattagattgtattagcctctgtcttgtcttttggttagtataagtattgataaattcctttgaccagcaagatatcatcactaaaagattttacattaccaagccatctccaatatcatcaggtcggttttctctcgatatcaattggttacgcatgcatctatcatatcttaaagtttattcttctttcattattcttaacccaaattttaatttttatggaacttactaaaacgttgacgatgatccctactgctagtttgttttgaggcatgcattgaaagtactctttgcggtgttccctcatatattacaggtcaagtgatg

SEQ ID NO: 26672 - DNA, 3003 bp, Unknown
  misc_feature (1)..( 3003): 2750-1469P.txt file - cDNA_ID_2715367; gDNA_ID_2213640; Annot_ID_132243
tttttgtatcacttgagttgagtggtatgattgtatcattttgaatttacgagtcaaaaattgaatttacaaacaaattttttctgtttaactaaaaaaaataaaactaaacactagtcaatgttttcttcgatttctataaaatggattaggaaaaaattgcgagtcaaaatttggttgacaaataaacggaagtattttttccccaaaataagtgaatgtactggcacaagaaacataaaaaaaatcttttctcgtatatatctaaattatttctcgatattcaagatttctaattttaaattttagaaacaaaattttcgttctatttctttttgtagttgcttattttttttttaatcaaaagtatgacttatttacaaaatgttcacaaaaatgttgctttttttttgtcaaaacacaaaaatgttgcttatttaagattatttggtcttatcctgattttggtttttggagtttgaaaaaaatataaaaataaatgaattaaggtcacaggtcatatataatttaactcatctactatgatgctagtctaatcagctaaaaatatgttaagctggtcggataatttttattttatctctaggttctaaccctatgacatgcaacattattttactacagtaaattgtttgatattggttgtatcacgtatagtttttacaataatgtgacgtttgatcaagttatatattatattttggcagtcataacgacaggagaagcaagaaggagtgtaatgaaattaggtgagagaatggtgaagaatttcaacgaaatgctgaccatgtccggaaaaattgactttccgcagcagtcgaaaaatggagtgagagtctcgattcggatgaacattgaggccggtcaaccacccggtatagttgtcagtgcttcgtcttctctcgcaatccctctcactcctttgcaagtcttcgctttccttcaaaacctcgacactcgtcaacaggttctttcttgatctgcatgatcatcaaaatttctcaacttaaatcacgtattaacaacaaaaacgtttacgtgtaacagtgggacattctttcctatggaaccgtagtcaatgagatcgctcgcattgtcaccgggtcaagtgaaaccaactgcgttaccattctccgggtacatgtatatctctctctcttcaacggtcttttaactattaatcgtttgttggcaaattatataactctaataacctataatcgtcgtacatgtgtatatatacattagccaacgcacgaagagaataatgacaagatggtggttcaagactcatgcaaggatgatatgttgatgctgcaagactgctacatggacgccttgggaggcatgatcgtgtacgctcctatggacatggctacaatgcatttcgctgtctccggcgaagtagacccttcccatatcccaatccttccatctggtttcgtcatctcaagcgacggcaggcgatccacggtggaggacggtggaaccttactcacggtggcctttcagatccttgtctctggaaaggccaataggtcgagagaggtgaatgagaagtcggtggacacagtgagtgctttgatcagctccactattcaaaggatcaaaggtttgctcaattgtcctgaatgttgagtgagggaatatgctgtggaagattctcttttgtttttgttttgttttgagatatttctgtcgggggattttatgacctcgattggttatgatggttttatggacatgctttaagtcttaagatatttccgatcggtaagattacagaccgattgatgaaagtaataaaacaacccatcctatcatgggtttttcttattggttttggttggtttattctattggttataataatttactcacagtttgaagataaatgcttgataataatgacgaaatcgtaaatgtgattgaacatttgataaagaagaatattcataaaaatacactaattatttagttatatatttcacgaaaaattcataagtttatgaatgtttcagaaaataaataaactaatttagctttcagaaagtaagatcagctaacttttttgcaaatacaaaaacagacaatctgtatattcttgaaactcaacattcttaaaattcttaataaactcttacaatattccaaaaaaaatcttaaatttttcaaatttcagattcataaatattttatttttatttttatatattaactttgataatttggaataagatataagaataacatacataaagtatgtattttgaaactactttttttagtaaaactagaaaatgttatacacacaataataaatatgttcatgagtgtctttttttttggtgtaatgctatgagcttttacatgtgaacatatagcgtttctgaaatcaaacttttacctccttttttttttaaaaccacttttacctccttataaattgatctttatatgtattctcttagaaattagtttgcagtttgtatgcatggtcttataaaaaatactattatttaatcaattttataaataacattatttataaatctcttaatagtttaaagttaatttggttctgtttatgtaatatgttgggctattaagctgtgtaccatttatttctaacacaatcaatagagaaatattttatataaaaaaatcaaattctattattattatttatttaaaagaactgaaaaaaggaaacaatatattgacggtaataagaagaagccggacggacatggaaaggtgacacgtgtatattgacaattggctcagataagacgacagagatatatatatttgcggtaacaccacgcatcgtcacttcatcaccactactcccttggcctataaatatttctctgcttttaatttccaatttgctctgattcattcacaaataacaatcctctcttcgtttttgtttttcttttggatccaaagctctcttaaatctgtaaatcaacaatg

SEQ ID NO: 26673 - DNA, 3003 bp, Unknown
  misc_feature (1)..( 3003): 2750-1469P.txt file - cDNA_ID_2715371; gDNA_ID_2213640; Annot_ID_132242
gttgttgttgtaggatcttgctgggtagtgtgagcaatcatgtggtgacaaatgcaacatgtcctgtcacagttgttaaggctaattaaagtgtctcttgttctttaattggacccagttaataacattagtagttacgtgtgtcactcatgcattgttttgacatttatacgtttgttgccttctacaaatttgtgtgaaactgattggtactgtttcattaataaatttcagttaaatgatatttactctctttttgtttgtgatttgtgaacgttacgtaaaaatcacaaaaaaaaataattagtttttctaattcattcatgaaaaatcttcgtggactaaacaaaaaagatgtgaaaaaacaatccccatgtttgatccagattaattcgatccgttaatcaaaagatggtcttaatgagcataattcggggataaagtcgaatatagaaatagttgttgaaaagagaaatgtttggattgaatcttgtcagcttgatgtgtggttgatcacatgaccaatctatgtatggaatatggatgtcgtgtgtgctgattcattcagatatgacaagtggtggatgggataattcacgatatgggccagattatgagtttgttttaacttgaatggcaggccgaatcataatggattcatgatcattatgtttgatcatagcctagttggacttgtatccctagatcatgatcaaagtgggcttataaacatggccgagatgggtagttctaaatcaatttgttggatcagaagaaatcaagaaagagacagtcgttggagcttttctgatctgcttttggatgatcacccattagattgaaaattaaatttttcattctccgctcgatggctgatttgtaaacttgttccttcatgatagaaatttatgggctaaatacagaaagtgaacgttagaatttggttttgggtagaagaacaactatcatatgattaaagattaatcagatgatctaaagatagttttggtgagtacagttcggaaatatagccgttgatgcatgatgtgtgactttcaaaaatagaaatagccgttggatttaaatttaaggtcaatgaacaactgtcagatatgcttaaaattaatctaatgatccaagaatggttttggtcaatacttcgagtatatatagttgctggtacgtgatatgtgaccttgcttcaaatataaaacgagccgttgaattttaaatttgggtggatgaacaacgtactgtcaggtatgatgattaagattaattcaatgatccaaaatccaaatattgtttcggtagacggtggtacttaattagtgagactttcaaatattaaaaagagatgttgaatttaaattttagtttgctcaaaagaaaaagtttctagtaaaaacaaaacaaattatgtttaattaaggtatgtaatatggttatgcataagactagtgttgatgagatgattcacgatgtcgtatggattggattatgagtattcttaaactcgaatgggttgccaaatcataatggcctcattaatttattgtactaaactgaattataatatatgttcttgagcgaaaaaaatccataatttataatttcctatctagctatattggattgatccggctgttgacaatctggtcctgatttgaatcggtttctcgaatcatgcaccgtaatcgtagtctagccatttaggattgtatcactaacagtagtgtcactttaaaatgttggagatttagactatgaatagtaatataaaccgcacccaaaaccgcactgcaacaggtaacagtatcaaaatctctctctatatatatgtattttcgttactatttgaaccgcaccgcacttctcccacaccgcaaaacgcagtcatcattcggacccttaagacaaaaataataataacaatttatatagaattttaccaaaattgatgtcaaaaagagaattttttattattattttaaaacctaaaaactaatacaatatagagacgtaagaaaaatgccatcttttttctttcctcatgctacacacctttagatcaatgtttcctatagattttacaatttttctttccacattactaatttgagtatttgcaatctgttgaataagttgtcattgttcttaaaaaggtacttttcaataaattgtcatttctatctatataatcagtgatatctttccattctcttattttataaataagttagcataagaaaatatataggactaaaaccatttaattaatatttaaaacactaattatgaatttgtttaattttttactaaaaatttatctgattagcacaagctttttgtaataaagtttacaaacctttttgtttgtacaatagacatttagctagatatcaaaatttaacatataaacaatagaaaacatttatgacaaaaaacaatttagaaaacatatcaaaaagcctaattgacacttgacattgttgaaactattgatttaacacattgtattttcatattatatataaatttatattcacctttcaaaaatacatttaataattataaactaaataaaaaatgtttgtttgacttgttttatttcagccttaaaaataaatcgaccaataatatttagaaagaaaatcttatctcaataatttaagttttgcttagatttaatttatttgttcacctcaatgcattttatacaaaacaaatattttatatttaatacatatgtgaattaaatattaccttttaacaaataatgtaattaatatcttttaacaaataattttacccactcaaatagtaatatctatatttccccccttcttccctttttatgaattaatgtatattttaaaaaaatatccttaagaccaccctttttcccctataaatactgattaacttgtgccttaacaaaaacaaaaaattattcgcaaacacaaaaaaaattgttagtgaagaacaaaatggataataatg

SEQ ID NO: 26674 - DNA, 2487 bp, Unknown; identical to SEQ ID NO: 10260
  misc_feature (1)..( 2487): 2750-1469P.txt file - cDNA_ID_2715382; gDNA_ID_2213640; Annot_ID_132238

SEQ ID NO: 26675 - DNA, 3003 bp, Unknown
  misc_feature (1)..( 3003): 2750-1469P.txt file - cDNA_ID_2715393; gDNA_ID_2936581; Annot_ID_194896
tctctttgtggtgatgatgaaaaaatattgtggctttttggttttgatgatttgggtttgagtcgtattgcacgattggggttaaaaagatgagatttgtaattgggggcaaatttgtgttgattagggttcctctttttttcttaatgtcgaaacgtgtgtttgaagattttagcatctgggtgatctaaaaagttttgattttgatggatttatgttaaagtttctgcaaattgtttctaaatctgctgatgctttgttttatgaggtactaatggtttccgttttgatctctaattcaggtgatatccatggacagtaccaagatcttctgaggctattcgaatacggaggctatcctccttcagcgaactatctcttcctcggcgattacgttgatagaggcaagcaaagtcttgaaacaatatgtttactcttggcttacaaaatccggtacccatccaagatatttctcttgagaggaaaccatgaagatgctaagatcaacaggatttacgggttctatgacgaatgcaaacggaggtttaatgtacggctttggaagatattcaccgattgcttcaactgtttgccggtagctgctctcattgacgagaagatcctatgtatgcatggtggattgtcaccggaattggaaaacttggggcagattcgggagattcaaaggcctacagagattccagacaatggtcttctttgtgatttactttggtctgatcctgatcagaagaatgaagggtggactgatagcgatcgaggtatctcctgcacgtttggagccgatgtagtcgctgactttttggataagaatgatctcgatctcatttgcagaggccatcaggtaaatagacttccatagtgatcaaaactagaaccaaatggtccaactctgtagaaatgtttgacatttgttgtatcttgtgaatatgggcataaaggaaaagacttttatgagaaccttccaagatattgacttgtgagggacgtgtttgcaggtagtggaagatgggtatgagtttttcgcaaaacggaggttagtcacaatattctcagctccaaactatggaggagagtttgacaatgccggtgcattattgagcgtggatcaatctctcgtttgctcctttgagattctgaaaccggctccagcttctagcactaatcctctcaagaaggtttgtttccaccaagaactttcaaaagaccaagtagtccttcttttgataataatattggttagctcggatataccaaaatctgaatccaacaagaccaagccttttggacttgatgagtcatgacaagttttgttcttttggaaacttcacgtcataatgtaacacatgtttctctctatattttctctttttgatcaggtaccgaaaatggggaagtcttgaaacttaatacagcttattcccttgagagatttggtttcacaagctcaagctagcgctctgtgcatttcttcagatgtaggcaaactgcaatggagaagagaacctcaaaaggctactttacttagtcatcaaagaagaagcatcagtagaaaaaacaaaagagagagagagagagagaaaacaaaaggtgttgtccaaatattctgtgtatagttgcagaaacatctcttttctgcttctctagattttcatctccttttggtctgttttcttttatttggttattcttttaacaccttagtttaacttagagtgcctctcctcttttgcttttttctttctttcctgtatcatcaaattaccacatttcttaatcttttccatatttgaattgacttccatggtttggctcttacttttgtgaatcatctgcacagtaaaaacaatttccttttgatttagcagtacatgtctctctgtgttttttctcttccagcagtaatacatatactttttacagagcttacttttacacaatggcacgacttgttctctctgtttcggaattggttcttcttgaaactgattctccctctctcgtcgagttttcatagtagcacattttattctcaggcttttggtttaatttcataggaagatggttcaatccggtttactattaaaccgaaaaatctaaaaactagatttttcggtttatgaaatccacaaaccaaataatatagctgcataccaacccaaaatctcggcaaatcaatgttttccgtaaataaccttttctttatcgatgttgtcaggaacattaagggtaacttagtaatataacaattgcagacgttttagcgagcagaggatccccaaagccagacaaatcctcttccgtcgccgccgccgccgccgcaagtctcgtcggttagtttctgaatctctcgtttctaaatctctgatctttcgttggattcctgtgtttgaatctcagcttctctacctgggtttatgtctcagctcttgaacttgcttgatttctgcatttcttgttattttcgtttgtctttgtctctcgatccgtgtgttaccattactgtatatgatcgcataattcatctgtgttttgctttgggtttattgatctaacttaatctctatttccttggattgatatgtaatggtggaatttctaaagatatataggaaggaagttggagagtttctagcaatgtttatgtttgattccaatgttgtggttctcaatggagaaaaacattatagaatctctgagaaattttatattgaatagccaattgctacaggattcttggttcggatctttcagtttcagaatctatatgtgttttagagttgttttttctttgagctgaataggtttagagagccaatctttcacttgattttcgaagcctatatctagttcattggttcgtagctaaagagtgtttctgaatccttgctgtaccatctgtgttaatagggtttgaagtctatgtttgattctatctttattctagagagcttagatgttactttttaggataagccttaaatg

SEQ ID NO: 26676 - DNA, 3003 bp, Unknown; identical to SEQ ID NO: 26675
  misc_feature (1)..( 3003): 2750-1469P.txt file - cDNA_ID_2715393; gDNA_ID_2213641; Annot_ID_132280

SEQ ID NO: 26677 - DNA, 3003 bp, Unknown; identical to SEQ ID NO: 26675
  misc_feature (1)..( 3003): 2750-1469P.txt file - cDNA_ID_2715393; gDNA_ID_2213641; Annot_ID_181253

SEQ ID NO: 26678 - DNA, 995 bp, Unknown
  misc_feature (1)..( 995): 2750-1469P.txt file - cDNA_ID_2715397; gDNA_ID_2936581; Annot_ID_194895
gaattctaagtattaccctcacacgtatacaaatataaccataaaacgaacttttcaaaagacgcggtttctcgcccgacaacaattacttgaataatttatttaactacaaaggaaattagtgtatgtaaggagctttgaccagttccaatgagaatcatccacgtctcattctttttaggctggatcttcttcttccatcaccgtccgtccactaccccataattcttgccttagaaggtttcactaattacttcgtcttcgtttttctattttgagatttgacaacttccccttttaatcatgtttttagttctgttggacaataccaaatcaattgcactggttttgctttctttatccaatcattttttcttttgtagttcattggatccatttttacatcatgtagagtagccattgttacaataccaaacaaagttagaaattgctaaatataattgttaattgatataataatcgtatatagttaaaactcaacttgttccatttctaatcttaattatgtttttttggaccgacatcattctcttaatgtaatgaatagccatttaaaacagagttgaaatataaattccaaaaatttctggcagcaaaagagagagaagagaaggagctattatctgcgccatctgtttctccaattaataatctccttaaatccggatttgttattaattctaatcttttccaattgatccactttcctcctctgagtttttaagactaatagagagatatatagagagagattgcttctggttttgccttccccctttgtttgacctctcttttctttcttcccccctttgtgtttcccgcattttctcgggaaaatctaaaggaacaaaaacattaaaagtttgtgattttctgattatttctttatttaatcgagacccattgtttctcgcctgatttggcgcaaacccttttggattctggtgaaaaaggttgggatcagaggaagaatg

SEQ ID NO: 26679 - DNA, 3003 bp, Unknown
  misc_feature (1)..( 3003): 2750-1469P.txt file - cDNA_ID_2715397; gDNA_ID_2213641; Annot_ID_132279
acaaaaatccgattacaaaagcaaccaagaagcaacagtactccagaatcaagtccaatggcggcaacaactttcttaaaccttgaatccacgactcttcctctttcctctggccttctcgaacttccttcccttggcccgaacatatggcttggagtgactgtgtggcacaccaggagcaggtccgaaatgcttcactgcttcacgtgaattcttaggtcctctaagaagaacctataacacaagaacacacaactatcaaattaaatatagtatccttaacaacttgaaaatggagaatagcagattggataagagaaataccgtgttctggcccaatggagctctgagagcgagctggtcaaaggttaagcattcacctccagctttctcaatgcgagcccttgctctctctgtgaacctcaaggcagtcactttcatggctggaatctcgtgtaccctcaaatcatcagttatagttccaaccaagacggcaatcttatcttcctataatatcagaacaagaggcaaaattcaaaatccaaagcatagacaatgtagagaattttgaatcaattatcgaacaccgccatgttacagactaagttcacattagcagattcataaactggacactgtatctaggaaatgtaacagattcaacatgacctaaaactaatttaaccataaagatacagtagagagagagggtttcaacgaattagtaccttgccagtcatgaactccacaagcctagatagagaaagaggagctttgttgactttgctcatgaaaagcctcttcaatatcacaccattgaacttgctattagttctccttaccagaaaccggtaaagctgcaaaatttcacaaacaaaattcagaacaattcactaaaataaaattaaaaaacctcttcaattggataatataaggcaaaggacaaagattgatgtttaaaattctgaccttgacagtaagcttgaggtagacatcatcagactttggagctgtccttttggtcttcttactcttacctccggcgatcagatcaataccctgcaataacacaaccaatcaatctcacaaacaagcatgaaagcaagatccaatctcaaaaaaactaagagagatagatcgttcacactctaacccgagactcaaatgtcagaaaaacaaacctaatacactatacaacatttaaaatgacaggaaacacccacaatctcttaacaacaagatttctgaacctttgatatcaaactaacaacagaaaatacttgtagaggaaagacagagagaaatgaagattgaacgacagaggaggagagaagtaccattgtcgtccggcgttgtggtgatggaaccgccgaccttctacatgaaaatactgatgctagggtttttataccaactcaattttagggttctcttacttcctccacgaaatgggcttagttattttcttccttcacgagatgggccttgaatataagaccacaataagtttggacttaaattctgtaatatattggcccatttatataatttttatttgtcaccatagaaagcctttccttttctttttctgaccaacatgaaaaaaaagcatttctgatgtattttcttacaaaccttttatatacgtaactataaaagattagttatattgatacaagaaatagtttaatcattgatgcatgccgtctagaagaaaagaaatattttattttgcttagaaaaaagaatgaaccacatattaggtgtagtatacttcatacttgttatcatgtatgtaaactactaatacataggtaagtatacttgtttacgcaattttaacctattattgttgatttcttgtcacagaaagtgttatgaatcaactttcaaataagttaaaatttactcgcccaaaaagaaagaaaaagtatcaattaatgttactaatcactgtctgtttatataattaggatggtgtagtggaacatgatgggaacccatttacgaattctaagtattaccctcacacgtatacaaatataaccataaaacgaacttttcaaaagacgcggtttctcgcccgacaacaattacttgaataatttatttaactacaaaggaaattagtgtatgtaaggagctttgaccagttccaatgagaatcatccacgtctcattctttttaggctggatcttcttcttccatcaccgtccgtccactaccccataattcttgccttagaaggtttcactaattacttcgtcttcgtttttctattttgagatttgacaacttccccttttaatcatgtttttagttctgttggacaataccaaatcaattgcactggttttgctttctttatccaatcattttttcttttgtagttcattggatccatttttacatcatgtagagtagccattgttacaataccaaacaaagttagaaattgctaaatataattgttaattgatataataatcgtatatagttaaaactcaacttgttccatttctaatcttaattatgtttttttggaccgacatcattctcttaatgtaatgaatagccatttaaaacagagttgaaatataaattccaaaaatttctggcagcaaaagagagagaagagaaggagctattatctgcgccatctgtttctccaattaataatctccttaaatccggatttgttattaattctaatcttttccaattgatccactttcctcctctgagtttttaagactaatagagagatatatagagagagattgcttctggttttgccttccccctttgtttgacctctcttttctttcttcccccctttgtgtttcccgcattttctcgggaaaatctaaaggaacaaaaacattaaaagtttgtgattttctgattatttctttatttaatcgagacccattgtttctcgcctgatttggcgcaaacccttttggattctggtgaaaaaggttgggatcagaggaagaatg

SEQ ID NO: 26680 - DNA, 3003 bp, Unknown; identical to SEQ ID NO: 26679
  misc_feature (1)..( 3003): 2750-1469P.txt file - cDNA_ID_2715397; gDNA_ID_2213641; Annot_ID_181252

SEQ ID NO: 26681 - DNA, 3003 bp, Unknown
  misc_feature (1)..( 3003): 2750-1469P.txt file - cDNA_ID_2715401; gDNA_ID_2213641; Annot_ID_132277
tgcgtttaatgttacgatgaagcagatcacggacgcagctaagaagtcgcagacgattatggagcttcagaaggattcaaggactaggatggcgcttgatcaatgcaaggagcttatggattacgcgttggacgaactaagtaactctttcgaggagcttggaaaatttgagttccacctgctcgacgaggctttgatcaatctgaggatttggcttagcgcagcgatcagccacgaggagacttgtcttgaagggtttcaaggaacacaagggaatgctggagagacaatgaagaaagcgttgaagactgcaatcgagttgacccacaacgggctagcgatcatcagcgaaatgtcgaattttgttggccaaatgcagattccggggctgaacagtcgtcgacttttggctgaaggattcccttcgtgggtagaccagcgtgggcgtaaactcctacaagctgctgccgcatattccgatgtgaagcctgatattgtggtggcacaggacgggagcggtcaatacaagacgatcaatgaagcgttgcagtttgtccccaagaagaggaacacaactttcgtggttcacattaaggctggactctacaaggagtatgttcaggtgaacaagaccatgtcgcatcttgtgttcatcggtgatggtcccgacaaaactatcatttccggcaacaaaaattacaaggatggtatcaccacctaccgtaccgccactgtcggtaagatatatattttggggatttttactcgttagattacaaagtcttagaagtcatctatgtaaaatgatgaatgtaatgtttattgcagccattgttggaaactacttcattgccaagaacattgggttcgaaaacaccgctggggcaataaaacatcaagcggttgcagttagggttcaatcagatgagtccatatttttcaactgtagattcgatggctaccaagacacgctctacactcactcccaccgtcagttcttccgtgattgtaccatttcaggcaccattgatttcctctttggagatgcggctgctgtattccaaaactgtacgttgttggtgaggaagccactcccaaaccaagcatgccctatcacagcccacggtcgaaaagacccaagggaatccactggatttgtgttccaagggtgcaccattgccggtgaaccagattacttggctgtcaaggaaaccagcaaagcctatctcggtaggccatggaaggaatattcaaggactatcatcatgaacactttcatcccagattttgttcagcctcaaggatggcaaccatggctcggggacttcggcctcaagacattgttctactctgaggtccaaaacacaggaccgggatccgcccttgcaaaccgggttacttgggctggaatcaagacattgagcgaagaagatatcctcaagttcacaccggctcagtacatccaaggtgacgactggattccaggcaaaggtgttccgtacactacaggccttttggctgggaacccggccgctgcaaccaccaccccaagcgtctcagctgctgctccaggtttctccaccttcacggatacaagtggcgctgactcaattgctccaacagcttccccagcagcttccccggaaagttcaattagcatggcttacacggggacagcttctccggaaagttcgattaaggtgtcttcttcaacggagacggcttccccggaaagttcatttacggaggcttcaacggcttccccagaaagttcaattatggtggcttcaacggagagctctggttcgtttttttcaatgtttacctaaaagattgattaagatggcataaaatgtgttttttctttactctaattcaagcaaaacctgaaaggaacaaaaatatttgcacaaccttgaggacttcaggattattggtattccaaattgttgacattaatgtttagctttgtaaactcatgtttaatatatcagtatattaaaatgctgtttataaatctattattattaactagtgcatcttgtaaactcatttatatgtagaaattagttcattactatgcgcgagctgttccaaagaatttcatgtgtcatctagtactaacaatttcctatacgaaattaatattcttatataaattattgacacaaccctcaatatataatatttatatatgaattgggacaagtttatgaaaagagaaagttggaaatagaagaagcagatcaatagtgaaaggtagtaaaagaaagtagttacaactaacctcatttacttctctgcattcattttagctccaccctctcatcttttaagctatagccaaatcatcttattctatacgtccattggaaaagttagagattcttttaccccaagttcgaatccgaaatctagccattaaatttgcatatgtactttcgaaatccgttgctattaagttttatatttcttagaaaaagttgatcagaaacaagttctttttaactctaaataaatatctgaagatctaaaattctaaatatatactcctatttgttatcataaagtttgaggcaataaaagaaaggtggttcccaatatatgcatgcacacaatcgcaactacccactagactacatttacttctctttacctccaaatggttactcgtcttcaccaattggcaagctcaacattatagatatacatccatctgtttattagttttgaaaactaaataaaagcagcgttataattgtcttttacatattgtgtttgatatttatttttgtgctgggtttcaatcaattttccaccaacttatcttaccatttaaaactagtattcatgctatctaaaaagataggtaaatagaagtaatattaaaagtaacttccctttggattctctatttatatcacttccaaattgattccatcacacatcttaaaaagtaaaaacacattcatctatccaacaaaaaaaaagaaaggagaaatg

SEQ ID NO: 26682 - DNA, 3003 bp, Unknown
  misc_feature (1)..( 3003): 2750-1469P.txt file - cDNA_ID_2715405; gDNA_ID_2213641; Annot_ID_132276
atagcacaaagcgatatgttatatatgttaagaaaggtgtgtataaagaaaatattgatttgaagaagaagaagacgaacattatgcttgttggtgacggaataggacagacgattattaccggtgaccggaatttcatgcagggtcttacgacattccgaactgcaaccgttggttagtattgatattttagttaattaaatcagtagttaattaattgattgattaaccttttttgtacttttcttcctttttggtttttgtcaaatttttatatatattagtgtgtctgaaaattagaaaagcatatatgctttctgcaatccgcaggctttcaagctttaagttatagtttttttcttctcataattcattcttttcttgtgctacaatatctaatccattacttaattgattgatcaatcttttcattaccttttaatattgttttggtcaaattttgtttactattgtctctgcaaatcatggaatattatatgcttttgctttctggaatctacaaactttcaagatttttacttttcttataaattatccctttcttatgttacaaataactactttttcaatatgtttttgttacttatgtatctaattaacatgattgaccattaattttggtttgatcagctgtttccggaagaggattcattgcaaaggacataacattcagaaacacggctggtccgcaaaaccgtcaagctgtcgcattgagggttgattctgaccaatccgccttctatcgatgtagcgtggaaggttatcaagacactctttacgcccattccctccgtcagttctatagagattgtgaaatttatggtacgattgatttcatattcggaaacggcgccgcggttttacaaaactgtaaaatctacactcgggtcccgctaccgctccagaaggtaacgataaccgcgcaaggaagaaaaagtccaaatcaaaatacagggttcgtaatccagaacagttacgtgctggctacacaacctacttatcttggccggccatggaaactttactcaagaacggtttacatgaacacttacatgagccagttggtccaacccagaggatggcttgagtggtttggtaattttgctttggacactttgtggtatggagaatacaataatattgggccaggttggcgatcatcaggtcgggttaaatggcctggttatcatatcatggacaaacggactgcattatcgttcaccgttggatcgttcattgacggtaggagatggcttccggcaacaggtgtcacattcaccgctggtctagctaactaattcaaaaaattttattttaccagaattattttagaattatgttattaatttaatcggttgtcatctatataatattcttgtttgagtagaaaacaaaaatcatgaatgtatagtgtatgtcagtatgtgtgtttaaatttataactttataaaaataaatggaaattatagactgcctgattatgcatctctgtaaatcatttaattttattcgtatctgatttaatttcattgattaatttcgcagtgatcgaaaaatatctccaaaaattccctgtcattttatccgtagatcttgtttgaaattttgagctgatttgaatcggacggatgaagaattataatatatgggctattggtctgccactaacttaaacgacttatttaattacgagtatccacgtacatcaatgtatttgtcattttcacacaaattaattcaaaccttacgtccggttaccaaaaaaaatatatatcaatttgaaacgaaaaaccaaagatcatgtataaatacacatacaattatacaaacatctcgaagtaaacttgtaaacatcaaccctgattaggacttagaggtcattcattacactttcctttttttgtccactctttctcatttttttatttttttattttgaatggatgggtgattttgctttgaagacattgtattatgcggagttcaaaaataccggacctggttcagaattatcatgtgattaatgaaactgaacctgtttggttcactgtctcgaactttatagttggagatagcttgttgccgaatatgggaactttttgtgtgtttatgtctctacctctgtgatctatatgaatgtggttgtgatcaaaattagaaagaatggtacatattgcataaaaataaatatatctcttctaaattgactagttaggtcatactatttgtcaagattcgtcaagaattaaatttactattcagtgcggtgaaaacggacaatattttcagtgtatacaaatgatttattttattttattttaagaccagagattgtttttaatcataatctaccaaaaaatcattataaattcgcacattgatgtatctagaattttaatatcgagaaaagggttttgataataagcaatgggaaaatcactatctttcaaaatcacaactgtaccgaatggtatgttaattagtagttaaaaaaacaaacacacaattaagacactgattaatccggtggagaaaagaacaaacaaacaaacaaacaaacatttattgaatccctaaaataagattaattattttccctaattagaaactcataaggaaacagagaagaccataaaaccacaagcctattttttgtcttttcaacagtttctcactagccggatttcccgccaagccttagaaaacagagcaaccaaaataacgaactcttaatttgtcataaccgttataaataagccatctagacaattatgaaaattgcacactcccaaggaggctacgtaaccttcgacggaggagtccataaaactcacattctcatttttttctcaaaagaacaacgaacagctcttatatttttttacaataattcttcagagctgtttaagttcaacaacaatttgattaagagaaaaccacataaatattaattagtgtaacgaaaaacacaaaacaaatatg

SEQ ID NO: 26683 - DNA, 3003 bp, Unknown; identical to SEQ ID NO: 26682
  misc_feature (1)..( 3003): 2750-1469P.txt file - cDNA_ID_2715405; gDNA_ID_2213641; Annot_ID_181249

SEQ ID NO: 26684 - DNA, 3000 bp, Unknown; identical to SEQ ID NO: 10287
  misc_feature (1)..( 3000): 2750-1469P.txt file - cDNA_ID_2715413; gDNA_ID_2213641; Annot_ID_132274

SEQ ID NO: 26685 - DNA, 3000 bp, Unknown; identical to SEQ ID NO: 10285
  misc_feature (1)..( 3000): 2750-1469P.txt file - cDNA_ID_2715425; gDNA_ID_2213641; Annot_ID_132270

SEQ ID NO: 26686 - DNA, 3000 bp, Unknown; identical to SEQ ID NO: 10285
  misc_feature (1)..( 3000): 2750-1469P.txt file - cDNA_ID_2715425; gDNA_ID_2213641; Annot_ID_181240

SEQ ID NO: 26687 - DNA, 3003 bp, Unknown
  misc_feature (1)..( 3003): 2750-1469P.txt file - cDNA_ID_2715429; gDNA_ID_2213641; Annot_ID_132269
ttacaagtgtatttatctaataaatctggttcgttttctgattgtttcaagggtttcgatgtggagtttgtggaagtggtgcgaggtatattttcagcaggatcaaggtcaaagtcgttcatcacattcatggctagggagaaacctgatggacctcctgttgagtatcaagctaaggtttggtgtacggttgttcgaaaccagaactatcccatcctctgtagacgggctctcacaacaaagcctccaagccaaaactagtaaaggtatggtttttgacccagactttcttttgctgttgatactttatatagcctgaattgttgtgcgtatttggatatattaagttttagatttagaaagataggcagattaataaccatctcagcgaattgtcttggctcatcatttctgtcactacaattatctaacttggaggatagctgaagtgcattgtcttattactatttgtttccatgctagtgagtatagggattaagggtgagaagtatcttctgactgtttagatctatttgaaactgtaaactgtctgtgcatgacttcagaataagatatctctgtaggtagacaaggagatattttcctcttctaaagtgattctagaaggccatttttattagagtcttaagttgctgacttgtttttatcactgttctctttcgtctgggactggaaattagactagcagctgatcgagaagatggaattcgctggctgatgcagaggctggagttcgcaccaggtcatctaatatgaagttgtttgtattcgacttagtcgtactaaatcacttctattgtgttgtgccaatatttatgttttaggtacttatctctatgttagctaaataactggtctaagagacttcaaattaaatgtttgtgttttataactttggaagcatggcatgtgtctcctttgatgcagtatcctcgcttttgggatttctttcttttattatgttttcatattatgtatgacacatgagtaaaaatcaaacatatccatccatatactaatatcaattacaaggatctaacaaaatgtaaaatcatggtagatagaaaacaataactttaacatattcaagtgatcaatgtagcaacctttctttcttcgatcacgctctgtacgaagtcaagggcgaatggaacaatttaattggccactctggcaatgatgtagcaatttcactgcgtggtgtttgaacacttgcaacattgtgtttactctcactttcattttgctaatacatttgctcagctaaaaataaataatttttgaatttttcttgcgttatatatattgttatttttatgttaaattaagatcaaaataaataaatttagagagcaatttttatttaatttaaagataaacacttatggtcgcacaaatatttgtgatattggtttaaatcgataagaaccgtttttgttaatcaaaaccgggccaaccctaaaaagctaaacgccggttagactaaaagagccaaccgccggataaaccaaaaaaacaacggcgtttgttttttcttctccttcttcttcaccctgcgtcgtgctctctcgaattcccaggtcagctacttggattcgtactctcaaaaaaatattgctttcgcattcctcttgtggtttcgtttctaaacgcgagtttctcccttttctaaggtctgtgttgatcccacccaaagtagagagaattaaacctaactgttcccgttttattgtagaattactgtacatatagatttaagtcgtgatctagttgtcgagaggctctgtgcagttgcgtagttcgcttaccctcagaaacgggctttgctgagtgatgtcaattagtagctagttgtgagctctatatgcgaaagttgtgtatttgtctctgattgctctatttctgatttgataaatctcagattttagcaaccagtctgaatcaattttatgaagacctaagagacctagcaattcaagaagaccaccaatcaatcctggaggcatggtacgatctgagccttgtgttctgttcgctcagacctttgttcatcctcaattggacgaatatgttgacgaggtaaccttaatttttagttaatgatacacttcaaatactgccctgttcttttggctagggagtgcctatgttggattagggttctgttttactagagtctcttaaacctggttaggaaatgcttgggtgaattactgactacttttacgggattgtcggaacaacaagtattatatgtggtggttttgtcattcaatggcagaagttacttgtttggtttcacgcttctgcggatttattttatgtttcctttaattcttataggtgatatttgctgagccagtaatcatcacagcttgcgaatttttggagcagaatgcttcctcatcttctcaagctgtttctcttgtcgggtatgttctttttttgactgtgtgttcttatatttctttctatattttaaccattgaggatcttgaagtagtaatatccaccattagaagtcttgttgaaatgcatggtcccatactctgtagctgtgatctctattgactcttaatgttaagccttttttttggatgtaaaagttcacgattggctattttcttgtcactggaaggtgaatgataagaaacctaaatttgtgtagaaaatctgaataacccaaacttgaaactgtaacaaaaaactgaactttgcagacatgatatttcgatccagtggtttcgatgaaatgtccagagtccagactctaaagttcagcttctttatcattaataaactttagtcactttcagagaaatctagattttgagtcaattcgtcttctagaaacaaaaatagtgaagcaatattgttagctgaaccacttgtagttagattttcagctaaaatgccagctttatattctttgtgagtgacttaatgtctgacaacatttcttgagcgtgggtgatgtctatg

SEQ ID NO: 26688 - DNA, 3000 bp, Unknown
  misc_feature (1)..( 3000): 2750-1469P.txt file - cDNA_ID_2715441; gDNA_ID_2213641; Annot_ID_132266
aagcaattggggcgttaaccgcagaagctaatgtgttcttaggttacactcattcataatctctctcctttatttgctccccacaaacaataatttcgtactttgtcctgctgagacagaacatggagtttcctcattgctgacaagttaccagaagcgatactccattataagctgtcatcaagaatcgtagagctcaatagctctcgaacaaactcactgcgtttcaacttctgcttgtgatcctcagctgaaagagaagtttttttcgcattcctatcatccacaaaaccttcatcagtgatccatacatgtcctatatgggtataagaactcaacttgatcaaagagtttcagtttggctcataaatcccaagtgtgcccaaaagtaaaacattgaagcaaatgttccaatggaaagttatagaccaaacacttaaaataacctagaatcatctaggttcaatcagtcttgaaataccagatttttactaacaagaggttaggcaaagtaaaatgattgagaagaagtaagcatactgttcgggtaaacactgaatagttgttttcttgacaggacccgtttctgcagatatgcatgactccgtggtgaagaacccatcagcaataggagaaatgaacgacgataacaatgggtcagcagctacattggatgatgaggaagacgatactatacacgaagatcctccaaagaggctctgaaagtttccatcaggaaactctctccttaagatcgataatgtggaatatgacccgcctcttcttggttttctcttgcggtgcatgtaatattttgtcaagaacacaacttaataacagactatagaaacactgatagaaaagattgattgttatatatgacttgggagaaagaaaaaaaggatatcttgaaaatattagcgtgctgaagggttatatgagcaaccatgtcaacacccaccctaaccgcacaaactggacatacctgcaataacaatgttcactagattaaacgctaagttttcatagaatccaaacaaaatcccccaaatatcagatgcaatagatacagctgatcctactattccttcgtgaatcggctataaacatgctattattctcagttttctttgtcatatcatccaagtaacaacagaggaggaaccaacaccgctcagtctaaacttttgagaatcatgtgatgaatcagaaatgtataaacgcatctttatgcttcaaatggttgttttaaaaaagaaataagaaagttaccccatttttggcttccataggatgatcttcatctatgtggcagcagagagagacaatatcaaaatagtcagaacagaaagggcaagcaaactcttccctgaactcttcttctccatctatctcttcaaaccctaagaatgtatctgcaatcccaaaaacacatcaaccaaatatttatacagcaaagctataagaaaacaaagagagtaatcagatatactaaacccctactctacctctgaggttacagtatatgaaacatattctcctcttctgaggagaacaatatcttcactttctcatgttcataaacactgagcatagtagcatcacaggagtaattaaaatgctaacaaagactgcaactttggataattttcatccattttctcaggaatcgagcaaaaccagaatcaaaccatatttcatcagtcaataaaaatcaattacaaaagccccctttccttcatttttgctagtatcaagcaaagcctaaggcgatgaaaaaatgacaaaatacgaaatctttcaaaacaagatcgaagatttctcatatatttcttaatcttcaaaacagagattctaaatcggaaagaaaacacaagtctatcacctaaactaccttcgcccatcaattttcagacgaaaaaaaagatcagataacaatcatttagaacagagggagaaaaaattcatatcatttaaactaaccagatcgtgatggaaaagctagctggtatctcctcgtagctgaagcgagacgatcactccatgaatcggaatccattattgacaaaacccggaaaacaaaagtcgaaagttttgtacttttttccttaacaaataaaacgttttgaagaaaatgaatctgtatacgaaagtaaatgattctgattactgtctgaagaaatccaacgaaaatggtaaagacagattatgaagaccacgattctgggtcggtttattaacaaagttttgtctttctttttttcttcttctcctcgttttaattaattttggatagagagtgagagacagaggagacaagttctataaattatttctttaaatttatgttttttatctaaaagaaattaaaacgtttgctttcagtgatgaatcaaatatttcgcggaaaaatagaaaaacaagaaagtgttgggccactctataaactctttttgtaaagtctacgaaaatgcatgccgtttttattattttacccgacgtataattgcattcagaaacatgacgtttccaaataaaacgtcatgctgttgtcttttagacacgtggcgtgttttcagtggttttatttataagatttcgcagttaaagatgcacgcaatagcaggagatttttagccccgttcttatgttttttctgacttgtgacttttttttttttttttttttttgggtcaactgtttatttatttatcgattggatgttttaattaattttcgaaattatagttaaatttccaatttgtgaatctgggcgctgtttttctccgtcggagaatttgatcccgccggagatcggccggtttccgcagtcgcattcgtttctttcgcgcgattttcgatgctttgtctatgatgaaaccgcgatcctgtttagatctatagctttcgatcggaagggaagctaaaatccatctagacgccgagatcttggttagctatcactgagattcttatagggtttatatttgagctgttatg

SEQ ID NO: 26689 - DNA, 3000 bp, Unknown; identical to SEQ ID NO: 26688
  misc_feature (1)..( 3000): 2750-1469P.txt file - cDNA_ID_2715441; gDNA_ID_2213641; Annot_ID_181236

SEQ ID NO: 26690 - DNA, 1709 bp, Unknown; identical to SEQ ID NO: 10316
  misc_feature (1)..( 1709): 2750-1469P.txt file - cDNA_ID_2715453; gDNA_ID_2213642; Annot_ID_132312

SEQ ID NO: 26691 - DNA, 1712 bp, Unknown; identical to SEQ ID NO: 10318
  misc_feature (1)..( 1712): 2750-1469P.txt file - cDNA_ID_2715453; gDNA_ID_2213642; Annot_ID_181316

SEQ ID NO: 26692 - DNA, 3003 bp, Unknown
  misc_feature (1)..( 3003): 2750-1469P.txt file - cDNA_ID_2715467; gDNA_ID_2213642; Annot_ID_132308
acactaaaaggataaacgtgttcccaaacatccttttgtctttgatgtcaagtggcaatgcgacaaaattgcaacttattattatatcacctatacatgacaaaacttcaattattgtttagttactttctcattctacgtatattttgttttaatacaaaaaggtatcggagctcatttctcttacatccattatctaaagaccgttatctgataagtatcttgatatttttgatcggtgtatataccattttcgtaaaaatgtaactaaggtactttagtttggattcgaatctagcggaataaaactaccattttccagctgattagaaatttagaaaacgatcagctgtttggactttgggttagatttcttttttgagtttttttataaaaaaattaatttgtgtggtgtgagctaatattttttttttggtatttgttttgttgacagcgcaaagcgagcaaattcttatagtaagtgataaatatagtcaaatgttctaaagcaaatactaaaatgaacgtggaaatttgatcaactgatgaaacaagtcaaatgctctaacattcctttttcacacgtttatatcataaaaatctataaccatacaaaaaatgtgtgttcaagaattagtaagattttgttttattcaaagtgttaaatgatcgttcggataaattttgtagttattcaagggaaacatcagattactgtacatacagtgtcggtaccactggccaaagtcatctgtatttgcatttattaatttttgaaaaacaaaatacatatttttgtcaacaatcaaaacatacagtacatacatatcatcgatatggacaagtaccatttatgggtccacgatgaaaaggatatctaacttacaaatcgaagcccaagtttgtttgtttttttggtcggtcgaagcccaatacataggcctaataaagttttacaagattgttcagttgttttttcaacacatgatttttccccctaacaaaagcaaaagcatgaacaaacaaattacaactacaaaaaaaatcgaagcccaatacataggcccaaaaaagtttttaaagattgttcaaacaaattatattacaattgtttatttcgacaaatgattccccccctgaacaaaagcaaaagcatgaacaatctccaaagacacacacacacacccgagtgtagaatgactagagaaagatccaagaacccaacataataaaagagtaacactaaaactacaaaagagcttcactttgcgaagatatcaatcgaatcggatttcaccgataacaatcgttttctctttaaagattgttaccacaacctcagtaccgtgtcccaactgctgcgaaaacagctactggaataagaaactgataggcaaaaccggagaccgagaaggttcttcttgcactgttcttgttaggtgctgcagctggtggaggaggcggtttctcaactaaaacagcgagcttcatacctccgtaacatccaccaccattaccactaatcagatagtaatgccttgtcacattgagatgaaccaagtcccttccagctccacgactccaatttgcgatcgggttattgggattgcagcttatgtagttcgtctcgttcacttctataacgttgtattggtttctctcatatacaaaatctgaccagacacaatgagaatgaaacactatataagtcaacaagattcatgatttgagatcttactgaagtacagaaccagaacctaatctatttccaattacaaaggatgctgtgaaagaagcatccttttttttaataagaaaacagagctagtgaagaaactagtggtcctttttcaaagttgtaaaatttgaaaccattcatttgccaactgatgtaaaacgtatattaagtccgaaagcctgtgataacaagtatcaataagagttagagagcgtacagagccaatcgtcgaggtagaaatgtttgtcctgagcccaaatggtatagttgatattaggattccagaacttgttatcacccaccgtccacctcttcgccgtcacattcgtcgccgccagcagaaaagccagcaccgcccctgcaaccaaaaccgcaactctcgccatcgatcagtactctaaaaaaaaaaggatgagtcgtcgtttgtggggggggatgggtttatcgaagttcaatctgagagataaatatgtctctttttcagggaaaagatctctctagatccgtaattccttcgactaaccttcgaaattttaattaaacctcgaggttgacgaaaagtacaagataagcgttatgtaattaaccaaaagtaatattttccttttcattttggtcatatttcttaccttttttccggatattaatttcctttttttagtcatccagttggtctcaattgcttaatcataaagtcaggatttatttacttaaataacatagtattgaaataaaacgaatcttataaaaatgtgtttaatcgatgatacttttaaaagttgtaactatatacagtatactgttgatagccgttggggaatttcacattttgaatgccatgtcacatatgacaagtagcttttcgtgttctattattttccatcatagcttccacgcgcaagcttgaccaccgccattaaacttggtaatttagtataattcacatgaatgaattagtaattttgttaaaatgtgtaaattaaaaaaaagaaattgagaaagttctctaatgttcctttcagtttgaccaagaatatattcttaatttgtttcctttcttttgacgtttcaaaatgatataaacggagtaacattttatgtccacacaatatttcttgtaatatccacgtaggatgaaatatccatttaaaccggtccacgtgtccagacatcagcttctagttccattgtacaataataataaaaaaaccttacctgaactaaaaaaaaaaaaaaaaacgaactgagaagcgaagaagaaaatg

SEQ ID NO: 26693 - DNA, 3003 bp, Unknown
  misc_feature (1)..( 3003): 2750-1469P.txt file - cDNA_ID_2715477; gDNA_ID_2213642; Annot_ID_132305
attgaaacagtctttattagcaggagaggtgagaatttgtctttttgtgactacttgcattcttcaacatattcattcctttttttttggcaaacccttttaggaagttccagctgcttttgtttcctttaggacaagacatggtgctgcaatagcaacaaacattcagcaaggaatagatccaacacaatggctaactgaggcagccccggagcccgaagatgttcattggccatttttcactgcatcgtttgtgagaagatggatctccaatgtagtggtgcttgtggctttcgtagctcttttgatcctatacattgtccccgttgtattggttcaaggtcttgctaatcttcaccagttggagacttggttcccttttctaaaaggaatattaaatatgtaagtaaagccctatttagataaagatggttcttcgtttcaattgaacaattacaaaatcttcttttttttcttatgattgcaggaaaatcgtgagtcaagtgattacgggatatcttccgagtctcattttccagcttttccttcttatagtaccacccattatgcttctactttcctcaatgcaaggattcatttctcatagccagattgagaaatctgcatgtatcaagcttctaatctttactgtatggaacagtttctttgcaaatgtactgtccggatctgccctttatcgtgttaatgtgttccttgaacctaagactattcctcgtgtgcttgctgcagctgtgccagcacaggtaaagaacacaaaattcagtattgaggtttccggaattcccttttcgtaccacgagtcatgtttattgtttaatctttggtgtaggcatcgttctttgtatcttatgttgtgacctctggatggactggtttatcatcagagatcctccgtttggttcctcttctttggagtttcataacgaaacttttcggcaaggaagatgacaaagaatttgaggttccttcaactcctttctgccaagaaatcccaaggattctattttttggactcctcggtataacttacttcttcctttcgccattgatactgcctttcttgttggtctactattgtcttggatatatcatctaccgcaaccaggtaacggaaccaatctcactcctaagtataattctctgttgatctctgataaaatcatataggaatcagctacacatattttcgttatatggaatctcacttttatcttctctttatatgtgatcccttttctaaattctcgaatagcatctttaaaccgaaagtattttttggagcttcagtcatgacataaacgttacatcaagaatccattttctcgtcacataattctttttcttcttaatgaatccattgcaacttgttgatagaaataacatcacctttttgtgctgcagctcctaaacgtatatgcggccaagtatgaaactggtggaaagttttggccaatagttcacagctatactatcttctctttggtactaatgcacattattgcagtcggattattcgggcttaaagagcttccagtggcatcttctttaacaattccccttccggttctcacggtccttttcagcatttactgccaaagacggtttttaccaaatttcaaatcttatcctacccaggtaaaggctttagagaaatagttactcatatttttgatccaatggaagaaaaatatggctagataatcttttattcctaacctaaacaaaacaaacagaacatgatgcatagtcctttattacattacagcatctactctaaacctttatatggtgatgatggatgttttacttttgcagtgtctggtaaacaaagataaagcagacgagagagagcaaaacatgtctgaattctattcggaactcgttgttgcttaccgagatcctgcactttcggcatcacaggactcgagagatatctcaccttgagatcacctttttacttgagctattgaagtttgcttatgttgaagctgttggtttactatacctggtgcaatccatgaaagaacacactaaaccggttgtcttgtacattgggtcttaaccgagaatcaagcggtttttgtcttgtacatttgcttacacttggcttgtgtaaaaaagaaaaaaagtttatgtcaatgtatctctctaaaccggtttaagacggtacaaactttttgaaagatgccaaaacaaaacggtggttaataattttaccacagagaatatttagcaaaaagatgatgactagatgccacgtccgcatgggggtatatattgtaattagtcgtaactctgggggtaatttagttaaagattgatccgtttatggaaccaaaaatcaaataatttcgtctttgatacttgcttgcgccttataggctacaggagcgagagcaatgaaagcgagaggaagaatctatcaataatttctgggtttaagctgatctctggatcttcctcaattttactttttcagctcagaaaattttgggacttttttttgctgcattttttggttccgaattttctcctccgccttttttaatttttggtaagtttcgatatctctcaattttcttatttcggaaataaaaaaaattctcgcccttttgcaaatcaatggattgatcttgaaatcgtcatttctgaatcgggtacgagagatccagtaatcctctgcgattgaattattattagggttcatattccgaattggggatagtctgaaaattgctattttaagctctcttcttagtgttggttggtttattctggataataaaagggatcctaattctcgctaaattctcatgttcaaacgagtagatgagtttaatttagtttcttcaacgatcgatcacagaatcttcaaaagtgtaaaaattacttgctttttgttcctattactcttttgcagtttgttttgtgtgttgtgtactagtagatctaatatctctctctctttttttgtagagaatg

SEQ ID NO: 26694 - DNA, 3003 bp, Unknown; identical to SEQ ID NO: 26693
  misc_feature (1)..( 3003): 2750-1469P.txt file - cDNA_ID_2715477; gDNA_ID_2213642; Annot_ID_181309

SEQ ID NO: 26695 - DNA, 3003 bp, Unknown
  misc_feature (1)..( 3003): 2750-1469P.txt file - cDNA_ID_2715488; gDNA_ID_2213642; Annot_ID_132302
tcccaatccttattcattcagattgtggaatctaattttctactatgatgtgatttgctaataagttatgatgataccaacaaatgcttcttcttcatatgcagataaagaagaattcgcagattaaggccgaagcaaaggctcatcactaaaccaactcttcttctccttctcaataagattatgaagccaagtgattgttatctctaaatgtagttcttttcctccttaagctatatctccctcggtgacattttttccatctttctgtttttttaatcaaaatcttctgtctgacaaagcaatcgtatacccgttttggtttaaacctgagttcttctttggtactttcctgctattcaataaacaccatatttttatcatcttaaccagataaataatttataaaaaaaaaaaaaaaaaaaaaagaatttttattgttttcaattaaaataaataaatatccgccgtggcgcagagttaaaagtaagcagttggctattcaggacgaccaatgtggtcactgcttggtggcaagaacaagttgtgttcgagctatacaaggtcgtggcttcgaacattggtcacactcacacattcgctgtctctctttctcacgtaatagaggcattcttaaatgcctttttctgttctctttcattctctacaatttattaagttatttgaacttattgtagaaacctaaatgtttgcacccaaaattaaaggttacaagatgagtatcttctttgagattttgagaagagtttctctatatggcgttctatgtctagtttgaataatcaaatcatcatttatattcccatcttgaaactttaaaatcactatccatagaatattcaaaaccataccatgaacactacaataatacaatactatataatatattcatcattatacttttaatgggagtcatgggacacgcagtaatcggttaatttcattgtgttggtgctttcttcattggacggatgagaacttaaagaataaattagtatgattttcaacatttaaatataaataccacttgaagtgtttttgtggtccattggctaccatcaacttgaggtatattaagtccctatatataataactaactaacataagttttggatttaaattactaaaagggtaaagaaaatataatctttactattaatagaaaataaataaatatttttatacaatgaggatattatataagtctaaatcctgagttaaaacctcaaatcctatgtttttttgttgtcattgcttggacataacatattgtttcgaccaaaaacaaaaaagaacataaaatgttcttaagattcaagttctttttcatatcaattaagaaataacttacggcatctttaatttatgtttgttttgatcaatcacataattatagtgaatagtatatttttagtgctattacctatccttacaaatccataatcgaatttcaaagcaacgcgacctaccctcaggtctcaaaacgcacgttcaccaatacaaagtggcattttcgtaaataacattaagaaaaaaacaaattaaaacagttttgtaataagatcaataattatatattattagatgactcggataagccattcggctttggtctttttgttattgccaacaattaagctcaggcttacgaaagtgattgtctgattgacgttttctttttcatttccttttttggtccctgaatacaccttttgagtttgaggtatatctgtcctctttcgaatctttttcttagtgattcctgattattaagaccatctccatcaatggtttctcattaaaaaactgttcaatataaaaataaaatataatcaaaaagtatgagagagagtagaattagtctttcaagtgagaaactctgagaaacccataaaaacacttgtatatcatctatttgtcaaatattattttattgttaaaatttaattatataactaatatttattaaaatacttatatcttttattttttagaaactaagaaagtatctcactgatggagatgcccttaatacaattcggtttgtatttatttctatttttcccgtaattttatgaccctgtaaaaaagttaccgtgtttttttttcacttttcttacatgacataattaattacaaagtatccatcaccacacaaatcaatacaaagctttttgaagtgtgatggtgtgtttatttaaagactttgaagtttggacccagaccattatcacacaagtggaccttattttatatttcgggtccagttgttagaaatttctttttacactgaattcattaattaaaaaaacaattatttaattagtacattttgatcgttcgttttcatgctacatttgagttttaaatagagaaggtctcaaactcacaactatttttttgactttaaatgtataaattagctgcaactttaacaaattgtgagtagttgtagttgcctagattctatttgaagactacagaccttaaaaaaaaaaaaaaaaagaggtcatagtcaaaaacaaaaaaacaccacatttggtaaatttatgatgtgttctctttttaaaaataaaataaatttcatgtaaaaaatctgtacgttcaaaatatctcaggtgattaatctgtaagtacaaattttaattttcaacatgaaattgaatgtttaacaataatgagtagttggaacttggattgaaaactcaacaacaactcattgtttggataagtaagtagaaatctggcaataaacgtattctatttttgtaacgtagaaaattagaaaaataatagtaagaggaaaaggcatggtttagtctggtcaagttaatgtaaaccagagtggttaaaaacaaaacgacaaagcaatttggcttcttaaaaacccgcccatggagaaagccctcacgcacctctaaaccacaaacaaaaagagagagaagagaacgagagaatcattgagaaacgaaacaacaatg

SEQ ID NO: 26696 - DNA, 3003 bp, Unknown; identical to SEQ ID NO: 26695
  misc_feature (1)..( 3003): 2750-1469P.txt file - cDNA_ID_2715488; gDNA_ID_2213642; Annot_ID_181307

SEQ ID NO: 26697 - DNA, 3003 bp, Unknown
  misc_feature (1)..( 3003): 2750-1469P.txt file - cDNA_ID_2715504; gDNA_ID_2213642; Annot_ID_132298
aaaaaaaagaaaattactaatgaaattaggatatggttagtaaattgtagattaatgatttggttttgtatattattgatgttggtcatctagatataaaagtaaagacttacttagtccatagcttctatcgcggctgaggatgtcataccatctcattctttcgcaatatttcttgtatacatggtcatcttcaactccttgtgtttgaatattctctatcgtaaccgaatcttggagcgctgaatccaagcttgcaatagataaaggcgagggatgatctcttttgctagaaactagaaaagatagatcattctccacgtctgagtttacaatttcttcttcttcgtcatcgttggttaaagaagcttcatcttcttgatgtattggcatagtttgaatttcgaactcaagattcttctccatgtttacaccatcaaaaatgtcaacgtcgtgttcctcctcaacctccttagcatcaagaagctcaacaacatcttcttgatcatattcatagaaaaaatcatccacatcttcttcttcttcaagaatcttgcctttttgcatagatatacgaacttttaaatgactatccacttgatatttaaacgaaaagctaaatgcaggaaccgggttatgagtacttgtagagagttccaagttatcaagggtattcttgatctcttgcctagactcaatatgacaagtaacctcctttttaaacataatgactcggaaagaactactaactagcttagagaacgtgaacaagaccgatgaaaaggcgttgtaaagagcttgaaagggtgggagaagccataaaaagaagagataaagccatataagaagttgacaaagaaagagaacaagagggtgcatgtataatttcatgtaagacgatttcaagaaaccatcttgaatcactatggattctatcattagccaacatgctgagagtaaagccatcaaatgtctgagagagagatgagagaggggggagagagagagagagactcaagagagtgtctttataaagaagaagaagaagctgctgagaaagagccttgttgaaatatttcccccaagactaatcattaataaataaagttggtaaaaggtcaaattgattatcttgagtgttctttcctatcagttccaagactttggttttaaacatgtttggaactatccggatattgaattaaacttgttcaatttgtaacagaaaatattcgtctttagtgaattaactaaacctataaggccatgtattggctataatcatcttttttaattaaaagagccaacttgaccctccatagttgtaactgttaatcacttctcaagctccatcacaacgcacatatgaagaacatagaaaactaacaaacacacatgatgatgttcttcaatgtaagtaacatctctttcgcaaccttcacaattgaaaacctaaccagatcataccatattcaacatcaatatctatttcgatagggctcgatcccgaatgcgaaaaaaagcaagcaaatcagagagtataaccaaaatgttcttcactataacctggttcccacaatatccttacaatgcttattccaattgtacattatttaaacacatggactataacatatataagtttttgtaaaagagtgtgtatgagagaataaaactaaccgaagaaaagtgtagtgatccaatctcatttccaaagattgaacctttttttatatatataataactttgttcgcttattcatttcttgatcttcctctgctgcttctttggcccggaaacgactaatctccttacagaacaaccacacctcgctctgaaaacaagcacggctcgcccattaggcggagccatcttcttcagctcagcttccaattcacggtgatgaacacgaggcaactcaaacattcccctcttgttgctggagctcttgacgcattcctcagtctcaagctgaatatcaaactcaacagctttcctaaggcctttacaattcggtttgccgcatctctgcatagtacacaagagtataacaagccaagtagagatggcagcacagaagatactcaaagctaatgatccatacacaatcgggttctgcaaaatctcttgtttgactaaaagagagagatctgaaaagacctcaatcgatttgagggtgatgagtttgacgtaagggaagaagaggaagccgcaggcggtgatgaccgcgataaggatcacgacgtcgatagcagcggactgagatccgtcgcagacagggaatttggaacaggttggtgatgatgaagatttattacgggtgtttctggatttaggtgaggagtgagacatgatcattgggtcgacggaattgcagaccgagattgagctatgcaaatataccatctcactcacaaacacagagaggccttgaagataacaaacaacaatccaatcgaactagtgatagagattggatctccacgagtttaatcagaatcgatctatgagactagatttgaatcccaattcttcagatcgagcataacgtagagaaatatccaagtcacctgattgaaaagctcggtttcaatctgatcgacgaaatccagcagatgaaaaatcttcggaacttgtcggttactacaaactgatcgaatttcgatccgcacgaggttgaaggttcgtgaagccgattgaaattcaacgtgtagagagaggagactgaatcgtcgtcgtcgtcgtcatgatgaagaattcaaaattttaatctctttagtgttttaggttccaaatccaatcggaatcaatgtgaatagtagtaagtttattcgtctagtgacacgcaggcttttttagataactcttttttacacatgacgtcatgtttttttttttttttttgagcagacatataaaaaccctaattttccgattcttcttcgtctaccagagtcctaaaaccctagaagctccgttgttcctgaatcagtctaacgatg

SEQ ID NO: 26698 - DNA, 3003 bp, Unknown; identical to SEQ ID NO: 26697
  misc_feature (1)..( 3003): 2750-1469P.txt file - cDNA_ID_2715504; gDNA_ID_2213642; Annot_ID_181302

SEQ ID NO: 26699 - DNA, 3000 bp, Unknown; identical to SEQ ID NO: 10308
  misc_feature (1)..( 3000): 2750-1469P.txt file - cDNA_ID_2715508; gDNA_ID_2213642; Annot_ID_132297

SEQ ID NO: 26700 - DNA, 3003 bp, Unknown
  misc_feature (1)..( 3003): 2750-1469P.txt file - cDNA_ID_2715512; gDNA_ID_2213642; Annot_ID_132296
caccgcagaccaatgatagtcaactacattttgatgttaattaatctcaatcttctaaccacaaactcttataatattgcaagttagtttaaactacttacataattgagtataaaatagcttcaaccttcatcaacaattcattatcaatcgagcaaaaaacaaaagctaagagcaacaaactaaagattttttaagaaaatggcagcttctaagcgactagttgtctcttgcttgttcttagttttgttgtttgctcaagccaattcgcaaggtttgaaagtaggtttctacagcaaaacatgcccacaactcgagggtatagttaaaaaggtcgtgttcgatgcgatgaacaaagcaccaacacttggtgctcctttgcttagaatgttcttccacgactgcttcgttcgggtatgtttctgtaataagtgaaatgaataatgattttaatatatttcatgatgtcacgttcttaataatgtgagtgaatcgtgtatgatcaacagggatgtgacggatcagttttgttagataaaccaaacaatcaaggtgagaagagtgcagttcctaacctaagtcttcgagggtttggcatcatagacgattccaaggcggctctagaaaaagtgtgtccgggaattgtttcttgctctgatatcttggcacttgtcgctagagacgcaatggttgcagtaagtaattttcacataatacaaaatttctacatatatacaaatataatagagctctcttttaatttattatatatcctgaatatgttaatttctagcttgaaggaccatcatgggaagttgaaacgggaagaagagacggtagggtttctaacatcaacgaagtcaacttgccatcaccttttgataacatcaccaagcttatcagcgattttcgctcaaagggcctcaacgagaaggatctagtcattctctcgggtacgcaaaagtgaattaatgatatttactatagtctgaaaaatgaataattaatgatggagaatatacatgtttttctaaaggtggtcacacaattggaatgggacattgtcctttattgacaaaccggctttacaacttcaccggaaaaggagacagcgacccaagtttggactcggagtacgccgctaagctcaggaagaaatgcaagcccaccgatacgacgacggctctagagatggatccggggagtttcaaaacatttgacttgagctacttcacgctagtggctaagagaagaggacttttccagtcggatgctgctctactcgacaactccaagactagggcttatgtcttgcaacagataagaactcatgggtcaatgttctttaacgactttggtgtctctatggtgaaaatgggtcggactggagttcttacgggtaaggccggggagatccgtaagacgtgtcggtctgctaattaagagatatagaaatgaaaatatctcaatatatgtgagtttgattattattgtttgcttcttttattttgttgtcatccctatattaaatgtgattgttttcttgggtattgtttcttgggaataagctgtatctaaaatttataaaagtcttgaaagttcagaatgttattattaagttataacgtttagtcattttgaaaagccaaaaaaaaaaaaaactgaatcaccatggatttgaatattgagaccataattaagttaaacaatgtattttttattattaattaataataaaagttaagatttgaaggaaaatggttaaaaaccaccaacttcagcagaacatctgttccaaactttaagaatcctgggacgacctttagaggcaaatggtttgtaataataagtctgaaacaaaagattcctcagcaccatgtgacattcttggccatatatgatcattttcagacaacaatacctcgaagttggtatgttttgaagaatctcagacatgacttgatcgctacatttttctccccccatcaagccagcgcaagtcccggcaaactgaacaagttctgttgactgtttattaagcatgtctatattgtattcactcgtactcggagatcttgcaaacgtggaatctaaatcaatattgggatctatcaacggtttctcatcatctgccaaacttggataagcaaacagtaccaacgtggtgattagaacaaaagccatgtaaacgtgattatttttcttcatttttttattttataacttagcctcctctttcacctatttactccttgtaaataaaatttgtatgtgtatagagattatataccctaaacacacagtagtcaactgaatgttattaacttatccgttatattgtaattaataaaactacgttttgtttctttgtttgttttctattaacaaaaaaaatgatttactctataaaatttgacgtttttttttgtaataaaaaatatgttcagttacgttattactattttatgtattaaatgtaaaattgaaaaaatgctttatggaattctgaatttcttgaaaacaatttggagggtggcccaaatcatcaattttcttttaaggtatttattattcaataaagttttattccggagttatgctaaagaaaagagtgtcgatatctgtattttgtggacgatttagattacgaagaaaatctcgaggaataaaaatttatgtggcgagagatcaattgcatcataatattatgctcatgaatcacgcgagagtttatggtgatttcgctcattgtgtccccattctctcttcttttgtttgattcctcctccctcttggttaacaacaacttcactcacaaagcattcccttttttatttttatcgctactctccgacaaagccttcttctttggatcatctagtctaggttcggttttctcaattagctctgttcgatttcgcggatgaaacttgttcaagtttgtgtctgatctgctctgctctgctcatacttaaaaaaggaaactttatttttctgtaaatg

SEQ ID NO: 26701 - DNA, 3003 bp, Unknown; identical to SEQ ID NO: 26700
  misc_feature (1)..( 3003): 2750-1469P.txt file - cDNA_ID_2715512; gDNA_ID_2213642; Annot_ID_181299

SEQ ID NO: 26702 - DNA, 3003 bp, Unknown
  misc_feature (1)..( 3003): 2750-1469P.txt file - cDNA_ID_2715516; gDNA_ID_2213642; Annot_ID_132295
tgttttcaagcccaagtaattagtgaggacattttcgtcaatttttcatcggaacgcaatttagcggttaacgccttaaccgtcgctcagaaaaaaaaaaaaaaaaaagttatcataaactttggcgatatgaatttacacggcgtctcgggccatcacgagcctaattccgaacctccaattccgacaggttcgtcgagtccgaagctgaagattagtcccaaattgaatcggtggtctaggggccgagctttaagatctggtgttaagcttgaccgtccaattccccgttccgataactcacctcgccgtcaagtaacggaagcccaaccgaccgatgaggctgataagaagacgacggcgatcgacgtggaggtaacggcgggaaagtctatatatttggtttccgacggaactgggtggacggcagagcattccgttaacgccgctttgggacaattcgaagatttttcgttgaatcgtggctcttctgtgaatacccatctcttctcctgggtaaatgaaaatcaaatcttcttactttcaggaaaaaatatgtcctttcttagaattctctgtgaatgttgctagtagaattgctcataggatagataaaattggatcattacatggaaactgattatatcttagtgaatgctagttgcaattagtgatcatctgagcaagaaaaaacttgacttttaaaccgaaagtgttaggttttgagaattgtcattactttggttttgggttggggattgatcaggttgaggatgaggagaggcttatcgagattattaagcaagcggcaaaggaaggggcaatgtgtttctacactttagcaaatccttctatggcaaaatccgcaaagcaagcttgtgatcagttgggtgtgctttcggttgatattctaggaccaatcatcgaagggattgcgtctcacttaggtgtttctccgtcaggtcttacacgtggagcacctggtagggtcaagactctcaatgatgcatatttcaaaaggattgaagccattgagtttaccattaagcaagatgatgggactttacctgagaacttaagcaaggctgatatagttcttgtcggggtttcccggacagggaagacgcccttgtccacttacattgctcaaaaagggtacaaagttgctaatgtgccgtttgtgatgggcgtggaaccacccaggacgctctttcaggttgaaccgagaaaagtttttggtttgaagatccagctcgttgtactgcaagcgattagaagaacaagggttaaaacgctaggcgtagatacagaggcagagaacaattactcggggattgatcttgttcggaaagaactagatttcgcgtcaaggatctatgagcgaaaccccggatgggcagtgataggtaaacaaaacttaaacaccattctcatttgctactcaaaatgctgtttttttctttccttttaatgctagtaagaaaaaaagttaacaagtaggcagagtattctcatgtgttattcttggggttgtggcgcttgcagatgtgacgaataaggcgattgaagaaaccgcggctgtgattctgcggctgtaccatgacggtagagacactagtactacggtaccgcgtatctcaaaacgctactaagcacactcctttgaccgtagagaggatgaaacaccagtgtcgataaagtatcaagtgaataaagtaatatatgtctataataataagttgaataacaaatccaaccgaggcatgatgaatcatatgttttagtcaacgaatgtaagaggatgaaggataacgaaaactaataattgtggctactctgaattcttttattactagtctataaaacaaaagaatatctgtcattagcatttagttgcaacgttgcaatttgggtgtgtttagcaagttcaagaaaagtcatccaaaacttaatgtcattttagttaatctattttgactctttctattcgtttatgaatgaatatttcggtaattaccaaaaaatcttctgattatccaaagtagatgatcagagatttgtgtccatcttcgatttatataactaattagtgatattttcttcctgtaagtaaacgatgaacctggaaacatgcaaggttttttcgactgtcaatttatgtggatgattattgctattcaatctgttcatccacatgattaataagatgctaattggtaacacatggcgtagtttagaaaaggttaaaacgttgcggtcaaatgattgacgtaattggaagaacatgcacgaaacattacaggaaacctataatgcatggatgcatgtgggatcaaataattgttatcgataacgtccaagtatcaattgatatgcatatatgtagatattttaatctacttgataagataaaaacttaattttaatttaagttattcttccaactgttgttggcaaagtattgtcccactctataaggcaagtaatacaaaatacattgttttaactatatccgaactctatatgtctttttcttgttaagtagaggaactagaggtgtcttagtgacgtgagacacacgaaattttcaattcttaaaaccccatttgtatttaatttgggcttaaagaaatttaggcagccattttttttggtggtagcaatatacaccatgcataagacaacatcgacacaaatattatatacacatatatatagtacgacttgtatcaatttgcctcttcttatttctacaaacaatgattggtcttaagaacaacaaaaatacaacaagcattccaccgcagaccaatgatagtcaactacattttgatgttaattaatctcaatcttctaaccacaaactcttataatattgcaagttagtttaaactacttacataattgagtataaaatagcttcaaccttcatcaacaattcattatcaatcgagcaaaaaacaaaagctaagagcaacaaactaaagattttttaagaaaatg

SEQ ID NO: 26703 - DNA, 3003 bp, Unknown; identical to SEQ ID NO: 26702
  misc_feature (1)..( 3003): 2750-1469P.txt file - cDNA_ID_2715516; gDNA_ID_2213642; Annot_ID_181297

SEQ ID NO: 26704 - DNA, 3003 bp, Unknown
  misc_feature (1)..( 3003): 2750-1469P.txt file - cDNA_ID_2715520; gDNA_ID_2213642; Annot_ID_132294
ttttacgttggttattactattagtgcaaaaccaaaaataaaaaaaccaaagaaaaaaacaaacacaatcaaattagaaatgaaagttgaattaaacaccttatttactatataaacacacatatatacttacttatatagatacatacctcagcaaggagtttcttgttataggcaagtagagaagcattgtcggatttaagagactcaaactgtttcttgagtgaatcataatctctctcgagctgtctagtcttccacctagctctcctgttttgaaaccaaatcgcgatctgtcttggttgcatccctaatgctttagctagttgtatcttcctctctggctccagcttgttaccaagctcaaagctcttctctaatgccttaacttgctctaattgcagcctcttcttcttctctcccagcatagtatgtgccccatcgtctgatagattctcctcatccaaggtttgattatgatcttcttgcacgttcattaaagacatagatctgttcatcatgtagtttcctcctcctatatacaccaacagaattcatgactcaaatctatttatgtggagaaatagtgagagaaagagagagtatagtaccattgaagagatgaggaggacaagaagggagctgatcttgactgttgtcttcatgaagttgttggaacataaaaccatgttgaggaaacgccatctctaatctcaatccagcttctgttgttggatcaaacacatacatgtatgtattccaccaaaaacctatcagtgattaatggattgtgaaatcagtatagtgatgatcaaatatactttgttgtttgcagatttggaaatcactatcaaatgagttaggtgtttcttgtggatctcatcaacctctcatataagagaaagagagagaaagaatgaggaaaggatcaagctagggaggtttctaggacccatccttaatattttaaaagctttaggcttattattatatttcatatatattctccagttcatgtaataaagttattttatagtttctgcctcaaatattttcgatcatgtaacgttactaatcatatcttcatgatggttttttttttctttttcttttcacaacaccttttatgctttaaaacctcacatatcatttatttatgttttccaaggaagcccaaagactttttacatcaattgcttcctcctccaccgatatgggccgctgcttttgcagcccggcccaaagcatctgagaaccataaagccccattagcaaagtaacgactgttgaccacactagtcgctgcagctgcagccactttccctgtaatggtggctgcggctacagcagctgtgcccgtgacaagaaccgcggatttagtgaaatccgagaaatgatacttctcgtccgctgatctcacgagttccatactcgactgaatgttctgtgtgaggccaaggtaatggctgatctctgccaatttggtcgctaccaagcttgaaaatctctgagactcatccaaagctttggctttaccaatcgcgtctttgcttaaaacgtagcctttagctaacatcgtctgcacaacttgttgagccacggttatggcctctccaggcgatgaagcaaacgcgtctgaacgagtcacctacaaagaaacattttcgagaatctttggcttataacctaaagtaacctagtaagtattgtttttaatgttaccgtaacactatagtcttcttcttgtctgagattgttagattcatgtaaatagacaccgtagaccgatatccaaacggtttgatcaacgatcgtagctccctgaagatcaacattaaaatcaatgccaagaagatcatactggaaatttctagctaattaagggacttacgctaagtaacacagccatatccagagcatacgcatctctgaaggttacataagccgttaatgcatccccttggcacctgaaatccatggagacatgaaacaaaatataaacagattcaagaatgattaataatttactgaacaatgaacgttgttgttacccggtgatttcaacgagctcgacgataccacagtgagagaagaacctatgaacatctttctcagtggcttgaggagacaagttggtgacttgagcaacgtaaccacaaggatacattatattgttctgttttctcacacgaacctagatacctaaatcaaagaacaaacataaacaagattcttgaatcacattccgtgaaccgttgagcgattttctagagatttatacagcaagaaatctacaaagctacgattactataatgattcaaataaaaaaaataaaaaaggtgtccaggccaaatagttagcggagagggaagaaagaagaagtaagaaccctagattataattgaatgagataagagatgaaagtaacagtaacaaagataatcaatgagatatgtatcaaccaaccacacaatcggaaacttcgagaagcagggcacgaaaaaaaactgatagtgtatgttctgttttagattacccgattaaggcacaatagaacaggacgtcacaggattgaagccaagtatcgaaagagacggagagaaaagaagacaagattcgtgtgattgtgagagagaaagaggattcttcaaatttaaacaaaaaaagaaagaagaggaatgttaacatttaaaccaaaaaagaaagaagaggaatgttcacataattttttttcttttgtcggctcgatcgatatcgatgttgtggtcgacgatacgcgtcaaacgtaagctctagcgatgcgcgtgttattattgtttccacgagtcttttgggcactttttacttaggctttttaaagcccaaatatctgttttcaagcccaagtaattagtgaggacattttcgtcaatttttcatcggaacgcaatttagcggttaacgccttaaccgtcgctcagaaaaaaaaaaaaaaaaaagttatcataaactttggcgatatg

SEQ ID NO: 26705 - DNA, 3003 bp, Unknown; identical to SEQ ID NO: 26704
  misc_feature (1)..( 3003): 2750-1469P.txt file - cDNA_ID_2715520; gDNA_ID_2213642; Annot_ID_181296

SEQ ID NO: 26706 - DNA, 3000 bp, Unknown; identical to SEQ ID NO: 10305
  misc_feature (1)..( 3000): 2750-1469P.txt file - cDNA_ID_2715524; gDNA_ID_2213642; Annot_ID_132293

SEQ ID NO: 26707 - DNA, 3000 bp, Unknown; identical to SEQ ID NO: 10305
  misc_feature (1)..( 3000): 2750-1469P.txt file - cDNA_ID_2715524; gDNA_ID_2213642; Annot_ID_181295

SEQ ID NO: 26708 - DNA, 91 bp, Unknown
  misc_feature (1)..( 91): 2750-1469P.txt file - cDNA_ID_2715539; gDNA_ID_2213642; Annot_ID_132284
aagctttactactcctcactgtttgcaccaaaatatgtgaaagagctcatcgcatagaaaaatgtaaactgatttgcactgttgacagatg

SEQ ID NO: 26709 - DNA, 91 bp, Unknown; identical to SEQ ID NO: 26708
  misc_feature (1)..( 91): 2750-1469P.txt file - cDNA_ID_2715539; gDNA_ID_2213642; Annot_ID_181285

SEQ ID NO: 26710 - DNA, 3003 bp, Unknown
  misc_feature (1)..( 3003): 2750-1469P.txt file - cDNA_ID_2715543; gDNA_ID_2213643; Annot_ID_132317
attaaactgacaatttcaataaaccaaaattgaaattctcggttcggttcgaatgaaaccttttgtaggtcgtggtcgtatatagttggacacttgacaaatctgagcatttcctttttgcttacagcggaaatatctgaaccaacgcgatgccgtcgacgcagtccttgaccgtcgcagcgaagacgctacgaaatcggatcttctctaggtctggatctacatccgccggtccgagtcggtgggcgacgccaggtcacgaggagcgacctaagggttactttatgaaccgtactcctccggcaccaggacagtcgcgaaaatgggaagattgggagcttccttgttacatcaccagcttccttacaattgttatcctcggcgttggactcaatgccaaacctgatctttcaatcgagacttgggctcatcagaaagctttagagcgtcttgagatggagaagctcgcgaccgctggagattcatctgattaagcatcaccgttggatctccggttgcttgatttggtatgtccttattctccgggagttgaggagtttttttaccgtttaatgatgatgataacgaagactggagagttagggtttcgtttggcccttgaactttgtttcaattctcctttgttttgtcgataatgatgatgttcatgaaataagtgttcttttaactgtttagacgcaattgccttcactctctacttcttattacaattctcaaatttggtcacttttgatttactcatttctcaaatgattcaatttcgactattgattgctgcattactaattggagaaagagattaaacgagagttgtatgctgatgttgtgtgcttctcttccttagttcatggcttgtttatgttctctgtgaatctcaggtttgcttgtttcactcagtgcagtgcatattgattagattaatagctactttatgttagtcgattcttatctctttagatcatcttttttatacttgtcatttgttgtagtagtagtgataagctgatagtgtagctctaactagggcatggattgttcctttgtgttgtagacatgttcgtgattataggttattgcagcgtgcacaataagttttgtaggctttcaagtggttggaatggcatcagccattgttagatgcaacactctagatttcagttttgtcatttgctgtattttattaggctagcgtttggagttttcatggtgtcagctattggtagatttgacacactagatttcagtttctttgacggtggtgtttattaggtttctacttagctgagaatagcagatgagaatgttgatttcgatcttatacttggacaagtctggagttgaaagtaacttcactagatttgggtagataatgttttagaaatcatgactgcttacctctatctctatagattttggtcgattaatactatactgcctttgagtactactattgctcatagtttcccaaatcctttgtttagtttcctaaagtgtggcttcatattcttctcttttaagtacaagtactttatgctggtgttggctttttagcaagcttgtgatcttcatctcatcctctggtttcatacatgatgattaaacaaaagaagagactagcgattaaacaatagaagagactagagtagtagcttaatttgttgtttgccttagttgagcaatctcgtgtcatcaaattgcatcacatagagagggatcttgtggtaattacttctctctgtgtagttgtgtttcccgagagtacaattctgtaacactgtctggaaccattaggctaggtctaagaagagacattatcacgacactcttcacatgctttttttttttatctctggagacccaagaagagtctagtgtaaagccatgtgaagaccatttgtcatctatccatttcctctgtacatcaatcagatgttttcagtttaagaaggaaaaaaaaaaaaactcggtagtcgtatgtaaatgtaagtcggtgtcggtcggtggagttgaagccaaataatcaataatgtttaggacgaaagtgaaaaggtcaataacggtcaattaaaagtaaagtttatttttctggtaatgtgaccggttattcccggtaaacacacgagccaccgacacatacttccatgggtcacgaccacgattgcagtccgtacacgatccatgtttttatttatttaaacgcaccataacttcccgcattcggatctcccatagcaaagacagagagagaagtaaagtagctttattatggattacagataaaagacaggtaatctcaatgacgcaaagataaagacaggcaatttcacttcagtgatgcaaatctgacagtagacttcactcttgtgtatattaaagtaaccgtcttgaagaggaaggaagataaccaagtgaatttcgtgatggtttcattgtaaaacaccactttttcaaattctctccttctcttggtgctctgtttctgttggagatttcagtcattggtaatctcttcttctcttctctagtcctcatggttgtttcatgctctgtttcttttctttgaaactgatagatagatcgttggatactttagaaaatgcattttattggttttatcaaatcaagttaatttactcgttcttgtaaaatccctatgtgaatgcacccatttttctattttagcaactatggacaagtagctggggcctcaactgctactgtaggatcagacaaaaacatagcaagtgccaattatgtcattttcctcctccattatttgctgtcgttttcaggaacaggaatatatcttagctgtgttttatcctttcgctcatcttgcaaaatggaaatctaaaaatctttacttcttgaagattgattatcacagaattttggtttctttcttgtctttgtagggttacacaaatcttcttggattgttttctcacgttgctttggctgtattgagagagtttcacgatg

SEQ ID NO: 26711 - DNA, 3000 bp, Unknown
  misc_feature (1)..( 3000): 2750-1469P.txt file - cDNA_ID_2715553; gDNA_ID_2213644; Annot_ID_132353
gcttctagattgtgatttacaatcttcgaactctcggtgagtttctaggtttagggttttatctctctttacacgacaattgttatggccaatcgagaaagagatcgagagcttctgattcccgtcgctgatttcggcgacaaagacgatggttcttcttcgaagccttcttcttcttcctctgcttcttcttcgcatcaatccggccacgaggtctagtttttgtcacctgatctaaaaacgtgttcttcgttttctcatttcaagattcatgcgaaactaacagtagaattggatgatagttattcatagatttggtcgattctgtctccccttagttcaaaatcttggaacttgttttgccctagattcagtatatcacaagaacacttgcttagataagtttggtagttgtgattgagtagagtatgaatttgcattccaagttgttgtggttggaatcattcagattcttgagtctttgtattatgctcattcatgttttcaagcatgtataacttatagagcattgtggcctgatgctttagctcttttctgcagactttaagcttgttcattaggggttgggcgtcaaagaagttcatgacaggctggtaaggaagagttgaaattttggcatttgatgaaaacttccacagattagttttaagtctccattgctttttgcagtgttatcctacttcctattgcagttactttctatacaacatggtggtttattcactttgtcgatggattcttctctccaatatatgcactacttggaatcaacatatttggtaagaatttgaatggcccctctttatcctattaacaacttgatatcggtttcccacaatgagtttgattattgttttgtaggtttcggttttttgacttccattgcattcatcttcttggttggggtgttcatgtcttcgtggttgggggcatcggttctgaacttgggagagtggtttatcaagcggatgccatttgttcgtcacatctacaacgcctccaagcaaatcagcactgccatatcgcctggtctagcttgcttataaaaatcttgttttgcttctcaacattaagttgatctcctatctcatcttgttcttatccatttctcatcacagatcaaaatacacaagctttcaaggaagttgcaatcatcaggcatccccgtgtaggtgaatatgcatttggcttcattacatcaactgttgttctccaggtgagtgaaaatactttgctcaaggattttgttattctttccagaacgtctccttgaggatacaaacaatttcgagttatatggtttaccataatttcgtaatctttttacccaatgtaataatgctattcgttcttgcagaactacccaaccgaggaggaactttgctgtgtatacgttcccacgaaccacctttacattggagatatactacttgtcaacagtaatgacgttatcaggccaaacctctctgtccgggaaggaattggtgagatttcagaatctaattgtctatactagatacatttatcgtttgttatatagcattcaaattattttgtggaaagatactgaacactgtatactcattcttcatctgcagagattgttgtttccgggggaatgtcaatgccgcagattctatcgactcttgataaacctttggcctcgattggaaatgaatcttaaagtgactattcaaaaacctttggccgatcgataggaaaaaataaaaaatcagaagagacgtttcacaaaatctgagcgaatagagaaaccaaaaaacacagaaaaatttgtcgagaagtgtaatttgtcaatattatttgaataaccttgttttcttttagcccttttaaaaataattttttttcttttcttatagattataatttgtatccgcgtccttgtgtctttcatattactgtcgcattgactttataacaaaaagataatcaaagataatcccaccctaataataatcacatgacaaatggcaatatcgttttacatattagggaatagtataaaatgtggtatatatagagagacattgttgatcgaagaaaaaaatggtctaacatttctctgtctagctcttcttttgatctcaggtacgttttgtttccaacatgttactaattcttatggtgaaataaaatactgcagctaaaaatgtatcgaccaaaattttcttagaggaggattgtgcttagcacctgacctaattatgaatcttcatttctctgcctttgtaaactttaatttattttagaactttatctcatatagaaatctcaaatatatatatattatagtttttgcttaacttttatatttaaaataaatctgaaagttgtaagaaaattattttccatatcagatttaacattgggtgcagtcttgggaaaatatataatcgttagaataattttctcttttaatgtgataattcgaagacgtatgtaacaaacaaaaatgacaataataaatattacagtataaatcatttaaaacatatactataattagttattttttgcttaaatatgatggaattgttttgatattgcttaagaatcaaaaatgttttactctagataataaaatatttattgtaaagtttatttttacgatgaatgtatatgatttcaagtagaacaaataaatttttgatatattaattcacaacaataaaattaatcttttcatcttttgaaaataatttgtatacagtaatttgaaacaaaaattaatcatgttataattaagaaaaggataaataaaagaagacagatataaaaagaaaaatccaaaaacgacagagagctcaagttggagttagctaagcttagctacaaaagaacagtcgccggcaaaagtctcagcctttttcctctccgccgttcacagttcaccggcatttctctcttctttctttttctccgactagatttccttgtctctttggtttcttggcgatg

SEQ ID NO: 26712 - DNA, 3000 bp, Unknown; identical to SEQ ID NO: 26711
  misc_feature (1)..( 3000): 2750-1469P.txt file - cDNA_ID_2715553; gDNA_ID_2213644; Annot_ID_181389

SEQ ID NO: 26713 - DNA, 3000 bp, Unknown; identical to SEQ ID NO: 10372
  misc_feature (1)..( 3000): 2750-1469P.txt file - cDNA_ID_2715566; gDNA_ID_2213645; Annot_ID_132368

SEQ ID NO: 26714 - DNA, 3000 bp, Unknown; identical to SEQ ID NO: 10372
  misc_feature (1)..( 3000): 2750-1469P.txt file - cDNA_ID_2715566; gDNA_ID_2213645; Annot_ID_181410

SEQ ID NO: 26715 - DNA, 3003 bp, Unknown
  misc_feature (1)..( 3003): 2750-1469P.txt file - cDNA_ID_2715580; gDNA_ID_2213646; Annot_ID_132392
tgccaatatgttccgaggatagcgagaatctatccgcttttcaaggaagtaacaagaacttctggtttggtaactgaaactgcttgggctggtgctgctttaaacctattcctctacatgttagctagccatgtaagaaaagattattttatttgattctttgctccacttgattaggttatgtttgggcaaagataacggttttaaccattgcgaaaaatggacaggtttttgggtctttttggtacttgatttcgatagaaaggaaagatagatgttggcgtgaggcgtgtgctaagatacagaattgcactcatgcatacttatactgttcaccaacaggggaagacaataggttatttttaaacggttcttgtccgttgatcgatcccgaagaaatcacaaactcgacggttttcaactttggtatattcgctgatgcattgcagtctggagttgtggagtctagagatttccctaagaagtttttctactgtttctggtggggtctccgcaatcttaggtttgtaacatctaaaactcttacttattacggttcggttactttttgttatctaatcgatgaaatcttatctttctgtgtgtagtgctttgggccaaaacttgaagacgagtgcctttgaaggagagatcatttttgcaatagtcatttgtatttctggactagtcttgtttgctctcctcattggaaatatgcaggtaatcatttctcttctcctttgagctcttaaaacaaggaatatccatatatatagtcttaaagagttctgtgatttgtagaaatatttgcaatcaactactgtaagagttgaggaaatgagagtgaaaaggagagatgcagagcaatggatgtctcatcggatgttgccagacgatctgagaaaacgtatccgtaaatacgaacagtataaatggcaagaaaccaaaggagttgaggaagaagctcttctctctagtcttccaaaagatctcagaaaggacattaaacgccatctttgtctcaagttgctcaaaaaggtaaccttttattttgtcccatcataacttcttgaattcactgttttgttttgtttcaggtgccttggttccaagctatggatgatcggttactagatgctctatgtgctcgtctcaaaacggttctttatacagagaagagttacattgtgcgtgaaggtgaaccagtggaggatatgttgtttataatgagaggaaatttaatcagcaccactacttatggtggcagaactggtttcttcaattctgttgacttagttgctggtgatttctgtggagatcttctcacttgggcattagatcctctcagttcccaattccctatctctagtagaaccgttcaagctttgacagaagtcgaaggctttcttctctcagctgatgatctcaagtttgtcgctactcagtatcgtcgcctccatagcaagcaactccgacacatgttcaggtaatactttcaattgaaaaaatgcatgttgagttaattataaaagttaacatattggataatgaggacatatcgtatacctatctcgtttctcaagtttccttcaacataataaccctaaatctttttattacctaccttgtatcttgtttctcaagttacctttaatattataacctaaacaactttttgtctccaggttttattcagtgcaatggcagacatgggcagcatgttttatacaagcagcatggaagagacattgtagaaggaagctctcaaaggctttacgtgaagaagaaggcaaactacataacactcttcagaacgatgattcaggaggcaataaacttaacttaggtgctgcgatttatgcgtcgaggtttgcttctcatgctctgaggaatctaagagcaaatgcagcagcccgaaattctagattcccgcacatgttaactttgttgcctcagaaaccagccgatcctgagtttcctatggatgaaacctagttgtgtatatagttgttgactctatctctatgtaatgtgatcgctagtattttttgcaaatgattatgtaaccagtaaagagctttatgtgaaataatcaataggaaaaattcttatagagtttagttaaaaaataataattaatggagacattaattttagcgagaatctcaccaccacaaccactgtaaatgttttgctatccaaaaacactttctaagtcctaagctttaaaagcatctctcattaaacaatttttccacatagttaggagagtttactagctagagacggtagacttatctctctattggtggtccagcttggcttcactctctcgaattgacgagtttagtcttattacgacgactttcaattgggtctgtattgactaaaagatggccaactaaaataatgatttaagtatatatttgaagatggtacgaaatgggcatgttgtgaaaagaagacaggtagagaaattggattttgtgaatattattgtaagttgtagggcaaagagagtgagactgcagagcccccaccgtagacgactttactgtctcttcaagtccatttagcttaccactctgcatccacatacatgagtctgtgttaaagctggagaacatcgatttgcccaccatttctcactgccaaagccatacccatatttattctctctcggtctctcttctcggtctctcttctcagtctctcactcccacagcctttagttcgagaagaccgaaggggacttcattttcttgtacgggaattaaaatattgaagattgacagataaaaacatgaatcttcagaggagaaaatttgttaggtagcttcttggaatttttatgaacaagtttaacatagcttcaatctagtatttttatatttacttttggcagtagtgatcatatcttgttgatacaggcttgatagtacgggagttgatggaaaattgaaaagtgttagaggacgcttgaagaaggtttacgggaagatg

SEQ ID NO: 26716 - DNA, 3003 bp, Unknown
  misc_feature (1)..( 3003): 2750-1469P.txt file - cDNA_ID_2715584; gDNA_ID_2213646; Annot_ID_132390
agtgtattactcagctttgtaacaacattattagagagaataattcactttcattgtataaatgacaaaaacaattaataccaacttgttttgataattacaaagtaacaaaatagaagcattcagagttttgaagttatatattcatttgaaatgtcttgaaaaaagttatatgtctttctttgacaaaacaaaattcagtaaatttcaatcaattatatatttttaaaagtactatacgcacacaattctttatacaacgacaaaaagaaattttacatctaaaaatttcgtatatagataaattaacacgtttgtaaaatattgaataaatattattttgtcactatatacacagtaatcacatgtaataaattaaaatcaatcgatatgtttcgttagatctctcaatagataattattgatataaactagtacgaaaataacataacatacacagttacacatacataaacatataatatttgtaccaaaattattaagaaaaagaaatttaaagctctcaatcaagagattttgtatgatatgaaatattcttctgatttttgaaccattttgcattagagaaaagtaaataaaactaaagtggtcctggaaacataaaaaaataaaataaaaatagagaaagaaagagatgctattcctggagactgagagtacagtggaggtccatgacatctcgtaacacccaacaacactcaacaacttgccaaattagctttcactagctgttgttatacattcatttcttaatttaaattggaatatcataaataacaccttataacattataaccaaagcataaactacatgcatatattcttagaagacattaactttttaattaatttccgattatagtgtgattacgctccttgcaaatactctacaagctatgaaagtaaaaaggtattggctactttcaccgccgctactatatctcgtgagtcgtgagtgaagccaagccaggctattattaagttgtgtactactcattccgtaaaaaccaaactgaaacagaactattccttttatagttaaacaccgaatttaattctaaactcaatcgtattaaatgagaaacgtaccattactttaaaactcaaactgaaactaaactaaaaatccggtaaaagttcttttactcatatcattggaaatagtttttgaagcaaagtaaaaaacactagaatagtgtaactagaaggaactactaatataaattttggttgctggtgagattctttttcctccttccccagcggacgtctccgtctcttcttctgcttctaacttgctccaaattttcatttcaatttttttgataggacttaaaaattccaagctcgcttatgagagtaatggcgtagcaaaatctttatctaactcttggctcttgtctttttttgtttgtttctcaacctacgccggatcttgcttcttcgaacttctccgacgcatcttcttcagattccgcagaagtttgcgtcgttttcttgaatccactcaaaattttattggaagtttgtgttgtttttactagctctgaatctttagagggctcaaaaattcgtcgagaaaaccagtctttggaagtgtagcattttggattcgcttgtgacttgaatcttgaatattaggtgaaaccgccttggatcttctcgttgatctttgtcgtggacatttttttttgtaaagcttagtagattctctaatatttaattagagagtatctgttcgtgttattctttattgttagataatgattaatcactgcacacaatcttattgaattttcctgttgcttttctcggcttgaattctgaagaagtagttagagagatggctttgctatatactcttgctagatctgtttgatttcttagattcctgatttaacgatttccttctaatttgattatccaaaatctagaaatggtaaaagtttcttgagttaaggttcatttattttacatttgactgtagtttttttgtgtgatttagatgcagacaggaccatgttgtgttttggattacttgagagatttactatctcaatagttcatttcatcgtacataatttttttttgtgaacttgtttaataggaatgatgatgaactattcttgttttgtgtgtatagtttgaagatggtaactttatgaattaattatttattacttattagattctgcagttgcgtcttcttgattcctaataaacaatgttaaagaacacacttttcatgcttcctatcattagaagtgtcaaagatgctgctcttttttaatcatttttcttcttacctgctgtattaacaatttacgtatatccaggtttctatttggtcaacaacatcagaaacatgtgtgctcagatgttgagctctttagattcaattgttgtgaacattgtcaaggagaatagtgattattgaaggatgcaagatttttatattcagctctaatgaagaacggacaggtttgtccctaacacatcctcaccaactttttccttattgttataatcttgctttcgtatacttagataagaagttgagccatgatagaaacttcattattaagaatacgtgatcctttagttattggtatgcttgattggaaagaaagttgtagctactttagcattgatatacttagatttaccaagaagtgaagaagtaaaagagagtttgtataacaggagttgcagtcttctacccaagtttcacatgagtcccaaggtgaacagaaagttaatttatcagtagaagctccaatacaagattctggttctgtatctgcctcaagtaatgacggtaggaaagtgtcaagacaagatattgaacttgtaagaacactttgccaccttcctatctttatagactttcttgtaagtttccaatcatctgataaaaaaacatattctaaatgactgatgcaggtccaaaatttgatagaaagatgtctccagttgtacatg

SEQ ID NO: 26717 - DNA, 3003 bp, Unknown
  misc_feature (1)..( 3003): 2750-1469P.txt file - cDNA_ID_2715600; gDNA_ID_2213647; Annot_ID_132424
ggaagaagaaaaagtgatggtcgagtgagttctgtatccattgaggatgtgagggatgtcgaggagctacaagctgttgatgcgtttcgacagtcgttgttaatggacgagttgcttcctgatagacacgatgattatcatatgatgttgaggttcttgaaagcgaggaaatttgatgttgagaaagctaaacaaatgtgggctgatatgattcaatggaggaaagagtttggtactgacactattattcaggtatgctattaaatagaagatagtagtttaaaccattgttgtctgtttttgtaacgttttatttctctcgttaggattttgatttcgaagagattaatgaagttttgaaacattacccacaatgttatcacggtgttgacaaagaaggtagacctatttacattgaaaggctagggaaagttgatcctaacagactcatgcaagttacaagcatggatcgatatgtaagatatcatgtaaaggagtttgagaggagctttatgatcaagtttccttcctgcactatttctgcaaagaggcatattgattcaagtacaactattcttgatgttcaaggagtggtaagtattttctacagttcatgatattagttgtgaaatgagtttttttctcatgtgtttatataacttcatattcagggattgaaaaactttaacaagtctgctcgagatcttatcacacgattacaaaagattgatggagacaattatcctgaggtattagttaattggagcttctaatacttgatctcaggtatcaaatgctaatcttggctttgtggtatttcatgcagactctccaccaaatgtttattatcaatgcagggcctggatttaggctactctggaacactgtcaagagctttcttgaccctaagacatctgctaaaattcatgtatgagagatctaagttatatctctatttaaaagtcttgtctttgattatatagaattcaatatggactattctattgtttatgtaggtactcggatacaagtatctaagcaaattgcttgaagtcattgatgtcaagtatgtgaaccttgacccacccttatttgatctgttctatcgaaagctgcacgtttttttgtttttgcttatgttcaaaatggtctgcacttttttatagcgagttgcctgagttcttgggaggtgcatgtacttgcgcagatcaaggcggttgcatgctttctgacaagggaccttggaaaaacccggaaattgtgaaggtcatttacttagactaatctctttttggattctatttgtatcatccaagttggaatctgagacatttggttttcttctcattatttcagatggtgcttcatggaggagcacatcgagcgaggcaggtggtgaaagtgttgaacagcgaagggaaagtcattgcttatgcaaaaccttcatatacatgggtacgtagttattaaatcctataactagtcaatctttaacttgtggctgaccatattgtgcctaaactctgctctgtcataaacatagataaagggaagtgacacatccactgcagagtcaggatctgacgctgaagatatcggttctccgaaggctataaagagtttctctcatctccgcttgacacctgttcgtgaggaggtaacttttttctctttctttctatcttctagttggggaagtagtagatgtttatcctgaggctttgcaggcaaagatagctggtgaaacaagcttggctggtagttttccgggttatgacgagtatgtacctatggtggacaaagccgttgacgccacctggaaggtgaaacccgccatccagagagttgcctcaagaggttagttagttagctgctatatgctttacgtaccagtaggctccggtttagaaccaaatactgaaggaaaagaatttaacctaatccttgtttacataggatttattttcttattaggattgttttggagttggttataaaaacagagtttttttggtctttctttgtttggtgatcttaactcttatctgtttccttcaggagctttaatgtctcccaccgttccaaaagatcatgaaggcatcaaggctcgagtcctagtaatgttcatggcattcttgatggcggttttcacattcttccgcactgtaacaaagaaacttccagcgactactacttcttccccagcagaaacccaaggaaacgcaatagaacttggttctaacggtgaaggagttaaagaggagtgtcgtcctccttctcctgtaccagacctcacggaaactgatctactaaactgtgtgacgaagaaactgacagagctggaaggtaaaatcggaacgctccaatcaaagccaaatgagatgccatacgagaaagaagaactgttaaacgcagccgtctgcagagtagacgcacttgaagcagagctcatagctactaaaaaggccctttacgaagctttgatgagacaggaagagttacttgcttacattgatcgtcaagaagaagctcagttccagaagatgaagaagaagaagaagaaacatctcttttgcttctgaagcaaagccaagaaaaaccagcaccaggcatcaaaatctccctctttcgtaattcgctgttcttaagtataaacaacaaaacaaaacaaaaactcttatatctgatttgatgttaaagctaatacagagagctctgtttccttctgtgattatgagccactttatattatatgttttatttttataatcataaaaaaatctgtaactgtaaacttgttaatgcaaaacgaaaaaagagtatcgaaattattaatcaggattctgtttttttttaggattttgtttttatccagatacaagatattgtagccacatatcccatatagtgattatctcttaacgtatctcaaaagtttttgcatttttctttacttcatattttgtttttgtaagatcaatcagtttttatgaagagaaaatg

SEQ ID NO: 26718 - DNA, 3003 bp, Unknown
  misc_feature (1)..( 3003): 2750-1469P.txt file - cDNA_ID_2715603; gDNA_ID_2213647; Annot_ID_132423
gttctagtcttctagatgttttatattgttcttcatttactcaattttttcacgcagtgcaaacattattctcaagatgacacagagaacttcgagtcagatgagtacagagaaaaccaagaaagtagcagagttaaaccagactcaccggttaactatcaaacctacttgcagtattgtttgtttgaaaagctgcatgcgatcattcatcttaattgttcggtttcttactcctctgcaaatcatacttattaccataacgtgatctagaagtttcaacaagaggctgatgcatagaaagctgatgaagaagctgaaactgcgggtaatgtaagaagtcactgctttgctcattttatcatatgctttagtgatgaacctcctttttgtaaaatcatatttgtttgtccggttctgtttgtgcatgtatattcagcaactacgatttgtcgatttaacctgaaaatttgattttttggcctggttttgtttcaaccaactggattagtttactcaaaattcatttcagaaaatgatcatttaaatgttgtggttcttgcaggcgaaatgcgaggaaacgcaggtgcgaggtgtgttgctcaagtagaaaccgagaacggtccaagatcagaccgtacagagttccaacggtggattatttagcaagacaaattctgggcttctttttgattatttagcaagacaaattctgattttcaagacttgatctagaatgtaattactattttttgtccaactggatgcattttgtgggttacattattgtattgaaataaaatatagtgtggttatgttgaaaaatgattagagcaatgattgattaaaaattctactaccagaacgaacgtactaaccaatcataacacaactgatcattacgaagtctaaaccgaaagtcaatatttcgtgctgttcagattcaattaatgaaacttgtctaattttcttttgtcaaaattcactatctgttgatttctgtaatataaaaatggatatatattgtgaaagtaaaacaaattaagtaataaatatattcgaactagaaatgggaaggcctaacgaccgttgaccctccctttaattgctccgtatttaattgatttttcttctaatcttgttatcatcctccgctatccgccacgtgttgtatgggtcccacggtacgggcaatgagagaaactacactttgctccctattttaattaataattcacattttgctacacaacatcttctaattgtcaaaactcaaaactaacaatcatggtcatttaaaacaagctatatacatttttcaaatctgtatttcaaaaaatcaaataaaaatcatcttaagtcactaacctatgtgattaatcaaagtggagtaaaattttccgaaataacatttgcaaaaaattgttgaaatctaaattgacaatagttataataaaatatccaaaattaagtggggtcatattgtaaagaatatttcattttccacctcctgttttgacgtttctcttcttttttttccaacaaaaaaaacaaaagcaattaaatagtgtttgtcgtttagttggcggaattctctcagttgaattttgttataaaaatcttacaggtatacaggtctactgtccatagatccgttaaaagttttacctacggccattaatgaccgtccgatcttcctttgttgatgatgacgaggaccaactatctctgcactttctcggtttctccttatttaactacttttaatattactccaaattcacaccccataattatgcttctttttgcatatttgatcaaaaactagttctagtgacagaattaacctcaatttccgtaaaccaagttttaatatatatcaaatgcaatactcgatatcacacattattcactaaatgtgggagactttcatattttttgttttgtcacacactataatatgaagaatgaaagtaacatgatatttttgttctaggtgtaatttaatttccaaaacattaaaaattcctgacacaaaatactgtaccaccgtcaatttggggggtagattgaaagaaaataaagtgtggggctcacagataaaaacgaatgtaacagttggggtctcattaaatagcggtgcaaatacaaacttctctataacaaaaatctactactattaaaaaataattaaattcgagaggcagtttaggtgagaagaaactgagaaagttcggtccgaattctaatcccacttttgtctctcaatttgtttcccctttctctctctctctctccttcaaatttttttagcgatttttctgggtttcatgtaaatgtgagaagtagatagattctcaacaagaaaaaaaggttttttttttttttttttttggattcgtggatcagccatcttctcgaaagatttgggaaagatccaaagaatcacaatattttttcgatatttagtcgaaaggaatttaacatgtcaggtccacttgatcgatttgcaagaccatgtaagagatctcaatcttctttgtaatgttcttgcttctgggttagcttttttctaggtttactgtagcttaaacttggaattgtgtctaatataataatgagaatctaaaaattgtgtctctttgctttctcgtgtcttcaatatatgttgttgagctggttaaataatgtgtattgctttagataatttttaatgtgtctcatcaaatcaaaacagctttcactacaggttttgagggattcttgagcagtgatgagaaaaaggaaagaaagtcagattttgagaattcagaggatgagaggagaacaagaatcggttccttgaaaaagaaagccattaatgcctctactaagttcaagcattctcttaagaaaaagagcggaagaagaaaaagtgatggtcgagtgagttctgtatccattgaggatgtgagggatgtcgaggagctacaagctgttgatgcgtttcgacagtcgttgttaatg

SEQ ID NO: 26719 - DNA, 3003 bp, Unknown
  misc_feature (1)..( 3003): 2750-1469P.txt file - cDNA_ID_2715611; gDNA_ID_2213647; Annot_ID_132418
ggcttgaattccagatatattcaccaacagcgtgcctataaaatgcaaacatataccacattttatttagtctcttagattgatttaatcaatatatatatagagagagagagagaagctaacatgaaagacaaagaacgaaaacgatgaagattgtagtttttgatgcggccatgtctttagcttgaaatatttggatatgaggattatttatggtttagagtttataaaacacgttatgatatctgtatgtggtggtttggatgcttatatattgtgccttggagcatgaaattggtaatttaattaatacataatagaactttgacaaataagattttggcaattaatttattagtgaagactgaagactacgaaggagaaagttaggaataatttactttcctatgatcttatactatttaaaataatattttatgtaattccttctcattcataatttgttataccatttggaagtaatatttgatatatatgagatttacataatttatccacctcatttggaatcatatcacaaaaatatttttcaccaaatttgacaaggaacaaaaagaaacaatattctttccttttataaaaaatgtaatattaatttatttaacaaaatggattatttacaagaaaatatacaaatttcacgaaataaaagaaatatttcttataaattccatgaaatttgtttttttttgtaaataaaccattttgtaaaattaattaatattacattttttaaaaagtaacaaaggttttattccctgtagtttgttctatttcatttctcttcattctttcttctttttgttcctattattttaggagttattattaaaaataggcatttgttgggttggaaattagagattaggaaattttgtaatgctttacagaattaaacatttctggttttgtgtcttgacaattttacccttcattccactagagcgaataatgaaaatttaacttagctttctaatgactgaagtgaatgccaataattgtagatcgattatgtgctaggatttgttgctgttgggattagtggacaagattaattttcatttacaatggatatgtttaagctacgaagttgttgtgtacaattgtagatttttgaaactgtaaaacaagattagaaaagaagaacatcacaggagaaacctgattgaggtcacaatattacaaaatttacaacttttgcagaaacgaatattggtttgggtgtatacaccaccgagacattagtagtatttggttcatgaaatgaaatcatttttttttttttttgaataccagagattctgggtcaaagtccgtaatcctcccaaatctgaaaccacagcatataatattagtttagtctcaagcgtcactcgaaccggcaacctctaagcttcacctagggtttttaccaattaagctaacgatatttggtataaatgaattcttttttagttacactcagatggatactaggctttacagacaaagaagtcgagagtgcacaagcaccaatcctactaaatccattttgatcacttcacaacatgatatcaagtgaaatggatattatttatgaggaagtgtaatttaataatctaggttacacctatgtgtatataatgcaacaaacaatcaattagtaaaactacaccccaaagcgaattacaagatcaacacaaagagtcacataaatgtgcattcaagaaatgacaataaacactaaggtcttgaatatgggagaacccaattagacgagataaaatgcaagccaataacaggtaattaggactacaaaacaaagagataaaatgcataacatgattcaaaattggaaactaaattgaacaatcaatgagctaactagggctattagagtaatcaacacaagagaatgcatcaaggtaaagaaggagaatcaagcacatacattagtcgtatgtgactaacgaccaatgaattagtgaaactaaaccctaaagtcaattacaagtatcatcccgagggaattacataaacacctattgaagaaaggaaatactaaagaccagagaacccaatgggcatgataaaacacaaggcaaagagctctaagtatcatgacagagaagaagaggtaacacaccgaattcaacacacaatgaagaaagaacattacaccatgagagacgtacgatgcttccattcagtatccattgtaggaattcatcaaaccagagaaagcattacttgaatatacattccatcaaccaagcaaaaagtcgtgactgaaataaactacaaattcaacaaaacaaacgtgttttgtttttatcaaaacgtcattgtctagatttattgaattaagctttaactcttagcaaatgattgagatagtttaaacaaatatcaagaacttaacctaacgtaagctataaactctatataaaaaaatccatcagtagagatagtttataaaatttgaaaagaaaaaaattaaaaggcttgagtccgatcaaactactaattaaaagccatcactaaattgagcaagaaggtgtaaagacatttatatgaaaaaaaatatatatctttttaattaatgtttttcaaacataagtttacataaaaaataaaaattcactcgaatcaaaattttgttttgactcgaatcgaattgaattaaaaaagtcaactacactaaatattcgaaagaggaaactaacaagtttacacacaaaaaagcccacgtgactcttttttctccaagagacgtctcttttcctcttctctcctttgttctttcttccaaatttcccaaatccctccacaataaaccctagaaaatcaaaattcgctactatttctctgttccctaatttctttcgatttcaattcattagtcctaaaaagctttaatttttctaatcccccagttctccttcttctgcttctgaatcgtcgtttaacgtattgctccgtcttttcactttctccgccatg

SEQ ID NO: 26720 - DNA, 3000 bp, Unknown; identical to SEQ ID NO: 10424
  misc_feature (1)..( 3000): 2750-1469P.txt file - cDNA_ID_2715619; gDNA_ID_2213647; Annot_ID_132416

SEQ ID NO: 26721 - DNA, 3000 bp, Unknown; identical to SEQ ID NO: 10423
  misc_feature (1)..( 3000): 2750-1469P.txt file - cDNA_ID_2715623; gDNA_ID_2213647; Annot_ID_132415

SEQ ID NO: 26722 - DNA, 3003 bp, Unknown
  misc_feature (1)..( 3003): 2750-1469P.txt file - cDNA_ID_2715631; gDNA_ID_2213647; Annot_ID_132412
cttctctttggaaacactactcatcccaagaaagatcaagataggggtacaatggaagtaacttcaagtgctaaccactaacctaccacacttttgtaaggatcgagctacaaaaatagagaagtagtacatataaagagtttagtattagtttatggatggtgatgataaatttagagcatctttcaaagtctgaactatatgatttaatttgtgtccataatattatagacaaatgagtatgtttaacaggtggcccatgagggtatcggattaactttcgtctttacctactagcctactttatttactcaatttcattattgtcctaactatagatatatagttaagtatttttgtttttaatggttacataatcaaattaaactgatctacatgttaataatctaactagctatcaccaataactaacatatccaaaataacaaaacaattcataatcgtaccacgtaccgtgaagaatcataagttttcagctaaaattaagtatgagtaaatagattaacaaaatgtatacacatctttggtaaagtatcttatgttttttttaactcgtcttatgtcaatttcataagtgagatttctaacacgtttagtcgataataattttccttactgttagtcagtcacaattttcattttgactttaaacatttattgtaatattcttttcttatgattaagtacatctctatttattatactttgctataaaatttaaaataagaaagaagattatcattaatcatgtaatgttaaaataaaaagtacatatgttcgtcttgttaaatgtgatatttaaaaaacagtcgtgttaattatgtgatatttatcatcaagagtttccaaaggcaaaagtggagaaaaaacattcaatcttgttttgcataaaaaggctacgtacgtatatgtttgtttgcaagtaaagttaggtgtgtctttagtctttacttatattagtgtcttagtgaatcattctttagcaaatcttaattaagtttccttaaacaggtgtcgagatcgtacattatgtggtgcgatttccatttagcattagctttttggaattattccctcccataaaaaaaagtgttgtattattgtagcaacaaaacttttaaggtttttaaatttggcttagttaaaggcgttaatgggaatcacaccctatatgatgtagcctatgcatgtaaagctaagctatagattaatatatataacccacaagtttaatagattactacttcttggttatttttaaaaagacagattaagaataggaattaaaaccaaaaatatccaccccggatgtgtatgcttgagatatagatgacatccaataacaaaaagagaggggttctctataatgttgaaagtcaaaaatgaaatttgtgactgactaattgtggttaattcgatatttagtgaggttagaatggatcggagttttgtaggagactagtgcggttgggagattgtttcccaccatagtttttttgtaagaaacgaacgtaatctccgacttcatttttgatacatattttctatgtaacgagagaacgttctattaacggggttaatcggcgagttaacattttgggattttggccaggtcaacgtttaaaggaaattctttacttcttctttacttgcagttttgtagtgaccacctcttctttacttgcagtttcacttctgcaatttgggtagatttagcgagaggaattttcaaaacacagtacacttcacactgacaatcgataattgaagccattacaaactctcagcatcaccgtgtggaatggtttctccgccgctatgttttccaagccacaatctacattgtgtggagggagcggaatggtaggcgtcacggcgagcctccgaacacagcatctcaactcgttggttggatagataaacaaattagaaatcagctgtcctctatctgtctcaagggggacaagcgttatgatggaagtctccaagtttggtttcagtcaagaagttaatctcttagctctgtttctttcttttgttcaaaactattctcagctctaattctcaaaaccaagctgcacttgttgtaaaaacgtttttctttggaatataatttaacattatttttaaaaaaaaaaacaaaatggctgatcaacgtttttatcatgtttaatttggccgacctcagaattcacgtatggaatgagcactttttgaaagttcacgtataaaacaacatttttcccgatctttatgatatcatttttattgatatgtttctttttttctttttgttaaaggatttgttcttattttgtgacaataatatataataagagttcttgattatgatcaaagtaaactttttttgtagaacccatgacataacatacatgatacaaccaattattcccactttgaggttcctttcactaatattcaactaatattagattattattttattagcttctatacttttaaaaagtttacaataaaaaagtgaacataatctttaaaacagttatttatcgtgaattattttgaaaatagcatttattaacacacattttctcttaaatatctttaatttcgtatttatttcatcaaaataacaatatttaatcgtaattacgaaaattcaaaattggaataaattgttttgctaatcgttatttattgggccataaccagtagagaaagcccgaactaaatatgggccgatacagagagaccctaactcaaatctggaaacaaggacaaaatggtaattcagacaactagtaatgatttatcataattgattcatgatgaatcatcatcatatgtgtaatggtatggtcaaaactgtgttaaaaagatacattaaacaaatacgtggcagtaacaacaacaaagttacctctggctcaaaattgtcccttcttagctcatcattgatccactgagagagaggattacgaatacgagatcggagacatg

SEQ ID NO: 26723 - DNA, 3003 bp, Unknown
  misc_feature (1)..( 3003): 2750-1469P.txt file - cDNA_ID_2715639; gDNA_ID_2213647; Annot_ID_132410
acttatattgtaatttttaattttaataataatttttacttagttatatctatgctaaattcttatttttttttaagaaatttaatacataccgaatttaatacaccaataacacatgtaaatatttttggatcagagtggttgttacggcccaatggatctagtgagcctaaatgatacgaccatatattgtttttttttcggttttcgccaacgaggatttggttaccgagagtttgtttgaacggtcctcagaaattcggagcttgtagcttctcggtgcggtgccttcactttaatggcggcaatatcccctgttcaatgcttattctcttgcaattctcatcatcatcatcaacaacgcgagcaggtgaatctctctgttcttatttcttcataattagcgagaactaccttcttcttgttatgacttcattcctccgtttttttcaagtagagtgggtcgctttggagattgggttctagggttttagtatcttcgagtctatggaagctttctctgttctctggactccatttgaaccgaaggtgattatgttctagttaacgatttcagtaggatttggcccttgaagcgatgattctgtgtaatgcagttggatatgagataattgattgcaatcttttgggtctaataaaacaggagaactttgatctgtgcagtcaagggagatccagaagatgcctttaagaagactgtcgaaatcgatcggatgattgatgctcttagagatgcaaaccctagacaagtaaggaaacatgtcatatgcatcgtataaatgttgtgtttttgctctattatcttgagtaaattgagttttgttttgttgttgttgccattttcattgaacaggttgagaagattgttgttgaaaatatccttgcttttgatgaggttttttggataagactagcagctaggtcggatacttgtaaatcagaagatgacaaggcatgagtttatattgtttatgtcaatgatagagcagacttttgatctcttttgtttccgctaatgctttgaatacggtttgtttcttacagaaggactatgaggagttagctacaactgtgatgactatagttgactgtgttgtgaataagactcgggtttctctttcttctgtggttttattgtctcttcttcttcagcgtttacttaaacagggataactgagagttcattatatccctttaggaaaagatagagacgtctactgatattctgaaagggattttaagacctgctatagatggagtggaagagatttcatggccgccaagagatcctgaagccatcaatctaatgaaaaaggtttatactagttgttcttcactttctactacatctacacattttttatatatacaacctatattcagaagggttatctggtcttagattctgtgatttgatatcgtcatggttactgagatcagtgtattaacaggaaattatacaacgggaaaaagaagggcaattagatgaaggatttctttcagaagttaatgctcagctccggcaggtaagtgctacaatttgttttgtttcacttctgaggtctttcctttacagtgaatagatgtattcttttgaatgtttgaggctgacgattgttttcaggcaaaagaagataaagacaaaccagggttattggctatgctgcaaaaagttcttcaactctattctgctactatcctctccaagcgtagctacgcaaagaaaggtgatttgcccaattttgaaaactatgccaagtcactctaaaccattttctacgaacataatctcatccactatagctattgtcacagggaacgaagttgtaaaagccgagcattttcttgaaactctgatcaaaggtctgttctgcaaccacttttccatgtactatagaccccagccagacttcacatcggtttattatgtgtgtttcagctcctgaggaacaatggaacaagcttttcgtagacgggttaacaatcggaaaaggagatatcacacctgatgagctatctgctgttatcaagaaacgaatcgagcgcacactgattcgaactgtaagtaacataccatgacacatttgcttgcattgttattattctcttcaggagtgaatgcgaggctaaccgggttttgggttggggttttaaccagatattgttttctaaaattcatcattctaaccacaactattctgatcataccaggaagggggttcataccagcagcgaattttgaccgagtatctcaaaggaatcgagtccagggctaatgaaattatgaaattactccagggttaatgtcgtaaatcatgtatttatctatacatttttgtgtaatatcagttcaataaccccaattaatatattgttttctctcatgtaataattttttgattgagcatttgaagtgttatctgatttaaaaatatgaagctctgtagtcaaaattttacagattttaattatcttggaataaaaaatgtaaagttgatgcttccatataaaataaaagtaaaaatgagtaattcatgccaattaaattagcgagacgcaaattggagacagagataactgagcggagggattcagatctatacgacgaaactgaatctcaccgtcttcttcttcttcttcttcttctagacgatccttgtgtttctcttgctctcgcatccacgcttctctggtaatgctactgatcgtcaccgtgaagctgagcttgatcgcttccccttgtgaactgatctgatctgaggtgaatctctatttcttctccttcttcattgtacgaatctcgatttctcggatcttgctgcttcttatcgttagatctgttttcaatttcacgtggattacgttttttttcttccttttgcgggtttttcgatttctttgaactgatctttctccatgattttcattctctgttgatctggtttttgtagagttgtttctgtttcgtaatctgtgaatatg

SEQ ID NO: 26724 - DNA, 3003 bp, Unknown
  misc_feature (1)..( 3003): 2750-1469P.txt file - cDNA_ID_2715643; gDNA_ID_2213647; Annot_ID_132409
accttcaaggcattgttgtaatctgacactccgagtctaccgtgaagtaaccacaacaaccagtctgcctgatgcagcaataccgctgattctctgtttggcacctcagtgttccaccatgagacaagtttgcacaaggtagaagtaccagagcagactgtatggtttgctggcgctatagacttgacctctggcagagcatcagggcagctctggttgtagagataaggttgacacagaacttctccactctcactgcaacacataattgaataagcaaaggagatttaaacaacacattactgaaacatcaaatcctctaatgtaaatggaatacagaaacagaaaagagaagtgatccggtgaattacatgcctgtttaagatgagagtagttgcagaagttccatcaagcgaaatggatgagacgagggagcgaactgtgacgggaatgtcctctagcaacgaaaaaagagttgctttccatgagcttgcccaacccatgctttcttctttctatctagatttcaaaacaaatgtctcagtccatagctttctcttgattttgttcataaagcagctcagaaattgtatatgatatatatacaaggatacttaatgcaaaagttttaccatgaaaggaggatattctcttttgccttgtgctttaatctctccttgctcatcaataactgtaaatcgacctccagaagtaccaaaatccatacccagataaagtttttcatagttcgttcctttattgccactcataactctgaaatcggagtaaaatctagttctgggtagaggaacactccttgaactagagtaaaaccctgagattaacattatcataaatgattcagctcctaaaacccctaataaacgccattatatcgaaaaatcttcatgtttacctgtttgttttggagattggaagagctcaaatgaagatatctgaaattgacgaagaatcagcatctctcttttccttctgaggctgctttcttctaaactccatagataagggagctagcaagttcgtgaccgttggatttctcgattttttcctcttgatttgaatttaccattttagccttccatattatttttatttattttactccactcaacaccaagcagttgggctgcacgttctctggtcatctaacggctcagattatgggtgcggatcttcatatttggacccttgtaggcccacgaccaataatgatgacaacaatccctctctcctggcaccatattttgttccacacaagttttctttaaaaaatttacatgtaaatgctatatataccaagcaatttttgtctaattaaaaatttacagaatattgaaatcatagcactaagacgcaaaactaaaaataacaacattccatttgcatatgaaccaaatgggtcgtggtctagtggtaattcatgaagatgaaggttggttttggtgtgtcccaagtactgttgatatccttattcattaaatcggaacgtctaaaaatctgtctttggatacttgggaaaactacaaatgattttttgctgaaaacatgacttggatttcattgtgaaaagcatgcacgtgtgagccagatgtgcggtggagctcaagaagtgggagatatgacaacttctttgccactgctactttaccttcgagaagcaatcacactctatatacgtaaactacttggtattagggaataaggacccacatattcaatgtgtgtgtaacataagtgtttaatattatagaagcaagatatacgtgctcgtaataactccattttattggattactttctattttatttttatttaggttataattttgtcttttgcaatttgcaggatttattagtacaccatctatttaaggataatgtttcctttcatttagccattattaaattcagtactgaatctattcgacatgttgcagttaagtagaatctaacataatgtcgcaaatcatgttccattggaattgacgttttttaacattttgagtgacccttaagagaaattactttaaatctgttcattatttttagatttggtgttggatacaattcctaatttattttttaactgattcggttaaaaacttaaaattgaacatatttcactaggatttcattttctttggtttaggttgaaccggaacaaaaacattgaacgaattaaagggcagaaaggacaaaaacattgaaatcctccatttttactaacccatcgttcttcccgctcgttcggttcattcaatttgtttcgaaaaccttttaacccggttcgcggttattttattttaatcctcaaccacgttcgaatctattagcgacacagtaaaaacaaatatattttattaatcaaaaattcaaaatctgaaaaaaagacgctttcaccaaaaaaaaatatctccaatcgatttctctctatctctctcttcaccaccgtcgcgtgaagaagacgaaacaatcgctctctccttgtgtggtctcactatctttttctcaccttcgcgtagcttaaccatggaaaagtagagaagaagaagaaagagagaagtgagagaaagacgaagaagatgaagagcatattgctttttctgtccccagccatgtgagtttccactgacacattctctccatcttcacatttggtgtttttttcttttgcttgattctttctatcttcattttcagatttttaccgagtccgtaaccgagtttgaacgagttagtggatggcttcatcgtcgtctagaactaggagtcgttctcctttctcgcaccgtagacctccgagtccttactcttcggcttcgtctacttcttcgtctcttataaataatcgtctattacctcgttcttcttccacacctacttctaccgtttacaattccggcggtgtaaccgggtcccgatctatgtcgattactcgcaccatttccgattccggtcccatcggcggctccgggacttatg

SEQ ID NO: 26725 - DNA, 3003 bp, Unknown
  misc_feature (1)..( 3003): 2750-1469P.txt file - cDNA_ID_2715659; gDNA_ID_2213647; Annot_ID_132404
cgaatgcagacaatcaagaagttgacaacgagtggataatggacacagggtgctcatttcatatgacaccaagaagggactggtttgttgagtttgatgagtcacaaaccggaagagtgaagatggcaaatcaaacatattctgagatcaaaggcattggaagcataaggattcagaatgatgataatacaaccgttcttctcaagaatgtgagatatgtcccaagtatgtccaagaacttgatctcgatgggaacattagaagatcaaggttgctggttccagtctaaggctgggacattaaaggttgtcaaaggctgcatgacactacttaaaggaaagaaagttggtactttgtacctcttgcaaggagttgttgtaacaggaaatgcaaacgcagttacaagctcaaaagatgaatcaaagatatggcacagcagattatgccatatgagtcagagaaatattgatgtgttgatcaagaaaggatgccttcaagctgaaaagataaatggtctcgagttttgtgaagactgtgtgtacgggaaaacacatagagttggttttgggtctgcaaaacatgtcacaagagagaaacttgagtacattcactcggatctttggggagcgccatcagtaccaaactcactaggtaattgtcagtactttatcacgtttattgatgaccttacaagaaaagtatggatttattttctgaagaagaaagaacatttcttctcttgtatgttgatgatatgttgatcatatcaaagaacaaggaaacagtcaaggaattaaaggaaagactgagttcagagtttgaaatgaaggatttggggcctgcaaggaaaattctgggaatggagataacaagaaaccgagaagaaaatattttggagttatctcagagaagttatctgcaaaaggtgttaaagacattcagaatggatgaatgcaagcctgttaaaacaccattggcaccacatatgaagtttgtagcagcaacagagactgaagcagaggagcaagctgatcaaatgaagtctataccttatgcaaatgcagtgggaagcataatgtattctatgatcgggtcaaggcctgaccttgctcatcctgttggagtcataagtaggtttatgagtaaaccattgatgaatcattggctaggtgtgaaatgggttctccgttacattaaggggtctattgattcaaggctgcagtacaagagagaaggtgattttgtggtgacagggtactgtgattcagatcactctggagatcgtgatcgaagtagatcgaccacagggtacacattcactgtaggagggaacatagtaagctggaggtcatgcttgcagccagttgttgcactgtcatcaacagaggctgagtatatagccttaacagaggctgcaaaagaagcatattggctaaaagacttgatgaatgagctgggatttaaacaaggagcggtagatatccattgtgattctcagagtgctatagctttagcaaagaatgcagttcatcatgaaaggacaaagcatatccagagaaggtttcattacatcagagatgcaatcactgatggagaagtgaaagtgctgaaaatatccacagttcataatccatcggatattttcacaaaggtggtaccggttaacaagttcctgagcgcgttgaagaagctcagggttacaagtgcctgataagggatcatggtccgagatggaaatcaagttacactagaagggaagcaaaggaaaggttgacactaaggcaaggtgaagttttgtggaagtattgcctaaagtgtcataaagactctaatccaaagagaaggtctcagcttgtgaaagaaacgaagtcacgagaggcgcacgtgctttgtcatacagctcatcaaggctagagacgtaattaacctcttgccaatggttcaaccattttgtctctttgtctctgcatttgaaacagagtacggaagaagagagaggagcgtggcggtgagtagagttgtataaaggagaagataagtgagacattagggttaagagagtaagtgcaagagaggcagctgaaagtttattcagtcttgtttctaagggtttgtgtaaccaaggctttctagtggatttccgggtaatctcggtccagacgtagcgttcatcactgaacgtgaactgggttaacatttgcttgtgtctgttttactttctttgtctaaacacacgagtgatcgaacaaagagagatttagtgagagcttccgcataaaacagttaaagattcaagctttttttttttacatcaacatttactaataaaaatgtatagttgaattttcaatattatatgctccaattgatacttcagaatgtgttaagattttcagcttagcaaaagtacacaaaaactatagtagaatagttcaaaaaaaattacaataacaattaatgataaattttgagaccatttttgacactgcaatttccttttaaaataattaataacaaattaacaatcaaaatggtgtatacactcacctaccattcaaacccataatttcatatagaacatattcctaaaaatgtgaaaaaattttaaaagattaaaaaatatttgacaaagagtcaaatacaaaaaaaaaaaaaaaaaatcctatctatgtttaattttggccatcagaagggaaatcaaataaaggggagatagagcgagtatacatatacaagctactcgcagcgtctgcaaattcatctatccatcatatttctctgctgctctctgctttcttcttcttcttcttcttcttcttcttcttcttcttcttcttcttagtttgattcaaaaaatctccttcctcttcttactttatctcgtattatccattaatcctaaaccctttagtctctccatcttccgcttcaacaatcagaatttgggtttggcgaaagatgctaactttgaaagtgagactaatcgtttgagtaaaaaacatg

SEQ ID NO: 26726 - DNA, 3000 bp, Unknown
  misc_feature (1)..( 3000): 2750-1469P.txt file - cDNA_ID_2715665; gDNA_ID_2213647; Annot_ID_132398
acatagcatctttctcatctatgttctttggtcattggttcattggtaaagagctacagagcatggcttgctattcatgaacacattatgttagtgaggtgctcagaatcttatatcctacagtaagaatataaaagagcagagaattgtagaaagttgcattgaatctgataaagaaaacaagccgcgtcaagaggagccagagatttattcacttatttgttttccttgtatttttagtacacaacatgagaggtcataaatagactgagtagacccattgtgtgagttgatcaacccctcaatgaatacttcttcccagagaaagcttgaaacttgggctcgtctttcttctcttgttcctctttctttgtctcttttgcagctccaacctgaaaaaaaaaattaagagatgaacaatcatatgcatttgtctctcaattccattacagtttttgttttgtcaattatcaataaactctgaatgcgtactttcggagcagcttcttttggagcacggtttccgttagccccaaatacaagctttccctgagctcgtgtagctttctctgagctacttgctacagatgactgtccattaccattagcgacaacaggttgtttgccttttgagctagaggctggcgctggctcataggcaagaggtctcccatctaaccgtcttccagatccggtgaaagggttgaactttggttcaggttcatccacaacctcctcagctgtgaaatttggaaagaaaagaacacatgagaatctaacaacttgaagctgatagtaagtccatctgatgatttcatgtccatggatagataccttttgccggacccttagctgcagaaggtgctgtgggacgttcaggctccttgtaatcgaggggaggtgcgaaatcaacctcacagtctgtttctatgatgctgattgcgttagcaggctttgtttcaactatatctatgaagtacttcttattgttgtatggaaccataatgctatccccactagttaggcatgaataatttctcaaagcagtctccaagctgcaacgttcactcaattatcagtaaagaatattgggaacaagataaaaagagtgacatcaaacaactacgagccagaaaacgggaagaacttagatataataatacattctctaagcaataaacaacatgatgtgggaaagtatatgagggctcaaatacaagagggtagaaataagtcggactcacatggctttcgggttggatatatccaggaagtctgttgtgtggggctgtagtttaacgtaagttccctttggaagagtgacatttctaactctcacaatgtctccttcttgcagcagcagattctgcatcatctggattatatcaaagaagcaaacaatcagtctggtaagtccacatgatccagagtacttcgattcacaaacaaagaggaaactgattcttacccaatatggcatgtaaatcatgccttcttctgcaatgaactcaaggactccacagtgtgtaacacgttcaattccagcattacgaagctcaaacagcatcggatagtcaatatgcaaagaggctgtaaagtccccaatattagcgatttgatatgtttctaagttaaacaaatattagaccaaatccaaaagagaaaaccagtaggagcatacctagacgatcaagggctgatggtggcattataactgaaatagaattaacacaaattaaaacctcaggcttgaacaatacagatggaaacaaacattggtgtctagatagaagacttactcttgtcaccactttcaagttgtggctgcagggaagagaaaaggaaatagaaattagatactagatctcagctttcttatagaacttacttagtagaacatgacaacgactaagattctaacattacaaaagagcactctcagattcacttatcagggaattaaactaaaagtagagagatgaaatcaaaccttgtcgataaaagatgccggataacaccggtaactctgctcaaaggttgttccatgataatggtatccatcgaaaaactgcatcgagtttaaattccaaaggtttagacaaacaaaccaagggtgcgagatataaaagctagagtgaagactaacggttaaaaaggaaagctttgaatacacttaccatagttattggtggtagtagactaacagagtaagttaacaaatggcaacctacagaaaaagaaacctcacacaagtcaattacaagagatccaaatcataaaagagaaaaagagggcactctttaatttaagggtttcaataatcaattgtggccaacaattccgaccggaaggaacatcaaagttagtgactttaacagataactaaacaagctattatcaaaaacctaagacctcaatttcgaatctcagcagaagaatagaaacctacaaaatcgaagaaccatctacaacttgcaaaatcccaccttttgaaacaaacccaagtaagatccttggaaacctattcctaaacaattcaccggaaatccccagaacagaagattccgatcaaaagttgagagtgggatcgatacaaacaataccaaagctaaaaactttacaaaattaaaagctcgtcttgagattatcagagaagaataagaactcagaaaccaccgattgagctgcccgaccaataaaattacctttaggaagtaattgattccagacacaacccaagtaaagatgcaaactttgaggacctgtgataacgttgcttgtatatatatatacccatacggtgcgtattgattcatgtctttgtaaaacagtttgggcttcacaaaaaacggtactagcccattgggcctcgaatagtgaggaatcatgaccactttatattgacgtgtgcgttaccaacttaccatactgggaaactctcaattctgagcagatatctacccaatcacggattgaggagagaagcaagaagaagaaatg

SEQ ID NO: 26727 - DNA, 3000 bp, Unknown; identical to SEQ ID NO: 26726
  misc_feature (1)..( 3000): 2750-1469P.txt file - cDNA_ID_2715665; gDNA_ID_2213647; Annot_ID_181465

SEQ ID NO: 26728 - DNA, 3000 bp, Unknown
  misc_feature (1)..( 3000): 2750-1469P.txt file - cDNA_ID_2715669; gDNA_ID_2213647; Annot_ID_132397
tagtagactaacagagtaagttaacaaatggcaacctacagaaaaagaaacctcacacaagtcaattacaagagatccaaatcataaaagagaaaaagagggcactctttaatttaagggtttcaataatcaattgtggccaacaattccgaccggaaggaacatcaaagttagtgactttaacagataactaaacaagctattatcaaaaacctaagacctcaatttcgaatctcagcagaagaatagaaacctacaaaatcgaagaaccatctacaacttgcaaaatcccaccttttgaaacaaacccaagtaagatccttggaaacctattcctaaacaattcaccggaaatccccagaacagaagattccgatcaaaagttgagagtgggatcgatacaaacaataccaaagctaaaaactttacaaaattaaaagctcgtcttgagattatcagagaagaataagaactcagaaaccaccgattgagctgcccgaccaataaaattacctttaggaagtaattgattccagacacaacccaagtaaagatgcaaactttgaggacctgtgataacgttgcttgtatatatatatacccatacggtgcgtattgattcatgtctttgtaaaacagtttgggcttcacaaaaaacggtactagcccattgggcctcgaatagtgaggaatcatgaccactttatattgacgtgtgcgttaccaacttaccatactgggaaactctcaattctgagcagatatctacccaatcacggattgaggagagaagcaagaagaagaaatggagattacactgaacagtggcttcaaaatgccgatcatcggcttaggagtttggagaatggagaaagaagagcttcgagaccttatcatcgatgccatcaagatcggttatcgtcatctcgactgtgctggtataacttaacactgcttaaaaccttttctttctgatctttgttgcttcgggtttgtcaggatatgtgaataaaatattaggttttgttttaatttgttgaaagttggaatcttacttggaaattatgtcttaagatttgggtttttaagtatttggaaatttggaatcgtagaatgatcttaagtctttgctgtatcacagacaattgtttttgtttctttgcatgtgagtgagttgctttgttctgtatcctgatttatgagtatcttttggggttacttggttcagctaattataagaacgaagctgaagttggtgaggctcttacagaagcattcacgacaggtcttgtcaagagggaggatctcttcattacgactaaggtccaaacggctttaagttaaactactacatacctttgatatcagttcatttcagatcgaatgctctctgtcttggttttgcagctatggagttcagaccatggccatgttattgaggcatgcaaagacagtctcaagaaacttcaacttgattacctcgaccttttcctcgttcatatacccatagctacaaaacacacgggttaggcttcagccttgttcatgaatattatcagtttcgagtagagaccattgcatttcagccttgttactggctggaaaattaagttttctcaagtctctagcaattggcacacagagtaataagctgtaacatgtaagccttgtgcaggaataggaacaaccgatagtgctttgggggatgatggggtattggacatagatacaacaatctctctggaaactacatggcacgacatggaaaagcttgtttctatgggtttagtccgcagcattggaatcaggttcaacttctctcactatcattacaagttctcttgtttagtcgccaatatatgaattatttgaccattaggttttttgcagtaactatgatgtctttctaacgagagattgcttggcttactccaagatcaaacctgctgtgaatcagatcgagacacatccttacttccaacgcgattctctagtcaaattctgccagaaacatggtatctgtgtcactgctcatactcctctgggaggtgccacagccaatgccgaatggtttggcaccgtgtcatgtctggatgacccagttctcaaagtaagccccatcctctaaaccttaaaagtttggactgaaacagttaaataattaaaccttttgtctgtctgaattcataggatgtggccgagaagtacaaacagacagtggcacagattgtcctgaggtggggaattcagaggaacacggtggtgataccaaagacatcgaagcctgaaagattggaagagaattttcaggttttcgacttccaactatcgaaagaggacatggaagtgatcaaaagcatggagaggaattaccgcacgcaccaaacagccaagttttggggcattgagctctacgcttgatcacacacacactctctctctctatctatctatatgaataaatgaagcttaagaatataatatcagataacttcaacttttttaagaaaacctaagactccaatttcgaatctgagcagaagaaaagaaacctagaaatacgaagaaccatctccaagtttcaatatcacaccttttgaaacaagcccattaagatcctaggaaacctgttccaataccactcaccggaattccacagaataaaagattccgatcataaattctacaatcatcgaattataatagtgatatcgatacaaacataccaaagcttagaactttacaaaattgaaaactcgccggaaaaaaagatgcaaaggggacctctgattaaacgacgtttcttcttgtttgtcctctcgcatcaactgtactgggcctaataaataaacggttctggattattgggcctaaagtagtgaggaatcatggcccctttatataacgtgtgcgttactaaaaacacacactgagaaactctcaatctgagcagatatttacccaatcagggattcaggaagagaagcagagaaagaaatg

SEQ ID NO: 26729 - DNA, 3000 bp, Unknown; identical to SEQ ID NO: 26728
  misc_feature (1)..( 3000): 2750-1469P.txt file - cDNA_ID_2715669; gDNA_ID_2213647; Annot_ID_181464

SEQ ID NO: 26730 - DNA, 3000 bp, Unknown; identical to SEQ ID NO: 10429
  misc_feature (1)..( 3000): 2750-1469P.txt file - cDNA_ID_2715686; gDNA_ID_2213648; Annot_ID_132425

SEQ ID NO: 26731 - DNA, 3003 bp, Unknown
  misc_feature (1)..( 3003): 2750-1469P.txt file - cDNA_ID_2715690; gDNA_ID_2213649; Annot_ID_132453
ataggagcagacttgtgtttttcgagaggaggaaacagtttgagcttgatgatttgttgaaagcatctgcggagatgcttgggaaagggagtttagggacggtgtacaaggcggtgttagacgacggctcaacgactgtggcggtgaagcggcttaaagacgcgaatccatgtccgaggaaagagtttgagcagtatatggagattattggtaggcttaaacaccaaaacgttgttaagctaagagcttattactatgctaaagaagagaagctcttggtttatgagtatcttcctaatggaagcttgcactctcttcttcatggtaaaactctcttctctaagctttgattatcaaactgaaaatgctctgttttgcttagtgacaaaagtgttgatttttactacattatcggccaaagttatgatttttttattggtggttttagggaatcgaggaccaggacggattccattggattggacgacgaggattagtctaatgttaggagcagcgagaggattagcgaagattcacgacgagtatagcatctcaaagataccacacggcaatatcaaatcctctaatgttctattggacagaaacggcgtcgcgctaatagctgatttcggtttatcacttttgctaaacccggttcacgctatcgctcggttaggaggataccgtgcgccggaacagtcggagatcaaacgtctctctcagaaagctgacgtgtacagttttggtgtgttgcttctcgaggttttaacaggaaaagcaccctcgatattcccgtctccgtctagacctagatcagcggcgtcggtggctgtggaggaagaggaagaagcggtggttgatttaccgaagtgggttagatcggtggtgaaggaggaatggacggcagaggtttttgatccggagcttttgaggtataagaacatagaggaggagatggtggcaatgcttcatatcggtttagcttgcgttgtgcctcagccggagaagaggccgacgatggcggaagttgttaagatggttgaggagattagagttgagcaatctccggtcggtgaggattttgatgagtcacgaaactcaatgtctccgtcgttggctaccaccgacggctaagtttggtttctgtctgtcgatgttgtagaatacgtatcgtttggaccttgtcgatttttaaggttcttgcttagaatccctgatttgcgaacttgtcggagtttttttagccatgttttgtgttttcactgtttgtgatcgtaacggggttgtgtggttttgtggatttatgaagccgtttcaataataaaaccccatttgttactctttaaagcccattaggcccatatgttttagatgaattattttgcaattgctgctatttaattatagaacctaaaactcgaacgcccattgattagtgcttctagaacggtggatgcttctgtgtccactggtaattgtctttttggttgaagagtcagcccttcggatttgacctttcgtgtaccttttaagcccattgattatgattggcagattaagtaaattaacgaatggtcaagcacatgattagccaaatcatgacaaataaatggattcctttttcatttctggaagcggaatcttgtctaacaatttttttaattgatagtaatattttatgttatgggtttctgatagttgaagacttgaaatgttgaacttaaaagtgaaattacgctttcataatttcattaagccatgatggcaagttttttttttgggttgaggtcaacaagagcaagtttaatggtatcgaatagtgcgtaactgaaataaaacttgttgaaaaatcattcattcactattcctcggcgcgtgaggccaatttgaccccttcccccacgaaattaaacttggggagtactaaaagtctaaaccagcaacgtcgcttttcatgtgccttaatcacacccttttctgccacgtgtacgatctgggaccgtcgttgtgctcattgacatttgtagatccctttctagatgttcattaaaattacttaatttatatccagtccttctacttttagttttttgatactttaatccctgttgttttaatgatacttcattcagtatccatccaaaatcaaattaaatccatagattaagatgtacatttttgaaaataataaatggtttattataatatgttactaaatttatggtatttttcgctcttgtattgacttttacatggatacattaattttaatcttctttgatttctgttaattttctttgaattcattttatacatttattagtgaactattctaaaaattaacaaaatcatttaaaccgacaaaaaaaactttaaaagatcagcgtattataaaccaacgggggatagtttgcattaggtattggacatctggggggtaaatagagcgaaacaaaagttgaggcttgtttttcaacattttcattttattgtgtgctatttaaactgcgtcgtatttggaggcatattcgccggtcaagcgtatcaaatacccaatcacgcgaacttttctccgcctcttctccactccaaaattcttctccgtctttctcccgtcaccgtcgaataaagcctgagatctccgaattctgatcagcaactatgcattcaagtcatctccttctcgaggaaccgatcaggatgacttcaatcctcgaaccttctaaatcagtgagctatttatttctccttctctcgctctgtgtgttttctgtggttgttttgatttccttagctcgttgttgattatcgattacgtttggatctgttgcgatatttcatccattttgaagcagtgagagatttgtttcgtttgtcgtggtttttgatccgcttgatgttatttcgcagagtttcttcccggctttgactaagattgttgggactctaggtccgaaatctcgatccgtcgaggtgattgctggttgtctcaaagctggaatg

SEQ ID NO: 26732 - DNA, 3000 bp, Unknown; identical to SEQ ID NO: 10441
  misc_feature (1)..( 3000): 2750-1469P.txt file - cDNA_ID_2715700; gDNA_ID_2213649; Annot_ID_132446

SEQ ID NO: 26733 - DNA, 3000 bp, Unknown; identical to SEQ ID NO: 10436
  misc_feature (1)..( 3000): 2750-1469P.txt file - cDNA_ID_2715704; gDNA_ID_2213649; Annot_ID_132445

SEQ ID NO: 26734 - DNA, 1855 bp, Unknown; identical to SEQ ID NO: 10488
  misc_feature (1)..( 1855): 2750-1469P.txt file - cDNA_ID_2715726; gDNA_ID_2213653; Annot_ID_132495

SEQ ID NO: 26735 - DNA, 3003 bp, Unknown
  misc_feature (1)..( 3003): 2750-1469P.txt file - cDNA_ID_2715730; gDNA_ID_2213653; Annot_ID_132494
ccctgctaacaacatcactaccgaacagatccaaaaggttccttctttctcaccctatatctctccctctctcttaatttgttcaacactacttaggaggctcttagagcttttttgtactgacaaaatcattggcttctgagtgcaagtaatactcttttgactgtaattggtggcaattagggttttcatttgaatctttctcgttaattccacaacacttgagagtctgttgttggtgatgatgagaagagacagtttctaggactaggaaattagtagatgcttggtgggtcaggaaactttgaatccggttttcaagaatggacattgaagttagatgcttgcttgatgttgttgttttgtactttctcttggcttgatgtcttccatggtaagatgataggctgcatcgtcatttccttgtcattctctttcctttgcttaaacgcagtaccttgatgagaacaagaagctgattatggccatcatggaaaaccagaatctcggtaaacttgctgagtgcgcccagtaagtctcaccttttctatccatcttcttatgtctcttagatagtaatggaagcttagaattactattattaatggtgaggtttatatagttattctatcttttgctctgttatattttcaggtaccaagctcttctccagaagaacttgatgtatcttgctgcaattgctgatgctcaacccccaccacctacgccaggaccttcaccatctacagctgtcgctgcccaggttgtttgtgatgataaaactcaattgcgatctatcacagaaatttaatgttgtttgggggtttgcttactgttgggtatgatttctgttagatggcaacaccgcattctgggatgcaaccacctagctacttcatgcaacacccacaagcatcccctgcagggattttcgctccaaggggtcctttacagtttggtagcccactccagtttcaggatccgcaacagcagcagcagatacatcagcaagctatgcaaggacacatggggattagaccaatgggtatgaccaacaacgggatgcagcatgcgatgcaacaaccagaaaccggtcttggaggaaacggtaactctctttacattattaagacaatactcaatctcataaattgtaacttgtatccattacttctttctttgctaacagtggggcttagaggaggaaagcaagatggagcagatggacaaggaaaagatgatggcaagtgaaaaggatccaaagaagctttgttttgttgatatttaggacttgtgagtctcgtaagggctttttgcaatagcttgtttgagttttttaacagaagatagactgtggagtagttccgcaaaccgtgttgtaatgtattgttatttagtacaagctcggatttagaaaacatcgtcatcgttcatcttattctgaaaatcaaagcattgaacttattattttctcattccggacgagtcttgacgatgaaattctgacggctaatgggattcataacaacgggaggaccagcggttcttggccatgcttggaatttctcatccgttgctgcccaccattctttgttagagacagttcctggagtagtccctgaaattttcacaagaagataaccattaagatcgtccctaacttgaaaacacacacaaaactagataaatcttgagcagaacttgcctccaaagatcttattatcagagataactttgtcgaagatgtatgagattccgaaagaaccgatgagagcaccgattatgtacttggctttacctcctgatgccattttcttctaaagctgaaagtgaaccattattacaacttaacactcaactcacaagaggagaagcaacaaagcttatgtaaggatttagtattaaggccaaaaaaacacagatcaaattcaattattgaagctttacttatcaagttatcatataaccaatgaagacggtaattcaaaagaaaaataaaagggtttgtagaataattgatacgtttacctttgccgattcagagacagtgaagcttaaacagtggactccagttccagaagaattcaacggtggaagacggtcgtccaactctatcgtcttatctctttaaaaactttggataaatctctgtgaaattaccaaaatgggcattgttttctgaaacgttaattactagttttattaagagacaaaactacaatcatcacaagggaagatataatagcaaatctactagtttgctgaatttcatcatacgtctagctcgagtaattgttataaccaaaacctgtaatatgctaatttgctagttgatatgaatttatttatttatcagtaaggaaaggtccaagtgtccaacattgttttcggcgtatgacacatactctattataagatgatctcggcgaatgccacatatattaaacactacactttaattcttgcagaattacgattcaaaactctttttttctttattctttcgaatcagtgctgcatttgacatgttcaaaacatgattctacttattattgactattgaggtcgtgtcgtgttataacatatgatttcgttggaaaactgtaaatacactaaagattagagattcgtagtttcatttattaataggtctaggggagttaaataagtttttgttttatatggtttttctaaactcataaaacccgaaatacagaatgaattaagtcaaggattaaagcaaatgattttgattgtaaatgactacatcacatgtagctttctagacacgtaaagtcaaataaatacaaataaattagatcacgacgtgagcaatttccttatccgactgtatttaaacgtctcaacaaactgacccgccaaaataatcataaataaatttccataattcgaattatataaacttaataacaaaaacaattatccttccttaatcctattttgtttttacttgattcttcattctcagaaatcttgaccatg

SEQ ID NO: 26736 - DNA, 3003 bp, Unknown; identical to SEQ ID NO: 26735
  misc_feature (1)..( 3003): 2750-1469P.txt file - cDNA_ID_2715730; gDNA_ID_2213653; Annot_ID_181662

SEQ ID NO: 26737 - DNA, 3000 bp, Unknown; identical to SEQ ID NO: 10476
  misc_feature (1)..( 3000): 2750-1469P.txt file - cDNA_ID_2715738; gDNA_ID_2213653; Annot_ID_132490

SEQ ID NO: 26738 - DNA, 3000 bp, Unknown; identical to SEQ ID NO: 10474
  misc_feature (1)..( 3000): 2750-1469P.txt file - cDNA_ID_2715750; gDNA_ID_2213653; Annot_ID_132485

SEQ ID NO: 26739 - DNA, 3000 bp, Unknown; identical to SEQ ID NO: 10473
  misc_feature (1)..( 3000): 2750-1469P.txt file - cDNA_ID_2715754; gDNA_ID_2213653; Annot_ID_132484

SEQ ID NO: 26740 - DNA, 3000 bp, Unknown; identical to SEQ ID NO: 10470
  misc_feature (1)..( 3000): 2750-1469P.txt file - cDNA_ID_2715762; gDNA_ID_2213653; Annot_ID_132482

SEQ ID NO: 26741 - DNA, 3003 bp, Unknown
  misc_feature (1)..( 3003): 2750-1469P.txt file - cDNA_ID_2715765; gDNA_ID_2213653; Annot_ID_132481
tatatatatatattttttaagtatagaaaatagaaatatgacgtgctaaattgagctatggacaaaatcatatatgagaaaatgaatgtagatggatagagtcgtcccacacttaaggttggtccacaatgaataccgttggaggcttcgcaggcttttgttctgtccttgtctctctctcccctaaaaaaaatttgttacgaaaaattcatttgaattaattttggtcggtatgtgtataatattatacaattataatatatttctaggtttagacatttttttattttatttttcatgaagtaaagaacacaaacaaaaacccataaaataatgtaagatagataaaacaagaggatgtcgtcataaataaattggaatttggcatttaatgaaaaagggtgaaaggtgcttgacatacacgcgccgtagtttcttacccggaaagggattggtattgatgttaactagaccgggcccggtttaggctggggcggcggccgaaccgaccacctggctactattcttgtttgtattcgctgattctgcaaatctaaactcggatcttttatggacttggattttcgggtgggtggggttctgctaaagagacggcgctcttgtcattttaagtcggtcactgcaaaacgtgaaccctgtgactgtatttagagtctcgttacgttggatctctctccatgaaccgtccaaagtaggtcaatttttgtgggttcactcacgtatacaacgaagtacggcgctatttaattttccgaaaattttgaaagagacttttataccagaaaagtttgtaatccaaatttttaatatattgcagatttggttcgttttgggcttaaagagcttttattggtgtggtggctcaaatcgtttttgtaggcgtcaggtcaggcccattttcaatgtcgcttgctcatttgatacgctaatatagggctttgcttaagatttgaatgggccgtacccccattttgcttcatgagaatgggatggtaataaagaaaaaaatgacaggaaacaatgaattggtcacgaaaaaatgttgtattactttttccaaaatgcacctttgagaatcttaagattcaatcatacagtgaggtccatgtccacaataagaaatcaaataccaaacaaagtataaacgtgaattgtaagctaggcagtgtatgaagatgcatttgtcttaaagttacgaatctgataaataatattattcgatcgactttagatcgctttccatgcagatttatgcaattatctggaagaagaacaaaacaatatcttagtttcttcggcctcactattcgacttctatcttcaatatattttcgcgtatttttttatttgaattatttggtttttggttagttaactaaacgagcaacagaaccaagatcgaattgcgtttgccgtttggattcaattattgtagaaaattcgacttttcagacatttgttacgttctttctagtagttatattagttattatatgtggagtggaaagagatgaaagtagatgtaaaacataagtgatttcttcatagtgattttaaaactttttgttgattttcaaaattatataatatccataaaaaatagcctatgcgtgttggatgcttacaaagaagaatttgttttcggcgttagccaaaagtcgatggcatttgctaaaggtgttatttgagtggaaatgatctagaacaaaaacgcattgatataccaccactataatgatttggagacgtatctagttctcatcaacttttcaatagtaaacgcattatcaaggtaaacgaagagttttgctttatcagtgtaccatacacacattaatagattgatggacgttagtgactttggtattgactttaacgccaaatggacatcaattctgcaaggcaatgcctagtttcaaagcagcgttacttaacatttaactaaaggtagtgcaaactggttaatactttttaacggctttgcaggaagagtctcgactaaaaggagaggaagagatgagatcgacgaagattttcatatcataaaaagtaatataggtttttgaaaatagttagaataattatttttatttttatttttatgggaaagaagttgcacgagtcggtccacagaatgacagaacaaaagcattttagaagtttagaaccaaccaatcactatagttttccacttgtccgtatctcattggttcatcgaatattaacttacatggaaacagtaaaaagcgtggaataagtcgtaaaactgaaatctaaaaatgaaaagatttcgatttcgatataaatacttaatctttataaaataatatcgaaatcttttcatttttagttttcagttttacacttttacttgataaatttaatacatctgttaattttttttcttctaaaattaacatatgatatctattcgggagataaccctaagaaaactgataaaataaataagttactttttacaaagtcgaataaattatttacccttctgctttaatggcaattatcttaatattgcaaaaaaaaaaagagagaaatattactacaaaacagaagcaagcaagtggaaaacagaccagaagagagaggaagacgaagagagaaacagaacagagtagggatcgatagaccgtggaatctcagaatcacaaacactttgcaaaagggttttcaattcctatttatttacaaagaaatcatcaatagtagtggtctctagggttttgcttgctcttcttcgtgacccctttttacctgcaaacaacaacttcaaaattggcgtgtttcgtacggtctatctaaccctaatctgtcacaaaacactcttcttctctcacccctttttctgggtttattcaattctcgtgcttttggttctgttttcttctctggggatttggttttcttgagtgagtttttctcctctttcttatgttcttgatttgattattatatagaattatg

SEQ ID NO: 26742 - DNA, 3003 bp, Unknown
  misc_feature (1)..( 3003): 2750-1469P.txt file - cDNA_ID_2715777; gDNA_ID_2213653; Annot_ID_132478
ttagagtgatttggatgattcaagacttctcggtactgcaaagttcttccgcctgattaattatccattttacctttgtcgtagatattaggtaatctgtaagtcaactcatatacaactcataatttaaaataaaattatgatcgacacacgtttacacataaaatctgtaaatcaactcatatacccgttattcccacaatcatatgctttctaaaagcaaaagtatatgtcaacaattggttataaattattagaagttttccacttatgacttaagaacttgtgaagcagaaagtggcaacaccccccacctcccccccccccccccaccccccaaattgagaagtcaattttatataatttaatcaaataaataagtttatggttaagagttttttactctctttatttttctttttctttttgagacatactgaaaaaagttgtaattattaatgatagttctgtgattcctccatgaatcacatctgcttgatttttctttcataaatttataagtaatacattcttataaaatggtcagagaaacaccaaagatcccgagatttcttctcacttactttttttctatctatctagattatataaatgagatgttgaattagaggaacctttgattcaatgatcatagaaaaattaggtaaagagtcagtgtcgttatgttatggaagatgtgaatgaagtttgacttctcattgtatatgagtaaaatcttttcttacaagggaagtccccaattggtcaacatgtgaaagcacgtgtcatgttcttacttttgtttgggtaatcttctaattactgtatatggaagatgtgaatgaagttttggtcctgaatgtggccaaggttccgtcatttggagatacgaaatcaaatctcctttaagattttgtttttataatgtgttcttccatccacatctatctccatatgatatggaccatatcatacatcatcatttgtccaaatgcatgaatgaatttggaaataggtacgagaatgccaacaatgacaagaagggatcaaagacagtttttaaaacaatattttacagggttttaatctaattctaagttttggtcactcactttgttaaaagaataattcagtgtctggacactaaaatcttccaaaaaccccatatacatatatgctatttcgatacttatatttatttactcagcataaaaaatattaaccatgtattcatagtaaaatgtttcatgtgatatcaaaccagcgacaacaaaagtattattcccctcattatgtttgactcctattatatttttattttaatttttttcactatcatctttcttgcaatgaaagtcccatatattggtcaacatttcaaaccacttgttctcttttatgttttggtaagagctatcttctaaatttataatacgcataaattcaaaagtaaaagaaaattttggtcatgaatgttgtttaagtcatttggagatacgaaatcaaatctccttgtagattttgtttttagaatgtcgttcctttttcatcatcttagctatatctacagctatatatcctatctttaaacctatattattttttcctctcttcaccaaagccatgttttttagttgtggcgaaaaataagaaatccatacatcaacatatcgctttcgttaccttaaattttggcttgttatgaaggcatgtcataacgtttctagtcacaactcacaagcataccaacgaccatgataaatccaaaaagtagaaacaatctattatctaaacccccaaaagacaaaagaaaaaagtagaaagaaaaggtaggcagagatataatgctggttttatttgtttgttaaaagatattgctatttctgccaatattaaaacttcacttaggaagacttgaacctaccacacgttagtgactaatgagagccactagataattgcatgcatcccacactagtactaattttctagggatattagagttttctaatcacctacttcctactatgtgtatgttatctactggcgtggatgcttttaaagatgttacgttattattttgttcggtttggaaaacggctcaatcgttatgagttcgtaagacacatacattgttccatgataaaatgcaaccccacgaaccatttgcgacaagcaaaacaacatggtcaaaattaaaagctaacaattagccagcgattcaaaaagtcaaccttctagatggatttaacaacatatcgataggattcaagattaaaaataagcacactcttattaatgttaaaaaacgaatgagatgaaaatatttggcgtgttcacacacataatctagaagacagattcgagttgctctcctttgttttgctttgggagggacccattattaccgcccagcagcttcccagccttcctttataaggcttaatttatatttatttaaattttatatgttcttctattataatactaaaaggggaatacaaatttctacagaggatgatattcaatccacggttcacccaaaccgattttataaaatttattattaaatcttttttaattgttaaattggtttaaatctgaactctgtttacttacattgattaaaattctaaaccatcataagtaaaaaataatatgattaagactaataaatcttaatagttaatactactcggtttactacatgaaatttcataccatcaattgttttaataatctttaaaattgttaggaccggtaaaaccataccaattaaaccggagatccatattaatttaattaagaaaataaaaataaaaggaataaattgtcttatttaaacgctgacttcactgtcttcctccctccaaattattagatataccaaaccagagaaaacaaatacataatcggagaaatacagattacagagagcgagagagatcgacggcgaagctctttacccggaaaccattgaaatcggacggtttagtgaaaatg

SEQ ID NO: 26743 - DNA, 3003 bp, Unknown; identical to SEQ ID NO: 26742
  misc_feature (1)..( 3003): 2750-1469P.txt file - cDNA_ID_2715777; gDNA_ID_2213653; Annot_ID_181641

SEQ ID NO: 26744 - DNA, 3000 bp, Unknown; identical to SEQ ID NO: 10725
  misc_feature (1)..( 3000): 2750-1469P.txt file - cDNA_ID_2715781; gDNA_ID_2213670; Annot_ID_132765

SEQ ID NO: 26745 - DNA, 3000 bp, Unknown; identical to SEQ ID NO: 10725
  misc_feature (1)..( 3000): 2750-1469P.txt file - cDNA_ID_2715781; gDNA_ID_2213670; Annot_ID_182272

SEQ ID NO: 26746 - DNA, 3000 bp, Unknown; identical to SEQ ID NO: 10722
  misc_feature (1)..( 3000): 2750-1469P.txt file - cDNA_ID_2715784; gDNA_ID_2213670; Annot_ID_132764

SEQ ID NO: 26747 - DNA, 3003 bp, Unknown
  misc_feature (1)..( 3003): 2750-1469P.txt file - cDNA_ID_2715786; gDNA_ID_2213670; Annot_ID_132759
aaatactaaatacataaataccataagaactcttgtctaattcataaaaggacattattggggtcgcataaacatatgtaaatcagatcgagaaatcagaatatatatacattttagcttgatcaatttaattaatgttttagttgggaatatatttagccttgctttgggtccacccacctccatcaattatcattcttttatctttttgttttgacaatccaacagtggttgtgaatcatgtggtagcttcgcacctatacatgatccccacaaattgaatttataaattacgttaatctcgtaagaaacagacaaaactatgaaatgtcatataactaaggttccattcttcgatcagataaaataaccaaaaaaaaacaaaaaaaaaactacactcgatcacgcaagtaacaaaaaaaaatgtgaagttaaaggtttttttttactcaacataatactttactacttatcactttactcgttaatcaaacactcatactaacgactattttaaacttaagccatcttcaaattttagaaatggagaaacggcaattttgcttcgcattttggtctacactatatacggttttaagtcattttgctgtatttttatgtactcaagattaaactgcattcttctacactataattgtaaatgattatgaaactctgaatcagtgactgtctttttgatataactgtaagaaaacgatagaaagtgctttggagacttttttttgttttgttaaagggtttaagtgctttggagacttgtagtaacatttatacgtgattacaaattgtgatcatgatatagactttatggattataaaatttcgtgcccacacaatacaaatcactaaagatcccatgtgcccttgtctgcattcacttaagtctttttcgtttttattggatatcttttccatctagaaagatatatttagatgtgttgcaatttcacttttcatgataggcacagtctttatgtatatttggataaaaactgggacatatctaaaagtaatgttttacgataaatactatcacaatttaaatcgaaaattatccttcaaaacgaatatcaatatgtattcattgagagattttaaaacttagggattcatttgttggtactagcgtttaagttttcataattaagaactacggatgtatacatagatatatgataattttattttcgtagtaattgttatgataatctttgttcttttgaagtcaacaacatatattatgcgaatttttaaactacattatatgtttagctcactattttattttgaatatctcataagtatgtatatatacttacacattgttatagtgagtgtaaaaaagagagagacagtttagtaatgattgagtatgcagctcgtgggcacattattaaattgaatggtatgatggatatgcgcagacactgtcttgtgtgaactcaagaatcgatacagaacgacggcattaaaaaaaaagaaaaaattcaatataagacgaaaatgatgatggaaaaaaattcttttatttttaccaacgaaatgtatgcgatatgaactagtagtatttaattcactgtgtgaattagtagtaatatttaagcatgtgaatatgtttgtgtacgtattgtattgccacaacaaaacagcatgtcgcagcattgatttcattatcacctaaccgttaaatacgtcatggccctagacttaatgtattttagacttaatgtattttataccttattttgatatgtgtacggtcgaccccctcacaaaattgaaatattacgactatgcattgaaaaactatacacaactacattgtcaaatactgataagatcttaacacagaaacacatattatcactaataatgtaacgtgacaacattacattgctttacacacattttttttaatctatttaagatgattggatgatattgtcatttttctctataaatctaagatttttattgtctttataatctaaattcgcaattattacaacaaaaaattatcaaatctaaatttatttttaaaatccacgataattattctcattctatttcattggaaacaccaaccaattattttaaaaaacagaaaacatattaattaaaaaattgaattcaaattctatttaccattctaaaaaaaaaattatgcactgattctgtaaacgttgacaccgttaacgtagtcgtagatatgcactgattctgtaaacgttgacaccgttaatgtaatcacatcgaataaaagacatatgttgatcgtgtaaaggtataagatactcgatctataacatcgttgtcaaattccatgttgcatatacattatattgctttacacacatttttttatctatttgatcgtctgtgaattaatatgataatttgatggtattattgttatctttataatataaattcgtaattattataacaaaaaataaacagttttatcttaatatccacaataattattttcattctcgttgatttattggaaaagccagccaattatattaaaataaataaaaacaacatattaattcaaaaaaatttgaattcaaaaaaatttatcattctaaagtaactagatatgcactaattgcactgattttgtaaactttgaaactattaatgtaatcgtaacgaataaaagacacgtatcaatcgtgtaaggtataaaatactcgatttttaacggcgccgtcaaattctccgttacatattaaaagaattactattcctacttcacacgaggctttatatgaaaatgacaagagttaatcgtggccgttaacaaattacgatcaaaacgaagatcgtcaccatcttataacagaataacccaaatggtacgcgagctagagactctctagtagagagaaagagagagaaacacaaacacgcacacataacgagtgattttagagagagatagagatctggaaggtgacgtcgtaggagattatg

SEQ ID NO: 26748 - DNA, 3003 bp, Unknown; identical to SEQ ID NO: 26747
  misc_feature (1)..( 3003): 2750-1469P.txt file - cDNA_ID_2715786; gDNA_ID_2213670; Annot_ID_182263

SEQ ID NO: 26749 - DNA, 3000 bp, Unknown; identical to SEQ ID NO: 10526
  misc_feature (1)..( 3000): 2750-1469P.txt file - cDNA_ID_2715789; gDNA_ID_2213659; Annot_ID_132517

SEQ ID NO: 26750 - DNA, 3000 bp, Unknown; identical to SEQ ID NO: 10526
  misc_feature (1)..( 3000): 2750-1469P.txt file - cDNA_ID_2715789; gDNA_ID_2213659; Annot_ID_181816

SEQ ID NO: 26751 - DNA, 3000 bp, Unknown; identical to SEQ ID NO: 10525
  misc_feature (1)..( 3000): 2750-1469P.txt file - cDNA_ID_2715797; gDNA_ID_2213659; Annot_ID_132515

SEQ ID NO: 26752 - DNA, 3000 bp, Unknown; identical to SEQ ID NO: 10524
  misc_feature (1)..( 3000): 2750-1469P.txt file - cDNA_ID_2715803; gDNA_ID_2213659; Annot_ID_132513

SEQ ID NO: 26753 - DNA, 3000 bp, Unknown; identical to SEQ ID NO: 10521
  misc_feature (1)..( 3000): 2750-1469P.txt file - cDNA_ID_2715815; gDNA_ID_2213659; Annot_ID_132509

SEQ ID NO: 26754 - DNA, 3000 bp, Unknown; identical to SEQ ID NO: 10520
  misc_feature (1)..( 3000): 2750-1469P.txt file - cDNA_ID_2715838; gDNA_ID_2213659; Annot_ID_132503

SEQ ID NO: 26755 - DNA, 3000 bp, Unknown; identical to SEQ ID NO: 10520
  misc_feature (1)..( 3000): 2750-1469P.txt file - cDNA_ID_2715838; gDNA_ID_2213659; Annot_ID_181802

SEQ ID NO: 26756 - DNA, 3000 bp, Unknown; identical to SEQ ID NO: 10553
  misc_feature (1)..( 3000): 2750-1469P.txt file - cDNA_ID_2715858; gDNA_ID_2213660; Annot_ID_132534

SEQ ID NO: 26757 - DNA, 3003 bp, Unknown
  misc_feature (1)..( 3003): 2750-1469P.txt file - cDNA_ID_2715864; gDNA_ID_2213660; Annot_ID_132532
tgcaggactacaaagcgatatggttctcggatgcaactccgaagtatgcgtttgtcacttggttggtggtgaagaatagaattgcaacagggagagaatgctgaaatggaacaaaaacgtgggtactagctgtcttctctgcaactatcctttggagacaagagaacatttatttttccaatgcccttattcgagaacggtgtggagtgaactggcgggaagactactagctagcaaatatacggacaattggctagatatcatgaaggagttagtgagtaaagatcttgacgccactacaaggattgtgcttcggtatgtgtttcaaaacacgatacattctatatggagagagagaaatgagagaagacatggagagacgcgccatcgaggacggagaagataatcaggctaatcgacaaaaacataaggaatcgattaagcacgctaagggtgagaggtgaagagaagtacccaagaggaatccaagtgtggtttgcttcaaggcaagatcaaaatcaaggatagataagatacacatttgatctattttttttaaaaaagtttgcatttatatgtataaacagtttatttttctttgaatataatttaacattaaattttttaaaaaaaaatgcctatgttgcctactcttagagaagcgcataatgtatctttggactttcgacaagaccaaaagttcgactcacacgatgtttttataacaaattttaaccaaaacgacgttgttttataatatatatgatgttatatagtctgttaaagttgagtcttatattgcagcctttgcaggtggagaataaatttaccaaaaaaattaaaagttgtgaatatttatttgcaatttttcttcgctttagaagtttttaaaaattagtattattaaaccgtagtattattgaaaaataatactttttagtttttaaaaaatgtttcacacatgcaagaatttgaagaaaaatccgactgctaaccaaaatactaaaatagcgaattaaacatgggactcataacttttgtattaaatgactaaactaaaaaagatgcaattgaaagaaaatgaattgcatgtttaattggttgcaccaaaaagtttgtttggtgataggaaataactgatgatataaattttcacaaaatgacgaccgctccaccatagtaactactcaaaatttgtcagtgataatgagcatgacaaacatgatttataaagacacggcgagtccccaacacctgcagctcaactaatcaagtttcttgatatatgatacgcaacaaattatcttcagtccgtcgtcgggatccacacaaatacgaggatggacttcggttatggttcgcctctaggaactagttgtttcaatctctttacaaatcttttctcaaaataacatttaaaataaggttgcattcattgtacaaaggttttttggttgaataaattttaaattcattcaaaaaaaaacatgatttataatcatggaactatagttactattttaaaaagtaataaagaactacatggttatccaaagacgtgcgtcccttaatcattgcatgttttttcaatttttatcttttgtctcaaaagttattttgttaaaaatgtaatgaaattgttatcctagatatactcatgttacagaccacacgatcgtaagcttgttagttaaaaaaaaaaacactattatgcctactttattaaaaaaaatctaagagtccactcaaaagtcaaaacactccaaactcgcctaccaaaaaaaaaaaaaatcactccaaacttaaaatccactaaaatgaaccaaaatgcttagtacaagatatcatcttaattgcaatcgaactacctaatgcatttgattcaatatcttgtttcttttaagttttaactatccacaaagccatgacttgggaatgtgattgatcgataaaactttttcatttgattcaatatcattttactaactattcggttattttaaaaagttcggttcggatgcggttttgtttttacggttcggttcattcggttatttgcttaccgatttttctgcaagagagcgcgtttcgtttgtctccgcaaacgatgggacaaagtgggttaagtctgaggttgtttcttcgacttgtctctctagtctctataccaacaacactcaacgagacaagaccatcatcatcactcacttccttccttccttcaaatctcaactaaatcaatagacattcctctctttgtctctctctatccaaatttgaactgtaactgtcttcaaaatcttcatttttctcagacaaattggatctctccttggagcagaaacacccattaaaggaacaatagagagagttttggattgaataatcacagttccacaggtttccttccactctcattatcttaaatttcacttaaaggtcgaaacttttggtccactggtttcattatcttcttttaaacacatcaatttgtttaggatttaacttgtgattttgaattggttttactacttctcctctctcgatttagcaagttaaaagcttttttttttttagtgttcttgagggttttagggtacaattttgtttcctcaggactgggttttgctttcttgtttcatatgtgttttattgttcttgatgaattcattgtacattataaaatattgtctcagctattggtacacagttttctttctccctgggaattgtttgttaatttttaatagagtactaataaaagattagaaaatctgtggttactttagagagctgtggattctacttgtttgtttgtttcttcttattggattagttatggagcaaagtaaaagccttgttcattttctttgttcatatgtaataaaaacaactagtgatatacaagtgttcttggaaaatcttgaatgaaacagctttgaagaagactgaggtttatcttcctctctgttgaaaaaatagaagactgcagtggctacaatg

SEQ ID NO: 26758 - DNA, 3003 bp, Unknown; identical to SEQ ID NO: 26757
  misc_feature (1)..( 3003): 2750-1469P.txt file - cDNA_ID_2715864; gDNA_ID_2213660; Annot_ID_181848

SEQ ID NO: 26759 - DNA, 3003 bp, Unknown; identical to SEQ ID NO: 16663
  misc_feature (1)..( 3003): 2750-1469P.txt file - cDNA_ID_2715876; gDNA_ID_2213660; Annot_ID_132529

SEQ ID NO: 26760 - DNA, 3000 bp, Unknown; identical to SEQ ID NO: 10536
  misc_feature (1)..( 3000): 2750-1469P.txt file - cDNA_ID_2715890; gDNA_ID_2213660; Annot_ID_132524

SEQ ID NO: 26761 - DNA, 3000 bp, Unknown; identical to SEQ ID NO: 10536
  misc_feature (1)..( 3000): 2750-1469P.txt file - cDNA_ID_2715890; gDNA_ID_2213660; Annot_ID_181839

SEQ ID NO: 26762 - DNA, 3000 bp, Unknown; identical to SEQ ID NO: 10535
  misc_feature (1)..( 3000): 2750-1469P.txt file - cDNA_ID_2715902; gDNA_ID_2213660; Annot_ID_132520

SEQ ID NO: 26763 - DNA, 3000 bp, Unknown; identical to SEQ ID NO: 10544
  misc_feature (1)..( 3000): 2750-1469P.txt file - cDNA_ID_2715902; gDNA_ID_2213660; Annot_ID_181834

SEQ ID NO: 26764 - DNA, 3000 bp, Unknown; identical to SEQ ID NO: 10534
  misc_feature (1)..( 3000): 2750-1469P.txt file - cDNA_ID_2715906; gDNA_ID_2213660; Annot_ID_132519

SEQ ID NO: 26765 - DNA, 3000 bp, Unknown; identical to SEQ ID NO: 10534
  misc_feature (1)..( 3000): 2750-1469P.txt file - cDNA_ID_2715906; gDNA_ID_2213660; Annot_ID_181833

SEQ ID NO: 26766 - DNA, 3003 bp, Unknown
  misc_feature (1)..( 3003): 2750-1469P.txt file - cDNA_ID_2715910; gDNA_ID_2213663; Annot_ID_132623
caggcaatcacttgggctccgttggtgattttgacgtcgttgattttcgtctacgtctcgatcttcaccgttatcttcggtagcgctagcttcaatcctaccggaagcgctgccttttatgtcgccggtgtccccggagatactcttttctccttggcgattagattacctgctcaggttttctaaagatccaaacttttttctgaatttttaaacttttttcagcttactgttttgggtttacttggtttctatcaatatttgtgatctgtgatagtttctttcaaatgggtataggcttgtgtttgtctgcgaattagaatctagttttgtctgcgaattagaatctagttttgcatgaatcattgaatccaaagctatgtagtatatgcttttcccgtgatttgtccccacttgtatgccccattttagattagttgagtagaattcgacttttttggtacatatgagtctgatcttctgtttttcgtatattctcacctttgatctgtttagtatagttatactcaggtttgatatttcttggaaagaagaacacacagaatcagattctcttttgtttttgatgtttgtttttttgttgatgtatgtgtttcccacttaatttaaagtaggaaaacgaaaccttatctttctcgtcgatatgtctttgtgttttctttagccttttctagagtttcttgcgtgtccatgtgtttctgtgtactacaataacataaatagatagaaagactgttaaatttggtaacctgatttagcaaggagtaatttgtactctttttgagagttgaatcaagccagatgactttattgcctttggtaggaatagtcttcatgatcccttttttgccactgtttcttgatttcgacgggataatgtttgaaaggagatgtgatatattatatctgttattccaggcaattggtgctgcaggaggtgcattggcgatcatggagttcataccagagaaatacaagcatatgattggaggtccttctcttcaggttgatgtgcacactggagctattgctgaaacgatcttaagttttggtattacctttgcggttttgctaattatcctcaggggtccacggagattgcttgctaagacgttcttgcttgctcttgcaaccatctcatttgttgtcgccggatctaaatacactggaccagccatgaatcctgccattgtaagtatacatttcttgcttgctctttcagatgttctatactaagaagagattgaccccgaataagtcacctgataaattacagaagcaactttatgtttttgggccatatattcacatcattccaacactcttaaacccgagaattatgattgtatcttcaaagatagatgattaatcaatatctctcttgtgtttgcaatgcaggcgtttggatgggcatacatgtacagctcccacaacacatgggaccatatctacgtctactggatcagttctttcgtaggagcattatctgctgcattgcttttccgttctatcttcccgccacctcggccccagaagaagaaacaaaagaaagcctgaggaaaataaaacaattgggagaataccggtcagattcttcaccggtttgggctgtagaaagattcacaaagctgttccattctaaaataaggagaccaacaacaacaaaaagtcaaaagtctccttgtcattgtttagatccacacgcttattttacagatttgtgcgacgtaacttttctcttttatgttcataaatcattcagactctcttccggtttagaaacatttatgattacatggctggtttagtttggtttattatcggttcactctctattctggttctgatttctgacaacaaatcaaaggcaaaagttgtggatttccatccacaaaatttgggaattgggcctcaaaatttctttccaagggtggaagaaatctcaagcgagatctttcgacatttggtagtgttactgcgaaaaggaattgggcctggctaaggcccaactgtatactcttgctgaggcctgaccataaaagaagaagttatttacaaattaaatcagccaaacatgttggaccaggactcaccaactgtatataaagcctaacaacattttctccaaactgtaaatagatcaagactctgctgtgttgcaattttgttcccagtttcggtctacagttaaaaactactgattccctttgccataagagtgatcctaattaaactgattgagtaactcttaaaatggtggtggtgtgttttcagggatgtgaagacaactgatagtggaaatgcttcaagctgcgaagtctgttgtttccaactaagattaagaaaatggttccattctcaaataaggagaacaaaaaaggaataaaaaataatgtctgttacctctatcacactcttctctgctagtttcggtttagtaacgtctagattatcaatgtctggtttagtttggttctttccggtatgttcctaattttggtaggatttgtttggcttggttttatagcaagtatttaattaacattagctcaaattgcccttaatttattgaattttgttaaaaagttttgtctaaactttacactaaaatcagcttttcgtggatgttacccatttctcttccgtaatcgttaaattatgacataacgtctttgttttggtcgtatcgttcacgcaaaacttcacgattcagatctgtgtgtggcagaatttgaatcgaagcataggatcaatccggtaagcagccgtaacttgcaatcgatcgccgatctggatccgttaaaggatccctcgcagtccttgaagatatcggcgtcctccgccaccgggaacaggatccgttaccgttcaccttccgcttctgagctattggagtctggactagccaccggattatccggtaaccattctcctacttccgactctcatcagggacttgtgtctatcgacggaggaaaaatg

SEQ ID NO: 26767 - DNA, 3003 bp, Unknown
  misc_feature (1)..( 3003): 2750-1469P.txt file - cDNA_ID_2715914; gDNA_ID_2213663; Annot_ID_132622
gttaaatacaatgtaaaatacatatgcaggggaaaccataatactagatatattagcttatttcgcaaagtcaattcgtagaagtaaatattcgagttcaagtgataggacaaccaagtgatatataataaaatctaccacaacccgagaagctaaaaaaaatcacaagctggttagttcaactcgtcgaggaaaaatcaaatcaagagattaaaactctagtctaggatgatcccacagtcatctccttctacaatcattaaattattactctatcgaaaccacacgctcgcgaatacttatagagtacatgtggaatgagataacgttaccagggagattaggagacttggcttatagaatacttatggaatacatctccctcgcgacttacctgcgcaatgaaaactttttctcgtcttgttcaatagttgtacttcgcacaaaggataatacgatcataaaaagactcataatacgatcttcgatatacccgcgcaacgatggatcacataaacggtcgcatggttggaaaatttagggctcatctctgattgttttattttcttcacaaaggggcaaaaatatatatatacactgtatatatatatggggttttttttatggtcaaatgttattgcccttcgaataagagacctttgattcgtaagaagagattattattttataagagaaggttatgaccgaaaggtttctgaagaaaatgaaaaattacttttaaaaggaattttatctttaaaaggaaacaaaaggaatggttaagttttacatgattggacgcaaaaatggaaaattcttttgattacttcaaaaaaggaaaccctcatttcttattaataatacatcaaataaaaaactaacatgatttttcgcaaaatatccaatttgtgaagaccctaacgctcgaatttgtcatcacttggctcagtctttcaacttttgaaaactgaaactccttttttctcaatactgttagataatagagatatactcgagacgattgagcttcgtcaaatggatacatgcagtattaaaatcagcagttcaaatacaaagaaatttaaatcatcaagtatgaatatgtatgatcatgcttcacgatcgaacagacgaacaccaccagaaactcgacgtcccacacgaacagaagatgaaccaccacagtcttttcccaatcgtaagtgagccatattgtcgcataagttatcacgtaactcgagcatcgcttggtacctttgctgcagctccttcgcgctcaaaccttccgaaggaaagttccaccacattttatctaacttcttttcatttctcgattccttcaacagtttcaacttctctagatccatcgcaagctcctcttcgagcgcctccattttttttacgaggtcgtggagccttcgtttcttataagcttcgacgaggggtctggtatcgtctctctctaatggttcttgtctcgaagggttctttaaccggtcagccactttcttcatagacggatgtgcgaatgtatagggcttcttgggttgagagaaaatcaagaaagccacttcaacgtcacacattgctacgagctcgttcattttcttaaaaattccggttttacgttttgagaacgtaatcatcctatctccatagttctccaccttcttcatctcgatcttttgcttcccctttgtttttcttccctttgcttgcttcgtagatgacatgtttgcagaaaccagaactagtgtttgatttcttgtaggtttgttattttgtatgtaatgataaaaccatgcgcaaaacacaatctatttatagaccaaagaaagagataggattacaaagtttggagacattaaatttaaatcttagttatgaagaaagtgtattgactaatttacaaaaaaaaaaaaaaaatgttgactaaacacatttggcaaccactttaacatcttcattaatcagtcaagaaactattatggtaacccaattggtgtaatagctggtgtaaaggctaattgaccattcaaggaggaatgttcttttaggtaattacgagtttgtgtatcccttacagggaacatacctcagatccaaaattcttttgttacaaaaaaaataggaaaaatttgatataaaagatatctactacaaaatttgtccataatattcttatttttttgtagattagtcatataatttttttaaaaaacttcaaaatccaaatttatcttatttttctatcaaatttcatttaaaaaataaaacttttttgtattagtataagtccgttcatttgattagtcataacttttgctataatattttgtttgacttgaaatcactatcgttggaaagctaattgaaactaatagaattgctataatattccgtttgacttgaaattactaccgttggaaagctagttaaagctaatagaattgaagtcaatatataaacataaaaaaaaaatttaaaaatttaattttaggttaaaataactttaatctattttctctaaaataacaataacttaagggatgcaatttatacttataaatttccaaatttatataacatgaaacacatgaaaaatatttcctctcataggctacagctagctaatataaaataaaatccacgctttttatatgcttaatttaaactctaattattaactctaataaaacctagtttaagtccacgtataatttcaactgatattcaataactaataatttatatatttgttgcaatctctgtaagactatcggttaggttaatcattcaaagatatcttcgtttcataaaacaagaaaaaaacaaaaaaaaacaaattttcaaaaagaaaaaaatctatttgaggagaaaaatagctgtgagagagaaagctaaagaggcgacgtaccacccacctaaccacaaccagatccccaaaagacagagaactttctcgatacgaacgccaaagagaagaagacgaagacgaagatg

SEQ ID NO: 26768 - DNA, 3003 bp, Unknown
  misc_feature (1)..( 3003): 2750-1469P.txt file - cDNA_ID_2715914; gDNA_ID_2213663; Annot_ID_181912
aaatacaatgtaaaatacatatgcaggggaaaccataatactagatatattagcttatttcgcaaagtcaattcgtagaagtaaatattcgagttcaagtgataggacaaccaagtgatatataataaaatctaccacaacccgagaagctaaaaaaaatcacaagctggttagttcaactcgtcgaggaaaaatcaaatcaagagattaaaactctagtctaggatgatcccacagtcatctccttctacaatcattaaattattactctatcgaaaccacacgctcgcgaatacttatagagtacatgtggaatgagataacgttaccagggagattaggagacttggcttatagaatacttatggaatacatctccctcgcgacttacctgcgcaatgaaaactttttctcgtcttgttcaatagttgtacttcgcacaaaggataatacgatcataaaaagactcataatacgatcttcgatatacccgcgcaacgatggatcacataaacggtcgcatggttggaaaatttagggctcatctctgattgttttattttcttcacaaaggggcaaaaatatatatatacactgtatatatatatggggttttttttatggtcaaatgttattgcccttcgaataagagacctttgattcgtaagaagagattattattttataagagaaggttatgaccgaaaggtttctgaagaaaatgaaaaattacttttaaaaggaattttatctttaaaaggaaacaaaaggaatggttaagttttacatgattggacgcaaaaatggaaaattcttttgattacttcaaaaaaggaaaccctcatttcttattaataatacatcaaataaaaaactaacatgatttttcgcaaaatatccaatttgtgaagaccctaacgctcgaatttgtcatcacttggctcagtctttcaacttttgaaaactgaaactccttttttctcaatactgttagataatagagatatactcgagacgattgagcttcgtcaaatggatacatgcagtattaaaatcagcagttcaaatacaaagaaatttaaatcatcaagtatgaatatgtatgatcatgcttcacgatcgaacagacgaacaccaccagaaactcgacgtcccacacgaacagaagatgaaccaccacagtcttttcccaatcgtaagtgagccatattgtcgcataagttatcacgtaactcgagcatcgcttggtacctttgctgcagctccttcgcgctcaaaccttccgaaggaaagttccaccacattttatctaacttcttttcatttctcgattccttcaacagtttcaacttctctagatccatcgcaagctcctcttcgagcgcctccattttttttacgaggtcgtggagccttcgtttcttataagcttcgacgaggggtctggtatcgtctctctctaatggttcttgtctcgaagggttctttaaccggtcagccactttcttcatagacggatgtgcgaatgtatagggcttcttgggttgagagaaaatcaagaaagccacttcaacgtcacacattgctacgagctcgttcattttcttaaaaattccggttttacgttttgagaacgtaatcatcctatctccatagttctccaccttcttcatctcgatcttttgcttcccctttgtttttcttccctttgcttgcttcgtagatgacatgtttgcagaaaccagaactagtgtttgatttcttgtaggtttgttattttgtatgtaatgataaaaccatgcgcaaaacacaatctatttatagaccaaagaaagagataggattacaaagtttggagacattaaatttaaatcttagttatgaagaaagtgtattgactaatttacaaaaaaaaaaaaaaaatgttgactaaacacatttggcaaccactttaacatcttcattaatcagtcaagaaactattatggtaacccaattggtgtaatagctggtgtaaaggctaattgaccattcaaggaggaatgttcttttaggtaattacgagtttgtgtatcccttacagggaacatacctcagatccaaaattcttttgttacaaaaaaaataggaaaaatttgatataaaagatatctactacaaaatttgtccataatattcttatttttttgtagattagtcatataatttttttaaaaaacttcaaaatccaaatttatcttatttttctatcaaatttcatttaaaaaataaaacttttttgtattagtataagtccgttcatttgattagtcataacttttgctataatattttgtttgacttgaaatcactatcgttggaaagctaattgaaactaatagaattgctataatattccgtttgacttgaaattactaccgttggaaagctagttaaagctaatagaattgaagtcaatatataaacataaaaaaaaaatttaaaaatttaattttaggttaaaataactttaatctattttctctaaaataacaataacttaagggatgcaatttatacttataaatttccaaatttatataacatgaaacacatgaaaaatatttcctctcataggctacagctagctaatataaaataaaatccacgctttttatatgcttaatttaaactctaattattaactctaataaaacctagtttaagtccacgtataatttcaactgatattcaataactaataatttatatatttgttgcaatctctgtaagactatcggttaggttaatcattcaaagatatcttcgtttcataaaacaagaaaaaaacaaaaaaaaacaaattttcaaaaagaaaaaaatctatttgaggagaaaaatagctgtgagagagaaagctaaagaggcgacgtaccacccacctaaccacaaccagatccccaaaagacagagaactttctcgatacgaacgccaaagagaagaagacgaagacgaagatgatg

SEQ ID NO: 26769 - DNA, 3000 bp, Unknown; identical to SEQ ID NO: 10562
  misc_feature (1)..( 3000): 2750-1469P.txt file - cDNA_ID_2715930; gDNA_ID_2213663; Annot_ID_132618

SEQ ID NO: 26770 - DNA, 3000 bp, Unknown; identical to SEQ ID NO: 10562
  misc_feature (1)..( 3000): 2750-1469P.txt file - cDNA_ID_2715930; gDNA_ID_2213663; Annot_ID_181909

SEQ ID NO: 26771 - DNA, 3003 bp, Unknown
  misc_feature (1)..( 3003): 2750-1469P.txt file - cDNA_ID_2715966; gDNA_ID_2213663; Annot_ID_132607
tgatccttcatgttaataataatgataaatttgtgtaggtgattgaattgggtggaattccaacgattggtgattgtgcagtgatattacgagctgctttaagagctcccatgccttcagccttcttgaagatcttgcagacgacacacagtcttggctactcatttggcaggtaactcagttacaacctctctttgggtttagtctgttagagaagctagtctaaggcgttcgatatgactaaacttgactataaacaatgacatttgaatacacgtggtaaaaatctgttgcagcccgttgtacgatgagatcatcacattgtgtttggaccttggagaacttgatgcagccatcgccatagttgcagatatggaaaccacagggatcactgtccctgatcaaacccttgacaaggtcatatctgctagacaatctaatgagagtccgcggtctgagcctgaagagccagcatcaacagtaagctcttagttatcatatcctcttctgcttgttgtgaagtctctataagaaacagaaatcggtagaaggagctgaatctgtcttagttatgaaagttttgttcattataagtacaagtcatgtagttccgagtgtagaacagtttttactagtgttgcaccaggtccctccagtctgatacttaattctttagtgttggatctttctatataagaaacgcaaatagcaagacgcagctgaattggtcttactaacaaacgttttgttcacgaaaaagataggaagaaacaaatgaacgatagtaacaaaagttagaaaatcctcatcatattgcataagataggaagaaacaaaataaggatagtaatcttattcaatgagaaaaagagtgagtaaacgaaggaggctaaattaggctttaaaattcgtttgcttcttcagaccctcgaggactcgttttttccatttattatcctcctgcttggttcgctttataaaggcggcaactctcaacatgttttggtcatatcgacgctgttctagaatgggttttcgtttccttttgcctcccggaggttgtttgatttgcattgaatttggaacgtaagggcacaaatgtggcctacactttatgccggctacatgtactcggagatccaattctctaaaatatccagtttttccaatgatgttgactctgtggtgatcaaaaaccatggagactttcttctcctcgtcaatgaagaaactcccatgtatatatgcaatcggcatgtcagccaatggtcctgtatccatttccaagatcttgctccacgacactttatcatactcgatcttagtcgtgatccatatctcaaactcatatggattccagtcgttgtgcgtaagtaaagccgcaagcttctcttctctaacacaagataaagtcacatagtcatcatggccagcgctaaacggtagacgcaaaagtggcccaaatctctcacttgtgaaatcaaaacagattatgtgatcgtcgattttgtttattgcgttactttttgtagcacaaaagtaggtatttcccttgagagaaacaccacgctgataacacgatactatccaatatggagggacatcaagagttgtccataaatcggtttcaatatcgtagatttcataccatgaaaaccggttttcgggtgcgtggttcacggccgaagagatgtaatgatctataaacctcaagactttgtggctacgacaagagttgttcttgttcacgtaccctagagcgtacctgtacatgtccatatcctgttctacgcggtgctgcttctttactaatgtgcagcttcataaagctctgactttgggataaagcgtacaacgttttgcaagttaatttcaatgtcctcatatacttcatgggaagtctagatacaatatcctctatcaaatcccttggaagatttaagatcatcgttgtcgttttctcaagttgcaacaaggtttttttttttttaaccttaaaaaagtgttcttcttttcctctgatttttttcccgcagaagactatacataggaatttgaagttgggcccaatcgtgggcttcagaatcttctcttgttttctttttggtaatcacattcataacatccaagttctttaccaacaatgaccatttgtatggggagagcatcaagtttgtatgaagctgggctaactatgggcttattggaatttaaaacagtatcttaaattccatctttaattgaaacatttgataagtggaagctgccaaaacacgcgtccatctttaattaaaatcaaatgtgaattgttttcatttttgtgacatttaatatttacttctagaaaaagaagatcaagtaaacatgcagttaagttcaaataagattagaattgtgatacccttgaattcgatttagtatgcaatttttttgtatttaaagaaaatatattggagtagacaaagagaggaagatattgtaaattttttgttattttcttttctcaatatatttaaggtaattaatcaggattacgttttattgttggcacatttaatgcctttgcggcactatttgggaaagattaaagattgtttttgggtggattgtaaattacaacctttgagaagaaaacactgttgcgtcttagacacgtgttaactaaagacaaaagaatttggttttgtccagatttttgttgactctttgaccccgatacgtaaaatcaacggcgttgaaatttacacgtgtcaaatattaagtctaattatatgtgtgaaatcttgattggtcggaaagaggaaattgaaaaaaaggcaaataaaagctaaagaggaaagacgaagctacagcttctgaggtcggaaaaaacgaattttgataatttagggttttgcccttttcttctctcttgcgttatcatcggtgttttgattctccggccaagtcccggagacttgtgatctgggggaatttggtgttcaatttcattaagacgcgatg

SEQ ID NO: 26772 - DNA, 3003 bp, Unknown
  misc_feature (1)..( 3003): 2750-1469P.txt file - cDNA_ID_2715972; gDNA_ID_2213663; Annot_ID_132605
atcctccaccgtgacggcgaagcatctttcgaccttattctaatggataaggaaatgcctgagagggatggagtttcggtacttaatgatcttgaatcttaatctgcttaccaaatagacaatttaagtgggtcgatcatcactatacttaaaaacctcctctttaatatagtttttatgttctttgttgatttaatttagacaactaagaagctaagagaaatgaaagtgacgtcaatgatcgttggggtaacgtcagtagctgaccaagaagaagagcgtaaggcttttatggaagctgggctcaaccattgcttggaaaaacccttaaccaaggccaagatcttcccgctcattagccacctcttcgatgcttgatggatgaaggctcattaatgtatctatattttcaatcatgaaatcacctacacgtgtatttgacacaaaaatctgcatttgttgtgatatagggtttctcatatctatgtttgatttattttcttatcgtccgaggtaaaatcatgcaagtcatttcttttggctaataaaatattaaaataaggttttctcttgttgaatgagctaatttacttcatatggctcatgcaaatctccatatcagttaactttaaaaaaattatacatagtttcgcgataaattctaaattttaaataactatcacatttactaaaaataaaataatgtatgtatgtaaatatgtaatgtaactggctaatttaattgaataattataatacttacaaaaataatatatatcgcgaatctgactatatttatgttttgtttatcttattcaaaaagatgaaaatataaacactttactagctatatctattttcttttctctatttttcaaaaacataatttacataatatttcatattatttcaattccagtttacgttccatatttttaatgtatatatattttattcttgttcttcgcatatatacgtcatattattttgtccaatactatatgtcattaagaagatagggtactactactgggtacatcatatcttactttggatttgataaggtttgtgtaaataagagtaaattctattttcaacggcgtgtatcatcttagccaaatttgattaagcattgtgtgctatacactcagaaagtacctatactaatgttgcactataaataataattattacaaatttttaatcaagaaactagctatgggtctaaagatcagaacataaaatgtaatttttttttcttctaattttgactttataacacaatttttttggacatctttttatttatttatttagaaacgttaaatttttatttgatatctgttttgaattaaatcagaaaaagaacatcaaacaaaaatttaacgtttctgaatttctttggttgtgaccacatttcttgcagccgtataactcgtgactctaaatcttaaaagctttggttgtgtaagtgtttgaagtggagttatattctacactttaattttgagttgttttgtttgaactctatatctgtacttcacttttcaaagcatctactatgtctctctggaaagttcaaatttgttatatataggcaaaccaattcttcacttggcttttcaggtgtattggtttgattcggaaatgcttgggaggttgaaccgaagaacaaaggattgatgagttcgaatattttctatatataccatagctttttgagattatgatttgtttagataaacaagatcgtgttgtgttatttgtctctgcttctttatttaacatacgtatggcatcgtaacatcttcatatgtttgtaaatacaattattttcacttttgttttgatattactttcgaaaatatatgaaagtgttatctataaactatatcaggaatcagtggttcaacaattaatgatatccaagaaaaacgctgtgtattataatgtggattacgaaagttctgacaaaatttgtgtgaaattttgtatgtccgctttttctgttttctttcttatgcattttcgatcattttatctgaaatgtgttacaattaaactaaatattcctctactacataactcaagctcacattttttttttttgttacttcggcgcaaagtcttcaaacactaattaacaagatttcccgtgtggatgcttagcatttttctccaccctaactaagatggaaaaattactcataccagtaaacgaaactattcgtaaaaactgatttcctttttgtaagtgtagaacaaataatttttttcaccgacaacttccatttttttactatctctaaaattttcaacacgtattccaagtatttccttttattttgagtaatactcttgtttccaaaaataagagttaacatgattagcttatatacttgatcttttgggttcttgttgtgattatatgaatgatgaagacaaagaagaaagaatcgagaggagaaattgggaagaacatgtcgttgatatataagaagaaactaacggtgttggtcgttgacgatgatccatcttgtcgtacactccacatgggaatcattcaaatggctggaggattcccttacatggtgaaaaacggcgagaaataagaagctacgtgacatgaatgtgacgtcaatgatcgtggggatgacgtcacatgaggacgagactagggcattcatggaagctggagttgaccactgcttgtcaaagcccttaacctttggaaagatcgcatccatcattgaccatctcaaaaccgcataatctaccgattaacaaaatattacttggtttagttcggttatgtgactactgatataaatcttgttcaatgcaatttggtctagttcggttctgtctggttcaatccaattaactcacgtgatctgcacatgatcatcgtctacattttaattaaataaaaatctaaatttcaaatcactttatccattccccagtaaaaaaaaagtttcagactttggcaaaaaaaaaatg

SEQ ID NO: 26773 - DNA, 3003 bp, Unknown
  misc_feature (1)..( 3003): 2750-1469P.txt file - cDNA_ID_2715994; gDNA_ID_2213663; Annot_ID_132597
ttactggaaattgctaatttatctataatttcaaattgaagttgcaagattctgtatatggaattgagtttttcagctaggcttggtctaatcaaataattgagctgacaagttataatatcgatactttatctttcatgcgtacataagataaggttaattatttatggatccttccttggttaatgacaatcttatctaattgtttggcttaattttatataattgtttagagagagaattaatttctggtttattgaaatttgaaagggtagactgaggaagatgctttggaatattctgcatgggttgttccgttgtctacttgtcttgttcattcttctttggttgactctgattcaagatttttgtatacacaagttaatttcaagccttaaagagactttctatttttgctataattagatatgattggttttgttaagttttattggctcaataatgtaagcaatgataatgttgtctctctgatcatagaaaaaaaggctctatcttaaatgtgttgaagagtagatggatatggtatcatgttatttaatactcttctatgggacaaaaacttaagttttgtttgatggaaataaatctcggtattggtaatgaatttgaagctgatgaatttgtacttttgaatgcatcaagctaagcgccttcttgttttactgtttcaatctatcaattgttctatatagaagtgtttttagttctttgatgctgaaagtgatgtacttttctgttactgtcaatctctttgcaggtaaaggttttgccacaggaagaattagcctaggagaaatagaagtggtgaaaatcaccaagttccatcgagtttggagctctgattcatcacacgacaaatcaaaacgtgctacattttacagagccgatgacattccagaaggattccattgccttggtcactattgccagccaaccgatcagcccttgagaggttatgtacttgcagctcggactagcaaagccgtcaatgctgatgatttcccgcccttgaaaaagcctgtgagttattctttagtttggagtgcagattcagagaaaaatggtggtggttatttctggctacctaatcctccggttggttacagagcaatgggagttattgtaacccatgaaccaggtgaacctgaaacagaggaggtcagatgtgtaagagaggatcttacagagagttgtgaaacctctgagatgatacttgaggtgggttcttcgaagaagtcgaacggctctagttctccttttagtgtatggagcacccgaccttgcgagagagggatgctgtcacaaggtgtcgctgttgggtcattcttttgctgcacgtatgatctgtcgtctgagaggacggtccctgatatcggatgcttaaagaatcttgatccgaccttacacgcgatgccaaatctcgaccaggtccatgcggttatcgaacacttcggaccaacagtctacttccacccagaagaggcttacatgccttcatctgtacaatggttctttaagaatggagctttgttgtaccggtcagggaaatcagaaggtcaaccgattaactccacgggctcgaacttgcctgctggaggatgcaatgatatggatttctggatagatcttcctgaagacgaagaagcaaagagtaatctcaagaaaggaaaccttgaaagctcggagctttacgttcatgtgaaaccagcacttggtggaactttcaccgacatcgttatgtggattttctgcccctttaatggcccagccacgctcaaaatcggcctattcacgttacctatgacccgcataggagaacatgtcggtgattgggaacatttcactttccgcatatgtaatttctctggtgagctttggcaaatgttcttttctcagcatagtggtggtggttgggttgatgcatcagatattgagtttgtgaaagataacaaaccggctgtgtactcatctaaacacggacatgcgagtttccctcatccaggaatgtacctccaaggctcgtcaaagctcgggattggagtcagaaacgatgttgcaaaaagcaagtacattgtggattcaagccaaaggtatgtgatagtagcagctgagtatttaggtaaaggagctgtgatagagccgtgctggttacagtatatgagagaatggggtccgaccattgcatatgattcagggtctgagatcaataagatcatgaatcttcttcctttggttgttaggttctctattgagaacattgttgatttgtttcccattgctctttatggagaagaaggtcccacagggccaaaggagaaagataactgggaaggagatgagatgtgctgaaagaagacaaacctctttgtgatcaagacggtttaatggaagatgaagtctcttgttgaatcggagggttttgatctctactctactagtaattgtgactaatatgtaatttacagtatactagaatagggtttgatcttggtggttgtaatttgttgatgtaagacctaaaacgctgtgtttgcggctgtaatcagctgcgacagctcatgagcaatatgaatgattgattttgttgtactgctatcttctcgtatctctctgtgttctttacgctattggttagattgaattcataaccacccccaactgttccggtttgacacatcgttccggttagtgtgtagtattggacgaaatcggttattgataattcggttccgataatcggttttaataatgtgtatattgtaaacttgaaccgttctctagtctctatctctttctctttcttctgataaacctctcggcactgcgctgtgtagtgagctttcacttccgtcgttagctgcagtttaaaatccggcgaattgcggacggagaattcaatcatatagcattattgaggagctgaaatggaggttgtgacaaagatatggtgttgattttcacttcgccgttattgctgcgatg

SEQ ID NO: 26774 - DNA, 3000 bp, Unknown
  misc_feature (1)..( 3000): 2750-1469P.txt file - cDNA_ID_2716014; gDNA_ID_2213664; Annot_ID_132653
taagacaaagtttactgatagctccagcggatatactgccaatccttctggtatttacatgcaatctcctatttcgtgggcaaaggccattaaaaatgatgctgagctaaagggaatgaagaattctcacttgaggtaaagaaagccattgcttttacgatattttcctaatccaactgcctttataggattcaacttttctctggaagattttggtttcttttgtactttcaaatgctaagtatcttaggctgaccaaatatatatggagaaatgctgctgctctagctcatttctggaaaattttggtttctttttttcctatgtatgggaaatgtctttggctgaccacttattttatgcagagatgctgctgccctagctcatttctgggcttggctggaagaagaagtgcataagaatgcgaatctaacagaggtcgatgtggctgacaggcttcttgaattccgttcaatgcaagatggttttatggatacaagctttgatacaataagtggtatggttattgtcacccttgttggtggaacttgcttcttaacacatagtcaatatacagccagtgagtgatatgtattcctttcctctaattacccatgcaggttccggtgcaaatggtgctattatacattataagcccgagcctgagagctgcagtcgtgtagaccctcaaaaactttttttgctggatagtggcgctcaatatgttgatggaacaacagacatcaccagaacagtacattttagtgaaccttctgcccgtgaaaaggaatgtttcactcgagtcttgcaggtggaatatttggctcttcttttcctcatcatttttgatgaccattgactacctatattgaacagacgaacctgtatgggttgccttgtctgattggtattttggttgtagggtcatatagctcttgatcaagccgtgttcccagaaggtactcctggttttgtattggatgggtttgcacgctcttctctatggaaaattggacttgattaccgccatggtactctattctatcttttgactcttcttcccagaacaacttttttgtaaggaactcatattactctgatattttgcctgccaaacagggacaggacacggcgtaggtgctgcactcaatgtgcatgaaggtcctcaaagtattagctttcggtatggaaacatgacccctcttcaaaatggcatgatagtaagcaatgaacctggatattatgaagaccatgcatttgggatccgaattgaggtgcgactttgtcaccagtccatgacagtttttataggatatataagatttaagtaacaattgtatggtctgcttttgcagaatctccttcatgtgagagatgctgaaacaccaaaccgctttggtggtgctacataccttggatttgagaagcttacattcttccccattcaggtacagagtgacgtatccacttataaataattcgcgtctctgaatctaactctcatttttctggtcaagggagcccttctggttttcttctagctaattgatttgccttacatttgatctcacacacttctcactcaccaaaccatgcagacaaaaatggttgatgtttctttgctgtctgatactgaggttgactggcttaatagttaccacgcggaagtctgggaaaaggttagtccacaaaactagtttgacttaccttctcaaaaagccaagtagattgagtctaagcaaagcaaagcatatcaacaaatcaacacataaaggaaacatggcttcgattatcctcttagtgtaatagatcaaagtcttttacatacagctgcagttgtttgaaccaggtattatttccttggcaggtttcaccattattggaaggttctactactcagcagtggctctggaacaacacaagacccttagccaaaccatgatcaaacccaccaagttttatttccaataaaagcttagacttgatccttcatgattagtaccaaaatgttcgcgtgtgtaaattacaaacagaaatgtgatatttttcgtttattttaaaaaaagatcctcaacttttactaatcttctcgaattaacgtaagcatctctccagaagctttaaattgcacaagcttaaattttgtatgcttcagctgcacatatttaatgagttaaagtttcttggtcttaaatcctttccttgcacttgaaagttcatctcctaaagtggagaaaacattaaaataggaaactagcaaaatgattggacaaacttgtaccaatatatttaacatgtttagaaaatattcaactcacttagtttgattctttgaatcaagttttcagttattagttccaacttgtaaaaatggttgcagaacaaaatgatgaggaagttttttagtatcacataagtccagattcaagtttttttcaattgtatctaaaacacacacaactttcagattgaataaaatctgaatttcattctcagcagaggctaatataaaaatgacaaaagaagaggaggaggataggagctatatgtctactatttttatttttttagccaatgagagagctccacttcataccccacttttaccaatcgagcgatttcacaaccagtctcacccatgtcgcgttgagcgcgtgtctacgatttctaaaggggtttgtccacagaaatcatgccttttttgatccacgcaactcactctcaaaaatccatcgcgtgtcttattttttttggttttcttctctaaaccaaattaaaccgaaccgagatcaatttgaatttcaaaaccaatgtaaacccatcaaacccatcgctgtgaaaacaaaaagctcggccactgtaacaacaaaaatggagacgacacagaggtacaacttggaagagaacttaacggtcaagtactcgattctactagagtggaaagcaaatttctattacaaaatacaaattaagtgtttagcttcggaattgtggtgaatg

SEQ ID NO: 26775 - DNA, 3000 bp, Unknown; identical to SEQ ID NO: 10588
  misc_feature (1)..( 3000): 2750-1469P.txt file - cDNA_ID_2716029; gDNA_ID_2213664; Annot_ID_132648

SEQ ID NO: 26776 - DNA, 3000 bp, Unknown; identical to SEQ ID NO: 10588
  misc_feature (1)..( 3000): 2750-1469P.txt file - cDNA_ID_2716029; gDNA_ID_2213664; Annot_ID_182032

SEQ ID NO: 26777 - DNA, 3000 bp, Unknown; identical to SEQ ID NO: 10607
  misc_feature (1)..( 3000): 2750-1469P.txt file - cDNA_ID_2716033; gDNA_ID_2213664; Annot_ID_132647

SEQ ID NO: 26778 - DNA, 3000 bp, Unknown
  misc_feature (1)..( 3000): 2750-1469P.txt file - cDNA_ID_2716035; gDNA_ID_2213664; Annot_ID_132646
tttataacattattgtatggattgttgagcttcattagtttttgatcattgtgagatatctcccaaatctttggaatcttcaactttaagcgtaacaataattagctggataaattttgcatatcaatttgttgttgtgtatcttttttgcaaacgttgaattttaacatattaccctattttaaaaataaaataagagaaaaataaaaaaataaaaacacatagtgggccgatgcttctaaatgaaaaagaaaaaagaaggttttgccatattggttcccgtcaaatctcattggaccggagtagtatagatttcttcaaggccaatatcgtttcttcagagagaatcgaacggaagatcggaacaagatgatgtccggcgggaactacacgactatagacagccagaaagtctctggatctgtacctgtaagttttttatgtctcgatctcgaatgtttacatgagtgctcgtccctacactgattcttccgatctgatctagatttgtttgtgtcaatcgtagtctgttccagatccaggccataccaccgtcaaattcgcaggtaacattctcgtttttatgatttttggttgctgaggtgaaattgatattagagcgtttagggaaagaacgattttatttggaattataggcctttttttttctctgggacgtaagactatgttgaatcttagctaagattactgcaatttgttaggtaatggctatggattttgaattaaactgtagtttgaacagatgagggtttagccaatagtagaagtgtggtttgatttgacatggttatgttcatgttaagttgtgattgagggatgcattgttttgcagagtcaaatctacaaacttttcctccatctgctactcagggcaagatctctggtggtagtaatccccctcgtgatgctgacggtaagattctctcgacttcagaatttccgaatgtttgagcaagtagattgaagaatttagatgtggaaacgtgttcatcgactggttcatgttgattgcgtggtcccaatctttgccattctgtatatcttaaggcttatagtataattttgaattgttgcagattcattttctgggcatggtaatggtagtacagatgaacctcagtctggtggctggcttcataaattcactgttggtgcttacaagcccttctttgatgtcgacacttccgatgtagttgagagactcaaagaatcccttttcccattccgtggaacatttacagagaagacagctgataaacctgacttgtaagagtttcgtctttcttatctcttttcaacttagaggtgaattctcaaatgctcaaaaaattgattatatttttcaggtatggtccattctggatctgcaccaccttgatattcgttgcagcatctatcggcacatttgtcacatacatagcacacaaatggaagaaacaagaatggaactacgatattaatctagtgacttggtctgcaggagtattctatggctatgtcacaattgttcctctcgcattatatgtcgttctcaaatacttctctgcaccatcaggcctagtccaactcttctgtctttatggctattcccttttcgtctttatcccagcattggtaccaaatctctcctataaattctgatacatatggaaacatctgaatataatgagactttgacttattaatctgtttctgacactgcagtgtctctcggtcgtgccagtggagattttcagatgggtcatcgcaggtgtagctgggttcatgtccgcaacatttgtggctttgaacctcaaagcgcatatcaattccgctggagagagatcgatcctgattatcgccagcatctttcttttgcagctcgctcttgcagttgtgctaaagctctatatcttcaatgtcaaagtatgattcaaaaagaaatttgaaacttgatctttatagaacaaaaaaggtaatgaattctgatatctgtagatgctataatgtttcttctcctctgagttacccaattttgtaccgtttggatactgttccatttatttacactccatgatttactttgtagaaaatagtgttataacaaaatcgatttgtagctgctgtgatgttcaaactttctgtctctcaaaacaatttcaagagaaaaaaaacagtagaaggatttattttaatattttttatgaaataaaaggaccccagaaacttgaattctatagggtctaacaaagatttgtacggatacggctgtcttcgctaatatatttccttacactggtacatatctgacaattctgtaaatattcttccacattacgtcaataaccaattccgaaacatcttctatttttctcttcttgttaaatatttgttgtttttcagtgtttggctgtaagatagatgtcgaattttcttcacaaaataatttataagaaaaaaaataacaagtataatagcaacacattatctatcatgtgggtctcaatcatcgagacttccacttttttaatttctttttttcctactctctttataaaaaaaaaaaaaactaatcaatctgttctttagtgaacatggccgttgaatatcgaagccagattcacacaaatcttcttccttcaattatttcaacttctcttggcgtgagatttgaggtatgtatgtggatgtggtgttaagttaggtactctgttacgtttgttcatctttttattacatctcaagcaatcaaaatcaccaaacactttctttctttttctgaaaattgattggggtatttggcaagagattttcttgttgggaaaaatattgttttttttttgtcagagagtgaattataagtgagatcaataaattttgccccatttttaaagcttcctccttttaaatattttaggtcgcaactaaattggagttaaagtctgctgttgagattgttgcagatgagtttggtctgaatgtttggtggttttggatatg

SEQ ID NO: 26779 - DNA, 3003 bp, Unknown
  misc_feature (1)..( 3003): 2750-1469P.txt file - cDNA_ID_2716051; gDNA_ID_2213664; Annot_ID_132641
caccataaatggattgatatatagatattcattttcaaaatacagaatttggaaattgagaggataaaatttttaattactgcagtggatttgtgtagagcactagatgagaacataggttaggtccaacgtctataaagcaaacaaagttcataaaacaacagtttgatttggatactcattggcatgtgcttcaaaaataccccacatcttataatggttccaaaacattcacaattttattgattagtcaaaggtgtatagtagtggcgtactaaaagcaaataaaaatatcatttttatgataaattctatggaaaccgaaccacaaaggaaaagttaaagcctagtttcctcttaaaaataaaataaactgtagaaatattttaggaacatagctatgatactttcagtatgaatattatcttttagggactaacgtgtgtcatttttcttttgtcttcaattagatttaattcaaagatacctatagctgagcttttaaaatctttataaactgagttatacgaggtaaataggacccaacgttacaatttttcttaacgaattaattctaacgttctcttataattataacagcaatgaatttgaagttttgaacaataagaataaagtaattaaagaaataaccaaactgatatgtgacaaaagaaattaaactgacagcaatgttcgtcacgaggttggttttcttgatataagacgaaaaaacaacagagaaagttaataattttatctataaaaaagaagtgtctaaaatacctccgaaaatgattgctcaaaaaccctttaaaacaatgctaatatttatcccatctttttctcttatatatttagctttcgtggttttcttttattttctttggtctagcctttgtttttagctttcgtgttttatttgacttttttcggtcggagaaaaatttgacttcttaaggttccatggaccgacaccatgtacgcggttcaattcgatgacatgtgaatctatgcaagcttagtctgtgtaatttgtaattgtaggttcgtagagtatgtgagattcgaactatgaatagttttttttttttttttttttaaacttaaatcagttgattttagttattttccagatttgtcactttttgtataatcttaccacagatcctacacgtgtattcattctatctacctaacgcttactcacttagtgtggggattattttaatcttagtaactaaactcagtcaaagtcgtataaaatttaaagctgcactatgagaattaaaataacaagcacaaaatatcagtagtctatttattttcttatggaagaaattaatcacttactattatctcagtgaagtggtgcacatgcgtcacatgcattagcaagtaaatcgattttattgctaacatataaacccacaaaatatttcaactatacaattaaatagttcattaataattgatataaatcggaactaattggtggttgaaagctggcccaagaaaactctatctatcctccacagcaaagagtggaagcgacctacctgtcttatgacccattaaaaccccattaacattattgtaccctttcctgcttatatatttcgatttaaattcaattatacgtttgttattgtttaattttctaatcgagttttctaatcgagttttcaaaagatttggtttgatactactagtaaatttaatcgaattatacaattttttaactaattgagctaaccacattatgttgacaatctaacagtttatgtgagactttttagtatatcgatggtgtatgttaagtattatacgtaagatctagatcgcataatttagcattataggagtctttaactaatgtttaaactcactaccttacaatgtttgcgtaagtgatgttgttaaacaaagtccattttggtgacaaagacggtttcttgcttgcgattggatcctaaaccctctcgtcaacgatcattaaaatcattgatcacaaatcataattaatatcatgaaaatttcatattactatcagtgtcatacgtaaattattgtagtgatcgaagtttgcaaggaaatgatatatgcaatgaccaatattacttattagagaaaattcaatgtctaaataattgttagccttaatcaaaatatctggagaattacttaacacgtctgtctattaatatatggatatagacatttgacaaaatgcgaataataaataataaatcttcaataaaaaaaaacacacgagatgataagaacatgacaaacataaattattgaccatattaattaaagttgatttacatataaaccacacattagatatacgaaattaggaataatagcaaaataaaacaaggaaaaaaaacaaaacagcaaagtatttgtagttaaggaaccttaaatattcgaattaatcgtattcgggaagatgaatacataacacagctaagtacaaaagacgaagctgaggctgtacgttaagcttcttctttccctcaactctgtatcagaaaaagaaaaaacataaaaaaaggtacgaaaatttaaaaagaagaaaaagaaaagatttgatattaaaagtgtcaattaaaaaaagatattttgcaaaatcaaagttgggagatttccttgcaagctgtgccaccgccctctctctctctctctctcttagttttttttacagacatagaaataagaaaccctgaaacagagataaaacaaaacacaagttttgagtgtgttttttcaagtctctctcttctctctctgtccttgttaaacacagcaaccgcctttattacacaaaactctcttataataatctctctcaccatttcttctcttctcttcagaagaaagaaagaaactcataaaggagaagaaataagagtttctctgtcttaaactcattcattctttctctctctataaccagagttctgtctgtgaaaacacacaaatctaagagaagttatg

SEQ ID NO: 26780 - DNA, 3003 bp, Unknown
  misc_feature (1)..( 3003): 2750-1469P.txt file - cDNA_ID_2716055; gDNA_ID_2213664; Annot_ID_132640
taaatattttagtgagtcctcatgttggccgatagccatatatataagagattctgataaaccgttgaaaactttaacccaaaaacaaaaagtcctttctgtgacatcgaagtgaaaacgataataaagaaatctagcatagttttggacccaagaaaacgttttactctctattttgacaccacacaaataaaaaaatatgtcccaaatgttagctaaacataattaactctcgttaaaacaaaaatgtgatggttacgcgtgaaaatggatgatttatgtatttgtgattatatttccaatattttgctagcctactgaaaagtttaacgaaagcaatggataatggaaagattacaaacttttatattcgacataattttaccaattaggcaacgactttcattacacaaaattgcggaaactatacaaaattagccatggataaaaatggaaaataacaaaccgaaacttggctgtaacaaaatctgttagggatgtttcataaaaatatacaccaaactaataaaattcgaaaccaaccaaatgataaaattttgcctatgaccaaaaaaacataaatgacacaatgtgaaaagaaaaacatatttgttgattggaggaaccttcctgttgccacgtggaacttgaagtttgacacaattgctgacaccactgtactacctatctcttctttatgaatcttcaaatgtctttttttacgctataaactcactttcttctcctccaagagccaaataaacacacaaaaaaaaactcaaaatcatgagaagctccgatcatatggcgtttgccggcgttttgccgattgttttcttgcttatattatcatcagcggatctagcagcgagtcaatcacagcccggtccaacaaatcaaccgtataactacggcagactaagtccagccatggcagtgatcgtcgtgatcctaatcgctgctctcttcttcatgggcttcttctctatctacttccgtcactgctcaggcgtaccagacgccggtgtttctccagctggtggagctagatccagagcaaccgtcaacgcggcggcgcgtggtctcgacgtttcagttgtcgagacttttcctacgttcttgtactcagatgtgaaaacgcagaagcttggtaaaggagagttagagtgtgcgatatgtttgaacgagttcgaagacgacgaaacgctgcgtttgcttcccaagtgtgatcacgtgtttcatccgcactgcatcgatgcttggctcgaggctcacgtgacttgtcccgtttgcagagcgaatcttgctgaacaggtagctgaaggtgagtcagttgaaccgggaggaactgaaccggatcttgaattgcagcaggttgtggtgaatcctgaaccggtggttactgcaccggtaccggaacaattggtgactagtgaagtcgattcgaggagattacctggtgtaccggtggatcttaaaagagttaaattctcgagatcgcatacgacgggacattcggtggttcaaccgggagaatgtaccgaacggtttactcttcggttaccggaagatgtgaggaagaggataatgaaggattggaaattgaaccggacgaatagtcttctggttcttcctagaggagggagttcgaggagaggtaaaccgattgaccggtcaagggctcggtctgatcgatggttgtttcgtaaaacgccttcgtttctgtggaggagtcgtgatgatggttcgattaggttaggtgctaccggtagcgttcgagccagtgctgtaccgaattcaaccggtagtgattcggtacgtgcaggagaccggtgggcttttcttagaaacgcgtcgtttttgtggaggaactcttcggtacatgtgccaagaggaggagtcaataaagacggcgaaggaacttcggttaaatcgaccggtgcaagtggctcaactagcggttcggtgagattaccggtttagttgacttttcttttctcatctttttcatttgtttttgtttgggattgttgataaatacgcaaatacattttcaattttttaattgaattatccttgttttgtttaaaattctctgtaacgtacatatgaagtcagatcgaaaacggattcacttttgaaaactaatgtataaaaaagcttataacaaaacaacggacaatgatgtgaggtgcgctgtggtgcaggtgggtttctcggtttttcaatattaaaaaagtcgtattcgtggacaaagaatatagctatccgatcccctgataaaatatatgctaatagaatatagttttgtgtttgtcgctaaaaatatgctaactgttcaattatgtgtttggtttataaccagagttttacttcctagtttatacacaatattacatgttctaaaaaacaccgactacgcttcacagaaagaaatccattttgcggatgcattttgagaaaaatctttagtcaaagtactactatttagaattattgcattttccaaaagaaataatataatttcatgcaaaattggttatatatgaaaattattgaccgccactaggtctccagtcaggtcacggatctcatcgtgtatgaattatcatgagtcaatttccatccagaaggattatcccttaaaataaatattagttaagggatatatgtaactctatgcatttatttcgctccgttatattacatgctgtgtaatcacatgtatgatgtaatctatgcatatatgtaactctagatactttagacaattggatgaagactgtcatagtgtgcaaaaatactggttttaatttgttttgtcgtctcgtctcgtctataatcttaagacacgtgttacgttgtatcaaatttacataattaatgggctttaggcttgaacaattaaggcccacaaaagcctgttaatcccatgggaagttgaggacgagaaacagagtccgggaaaagaaaaaagagctctcggagattcaatcactcatg

SEQ ID NO: 26781 - DNA, 3003 bp, Unknown; identical to SEQ ID NO: 26780
  misc_feature (1)..( 3003): 2750-1469P.txt file - cDNA_ID_2716055; gDNA_ID_2213664; Annot_ID_182024

SEQ ID NO: 26782 - DNA, 3003 bp, Unknown
  misc_feature (1)..( 3003): 2750-1469P.txt file - cDNA_ID_2716061; gDNA_ID_2213664; Annot_ID_132638
tggaaaaatgcctttttttggaaatgaaacagttaagtttatggaaattattcatataatcataaataaaccagttaacatacaactaaatatatatgtaatccataaagaaagtgataatgtaactttctttgttacattgctaaagattcaaagatgacgccgtctcagagtatttaccggtgagaatgtgtagtgcaacaaaccgatttgcagcttcagtgtaatgaatgccgtcccagttaacatatttggaactatcataacaaggtttggcggttatgatcgtaccatttgatcttgctgtcttaccgcaaccaacctgatcatcgtagttcagtggtggtcctccggttccacaacataccattatcgaatgatcaaaacctattaccataccaaaaaaaagtttcaagcactgttaacttgcacataagtaagttttggcattccggttaaaatgccaccactaacacaaaagtaaaaaaatgctttctaatttgagtgaactgaacattattaatacttagttacttaccatatttggaatgattcaggatgaggtcggatttgatagagaagatatctacgtatgtgaaacgggaattgggatattgttgagggagttttttgaaaagaccatgaagctgcaaattgaaaagcttagcagcttggttatggtcactgacacaaccaaactcatcaagctttgatttgtcttccccaaaaattgacacaacttgtgctaaacacccaagtggtcctgtgttgtgtatccaatagtttcttgccccctctgcatataatctctagataaagaattacaaaatgaattaatagtatgatgatatcttatactcaaatcaaattcaaatatttcccccaaaaaatgattatccgtgtaacaattaacaaagtgtcatttatagttttatttaagattgaaaaaaaaacgaggattaagattcatgtaaatactaacctttattccatcttgaaatatatctaagattataggaaccagagcaagaacttgatctactgtcttggtgtaaaatgctccggcaatatcattttgtccgatatcaaacatatacaatccattactaaaaaaatattcggacggtaagtatctttggagctcttcatctgacaaacaaaagagaaaaaaaaaaggtacattggtcagtgactaaatgattcaactaagtctaaaatgttgatgaacttttggtatcatttgctatttagttaccttgttgtatcaattgaaggactttggacttaaaggtgatgaattgagagacttgaacaccaaaaccaaaggggctataggatgcagcatttgccttctgaatcgttgacgcagccgcagcaaaattgcagcctcttcggtaagtttgtcgacttatcgaatctaaataaggcctcaaatatggtcgatcaattgcttccactacaaaaacatatataaagcccactcaaaaacttatcatgtaacgagttttatggttcataagaatctttacacccacaacgaaaattacatgagcgtgaaaatcgcgttatatcaagatcaatcagatcatcttgtaacgttttaaaagtcatgttattaactcgactagtttgttatagttcatgcaatccaacgcttccagtaaaaacaggaaaacatgacaactttgccgttgaacaatttgtaaaataatataaaatcctattattattttgctacaaaaaaagtcatgaaaactgaaaaaatagaggaaagattttaaagaataaaggaattattagaaatgaagaatgattacttagaaaatcgacgataagacgtccattgcagaatcttccggaagttggagatctaaagaaggttatttcataggaaggttgtggaaggaatccaagacccgagctaagttctccggtgtcagagttagagtctccgaagttgaaaaccgccggaaagtcattagaaatccggaaagaaccggcgagaggggacagagtatgagagatggctacgaatagtaataatctaagaagagtgtggaaaagagtttccatggctcaaaacaatataatttcagccttatcatttcttacatactatatatacattatatattatggttttaacaaaaaaataaaataaaagataaaaaaaaatatacatccttatgtggatacaaatgtatgcgtgtatacataatgtaatgaaagtagaatgtgagtttgcttggaaatatagatagaaacaaatgatgaagtcctcctctcgtgacattttttttggttttatattcacggaaaccacatcaattgcactattgtgtcgactttacgatatccgaagataaaaaagctcagtatttgggtattaataattaacggtcgtgagaccccatttatattttgtatactgatggaactaaccttttcttttataattgcatgagatgcgtattttttaggataggcccaataagcctgataggcccaaatagttttttcgaggttctctagtaaaaacatcaatatagctggtaaaatataaaatggaagaaatcagaatctcgccggggctatagcttcaccgtgtcgtgtcctaatctattgtcgggaatttgaagctaaagtaacattacaatgaggaaaccacgaacggcagagatggtgatttccggttatttaaccacgattcgatactagtaaattgatatttctcttacattattttgaaggcttcttattttaatgaaagttattttttttttaaataggtaacacaaagttggcatcttttttttgcttactaaattccaagcaaaatagagaaagaattgatatgcgtgcaagtttctgtccaaattcttgtcttttttggaggtgtggtgttgttttatcgacactccactttacacttcacaagtcacaacacttataacaaaagtgatcacagaggccagagttgagagtttgacaccgtcatcaatg

SEQ ID NO: 26783 - DNA, 3000 bp, Unknown; identical to SEQ ID NO: 10594
  misc_feature (1)..( 3000): 2750-1469P.txt file - cDNA_ID_2716072; gDNA_ID_2213664; Annot_ID_132635

SEQ ID NO: 26784 - DNA, 3003 bp, Unknown
  misc_feature (1)..( 3003): 2750-1469P.txt file - cDNA_ID_2716076; gDNA_ID_2213664; Annot_ID_132634
ctgaaattgtcagttgcaatttcgatgtcagatattgagaagttttggagagatgattggaaatcgtagatatcgtgaaggaccatgccattcatgtttggatctgcacttttgttttgtttgatgatcggtggggcggcgccacttaatggaggaaaggaagagaggcgtttcatggatctgcgtttccatagcttgaagaattttccccaattagaagatgctctgtgattcttgcactgtacgtctgtgtctgcatctgcattgtcgatagcttctctgtttggaggaggatcgtcagatgaagatgaagcggaagagattgagcaacgagttaagcaggcttcgagggctcctcttggtgatttggggtcttgcttctctttatctacctctagtaatcttagatctgggaggagaagggagagaaaacgttggaagaagctaggttttttggtgtacaagcaatgaataagaatacagaggacaagagaaaacagagcaaacatagaaacagaggaaacagaggagctaggttttaccatgagctgaagcagaattcataagaaacgcgttggttcttttatgttttgacgtatgatttatgtcgtttggatcttcttcagtgacataacttgaatatttagagttgtacctgcctcgggagattcaaaagaaaagaacagactaaacatgtcgttcttatgtaaattttgcgggaaattaagagaaaatcggtgaaaattcagggaaagttcgttaattctgcttaaacgttcgttaagtatcaatgaaaatcataacagaacagaagataaacttctagacattaatatcatgtctaccaaaaaaaaactcaaatcaaatataagaacaaacagagaaaaaagtgatttgattgaatgattacattggaagagcacaacacacgggagaagcttctttgctttggtctaccgccatgaaagagtgttggtaggacacttttaagattttctcagaaacctgaaaacctaaaaatagagaagaggatcatagaaaggaaatagaaagaagttaacatttaaaccaaaaataaataaaaatagaaagaagttttgaagttggtgttcgtctcgagacacccgaaagaaaaggttttgtctgtgtgtttaaaatttgatttactaatttaattgttttccgttgaccaatggtatatctactagtagtttttttgttaagctaatagttagactctaaaatgactaaatcctatatttggcaatatgcttttgattttctctttttggattgaactcagaggcattctcttagcttcattcatttatggcagaaagggttaagggtccttaaaaatcgcttcatctgtcggtctcgttatccaaactcatattcctaatttaggtcttttaaggttttaaaaaactactttctttatcttgttgataaggaatttataaaagatcaaacttgagtaatctaagtagttttagttttactaatttcatttactgttactaatcaattgtagatattgacattcttgtatatattgcgacctgatagtaattatctttaattttctatatgtttttattcaagtagtactctgttttgtattttctttcttgtgaatagaatattttctgtgtgtatatgatgcagaaagcctgcattaaaacctgcattggctttattgctttgcaccgtttatttatttttatgattcttatttttgtgattaacaaatattatttcaagtgactcttatataagttttggatagttaaaccacggaccacaatcatgttggaagtgattgttcaatacttcattgttgtataagagaggggacatcgatcatttatgtaaatcttgttaggtactgttctgttctatcaatctatcaatagtccctacgctaactttctgtaccctcgattaaataggtttttgctcaatgacgctgggtccaaattgtaatgactcagttcaacttccgcgacaaaatcattttcatagattttgatgatttctatagtgggcggttttttctatacatcttacattcgcaagaatttgaatgatattagcccatatgacgagaagaagaataattcattacttatgtggttaatgcggagtggaaacgaatatctcatggccaactacaaatccaaatactgtcttttgaatccctgtagttttatactatatgatctagagttttttttggattttgtctcccaaattagaaattattatagtatcaactatccatcacatttatagaaaaaaaaaaaaaaaaaaactatccatcacagcttggatcttgcggtgggccaggaaaaaacacatgagcatcggatctgtggaaaacaactgtcttatcgggtcaaacctttgagtcaattacacgttactgtgcatgtcataaaccatcaccaaaaaggaaaacaaaataacaaaccatgcatcttacttacccagtaacacaatgcatccataatgtacatagtatttgtgaattttttgaggaaagtattagtgaatattattactatgaaataccatgtaattacttctgaattatcttacttaagaaaattcaagtttagtcaatcaacattaaaactatagagaacccccaacgtgtaataatgcattgggagttgggactttcataaaatctcgaataaattaattcaaattgtctaattcgtccaaaattatcctgcatgggttttagctaagccagcctagctacatgtactgatttatacagagataaatatagacatgatatatatcaataaattaggaacaaatcagagtttttagatctaaaaacacggtgccttctcatttcctccggtgagttatccaaatcttgtgtttcttatcatatatcctatattttatctacataaaaattgataagtattcgttgaattcaaagggcattttacgaagaaaatggagacaagaaaagacgacatg

SEQ ID NO: 26785 - DNA, 3000 bp, Unknown; identical to SEQ ID NO: 10584
  misc_feature (1)..( 3000): 2750-1469P.txt file - cDNA_ID_2716080; gDNA_ID_2213664; Annot_ID_132633

SEQ ID NO: 26786 - DNA, 3000 bp, Unknown; identical to SEQ ID NO: 10583
  misc_feature (1)..( 3000): 2750-1469P.txt file - cDNA_ID_2716090; gDNA_ID_2213664; Annot_ID_132630

SEQ ID NO: 26787 - DNA, 3003 bp, Unknown
  misc_feature (1)..( 3003): 2750-1469P.txt file - cDNA_ID_2716094; gDNA_ID_2213664; Annot_ID_132629
aggtgagaaacacgaggaaacgcaagtaagtcagagaaaaaataggtaccaaaaggccccaaaataaaccattgctggcatgtacaactaaaaaaaaaaaaacaagttacctgccagttgagtccagaagcagcactctaacattatctgtatgccctctcagcttcatactctttgaaccggttctagggtcccagacacgtaaaacctgcaataaataaaaaaaacttagttttaagaaatcaaaaacccaaaaaaattatccgttgttgttctcaggtatactctctgcaacttgggaatgtacgaataccttttctgttccaccagaaacgagcatcgttccggtatcattcatcgccaaagcatacacagactccttatggcctttcgcaattgttggtgtgtacccatgagatggagatgactgcacagagatattgttgcttgaaccaacagttcttaaacttgtaacaggaccatttgcaccatttgaagaactatcttcattagcgtcattaggtttggtaactggtgacaaagcagcttcaatatcccatataaaaacctccccaccaaggccaccagatgcaacaacattattctaaaagttgtgaaatcaagatagaatcagaatgcgacaatgagaagcacatatatcctcaaaacttgcaccaccataccaatcaatttttttcagtgggaactataaagaaaaaagcatgacaaatgagaaattacattttttgccgcaactgccaaacaagtaacatagtcagaatgctgacggagagtcctcgtacagactccatctgataaaccgtcccatgtctagatacaaaataattaagccgcatttagaaaccaatatggaattacaaaaacaaaacaaagtaaaatattggttcggctagcgaaacaaattcacaaaccttgaccgtagtgtctgaagaacaagaaacaagagtgctctcaccagccagagcagcgtcgttcacctgaccagtcaacatggggtttgaaattattagatgcacaatagaacagcatccacctcaggaaacacaggatcctaatcactgatcatccctatacaattaaatttcagtgtcaagaaaactatatacccagtcaacatgagactcaaatgtagctgagcagaaggtcgcatcctcgtcaaatgcccatctcttgagtgtaccatcacgacttccagtgaagaggtagctttgatcattagaaacagacgacttcaacacatccaagcaatttatgccagcacaatgctgcagcttgcaaataacataagaagaacatcatcaggattgagttgagaaggagatgtcttataacttcaaactatttcaagtcatgtcttaatgtataatacgaaggaactagaaaataaatcaaacaaagagtaacacaactcctgatggcaataaaccatattggtgtaaaaaaactaacctttgtatcgttggcatcatttaacacataagtaagctttttctctttgcgagtgcgaacagaaccgccattactgccggcacttccaacccggtgcatttcaaattattctgaaagcctgaaaggagaaccacaaaagggaaaaaaccagcaagtgagggacaagcaatctcttcttcaagcagactagttatcatcatcatccaaaacataacaagaccaaaccgaatattgctactaagaaaaagctggtagtagtagagtgataagaacctaagggacagacatagagatccagctgagagtaagattctttctcttcacgagaatctcaaatattccggaagaaaaaaaatcaacaattatccacatcgaataacagctgataagctcccaaaatcctccattgactcatcaaaaggaaaatagtcggaagaagaagatcaaaatcaaaaggccacactcaattgagatagattacaaaatcatcatcactagtcagctataagaagactcttcagttttgatccatacacagtacccatcaccattgaacatatacgattaattcaactacttgctcaatttctaacaggagaacaaaaactgaacaataacaacaacaaaaaaaaagtggaatcagtcgtgtacgaaatcatcaacatacctttaaaaatctcaacttcagatgaaatcgatgatagtaacaaggtgattcagcaacccaaaacacacagagagaaaccctagaatcgctcgttgggggcgggagtgaataacgagatttgggaatcggattgatctagaaagtcgaaagtttttagcacaaatttggaaattatgagcaaaatttaatttaagagtcaagaaggacaaacaaaaaagagcagcctttttccaaaggcgtgatggcgtttggagaattggaagaagaagacgaagaagaagaagaaacaaaaaaaaaaaagtgtttttttttccttaagaaacacaaactcttctctcaaaggctctcgagcgagacttggtaaaatcagcccatagaggacaaaattgcgtttagtaaataaaatcgaaatagtgtttgggattggataagattatatcaaaatcctcttgtattttcttattggataagtgacataatttttgacctcacacaaaaattagctattgagatttaataaatttatgctaaaaccacaaataatccttaacaaaaatttatgcattttcttttcatttgtattttagtaataatcattcacttgtttaaagtcacatatattcttctaattaacacatctcatattccagctaatattgttagaaagaaaaaaggattacttggttgacaaaaaaaaggaaaacttttgacagtttaaccgttgatcgtgcaatgaccatgtttgattagagtaaaactaaatattgacaatactataattggtaaacgaactcatttccactcactagtttccttaagcgaccagagacacactgagatctctcctctttctgtcttcaccaatg

SEQ ID NO: 26788 - DNA, 3003 bp, Unknown; identical to SEQ ID NO: 26787
  misc_feature (1)..( 3003): 2750-1469P.txt file - cDNA_ID_2716094; gDNA_ID_2213664; Annot_ID_182010

SEQ ID NO: 26789 - DNA, 3000 bp, Unknown; identical to SEQ ID NO: 10581
  misc_feature (1)..( 3000): 2750-1469P.txt file - cDNA_ID_2716098; gDNA_ID_2213664; Annot_ID_132628

SEQ ID NO: 26790 - DNA, 3000 bp, Unknown; identical to SEQ ID NO: 10579
  misc_feature (1)..( 3000): 2750-1469P.txt file - cDNA_ID_2716108; gDNA_ID_2213664; Annot_ID_132624

SEQ ID NO: 26791 - DNA, 3003 bp, Unknown
  misc_feature (1)..( 3003): 2750-1469P.txt file - cDNA_ID_2716112; gDNA_ID_2213665; Annot_ID_132677
tgacaaacccgcagaagagtatatacacggaggtcatggacgaagacgacggagtttctttcgccgtctgatttagcaatctccgatcaaaagatttttcaggcgtcaagagttgccaaaaagagaaggaaaatgcaaaattccggtctaatttaacaagaagccaaaattacccggttcggtctatgtttacttgaaccgaatttaatttaccttcccggttcaaaaacccaaaattctagagagagaggacggcaatgcgatggggtcatctttctccgcctcctttactaactccaccaccgccgccgccgttcctcctccgtcgccaccttcatcgccgtcacgttccaatgtaaaatctaacggagaagagagacctcgtttcttcgatggaaaggcgaagaacaagtgctgggctaatgctgacatcgtacctggtcgacatcccgagaggtggcgtaaagacgtcgccggtaacatagtctgcaaacgcttcggaaattgcaatggttgtctctgtttcgagtatgatcacattgttccttattccaaaggtttgatttttcttatcactgcttccccaaatgtgacattttgaatttaggttttgagtagttaaaattaggatcttgatatttgtttctgtgtatataggtggagagtcgatagcggagaattgtcagattcttcaaacaagagttaacagattcaaatcagctcaagaaaatgttgatgccaccactcttaagagctattcttgtggtctgcaatttacgggtatgttgccaaatgttagcttcttcttcttctaattacatgtgatgatggatcatagatttgctcatctgctataagattcaatctttccttgttgggtttgtttttcagtgttcatttctatgttattatgtagataagatgggacaatcttgattgtgatttgtagtatgttccatattctgtagagattaagatcattaatcgtatagatatagtctttcttacctctgttatgctttcgtaaagtgctgtgttgaatagcatgttcgtttagaagtaatgccaatctcatacatgtgggagatgcttttgctttagatcttctttctcttttctctgttggtttgatcatatcaagaattgctattgagccactaggaatctaaatcttctttaaacccaaaagccatgctgtgagttgtttttaggtgttgctagtttacgttttatataggagtgaagcaaagtgttaaatgctcttgggaaatgcattttcttttcaaaaagactcaaaagattatagagctcttggtacttgcaatgattatacacaagtgaactcaagtgtgtgttgtgtgtctattctctgcatatttgctttgactttcttaagatttcttctattgtaaacattgcagacaaggagttagatgttatcgagatggcggtttatggagacgtgttacgacctggaaaagaatgtcgctgcaaaaccgtagctgagctgcttggtcagtccaagtccaaagatggtaaagccgcatgcgagttaccatcatagaaagtagtaatcaaccatgtctttgtaaagctttgattcatgctcatacattggcagattcatcagaatcttttacatatactggaaaccattgtttgtaagagtagtgatgattctatatctctatatacaaatggaaataaaattcagcttacactgatacctaacttttgaagtcaacaaattgtttgttaatatatcgaccacctaattcactattatatagtcgagaaataaaagttactgttacgatagagattttatggttggtcatggagacatgaaatatcaaaaaacgggaaaggtgcgcaattatgtgtgagctattaaagaaagatgtctgccaaaaagttaaagtcaacataaatttcctttggcttttttttttaaaaaattctctctgatatttaaatgtattttttcccatctatatataaaaaaaatatagtagctttcattcattaatacctaaataaaaatttaaaaattggtagttgtatcaatgggtgttcgaatttcggctttgaacaataaatgtagctcccacgtatacacatatcggctggttgaaaaactttatctatggagagagtcacatgatatatggtatccaacaataattcaacaatttaatgtggaatatgtattgattgccgtaaggttcgaaagctcaaatcccaaagaatttatcttactctaaaaaggggctattctatttaaatctcaatatgcattttgataccactacttcggttattattaaacaaagaatttcgaatcgatcccatattatacgaataagaaaactacaacaatgtttgtgattgtatataaagtacacaaatgacaagtgtgaggttaaaaaatgttggaaacaaacaagtcaacaacaacccaccaccgtttttggccgtattagctcactctcacactggtcgccgctagtcaaactctcgttccattgcataattttttaatcctattaatttcgattttctcaacaatgttactcacttaattagaaaaaaaacactactatatcaaattgaactatacaaagaaaaaaagctgtagaaatacttaacacagaaagtaaaagagagtgatcaatcaagtcatcattattcactgtcgatccaaaaaatcttgccgtagatttcgccttaaacatttctatttttgattacacgacatttacttttgatctatctctgtttaatttttgatttcgtcttccgcaattcacgcagaaatcaaaaactctaaaagaaaaaaacaacattctctaaacttttctctctgtatatatctaacgaaaaccgcaacagcaatagtttcatcattcaccggagatccgaatcacaataaccggcgccggtttaagagatagttccggtacacatgtgttgttgacgcggaggagcgaaattctgggaatg

SEQ ID NO: 26792 - DNA, 3003 bp, Unknown
  misc_feature (1)..( 3003): 2750-1469P.txt file - cDNA_ID_2716116; gDNA_ID_2213665; Annot_ID_132676
cgcccaatcctggatgatacttctctatcatctcttcatacctgtcaaccaaaccttcccaaaacccgtgcaagtagtattgattctccacataaaccttctctatccatttttccttctgcgaaagcaagagatatatcaacgccgattgatcatcggcctcaaatgctggcctgcctttcagataagctgtcagtatcttcccagtttcgtcacggatcttcccttttggtcccattggggcccaagcatctaataaatccaatgaccactgacaatttctcaacagaaagatacccgtgttcaatgcaacccatgatttttggttgaacagcaagtctggataaccgtgtatcaccagattatgattttcgtaccgaggcaacgggatctcaaacagtatatcagtgaacaaagcatcactatccatccaccaaatccattctacttctggatgagacagcattaatgtcctaatcataggtaatttcgtccaataccctgagagttcctcatccaaattcgccatgttatacacaatctctatcccgtggagtctacagtaatcaatcttgttcttcacagctttcaatagataatagtttccaattggtttatcacagggtccgggggaagaccctgtgagaagcaatattcgagctttgccattgacaatattaggaaactcagggttctgattcagccataccttgcgttgactatcccagttggtgattttgggccctagagtatatgtcgcattgggactaatatcagctttaggcggctcaagcaagtctgtcaaatgcgaatcagatgggatctccgcgattctggggcctagagtatacgttgcattgggactaatatcagctttaggcagctcaaccaagtccgttgaatgcacatcagatgggatctccgcgattcttggctctagagtatacgttgcattgggactaacatcagctttaggaggctcagccaagtccgtcgaatgcgaatcagaggggatctccgcgagaatcggaatggtttccttgatgaaactctgattaacagagtcggcgttggagcttccaaggttcccaacacggattgtgccaagtaggatgagaatggtcacgaagcagcagagaatcatgaacttgatgttgttaaataaggtattctggatctgccaaccgcgcaaaaacccacgggttctccatccaccatttgatacagccgttgtcgacagtcctctgccacttcctgaggatcttgacccatcctgaaacatttcacttgttgcctcctgtctctagatttcactcacaggggagagacctccagatggcacttgaatccagacacggtctaacttataactataatcggtgaagactgtctttttgttactcacagaatgtgtagatcccacactctctccctctctgaactacaccgctctgaaacttcagatttttggcaggatcctgatggaagactagtagatgatggacttggacaatctgaagagcctcttttaaaaatcattaaagaatattaaattggataatggagaaacctggttgtaattaaatatatttgatgcggagcaatatgttttatatgcatgccaacattaagcatcttattaaatgaaaaataaaaacctttcgcatcttcaacatatgaatattcatgccagattgcttggatattttgccagagaggtatcaaaagcatgatgcttgatatctctacaaacttaagtgactctatgcttacatatcaaagaagagccaaccatgtatacgcaactgtaaacaatctactcagaggcttattatacctatatcagccttggtttggaaatgaaatgcatagtcttacaacgtaaaatggcatcaaacttcacgttgaaacctctacgaaatattatatgtaataacaagttggatccaaaagaaatcatatacccaaattcaggaaatggaattggagatggtaaagagctcgtttagtcaactgaccataagaaacgacttcccagcaggcgaagttatatttgcaaaatcttccacaacattttcgttttcaagctcctctataacatgctgcaaacatggaaccattaaaccaagcaattcgttttcatataaacagaataaatgttcattctttttcagtatgctgcagtaacaacttactgctgtttcatcattgccaggtgtcacagtcccttctctatatacgagatttcttaacagcttaaaggcgtagtctatctgcaaaacatttagtagcactgatgatattaacaacataaagctaacagatttagcacacaacaaactgacagacctctataaaatctgatgagcaagtatatcctgaaacagatagaaattgagagaaacagtatgaagaatgatggtgaagaagaagcatcatggaacgaattcatgtcatggtcgattttgaaaaacgttcttcaagtttgtctgcaatgtacttgaactaagaccacctaaagtatagttctaaaattcaattagcctacttatactaacagaaatagagtacgctgagtttatccaagactcttcacgaaacaccacacacagacgcacacactcacccaacagtagatactaatttcaggactatctatggagtataagttactcgaaggtggaatcatgcgattgaaacaagactcaaatgaaaacagaaagaaattcaaccgaaaatgacaaacccgcagaagagtatatacacggaggtcatggacgaagacgacggagtttctttcgccgtctgatttagcaatctccgatcaaaagatttttcaggcgtcaagagttgccaaaaagagaaggaaaatgcaaaattccggtctaatttaacaagaagccaaaattacccggttcggtctatgtttacttgaaccgaatttaatttaccttcccggttcaaaaacccaaaattctagagagagaggacggcaatgcgatg

SEQ ID NO: 26793 - DNA, 3003 bp, Unknown; identical to SEQ ID NO: 26792
  misc_feature (1)..( 3003): 2750-1469P.txt file - cDNA_ID_2716116; gDNA_ID_2213665; Annot_ID_182080

SEQ ID NO: 26794 - DNA, 3000 bp, Unknown; identical to SEQ ID NO: 10631
  misc_feature (1)..( 3000): 2750-1469P.txt file - cDNA_ID_2716122; gDNA_ID_2213665; Annot_ID_132674

SEQ ID NO: 26795 - DNA, 3000 bp, Unknown; identical to SEQ ID NO: 10618
  misc_feature (1)..( 3000): 2750-1469P.txt file - cDNA_ID_2716126; gDNA_ID_2213665; Annot_ID_132673

SEQ ID NO: 26796 - DNA, 3000 bp, Unknown; identical to SEQ ID NO: 10618
  misc_feature (1)..( 3000): 2750-1469P.txt file - cDNA_ID_2716126; gDNA_ID_2213665; Annot_ID_182077

SEQ ID NO: 26797 - DNA, 3000 bp, Unknown; identical to SEQ ID NO: 10626
  misc_feature (1)..( 3000): 2750-1469P.txt file - cDNA_ID_2716159; gDNA_ID_2213665; Annot_ID_132663

SEQ ID NO: 26798 - DNA, 3003 bp, Unknown
  misc_feature (1)..( 3003): 2750-1469P.txt file - cDNA_ID_2716163; gDNA_ID_2213665; Annot_ID_132662
cgtagcgaatcaggacaaggtcgactcgcaatccgattatccaatccctcttagccacgatggtatctttgcgaatctgaaaccaaagctagaaaaccctaatcttggtacccttgtcaatccaatttccgggtggggaatctctgaaagtgatgttgaagtcatcgatttgggtaaaaagttttcatctaagctgaaaaggaagcttaaggatactaacgggtttgtcaaagatgagtttgtcaagatgttaaagcagtttcttgagaaaattggtgagaaagttgggatttcagaggctgagtctgagatggttttgggagatcaagctggttctgagatacagatactggtggagaaaaatgggtttttgatgggtagagatgtatctggtttagtgttgaaaggttgtattagtctagagatgtgggagctagtggaaattttgatttcaaactccttggttgatcattcttcatactcttatttagttagcaatcttgttgagaagcaaaggtcagatttgctttgcgtagtgatcaaagaagcttcagatcttggggcaactgagctactttcaatcttgaagtattttttatgcccatcaaaggaagcaattagcactatggctaaggtaagagaagaatgggagagtcaggctatgttggctattgaaaaggtgagcaacacagagctatcaaagaagtctaaagttgcagaagaggcttctatcttgttaatggttgctcatgacgggttttcaacctcagagctttgcctgcattacttgttagcttcacggaatgttgacgaagtcatgtttgcatctgcagtcagtaagttgaatggcaatgagatgggtagctttattcgatacctctctaaatggatgaagaagtatgagatgttcccacaagctggtccatgccctaaagccgcctccaagcttggtttgaaactatgcaactgggttcctgaactcacagacattaccaaatgtttgggacttcttatcgatgagaacttctccactctggttctgtactcggatttgcatgaagagctaaagtctattgcaagagtagccgatgggttagcttcagaatcaaaactttcctgttttgtggctaatgtggttgaaagtttgaagcttggagctgcccgaaactagattttcacaattgttggagcttaatgcaaccctgttttcactttttattatggtctccagtgacatttgtattttctagtttcagttcatctcttaactaaagtataattttgttcgctatctttgagagtttgtctccaacctctgcacattgccaatctcatttaggatgcaccacatggtttaaaattgttttcttttccaagaattctttatcagttacaacaggaagagtaaaaggtttatctttgcaatacaacagcttactttgttgaagaatgagcacaagttgttgctcaacgaagtgtctcacagagccggataataaaaaccgttcctttatgaacactcacgagaccttgccgcaaaatcaaacggctaatgtatcatcaccacgaaagtgaggtactctcgctgaggttgaagaagaagaaggggcaagaatgtaattacatccagaaatgcttcatagttacgcagctgagttattacacttgttcacaaagtaagctgcagtctggggactacccaactcctaactttcttcaccttcttaaattacctatctgtcaattatcatcatttcccaattgtgttgatacttaattggtagtagcaattttttccattaaagttttcatttttttggttttttgttgatggaaaaagtattgatccaacggctgtagaagaacggtgcaacaagattttgaattcggagatgcgtttgttttagttttaaaatagaaataaataaagttgttctctctctctcttcgtggacactggaactaacaccaccgatgcactacactctgtagagactgcaaatggaaagcatcttttggtaatcacgggtactgttgtcttcgtcttagtttttgtcggaaatcagacattagatccgaccagattctctatttggagacagacattactcggatctttatttcattttgtatgattctttattgtagattttgagatcaggtagtgtggatttgagatcaggtacatttacttgcaaggtgagttccagatctggttttggttatttcatttctggagttttatacgtttttgcaattttggagattttgttgattttagattaggatgatcattgcattttctttctctttcttgtttgatttcattggttaatgattgtggattactactatttaatctttttataaaaaaatccaaatccttagctcatgtacttataaaagaatgattttatgtttgatagtgatctatacatagttataaacaaatggctgatccattgaacttagtatgatgaatcctgttacaaagagcttatgtatctctttaatgtctaaaagctctagatagaaccaaaatatgaaaattgcaatctttagtaatgaaagtgttgtgttatagtcttgtgttattgcttgaccataatattttgtgattgttcggactaatgcaggtgttttgaattttggttgtggacataatgggaaagcctgcaaggtggttaaaaagtgtactacttggaaagaaaccatctaaatctagtggttctaaagataaggaggtaacacacttccgcacaatgttgtatgataaaacaaatgaatttcaagcttgcatagttaaatttctcaggttgattacagtagtggttctcgtagaggaccttgactgcttgacatctcttttactagttttttcactttagacattgcaaatttcccactaattttgtgtcgtctactattgtctatggtgtcactttctgatttcatttccctttgttgtctgtttctaattgttcctgacaacaattctctatg

SEQ ID NO: 26799 - DNA, 3000 bp, Unknown; identical to SEQ ID NO: 10613
  misc_feature (1)..( 3000): 2750-1469P.txt file - cDNA_ID_2716166; gDNA_ID_2213665; Annot_ID_132660

SEQ ID NO: 26800 - DNA, 3000 bp, Unknown; identical to SEQ ID NO: 10612
  misc_feature (1)..( 3000): 2750-1469P.txt file - cDNA_ID_2716170; gDNA_ID_2213665; Annot_ID_132659

SEQ ID NO: 26801 - DNA, 3000 bp, Unknown; identical to SEQ ID NO: 10611
  misc_feature (1)..( 3000): 2750-1469P.txt file - cDNA_ID_2716174; gDNA_ID_2213665; Annot_ID_132658

SEQ ID NO: 26802 - DNA, 3000 bp, Unknown; identical to SEQ ID NO: 10611
  misc_feature (1)..( 3000): 2750-1469P.txt file - cDNA_ID_2716174; gDNA_ID_2213665; Annot_ID_182058

SEQ ID NO: 26803 - DNA, 3003 bp, Unknown
  misc_feature (1)..( 3003): 2750-1469P.txt file - cDNA_ID_2716178; gDNA_ID_2213665; Annot_ID_132657
ttaaaaaggattatgtgttttatggagttatagaagaatatatggctttgactaaaaagaagaagaaattgagcttctttttgttattttccactttggttagttcttaattgcaacgtagaagccttgccctccccaagtttcgcaagtcttcaacaaaaatgttccgcaagtcttcgctattacacgtggcgttgctttcatgtcttgcccgtgactgtcctgttactctagtggtcagagaaagtttctttttcagttgtattttgactattcagattttggtggtaagttgagaaacgagaacttttagcggaataagcattatatgattaaaaaaactctataatcaaagaagaataattgtcttgtagagtttgctaatcctcttctccaagcaaggtgcaaagtctcctctgcatactaggcttagttcaatacatctttcaatctagttaggcccattagcccgttatgtttacaaagttaaaagcccacttacttgagaaaattcacagatgcacacatgcattagattatgtactgcaatctgaaaatgcatgatgagaggtctcatacacaaaacaaaatcaaaaacaatttagaaaaatattagagtaacttataaagactgttacagctgaaactaaaatactaataaattcgacttctggcaataattaaggattacatctcttttgtttagagtataattgaacttttggagctgtaatataatttgtatgtatgatttatgaaaagtgattgaacttatacatagatggaaaagttggcgtaacaacatgcatgatacatacagaacacatgcagccacagcatttgaatagaacacatcatcacaattcccaaacataatcattctcttcagcaaaaagacacactctttccaaatataattgtcacttttactgttttaaattttaagttatgccagctttaaagttgccgacgacaaaagcatgtccatcgtttctttcttcttcggaagattaatcagaggatttaaaataatctaaattcgagattatgttgtataaatatccattttgaaacttgaatgaacaaaaaaccgataaagttttccacgaataagttgttggtgtttttagtaggttcatagataggagggtggaaggtctctagttgggcaataaattgaaaccgcttttttctgacctaccaaatattaatttgatcgaatcattgaaaaaaatacatatataaaattatccatataaaaactatgtagtttgctttaaaatatttcatcgtatgcaatgatatatgcatacttaatccaccacatgtcccttgaaacaaaagcacttaagctctgtgtggttgacattaaatcacacatttcattttgttaaaattaaagtctaaaattttattcatggtagtacatccatcatcaaagaccattttcattgaacaaaataaagtttcaatctctaatcctttgtgaaaattcttactactatatattaattaggtcttttggaatatagacgcgcaacacacattttcttatatatggattgaatggtatccaaatccccaaggtaatgtaatgtaaaaccaagataaagaaaacgagtatgacattgacaattgaacttgtagcgaagtcaggataggacgacttgcggtttctactttctaagccaaagaaacatagttttcattgatttttagtgtttttaaatttgttgttgacttccattaatggaatatttcgtactttgcttcttcttttcgaattttatttacctatataactttgctttattttctacaacacaataagtattgctcataattgaggaagtctatacacacaatattttcctatcctttctttttttctgtcgggaatttcttcatatcctagcatctagattatgattgtacacatacaaaaacagaaaagaactagacttcaaaataatgcaaattagaaacaaaaaattgctccaaaaaaaatatattcaaaactataaataaaatattattatgatttttcttctattttacgtacattgtatatctctagagaagaaaataatttttaaaaaatagtttgggatcaacgtcgcacttattgttttgtcttacaatctcagagtctcaccgtatccaccacgctggtcaacaacttcaacaaaactctcttcctcgaacttcaatcttatcccttcatttcattaccattaattcacaccaacggctaacattgtcctcctcgctaaactgttaattatacgtttggccgtaatgttttgaagtctgcctatatttcttttcaataaatgctcttttaattaggttttaatttggtgaaatccaacctttaaattttctgatgctgttaaatctaagagtttgaattttctaaaatcattgttgtcggttatcatttgtacatcttgatagaactataatatgatcaatataaacttataataataataactgaaaatacaaatgattttgtttgtttgtttataaaaccactgaaaaatgcaagagttaatccactgagttcaaccaaaaaataaagaagtgaattctattagtcataagcttggaccaaaaaatccatctagaagaaaaaaaaaattgaaaaaaaattacaagtttctaagaagatggtgcaatggttagaaaaatctctcaagttattaaatgcatcataaactaatactgtatattactatacacaaaaatcaaagactcccttttttttaattgaatcaaacaaaatccgaaatttcgaaaggtccgacttttcctcacctgaacccgcgttttctctccccctcccaacccaactctccaattcgccggaaaatcaccgccaccgtcacttccggcgtccatatgaactaaagagataagcttttttcttctataatccttcttcttcttcttccttgatctcctttctctgagtttgctgagtttcttaactcagccatg

SEQ ID NO: 26804 - DNA, 3003 bp, Unknown; identical to SEQ ID NO: 26803
  misc_feature (1)..( 3003): 2750-1469P.txt file - cDNA_ID_2716178; gDNA_ID_2213665; Annot_ID_182057

SEQ ID NO: 26805 - DNA, 3003 bp, Unknown
  misc_feature (1)..( 3003): 2750-1469P.txt file - cDNA_ID_2716182; gDNA_ID_2213666; Annot_ID_132701
tggctttgtgttgtgctagatgcgatgcaatagcaatattttcctggagtttcaagtaactagtggcttaggttcataatagtgtttctttgtaggacgaaagctgtgttagtattctctccactgtaaaggacaagatgtctcagaagcgaaatcttccttcttggatgagttctagggatcccgagattactccgagtaagtctcattgtaagaagcctaaggatgaaggaccaaccgaagagcacaacagtagaaatgccccttccaacaagtcagaacacgccgagccaagttcaaataccactgaattctctaaacttatggtttgtgtgtgtcttcatggtcttgttgagactcaattatcttaagctgtcatgttagtttatatgcttttgtgattgagttgaaggttaaactatgcaggaaggcgttgtttttgtactttcgggctttgttaatcctgagaggagtacactgaggtcacaagccttgacaatgggagccacctatcaacctgactggaacgctggctctaccttgttgatttgtgcttttcctaacactccaaagttccgtcaagttgaaacaaatggtggaacaattatctcaaaggttacctctttgactcttcttataagggattgtgtgcggatttgaatttctcctttttgctgatattttatatgatttcactgtctccaggagtggataactgagtgttatgcgcagaagaagttggtagatatcgagcaataccttatgcatgctggaaaaccatggaggaaaagcagtagtccccaagatgctaatcgaggtaaaaagaattatattggaaaggctttagatagaatctccgttttaaccatcctgaggttcatcaaatcaccttgtttttacgtttatgacaagagaaaagcttttcttattgcactgcttcactccgatgtttagttgactctgtgaaccttaattgattgtattcagaaaagagagaacacctgtctaaaaaaccagagaagcaagtagagaaaaaaacagaaacaaggggaacaccatctacctcatccaaggcatgtttaaatctgatgatttggttaaccaaaacgaaccgtattttgctccaatcaatggtctatgactgtttatttccatatgttcacagaatagatcagcttgcaatcttgtgaaagagccattttttgttacagaggtgaagaaatgggccagggatgacctaagtcaaaccatctcatggcttgagagtcaggaggaaaaagtaagggaattaatatgctctttcaaaagacatgttttcttgattgtatgtttccgttattctaaagccattgtaacagccagaaccaggcgaaatcaagcgaatagctgcggaaggagtcttaacctgcttacaagacgccatagattctcttgaacagaagcaggttaatatctctgaagtctgaacaataatagttgccgcctgtgtacatttttggatttgttaaactttgatcagtttctttgagaagatcattggttgaatttattctcgaatgttcttaattttaggacattggatcagttacagagctatggagctttgtccctcgtgtagtgaaggagcttggaaagatggaatcgtcttctaaaaaggaaaattcaacagcatcaaaggaagaagtttgcaaacaagcaaagtcgtggaaaaagatctacgaagctgagctagcaaaaccgggcgaagatgaatcgacctctcgggttgcttgtggctatgacagtgatatgaccgttgagatgactgaagaagagatcgaacttgcttataggaacgtttctttagagtgtctttagatcaaacttgtttcattttgcatatgatctcttaaggaattccaagaattcttgttatactcggtttgttcggtttgagtaggatgttattactgataaaaatttgaaataatccggtctgcttggttcggaaagaatgtttctaattagaatttatttatgctggtttggattcgattgagagatgtaatcggttgcaattaataagtcggtttgatttgatactttttagtgtcgattgacgatgaatttgatcggttaatacaaatttgatttggtcaattaggttcagatgtctccagttttgaaccggtttggttctatccaatttaataaccgttttgtaatatcagacaaacgaattgaaaccggaaacatgtaccgatatggttaggatcgaagaagattgattgaagacaagaccctaatttatttatacccttattgggttttgtcttgtgagagttgtgcctttctttgtttcgcagtagggttgaagcggatagtacgccacctctatctctctctcaccctatcgaactcgcgaagaacatcttcttcttcttcttctccgtcttcgtcttcgcgagctctctcagtagcgcaataaaatgggggcttcgcttcctcctaaggaggccaacctcttcaagctcatcgtcgtatgttccgattccctctctttctttctcagtttttactttgtcttaaacatgcgatgtgatgttcctggtcagcagaaattggaatacgatgagttttatctgctctattaaaccctaaattaagttaatcgtcaatgtgttgggtcaatagaaaaattcgttgacatatgaagtaaactgtgcggagttgtggttccttaatgtgttaatttgatgtaccaagttcttagcttcagttacttttgactatcggctattattagacctcgattgcttctgggcttttttagtcgctcagggattcgtagtttactttgaagaacttgaaaaccaagctttatcaatatatatatggtttcagcatagattttgggtttaaccattatattgttcaacctgctttgaatagttgacctttttctttatgtaattttcgcaagtaagtacatcatatatagttattctgagtaatcttataatg

SEQ ID NO: 26806 - DNA, 3003 bp, Unknown
  misc_feature (1)..( 3003): 2750-1469P.txt file - cDNA_ID_2716186; gDNA_ID_2213666; Annot_ID_132700
gactagttctagtgtccgccatatgtataaagctgtaaacatctttaacgcatatatttggtttattaaaacaatagttttgtgattactatgacccattcatgtatttgcatataaatgtagtaacttggagttttggttaattagacaaaagatactccgatctaatattttttaaaataagctaattgaaacttcaacgtgggataaaacgggctgacaaaaaaaggttcaacatgaagaaaataactctaactgataaaacggcacggcgtctgaatgactataactctataaggtgacaaaacgacacggtgtcaacatccttaaaggggggaagaagagtcgtcgtgattcgtcgggtggctggctctttgataaatctaaacaataaacgacggaagcaatccgattcttcgtagataggaatagcccgaatagactggtactgggagtgttggacccacttcatcaatgttcgtgtcgatattttcaattctcatactcttctttggtcgcgttcaattattcaaatctcttaacaagtattttcttcacaagaaaattcgccaagcaaattggaaaaaaacgaagaacacacgaaataactagccaaaagagtttaattacttctttatatatgtgatcgttatttatttgcattttactcgtttttttttccaattatgtcgacacttgattaaattagaagcacaaagcctcgaagcaaaccggcaaagataataacatctgccagagctaagtaataaggtttacagttagatgatcgagagaatatgagctttggcaccgcagaaaacgctggccaattacataggaaaatgttcatttgaaaagatatatagctaaacagtatatatgtctcaaaagatagtttgactcgccgcatctttctattaggcactcgacgtcttcatcatatatgcattattattttgcatattaattaatggtagggatcaaattgttacgaagacatgcaatagatcatttggatattcatgcggtcgacatcaaataaaacagctctcgtacatacagacaggataagctcatgaagtttcctttggtatttatttttacgtccttttccatatccattatgatagttatccggtagctgatgtggacttcgtatcttctactgccagtaattgtatttctttttttataagtgcgcggaatatctattttcattcatcctcatcatcatatactaacatcaacttatctacctttttttttttaagggtttgctcgaggtttcatgtcattttttggaaataaattttgacaacatgatttaatgttgaatggtaatgaaataagaaaatcaagatgattcaatactcttcgatatatataaagtgagcgagagggaaagcacagagtatgataaatcaactgaatttagctaataaaacacatttttttatattgatagcgtcgaacagaccaacgacaacacaacggtcaaattaacatggcttaagtcaagcgaggacagaacgtgccaaagccattgaatatattgaatccttttataagcatatcttatttagtaaccacgtgagtcgtgacgatggcttattattagtacgtactacgtaactttgaagaaaagaagccctgaaatttcggaaatgggttcaaaagtccaaaaacagtttgcggttaaagaagggtacgttattttttttataacttttttttcattttttcatcaaagaaaggtacgttaaagacaaagtgaagacgtagtttaattttgacatgtttagactcattgatattcagaaacttagtcctggaattgtgttgtagcaaaaacaacaacacaacgagagaaagataagataaaagcatatatgatgggtttgtgttgcggatgttacgagaatatgagacatgacacatcatgacatcaatgatatggacaagcatacgatatatttcagaagaaataggatgtttcctccccttgcaagctttagcttctccagtgcattaagtctaattcatcgagctcattgtaggtatacgaaggatttgactgagctaacttaggaaaaaaagattgaaacgaggaatgatttagtaatggtaatttgaccttggttttgtacttcttttaattcataaaccccctccaccgtaaaaatgaaacattagaaatcctaaaagggcagacaagttgatgtccaaaaaaaaagaaaaaagggcagaagagtaaaaacgcgaatgaaagagtcaaagcaaaaaattggtaaaaaaaagcgtgaacggcaggattcgaacctgcgcgggcaaagcccacatgatttctagtcatgcccgataaccactccggcacgtccacctttgctagttgaatcatttgttaaattgaaaacccgtcattttgatctgattttgtactgtatgttgacaaattgaatagtctctgatgatttcgatcaaagagaagccacggggggagcgctagcacttaaaggttcctcgctttcttctcaagtttatagtcttctcctctgtgttggctcatttacatgggtagatttagttttcgagggttttatggcgaagttcgcgatgttctgttaattgcaatgtctttcttctttttttttttttttttttttttggtattcaattccaattttccagtgtgatttgatctgaactcgaattcaaattcagtgctactgagttatgttaaaaccattgtccattgatttttttatgttgaaattgaaaaaaggttataccattcgtttgtattaagatttgtctttcttagggaatgttttacattttttgcagatttgcaccgttttctctctggctttgtgttgtgctagatgcgatgcaatagcaatattttcctggagtttcaagtaactagtggcttaggttcataatagtgtttctttgtaggacgaaagctgtgttagtattctctccactgtaaaggacaagatg

SEQ ID NO: 26807 - DNA, 3000 bp, Unknown
  misc_feature (1)..( 3000): 2750-1469P.txt file - cDNA_ID_2716202; gDNA_ID_2213666; Annot_ID_132696
tttgccctgttctttttgttatcgctgcgtcagcggttggcgaccggaaattatagcttatttgcatgtaatctgtatggaaactaacataatcgttcttgtgaaaagagccgcagtgtctataaaaatggtcgccgttttttttagcgatgccgacgacaccggtatcccctgtaaaagtggccgcagcgacacccttattcttttttttctgtttcttttgctgttgttgacgtttaaatttcaatcgcagatccctgacgcagcgttaacgtgccgaacatggccattgattcaaatacatccaccatataacccattccaaaataaaacctgttcaataatctctttacccgtcccgtgatttttttttaaagtagtaatttttaaaatttaagaattattttttatatataaaagttttgcaaattgtatcattctctaatacatttatattttatagtttaattttatatatagtaacattatacataccacataacattttcggttttatataattttttctaaattaggatgatttgatatgtttaatattagtggtcttaaaaaataataaattaaagatttaacccgtattgaaacggtggattaattatattttactttttttattaatgttgattcaaaaacccgtcactccaaatccgtcttgccaaaaagccatttattttattaacattaattttattaatgatatgactctgaattataatctaaacattttagctaataacataggagtacaccatatttatttaataggggaatgtaccatatgacccgaatgcacttttacccaaatccaccaaaaaagtcttgcaaaaatactatagagataagaaacgatagtcggttttgataggtataagattagcaaatatattagttagcttaaattagttaaaaaatacaaattgaaaaggtatattacactttattcgaatatagtatcaaaacttatataatacagagatttgataaatttttaatcgttgaatacttttttgtgctaattttatgtgattaaaatttaattgattttgtatataaaatattaaattgttttacgaacttatttgtttataatttggtaacagatagatatttgagtattcagtatattttgcttcagtttaggaaatctttgatgacccgtctttagatccaataagccctataatctagatattaacttgcagtatatcgatggtaggtttatattttagttaaactaaaaacttttattgtaaagatgatttaaaaatatatgatattattttatttgattttaaatgtatagtaaattgtgagttgtatatgttttattgatattatctatattgtttaatgtttaagattatatatttgtagtttgattgttaatttaagagtttcacctgtagtataccatcttgtattaatatcgatctaaacttgtcaattctaagattttccagcttgtattaaaaattgaatcacatcatacacataaaaaaatctaatatgttattaattattatagtatataagattttaaattttcaatataatatgtatgaaattgaatataaatcttttaaattatgacccgttactcagtagaaagttttcttaaatctattttttactcgttataatattttttcatgtattgaacagtttatattcgtttttaaaattcaaattatggcatatgcaaaaaaactttaattatttttttataatgatgatattatttttcgcaaaaatcgaattatataaagatgagaagtgaactataataattaataaaaaattaatatgataatttagatatcaaatctaatttgttgattttaataggttacttttttggaaattaataatgtatttcgtttttctaattaaattaaattaattaaaatttagatatcaaatcttatatgttgattttcattggttattatttttgaaaattaataatgtattttgttttttaatttaatttaattaattaaattagtatttgactttttaatctttaaagagataaattaatttactttttaaaattttatttctaatagcatatctatgtaattacttataaaaattaaggttatatttaaaatgtacttcctaaatgatttgattagtcggctgcatgtgtctatacaagtccatggactcttaacgggcctattactagtttgtcaatctagttgtttattgggcctattaatgagttaccaagtaacattagtttccatctattgttaattttatcatttagctttgtttacgataattttgtttatgaaaagtcgtttttttatttttaaattactcatttttatttttctattatcgtatagatatgaacagaaatattaatacgcattttttaaaatatttttttctagtatatattcataaaattgaaattctgttaggcgttaattattgaatgagaaatttaaaatgaagaacaacagttagcaaaagtaatcattattttctacgtgtggtcttttcagattgccgtaaattaaccattttatcattattgtaattatcattaaatataataaatccaccattaataaaggccaagcgaaaaaaaagggtcagttattaaaattaaccaaggggcgtgactctttgattttgaatatatataccataaaaattgtcaaagagaagtcagatagcgagcgagaaaaccttcgtgctctttcttcgccgccaagttatatcgacggtgttttcgtatcgacgtcttctcctctctctctctctcgccgtcatcacctctttgaatgaacggcggacgcgggaaaaggcctaactcagtaagttatttcagtacccttatacaataaatatcatttgtttgtttctagacacctctagaatttgttggcttacttgtggtgacagagtcgtgagagtatactctgatttttgatggtttaggcagaggaggaaggaaccatg

SEQ ID NO: 26808 - DNA, 3000 bp, Unknown
  misc_feature (1)..( 3000): 2750-1469P.txt file - cDNA_ID_2716202; gDNA_ID_2213666; Annot_ID_182113
atccgtcttgccaaaaagccatttattttattaacattaattttattaatgatatgactctgaattataatctaaacattttagctaataacataggagtacaccatatttatttaataggggaatgtaccatatgacccgaatgcacttttacccaaatccaccaaaaaagtcttgcaaaaatactatagagataagaaacgatagtcggttttgataggtataagattagcaaatatattagttagcttaaattagttaaaaaatacaaattgaaaaggtatattacactttattcgaatatagtatcaaaacttatataatacagagatttgataaatttttaatcgttgaatacttttttgtgctaattttatgtgattaaaatttaattgattttgtatataaaatattaaattgttttacgaacttatttgtttataatttggtaacagatagatatttgagtattcagtatattttgcttcagtttaggaaatctttgatgacccgtctttagatccaataagccctataatctagatattaacttgcagtatatcgatggtaggtttatattttagttaaactaaaaacttttattgtaaagatgatttaaaaatatatgatattattttatttgattttaaatgtatagtaaattgtgagttgtatatgttttattgatattatctatattgtttaatgtttaagattatatatttgtagtttgattgttaatttaagagtttcacctgtagtataccatcttgtattaatatcgatctaaacttgtcaattctaagattttccagcttgtattaaaaattgaatcacatcatacacataaaaaaatctaatatgttattaattattatagtatataagattttaaattttcaatataatatgtatgaaattgaatataaatcttttaaattatgacccgttactcagtagaaagttttcttaaatctattttttactcgttataatattttttcatgtattgaacagtttatattcgtttttaaaattcaaattatggcatatgcaaaaaaactttaattatttttttataatgatgatattatttttcgcaaaaatcgaattatataaagatgagaagtgaactataataattaataaaaaattaatatgataatttagatatcaaatctaatttgttgattttaataggttacttttttggaaattaataatgtatttcgtttttctaattaaattaaattaattaaaatttagatatcaaatcttatatgttgattttcattggttattatttttgaaaattaataatgtattttgttttttaatttaatttaattaattaaattagtatttgactttttaatctttaaagagataaattaatttactttttaaaattttatttctaatagcatatctatgtaattacttataaaaattaaggttatatttaaaatgtacttcctaaatgatttgattagtcggctgcatgtgtctatacaagtccatggactcttaacgggcctattactagtttgtcaatctagttgtttattgggcctattaatgagttaccaagtaacattagtttccatctattgttaattttatcatttagctttgtttacgataattttgtttatgaaaagtcgtttttttatttttaaattactcatttttatttttctattatcgtatagatatgaacagaaatattaatacgcattttttaaaatatttttttctagtatatattcataaaattgaaattctgttaggcgttaattattgaatgagaaatttaaaatgaagaacaacagttagcaaaagtaatcattattttctacgtgtggtcttttcagattgccgtaaattaaccattttatcattattgtaattatcattaaatataataaatccaccattaataaaggccaagcgaaaaaaaagggtcagttattaaaattaaccaaggggcgtgactctttgattttgaatatatataccataaaaattgtcaaagagaagtcagatagcgagcgagaaaaccttcgtgctctttcttcgccgccaagttatatcgacggtgttttcgtatcgacgtcttctcctctctctctctctcgccgtcatcacctctttgaatgaacggcggacgcgggaaaaggcctaactcagtaagttatttcagtacccttatacaataaatatcatttgtttgtttctagacacctctagaatttgttggcttacttgtggtgacagagtcgtgagagtatactctgatttttgatggtttaggcagaggaggaaggaaccatggctgaaccctctgtaaagaagagcaagttgacggaatccgattggataagtggtttagcagatgatttgctacttcagatcctctcgaaagtccctacgagggaatccgttttcacaagccgtatgtcaaagcgatggagaaatctctggagacacgttcctgccttggacttggactccagtaaattccctcatgagtcggacttggaagatttctttgatagctttctgcagtttgatggtaatcttaagatagagagattcaagtggatttacaacgttgaagagcattgtgaccctgaatttgtgtctcggatcgatcatgtggtgaaacgtggacttaaagatctaactattctcagcaaggttaatattgaggatgactcagttcggatgcctgtctcgctctactcatgtgcgactctggtgaatttaactctctatagtgtagtcttcgatgctcctcgagcacaattggtttctttaccttgcctcaagactatgcatctcgaggcggtcaagtttgacggagagaccattcttgggactctcatatcaagctgctcttttctcgacgaattaaccataatcacgcatgatcatgatgaactcggagatgtatctgtgcgctctccgtcactaaggcgcttcaaacttgagtctatg

SEQ ID NO: 26809 - DNA, 3003 bp, Unknown
  misc_feature (1)..( 3003): 2750-1469P.txt file - cDNA_ID_2716202; gDNA_ID_2213669; Annot_ID_182231
caaatccgtcttgccaaaaagccatttattttattaacattaattttattaatgatatgactctgaattataatctaaacattttagctaataacataggagtacaccatatttatttaataggggaatgtaccatatgacccgaatgcacttttacccaaatccaccaaaaaagtcttgcaaaaatactatagagataagaaacgatagtcggttttgataggtataagattagcaaatatattagttagcttaaattagttaaaaaatacaaattgaaaaggtatattacactttattcgaatatagtatcaaaacttatataatacagagatttgataaatttttaatcgttgaatacttttttgtgctaattttatgtgattaaaatttaattgattttgtatataaaatattaaattgttttacgaacttatttgtttataatttggtaacagatagatatttgagtattcagtatattttgcttcagtttaggaaatctttgatgacccgtctttagatccaataagccctataatctagatattaacttgcagtatatcgatggtaggtttatattttagttaaactaaaaacttttattgtaaagatgatttaaaaatatatgatattattttatttgattttaaatgtatagtaaattgtgagttgtatatgttttattgatattatctatattgtttaatgtttaagattatatatttgtagtttgattgttaatttaagagtttcacctgtagtataccatcttgtattaatatcgatctaaacttgtcaattctaagattttccagcttgtattaaaaattgaatcacatcatacacataaaaaaatctaatatgttattaattattatagtatataagattttaaattttcaatataatatgtatgaaattgaatataaatcttttaaattatgacccgttactcagtagaaagttttcttaaatctattttttactcgttataatattttttcatgtattgaacagtttatattcgtttttaaaattcaaattatggcatatgcaaaaaaactttaattatttttttataatgatgatattatttttcgcaaaaatcgaattatataaagatgagaagtgaactataataattaataaaaaattaatatgataatttagatatcaaatctaatttgttgattttaataggttacttttttggaaattaataatgtatttcgtttttctaattaaattaaattaattaaaatttagatatcaaatcttatatgttgattttcattggttattatttttgaaaattaataatgtattttgttttttaatttaatttaattaattaaattagtatttgactttttaatctttaaagagataaattaatttactttttaaaattttatttctaatagcatatctatgtaattacttataaaaattaaggttatatttaaaatgtacttcctaaatgatttgattagtcggctgcatgtgtctatacaagtccatggactcttaacgggcctattactagtttgtcaatctagttgtttattgggcctattaatgagttaccaagtaacattagtttccatctattgttaattttatcatttagctttgtttacgataattttgtttatgaaaagtcgtttttttatttttaaattactcatttttatttttctattatcgtatagatatgaacagaaatattaatacgcattttttaaaatatttttttctagtatatattcataaaattgaaattctgttaggcgttaattattgaatgagaaatttaaaatgaagaacaacagttagcaaaagtaatcattattttctacgtgtggtcttttcagattgccgtaaattaaccattttatcattattgtaattatcattaaatataataaatccaccattaataaaggccaagcgaaaaaaaagggtcagttattaaaattaaccaaggggcgtgactctttgattttgaatatatataccataaaaattgtcaaagagaagtcagatagcgagcgagaaaaccttcgtgctctttcttcgccgccaagttatatcgacggtgttttcgtatcgacgtcttctcctctctctctctctcgccgtcatcacctctttgaatgaacggcggacgcgggaaaaggcctaactcagtaagttatttcagtacccttatacaataaatatcatttgtttgtttctagacacctctagaatttgttggcttacttgtggtgacagagtcgtgagagtatactctgatttttgatggtttaggcagaggaggaaggaaccatggctgaaccctctgtaaagaagagcaagttgacggaatccgattggataagtggtttagcagatgatttgctacttcagatcctctcgaaagtccctacgagggaatccgttttcacaagccgtatgtcaaagcgatggagaaatctctggagacacgttcctgccttggacttggactccagtaaattccctcatgagtcggacttggaagatttctttgatagctttctgcagtttgatggtaatcttaagatagagagattcaagtggatttacaacgttgaagagcattgtgaccctgaatttgtgtctcggatcgatcatgtggtgaaacgtggacttaaagatctaactattctcagcaaggttaatattgaggatgactcagttcggatgcctgtctcgctctactcatgtgcgactctggtgaatttaactctctatagtgtagtcttcgatgctcctcgagcacaattggtttctttaccttgcctcaagactatgcatctcgaggcggtcaagtttgacggagagaccattcttgggactctcatatcaagctgctcttttctcgacgaattaaccataatcacgcatgatcatgatgaactcggagatgtatctgtgcgctctccgtcactaaggcgcttcaaacttgagtctatg

SEQ ID NO: 26810 - DNA, 3003 bp, Unknown
  misc_feature (1)..( 3003): 2750-1469P.txt file - cDNA_ID_2716206; gDNA_ID_2213666; Annot_ID_132695
tcgtcatgaagtgataataaatttaaaatctattttttattatattcacatggataggctattttcttgtgggacgagtaaagatggggaatcgttcatagttgagtggaatgaaagcgaaggagctgtgaagagaacttatcaaggattccacaagcgttcccttggtgttgtccagtttgatactactaaaaaccgttatctcgctgcgggtgacgacttctccattaagttctgggatatggacaccatacagcttttgactgccattgatgctgatggaggtctccaggtatgcaaacaaatacctcgattctccctgggaaccgaatgttttcatttgcagccatcatggctctctatgttttgtaggcaagtccacggatcagatttaacaaggaaggctctctcttggctgtttccgcaaatgacaatatgattaaggttatggcaaactcagatggtctaaggctattgcacacagtcgagaacttatcttctgaatcctccaaggtactgaattttgtgctcactggatcttcaacaagcaaattactaacccccaatttgaaatttcttcaacactttatttttcatgtacatttgcagcctgcaatcaacagcattccgatggtagagagacctgcctctgtcgtttccatccctggaatggtacgaaaatcgatactttttccgtcagtttctctatctcttggtctgggtccaatcatcgttgttgatcacttacctttccaacagaatggagattcgcggaatatggtggatgtgaagccagtgattaccgaagaatcaaatgataagtctaaggtatggaagcttactgaagtcggcgaaccctctcagtgccgttcattgagactccctgagaatatgagagtcaccaaggtactaacacatagactgacataactgtacttatatggcttgattctaatgactcaaaacttgagcagatatcgagattgattttcacaaattcgggaaatgcaattttggcattggcatcaaatgctattcatctgctatggaagtggcagcgaaatgaccgtaatgcaactgggaaggtacttatggtctaaaatcttcctttaagatcgccaaaagagttgaaatcatgatgaaattcaatttgagattttgtgtaggcaacggcttctttacctcctcagcagtggcaaccagcgagcgggatcttaatgacaaacgatgtggctgaaactaatccagaagaagccgtaccctgttttgctttatcgaaaaatgattcctacgtgatgtcagcatcgggaggaaagatctctttgtttaatatgatgacgtttaaggtaaaatcccagctacagacagcactatgtctaatgtatgcaaacaatgcttcatctgttacatttaattgtgttgttggctaagcgcagacaatggctactttcatgccgcctcctcctgccgcaacgtttcttgcttttcaccctcaagataacaatatcattgcgatcgggatggatgacagtacaatacagatttacaatgttcgtgttgatgaggttaagagcaagcttaaaggacattctaagagaataaccggcctcgctttctccaatgtattaaacgttctggtttcgtctggagcagacgctcaggtgctgattcatctcatgttttgtaataaagaatccaaatccttagaagtcttagtgtgaatcttttggtttttgtatgcagctttgcgtatggaacacggatggatgggagaagcagaaaagcaaggttctgcaaattccacagggaagatccacgtcttctttgtcagacacgcgtgttcagtttcatcaagatcaagtacacttccttgtggtccatgaaactcagctcgctatatacgaaacaaccaagcttgaatgcatgaaacaggttttagtctttatatatgttcattctctctccttgcatctgagtaacccttatagaagaaagaaatgtctttattttgattccagtggcctgtgcgtgaatcagcagctccaataacacatgccacattctcatgtgatagccaattgatatacacaagtttcatggacgctacaatatgcgtcttcagctctgcaaaccttcgattgcgttgcagagtcaatccctctgcatatttgccagcttctctcaggtgagttaatgaaatgaatataaactagtgcaatgttggatcatgaatcttgagtcttcatgttgatgttttgtgcagcaactcgaatgtccatccactggtgatagcggctcatccgcaagaatccaacatgtttgcagtgggtctgtcagacggaggggtccatatattcgagccgcttgagtcagaaggtaaatggggagtagctccaccgcctgaaaatggctcagccagcgctgtcacggctacaccttccgttggagcttctgcctctgaccagcctcagagatgatctgcttcagtttcttactctgttttttttgtgggggttttagatcttttccgatttattattgttttgtttgtgtggggggaagaaagcattctaacaaggtaaatgaattaatagcttacaagttcttcttaattggttaattcgatgttgcttgcctctgatattttggtcttgagaaatatcagttttgcaaaaggacgaatttgcaattttgcactccgaatctaagcacgaactaaggattgaatgccacgtgcagcttcgagataggtttggatattcgttttgagatacgaaggaagaattactaaggcctatgcggcccacggcccacagacttatatatctacaatgataaatatcttcaaaaatagtaattttgagaaaatattgagaagagacagagaaaaaaaatcgagtgaaaattatctggtgtgtgtatctagaagaagctacagagtgggacgaggtttaaactcgccaatcgccattgacctctcgcttgctttctttaactaaaatg

SEQ ID NO: 26811 - DNA, 3003 bp, Unknown; identical to SEQ ID NO: 26810
  misc_feature (1)..( 3003): 2750-1469P.txt file - cDNA_ID_2716206; gDNA_ID_2213666; Annot_ID_182112

SEQ ID NO: 26812 - DNA, 3000 bp, Unknown; identical to SEQ ID NO: 10713
  misc_feature (1)..( 3000): 2750-1469P.txt file - cDNA_ID_2716206; gDNA_ID_2213669; Annot_ID_182232

SEQ ID NO: 26813 - DNA, 3003 bp, Unknown
  misc_feature (1)..( 3003): 2750-1469P.txt file - cDNA_ID_2716210; gDNA_ID_2213666; Annot_ID_132694
acaattattagaaaaatcaatgccttctttggaaaaaaaaaatcggtatgtggctctattaattgaaaacatattttatatttgactttgttttttttattgaaagtgatttgatagcatcgttgaatgatttagtaatatctcccgtaagaatttaattatcccgttagactttttaacagaccagccagatgggaccaacgtgcactgttttttggccggagaatgtataaaaaatattgaagatgcagtgaacactgaccaccattcacttctccacaacttttaatgaccggtttacaaaataaaacatagtactatataattttcaacgtgttagtctgatttttatatttctaaagagaagtactcatctatttttgagctattaatctattacaatttgtgttctgatctggagagtggagagttatttcaaagtaaagtatgtagattgtagaggatctatcgagaatctactcatttaaaatagtttgacgttgtagcaaacaatttttttgtcattgatgatttgtattgtttgtaaatattatttagaaaccaaatcgaatttttagttgaaaattataatctgtttaataagtgataattacatcatgcacatgtacctagtgactcataatgaaacgtatcataatggattgacgagtagttgtctgatattgacatcttaatttataacttcccttttcattgttaatgttccttactgtcttctgattgataataaagacgttgacatgtcaaaccacataattatttgaaaaatatatattatttcttcagattttcatcatttgttataagtctcgataagacagtttttgtttttttaacaattttttacaaaaaacttacgaccataatttagttcaggcgaaaatcagtgaatcattaatcatatttattagtttggatttttatgtgtttttctttttatgtatttgaggatttttcagtttgtgaaaacaaatctaatatgcttatttgatttcttctttatttgctgtattcttaatatatcttgcagagctaaggtaatactcaaattttttttttccacacgtaaaaactcatatttatcagtttggaattactgtattctttttagtagtcctctcactcgccatggcaagaagaaggtttttttttcctttttcttgcattccatgttaatcagtatttgaataaaaaagcaagctaaatcggcaaatgaacttatatccaaataatcaagatatcaatctgtgtaagcattactagaaaagtagagatactcgtgttaccgtgtaaattaaaagaataaaaatgtgcttttcaaaagttatatacttttcttgtgcacccataactttagcaaaagcaaccatcatcattcttgagcaattaaaacaaataatattgatcttcatttggtgccaaaatactttacggtaatgacgtcaaactcgatgtttcttgtcaaagtctgaaagaccaatataaaataacactagacacattataaaattaacatattggttcattgtaattaaaccgtcgaatatatataacgaaaataccaattacgctgtgaataaacaaacaaaatcattttattagtcatcgagtaaataaattcgattataatcctcaatagtcaatatatatatagctcacatcacattatgcgattaacaaaaacaatccaaaacagttaaatgattagaaattaaacgagtctcactaaattattaacgactccaaatcacgagaaggcttaagagttatcatgtcgggagaatttaactgataacctcttccattatctctcaatcacgtgatttttgttcaacgagtaccgcatctcaagaataaaaatggcaatttaggtaaatatttgtcattttcaagggcaatggaacttaaagatgcatttcagaaggaaaagctttgtcgtgttatgagggaaatgtggggacgcagctacttcgctttcaaaccgttggatgaatatcctttaaggttcatcgtacaagatcgacggcactcaccgagggtgtactcatgttgtgacacagaggatcatgtctacttggagtacagctagcagctagagattctgagccgataacgtcgagaattgtagccggctaagtcgtatatgctggtttaaactttaatctgtacttatatataagtcaacgtgcttatcaaaatcagctcccttatcgtgtgataggtgcattgtcttattagactccgttatccgtcaccttcgcatattaaaatcactttttattttttggttttaaattaaagtctccatttctgcaagattttaatgttcgtataaataagcctgaagagagagagagagagagagagaaaacttgttttttttttttccattagtttttttcttactttctggtcgagagaggagagtccaaaaaacccaaatccttggcctctttcaatatcaggagagagaaactgaagctctggcctttgtttctgaaatcgatcgtcttcttcttcttcatggcaagtaacgtatctaggtctttcatttttggtttaatatctaaatcgtagcttttctgggtttttgatttttgtttttgtctcatggaagtgaaaaagatggccattttaagctttatatttaattcggtggacaataataatactaggaagacctaatttttgtgtagcccaattaaacactaattaaatccgccggaatagagacttttggagaattttccggaggatagttgtaaagatctagttatatactgtgtaattaagaggctgtgtctattttcattttttaaaaataataattaaatggaggaatatctgaaacccagtaaattgggatgatttgatggttttgtaaggttatcatcgtcgccattatattgatatgcagatctggtgggtttttctgcatctgacttgatagctttatcggactgagtggcaaaatcaatcatg

SEQ ID NO: 26814 - DNA, 3003 bp, Unknown
  misc_feature (1)..( 3003): 2750-1469P.txt file - cDNA_ID_2716224; gDNA_ID_2213666; Annot_ID_132690
attactaatttgtgacgcgatgtcgtttatcttcaggattgggtctgcaatgctgtacacggggcaaaacgagttctacggtagcgtggagaggacgtttatgtacattgtgaaacaagcaactggagttttgactaagctaacgagcttatgggactcgattcaatctgctaaagacattcagctcgatggacacaacctgtttcctcccgagtttagaggcaacatcgatcatttcaacaacatgatcaagatgtctaacatcacttaccccgaccgtgtcgctaaccagacaatccgttatctcaccggagcactaaaccctgtgtaagtaataagtattcgcttgatatgtttcttgcctcacaagctaaatatatatagaagctctgtttgagtatttgactcaaatgcgttttcctcaggagatatgtgttaaatgtgatcgctggtgtaatgctcgcagtcgcattcctcggcctttgtaagtcacaaatcaaaacatatctattttgatctgaagatacagaataatctcattatttttgtttctgtttttcttcttctttcgaaacagtgttttcgttctgtggattgcgagttcttgtctacctgtgagttacacttagactacgttgttatattatcatatcatatccaaatcaaatgtttataatcagtgtttcaattatatcagattggtaattcttggttggattctcgtcacagccactatcctcctcagcgccgttttccttgtattccacaagtaaatgatatttcgtcgtcacttgatctaattcaagattcaatttgtttttatcaaactaatgatgttacttaataaacagtgtggttgcggacacgtgtatggctatggaccaatgggtgcatgacccagcggcagactcagcattgagtcaacttcttccgtgtttagatcctaaaaccattggagagacattggatataacgaagacgatgactgcgacggccgttgacatgaccaatgcgtacacggtcaatgtcagtaaccatgatcagttcccacctaatgcccctttctaccacaaccagtctggtccgctcgttcctcttctctgtaacccactcgaccaaaatcacaaaccgcggccttgtgctcccgacgaagtcctcttagccaatgcttctcaggtacatacattttctcataagtgatacatatgtcaaatgttaatgttaattcaatttgtatatgtttttgtaattaggtttataaaggctatatttgccaagtgaacgcagaaggaatctgcacaacgcaggggaggttaacacaaggttcgtacgaccagatgatgggtgcgatcaacgtggcgttcacgttggaccattatggtcccttcttagctagtattgcggactgtacattcgttagagacaccttcagagacataaccaccaagaactgccctggacttagcattacaagtcagtggatctacgcaggactcgcgtcgctctctggtgcagtcatgttctcactcatcttctggttgattttcgtcagggaaagacgtcaccgatctcaaaccaaaaagtctatgatccagatgaatagattttaattagtggagccagcccattatggactcggcccatattatcacccctttttttttttttttggaaacgttaatgatatatggttttaaaaataaagtcgtacgtgcaaaggaattcgtcaatttttttttatttgttgttttttttgtgcaaacgctcttttattgttttactcggtttattaacttttagaaagtggatagtctgtaaatcaacaacttatttagactattaacttcactagatagctataatagtattgatgtttttttcctggtctaaaaatataaattataaacttttcttttagataatattctacttgtataattatttactaatttcattctatgagaataagaggtgagaaaaaatgttgaacattctaagatacatgacatgagtaggtttttcaataaagcaaagccattgaatttgtcaacgaacgtcgccgttggacccccaaactaaatgtacttagtaattgcgacgactagttggggctagctaggcaccatacctaattgctatttgtgaaattctgacgtgtcggattgctatttgtgcctcgaggccggtgcagaaccaggtgtcctgccgtttcaacttgcaaattattgttttttttccgtcctcagtaggtaagatttttgagtattttagttaaggtccatatgtagcagtcaaaacaaaacaaacaaaaagttaggccccctctttaatttatttttatgcaacgataatcctgtaattgtcggtttttgactctataatgttttttaaatatgccatgggaacgttaagatctatgccaataccaaagtgatgtatcgggcggtccacgcgggacgaagtcacagtcaaatgacctcacgtgtttcaagcacaaaaatcttaacaagacaacaatttcctctcttacatatttgtaccataaaataaattttcaaattaagccaaaaaaataacggaaagtgtttgattggttagtgcttcttataactgtcgaatttcagacaaaaaataaaatagaataggaacaaaaataaaaaacgtaggatttttgtcattagttgtgaataatactaagaatctaactgagacccacttgcaattcttcaagaatttaatatgattagtttcaaaagtaatgctaaacctcttgcgaatcacgctttttatcctcttgagtttttttttaaaaaatagtatgaaactactataacgtatgctttaaatatgttaaaaaatatgacgtcattttgaagatgtttaatgctttaaatagaaacacaccaaacaataaagtgagagtgagtgagtctgattcatctcctctgtttaagcaaagcacttttctaaaatcccacaggagaagagagatcggaagagatg

SEQ ID NO: 26815 - DNA, 3003 bp, Unknown; identical to SEQ ID NO: 26814
  misc_feature (1)..( 3003): 2750-1469P.txt file - cDNA_ID_2716224; gDNA_ID_2213666; Annot_ID_182107

SEQ ID NO: 26816 - DNA, 3000 bp, Unknown; identical to SEQ ID NO: 10711
  misc_feature (1)..( 3000): 2750-1469P.txt file - cDNA_ID_2716224; gDNA_ID_2213669; Annot_ID_182237

SEQ ID NO: 26817 - DNA, 3003 bp, Unknown
  misc_feature (1)..( 3003): 2750-1469P.txt file - cDNA_ID_2716228; gDNA_ID_2213666; Annot_ID_132689
aaaatcaaattaaattaggcaacaggatgagaaagaaggaaccttcaagagacccagctaaacaaagaacgtcaacagcgactgggatcacttcgttaccgacgccatcgccgggaagaaccgcgatggtgtaccgtttctttggagtgttggcggcacatctgatcacagaagctctcctaaagctctgtttggttgcggacataaacgcaaccggaatctgggtactgctgacgtggatgactcccgccatttactacaacaaagactacaaggagacctggaaagaacttttgtgtttataatcaaaccaatattaaccgttcgattatttattttcacctctggatggctcaattatgatgggcctaagaaagattcgtagaagatagatcggcccaaatgttccaaatattaacacaagtccagcgggctttgggcccataaatggtattcgggtcagattttaaaatgggtattcgggtcaaaattcgcccgttagatgatgaaccctaatttcgtgtgtacagggagcggagaggggaaacaagagaatgctcttgttgcggcgactcaatcgagttcggattgcttccccttactccgttcggcttctgtcagtaaaacctatttcaaatgtcgatgatgcgaagtttcgatctcaggaagaagaagatcagtccagttacgatcagaaaacagtatgcgaagctctcacatgttacagcaacgattggcaaaaggcgttggagtttttcaactgggtcgagagagaatccggattcagacataccaccgagacattcaatcgggtgatcgatattctgggtaagtatttcgagtttgaaatttcttgggctttgattaaccgcatgatcggaaacacggaatctgtgccgaatcacgtcacgtttcgtatagtctttaagcgttatgtgacggctcatcttgttcaggaggctattgatgcgtatgataaattggatgatttcaatttgagagatgaaacatcattttataatctggtcgatgcgctttgcgagcataaacatgtggttgaagctgaagagctttgttttgggaagaatgtcattggtaatggttttagtgtgagtaatactaagattcataatctgattcttcgtgggtggtcgaaattgggatggtggggtaaatgcaaggagtattggaagaagatggatactgaaggtgttactaaggatcttttttcgtattccatttacatggatatcatgtgcaagagcgggaaaccgtggaaagctgtgaagttgtataaggaaatgaagagtagaaggatgaaactcgatgtggttgcttataacactgtgattcgagccattggagcgtcgcaaggtgttgaattcggtatcagggtatttcgggagatgagggaaagaggttgtgaacctaatgttgcgactcataacacaatcattaagcttctatgtgaagacgggaggatgagagacgcgtatcggatgcttgatgagatgcctaagagaggttgtcaacccgattcgattacttacatgtgtctcttttcccgtttggagaaaccgagtgagatcctaagtctgtttggtaggatgataaggagtggagtgaggccaaagatggatacttatgtgatgctaatgaggaagtttgagagatggggatttcttcagccggtattatatgtgtggaagacaatgaaagagtctggggatactcctgattcagcggcgtataatgctgtgattgatgcgttgattcagaaaggaatgttggatatggctagggaatatgaggaggaaatgatcgaaagagggctatctccaaggagaaggcctgagttggtagaaaagtccttggacgaaacgcttgtctgtagagaatagataactagatatgaagaaactctttggttatgtgttcaaaacagacatgaagcaatagagaagcgtccttttggatggagaaatctccccaaggtatatcatctttgccataaagtggctttgtttcaactcaaaaccgaggagaaaacactgaggttcattgagaaatctggttgagttgtgtgtcttaagccaaattccgaagatttggttttgaaagatggtttgtcgcctcctatatgtgttctactacatatacgtaccatttgtaattcactctctaacttaatttttttttgttgttgttccactctgtgacaaccacaggcattttgtggctattttgtaagatcgttaagctcaataaaacaccctacagaaacgatggatgatccatcatggatcacattcttaaaaccattggagaatatggcgttattattgtaatttgaaaaaaattcaactaaagaatacgacttttaatcttagcttacttttgtaaagattatgcagacatgacgtaacaattttctaaaaaaaatcttagttacaacatttttctttagaaaatgccatgacagagcaaaagcaggaaaagttggtaccagatgatcataaatgcaattttccgttacaaaattagagtagctctcatgtcagtattggtggtaattaatgccattctccgtttctttttctaatctccgagtcgaccctgagtataaagtatttttaccaatttcatttcaattttattgtataatcggttttatagaaaaaaatgtgattcattaatttaagttttaggtcacacagccaataagagttaaaagagtaattaattaaggattttaaaaactaagaaaatgaggtgaaaacttaaaacaaaacagaataacaacaatggatggtgaaaatctaaataaagggaacagtttcgtttcatcttctttgtccttgatttcctgaagaagtaaaagattcttattcatacgtttgattgataaacccttttttagagtttcagaaattagaaaccaaacctcccccaaaaaaacaaaaaaagagagagaattagacaagaaaaatagggagaataatg

SEQ ID NO: 26818 - DNA, 3000 bp, Unknown; identical to SEQ ID NO: 10636
  misc_feature (1)..( 3000): 2750-1469P.txt file - cDNA_ID_2716236; gDNA_ID_2213666; Annot_ID_132687

SEQ ID NO: 26819 - DNA, 3000 bp, Unknown; identical to SEQ ID NO: 10636
  misc_feature (1)..( 3000): 2750-1469P.txt file - cDNA_ID_2716236; gDNA_ID_2213666; Annot_ID_182103

SEQ ID NO: 26820 - DNA, 3003 bp, Unknown
  misc_feature (1)..( 3003): 2750-1469P.txt file - cDNA_ID_2716236; gDNA_ID_2213669; Annot_ID_182241
gttacgtcatgtctgcataatctttacaaaagtaagctaagattaaaagtcgtattctttagttgaatttttttcaaattacaataataacgccatattctccaatggttttaagaatgtgatccatgatggatcatccatcgtttctgtagggtgttttattgagcttaacgatcttacaaaatagccacaaaatgcctgtggttgtcacagagtggaacaacaacaaaaaaaaattaagttagagagtgaattacaaatggtacgtatatgtagtagaacacatataggaggcgacaaaccatctttcaaaaccaaatcttcggaatttggcttaagacacacaactcaaccagatttctcaatgaacctcagtgttttctcctcggttttgagttgaaacaaagccactttatggcaaagatgatataccttggggagatttctccatccaaaaggacgcttctctattgcttcatgtctgttttgaacacataaccaaagagtttcttcatatctagttatctattctctacagacaagcgtttcgtccaaggacttttctaccaactcaggccttctccttggagatagccctctttcgatcatttcctcctcatattccctagccatatccaacattcctttctgaatcaacgcatcaatcacagcattatacgccgctgaatcaggagtatccccagactctttcattgtcttccacacatataataccggctgaagaaatccccatctctcaaacttcctcattagcatcacataagtatccatctttggcctcactccactccttatcatcctaccaaacagacttaggatctcactcggtttctccaaacgggaaaagagacacatgtaagtaatcgaatcgggttgacaacctctcttaggcatctcatcaagcatccgatacgcgtctctcatcctcccgtcttcacatagaagcttaatgattgtgttatgagtcgcaacattaggttcacaacctctttccctcatctcccgaaataccctgataccgaattcaacaccttgcgacgctccaatggctcgaatcacagtgttataagcaaccacatcgagtttcatccttctactcttcatttccttatacaacttcacagctttccacggtttcccgctcttgcacatgatatccatgtaaatggaatacgaaaaaagatccttagtaacaccttcagtatccatcttcttccaatactccttgcatttaccccaccatcccaatttcgaccacccacgaagaatcagattatgaatcttagtattactcacactaaaaccattaccaatgacattcttcccaaaacaaagctcttcagcttcaaccacatgtttatgctcgcaaagcgcatcgaccagattataaaatgatgtttcatctctcaaattgaaatcatccaatttatcatacgcatcaatagcctcctgaacaagatgagccgtcacataacgcttaaagactatacgaaacgtgacgtgattcggcacagattccgtgtttccgatcatgcggttaatcaaagcccaagaaatttcaaactcgaaatacttacccagaatatcgatcacccgattgaatgtctcggtggtatgtctgaatccggattctctctcgacccagttgaaaaactccaacgccttttgccaatcgttgctgtaacatgtgagagcttcgcatactgttttctgatcgtaactggactgatcttcttcttcctgagatcgaaacttcgcatcatcgacatttgaaataggttttactgacagaagccgaacggagtaaggggaagcaatccgaactcgattgagtcgccgcaacaagagcattctcttgtttcccctctccgctccctgtacacacgaaattagggttcatcatctaacgggcgaattttgacccgaatacccattttaaaatctgacccgaataccatttatgggcccaaagcccgctggacttgtgttaatatttggaacatttgggccgatctatcttctacgaatctttcttaggcccatcataattgagccatccagaggtgaaaataaataatcgaacggttaatattggtttgattataaacacaaaagttctttccaggtctccttgtagtctttgttgtagtaaatggcgggagtcatccacgtcagcagtacccagattccggttgcgtttatgtccgcaaccaaacagagctttaggagagcttctgtgatcagatgtgccgccaacactccaaagaaacggtacaccatcgcggttcttcccggcgatggcgtcggtaacgaagtgatcccagtcgctgttgacgttctttgtttagctgggtctcttgaaggttccttctttctcatcctgttgcctaatttaatttgattttcccaactgaaatcgtgtttttggatatcagggatagattttagcttcgaggagttgcctataggaggtgttgctttagatcttgtcggagttccactgcctaaggaaacattgatcagggcaaagcaatcagacgctcttcttctcggagctgttggatggtatggtattattaccataactttcgttcatctcaagtttggattcatctaaagtttggatttttgaattgaaggccgaaatgggataacaatcccaagcatttgaagccgataacggccttgttgcagcttcgtgcggctcttcaagtatttgatgagccctccttcttctgtgaggtgctgctaataaatggatatatatatatatatatatatatatatatatatgttgtatgtggtaatgtaaggtgtccatttacaaaattaaaaactttggggtcaattctgaaaataaaacaatgtgcaaaaaaggacccataaatgcaaagaagtaaagtctgagtgtactagtagtatccatttgacttgcggtttcaaaatccgaaaaagaccaatcaatcctttctccctgaaatg

SEQ ID NO: 26821 - DNA, 3003 bp, Unknown
  misc_feature (1)..( 3003): 2750-1469P.txt file - cDNA_ID_2716252; gDNA_ID_2213666; Annot_ID_132683
tttaaaaacgtaattttaagcgtctttgttgtggtttgggctgatctactaccgagtacgcccttgacatttcagttggtagcttgtgggtattttggtcattttaggatccacgatcgtgttcttaagctgatcatgtaggtacaccgacttttcgttgaccgaaatacccccagcgtggacacaactccaatttaggcaatgatgtttttagtcttttcttttccaagaaactcaatctatctttctcgatttcttttgttgtcttcttggaaacacttgttagattgtttttgagtttcaaacaaacaggtgataaattcggtgatctctgctttttgctcttttcttttggcaacaaaagagtcacgttttcccacttttgtgcatctcagtcatctttctctctctctctctatgctgctttgcggaaagaccacaaagccctcacatcaagggagaggggagaggtcttctgggtcaaatcagcgttgtagacttcaatgctaaagagaaaaaataaacacattcattatcattaccaagctaatgactaaattaacccttgtcaccaggttagctgcttctcacgatagagggtatattagtcaatgccagagattatcgctggcgttatttataatttgggaggcgttttcgtggaattgaatttaagattagagtatgagtggattaggtacgtgtgtggtagggtttagtggggagagcagttatcagatgtggcgcagtggacaataagtagtatgtactcgttctctagtagtagtggtcaaagtcctcagttgttgcaacggattaggtcctgtgattcgtccgtcagattttcttggtgacagtcttgttgagttagcctgttttacttttttttttacaaagtttagttaagattgttgtctgatttgaagttgactttgatcggtgggttataatttgaaaaccaaagtaaagtcgtcaaactaaaggaaatggaatttttgggtagaataaaataaaaatagaaagatgatagataataaggacaagtggtggtgtggagaatacgtgacactagtttggggttggaggacaaggaaaagcatgacgtgtgaatgtgacgaccaaacacacacgctttatatttaaaagtctcccaagtcacgctccactcacgtgtttctatgtttttctatatatttatttatttgcccttctgttttttctttttgagtagttgaccaagaagatactgctgaaatttacatgatttggaattttcttttagatttccaagttctagttgttatttgttaatatgctgatgaagtgattcttttgtttccaacttatcgtgcctctaaagtctctctcgaatggtaggtgtgtggtttctttatagaaatgatatacaatacaaaaacaaattgtttttacggtattagtttggtgtgattattgattgttgagctggctttatctggtggtgttgtgtgtcttaagccataatctgattgtttttgttttgatgtccagatttctcaaacgagtgcaataacaacaacaacaacaacaacccttttcaagagatcaagaaagaagaaggtaaaaaatacgaaagacagtgtttctattagttactgatactgttaaaagataatattactagttttagaccagacatagagcaactctgaccaggctactacctactggtttgtttaaatctgttgaggcatattgtctaagatacgcctagcaatcttatattttctacatttggactgatatggttttacattttagccgattcaaacctatatttctctaattaatatatatgattgttgacagactttggctgagcttaaagaggaagagatcatgctcttgaaggaaagtaacggcctgaaaaatgtataacctccattttagcctctttctttatgtctctatatatcaagtccaagttctaatcttagatttggttaatcttattcttgaatcaggaattggcaaatatgcgcgatttgctcgagcaacaaagagcaagaaacactgctctaaagaagatgaaggtgagcccatcgctctctctctctctctctctctatctttctatacatgtactcattcaatcatatatacggaagataaacatgttaattattcaagtatatcattttcatgtgtatgcaggctgaatcacaatctgccttatcgtgcaaactcactttcgaacaaggttcttccttcttgctccctgacctaaacatgcctctagataacgacccgagccctgaagttgtctgctgaacgggcgagccacaagcatatcattcttttgtttttcccattacacaacactataccactatacctcctccgtccacaaacatgttttttgaactgtaactatatgaatatgaagaacgtagattaatcctatatatccttcacccatatcccggtggaagctgaagaagattcgcctgaaggtgaagtggttcgagactatggttaagtgtgttaacaatatcttctagtttagctggtagtaagatttttgttctgccaatctcctaaatgattcttatctttctcccattttattaggatgagatgtaattatctacttagataatagatgtacacctttttttttttgtttgttctttcttattatctctggtaagatgtattacatcgacatttataatcagtgtaacacgttccaaacattttactatattttgtattatgattgatggactaaaaaatatctgcagtcttgcattctttttcatcgttataaataatttagaaatttcaaaccattaatactaaaaacacgtaattacggaaaaagtaagatactaatcagattctttattaagctcagctaaaccagtagtagtaaaattatcactggccttaaaaccctagaaatagaattaatctcagctattttgtcttaacgactctttattgtcccgacacacgaaaatg

SEQ ID NO: 26822 - DNA, 3003 bp, Unknown; identical to SEQ ID NO: 26821
  misc_feature (1)..( 3003): 2750-1469P.txt file - cDNA_ID_2716252; gDNA_ID_2213666; Annot_ID_182099

SEQ ID NO: 26823 - DNA, 3000 bp, Unknown
  misc_feature (1)..( 3000): 2750-1469P.txt file - cDNA_ID_2716252; gDNA_ID_2213669; Annot_ID_182245
aaaaacgtaattttaagcgtctttgttgtggtttgggctgatctactaccgagtacgcccttgacatttcagttggtagcttgtgggtattttggtcattttaggatccacgatcgtgttcttaagctgatcatgtaggtacaccgacttttcgttgaccgaaatacccccagcgtggacacaactccaatttaggcaatgatgtttttagtcttttcttttccaagaaactcaatctatctttctcgatttcttttgttgtcttcttggaaacacttgttagattgtttttgagtttcaaacaaacaggtgataaattcggtgatctctgctttttgctcttttcttttggcaacaaaagagtcacgttttcccacttttgtgcatctcagtcatctttctctctctctctctatgctgctttgcggaaagaccacaaagccctcacatcaagggagaggggagaggtcttctgggtcaaatcagcgttgtagacttcaatgctaaagagaaaaaataaacacattcattatcattaccaagctaatgactaaattaacccttgtcaccaggttagctgcttctcacgatagagggtatattagtcaatgccagagattatcgctggcgttatttataatttgggaggcgttttcgtggaattgaatttaagattagagtatgagtggattaggtacgtgtgtggtagggtttagtggggagagcagttatcagatgtggcgcagtggacaataagtagtatgtactcgttctctagtagtagtggtcaaagtcctcagttgttgcaacggattaggtcctgtgattcgtccgtcagattttcttggtgacagtcttgttgagttagcctgttttacttttttttttacaaagtttagttaagattgttgtctgatttgaagttgactttgatcggtgggttataatttgaaaaccaaagtaaagtcgtcaaactaaaggaaatggaatttttgggtagaataaaataaaaatagaaagatgatagataataaggacaagtggtggtgtggagaatacgtgacactagtttggggttggaggacaaggaaaagcatgacgtgtgaatgtgacgaccaaacacacacgctttatatttaaaagtctcccaagtcacgctccactcacgtgtttctatgtttttctatatatttatttatttgcccttctgttttttctttttgagtagttgaccaagaagatactgctgaaatttacatgatttggaattttcttttagatttccaagttctagttgttatttgttaatatgctgatgaagtgattcttttgtttccaacttatcgtgcctctaaagtctctctcgaatggtaggtgtgtggtttctttatagaaatgatatacaatacaaaaacaaattgtttttacggtattagtttggtgtgattattgattgttgagctggctttatctggtggtgttgtgtgtcttaagccataatctgattgtttttgttttgatgtccagatttctcaaacgagtgcaataacaacaacaacaacaacaacccttttcaagagatcaagaaagaagaaggtaaaaaatacgaaagacagtgtttctattagttactgatactgttaaaagataatattactagttttagaccagacatagagcaactctgaccaggctactacctactggtttgtttaaatctgttgaggcatattgtctaagatacgcctagcaatcttatattttctacatttggactgatatggttttacattttagccgattcaaacctatatttctctaattaatatatatgattgttgacagactttggctgagcttaaagaggaagagatcatgctcttgaaggaaagtaacggcctgaaaaatgtataacctccattttagcctctttctttatgtctctatatatcaagtccaagttctaatcttagatttggttaatcttattcttgaatcaggaattggcaaatatgcgcgatttgctcgagcaacaaagagcaagaaacactgctctaaagaagatgaaggtgagcccatcgctctctctctctctctctctctatctttctatacatgtactcattcaatcatatatacggaagataaacatgttaattattcaagtatatcattttcatgtgtatgcaggctgaatcacaatctgccttatcgtgcaaactcactttcgaacaaggttcttccttcttgctccctgacctaaacatgcctctagataacgacccgagccctgaagttgtctgctgaacgggcgagccacaagcatatcattcttttgtttttcccattacacaacactataccactatacctcctccgtccacaaacatgttttttgaactgtaactatatgaatatgaagaacgtagattaatcctatatatccttcacccatatcccggtggaagctgaagaagattcgcctgaaggtgaagtggttcgagactatggttaagtgtgttaacaatatcttctagtttagctggtagtaagatttttgttctgccaatctcctaaatgattcttatctttctcccattttattaggatgagatgtaattatctacttagataatagatgtacacctttttttttttgtttgttctttcttattatctctggtaagatgtattacatcgacatttataatcagtgtaacacgttccaaacattttactatattttgtattatgattgatggactaaaaaatatctgcagtcttgcattctttttcatcgttataaataatttagaaatttcaaaccattaatactaaaaacacgtaattacggaaaaagtaagatactaatcagattctttattaagctcagctaaaccagtagtagtaaaattatcactggccttaaaaccctagaaatagaattaatctcagctattttgtcttaacgactctttattgtcccgacacacgaaaatg

SEQ ID NO: 26824 - DNA, 3000 bp, Unknown; identical to SEQ ID NO: 10635
  misc_feature (1)..( 3000): 2750-1469P.txt file - cDNA_ID_2716259; gDNA_ID_2213666; Annot_ID_132681

SEQ ID NO: 26825 - DNA, 3000 bp, Unknown; identical to SEQ ID NO: 10635
  misc_feature (1)..( 3000): 2750-1469P.txt file - cDNA_ID_2716259; gDNA_ID_2213666; Annot_ID_182097

SEQ ID NO: 26826 - DNA, 3003 bp, Unknown
  misc_feature (1)..( 3003): 2750-1469P.txt file - cDNA_ID_2716274; gDNA_ID_2213667; Annot_ID_132722
cattttcttggtagacttcatcagctaaaagaaccaaaccctcttgcttgcagaaattaacaatgtcacgctggttttcttccgcaagaacctaaccagaataagaacgcaagattagaagaatgttacattttgttaggctagtcttgaaaatctgtttgtacctgcccagttgggttaccggggtttatgacaaccaaggcccttacagagatgcccttggacctagcttcctctagttgcttcttaaggtcagatatttccagtccccatcctgttgcttcatcaagatagtacggaacctaagaagtacaaatttcaaaaacttgtaccaaaaaacaacattactccatgatgattatatgaacataccaaagatccaccatgaagggcaattgaagccgagtacaatggatactgaggaatcggggaaagaataccatctttctctgagctcaagagaagttgcatcatcatgtgaacctatagagtaaaaaacaccaaaaacacttagcatgaatcctttaaaagaacttactctaactctatgagataacgttttcgttttgattgttaccgctggacttgcaccatcagtcaagaaaatatcatttggatcagcagggaaaccatcacgtgcttcgattccagctgcaattacatcacgtaaacccttgataccctgaggcagaacaaaaaatgaaacattcagcaacataagaaccatctcaagaaagggtttaggacttttaactagactctaataacaaacctggctatgactgtaagccccagttgctcttccgggaatatggtccaaaatcctccatgctcggtcaattgaatcggtactgatagcagagtagaaatcaaatgttaagcaatcttaaaccgtgagcatacatgtcctaaagctgaaatatagcaaggaaaacctcacctgaacaaaccatgggtttcagactcatccaaaagacttgcgtggtcacacaatgcgagaacctgaggcatatagatgatagacgttatatctctgtggctgatatgacaaccaaactagtaccaaaaacattcacttacctcacggaagaactttataggcagctgaccaagagattgaggattcccaatgttgcaatagattatctgccaaaagtaatgaagaattctaagttccttgcacaaagagtttgagaacaggtaacatcaacactaaactaatcataaatccgtcaaaactgccgataaagaaagagattttacctcatcaaagggataagcatccttattagtcttcaagtcttcttgtaacttctgtaagatggaagcaaaaagcaaacaaaaatcaattagcattaaaaacaattttacagattttgttcttggttttacaagacaaagcacatgcatctctgacctgagcaatgttgacaatttctcctcgaacagcatactcacatttcagaacctgttccccggaaaagaaaaaaaactcttagttaacaataaaaccaacttctctgtaatataaagtacaaagaagttatgcaaagcttgtcgatttcatcgttgggaatcacaacgagaagcaaaggataaacctttggcgttaaatcagacaaccacagtaaaaaattgaaacttttttactaaattagaaacaaatccagatcaaccctgaaacccacaattcaaaaacgcaataaaccagctagagaattagaaaccgaccttgggattgatggagtcaagagtaacgggaagagaagaagtggaatcagaagcagacatctccgaagtagaagagaagaaacgagacagagcaggaggagaagaagcaaggggacgaggttgaggagagagaaagcttggacttttgtggtgatgttgacgacgagaatggtcgacgagacctttagcttggttaatcaagaatctccgcatctgtgaatcagctttatactaggaacgtgctctttaagccctaggattgaaaattctctcacgaggaaacaagggtcccaatatccagtgccttgcacaccgaattttgccttgtcctccacgctcagaaattgctttttcgttttttcttttcgaaaatctaattgatgaagatatttgtaggggttttttttaggcggctaattttgttgatttatctgttaaacacacgactaatcccaaaaaaagacatgtcttttatcaaaaaaagatgtctgaagtctatcttccgttgacttaattatccaaaaggaccaaaattgaataatccaatcacagtcgtaatctaatttggggataaatagatacttataaaacctacagctaatttgaaagttataaatttttagaaatctctaaatttaaataaatcacaacaacatgtagcagcacattgctaacgatgaggttttttttgggctacataattgggccctaaaaaggtcggtaaaatcgtgatttaaagcccattatttgtttatatccacgtcaacaaaacgatatcgtattaggttggacgagaataaaaccctaggaattagaaaatttgtacaacgtcaaaacatcgaagattttgatccaacgtataccaagagtttcggagacgacgtcgttttgtctctgcgccgcgttcttagtctgagctcacgcttgttcgtttctcctctaacgtcaactgtgtttttgcatcctcaaaggtttgtgatacaccttattgtttctgttcttttgtacaagcttcacatggattagtgtaaagtcttagaattgggactcggaatttattgttatgttttaggttattcaacccagttatggtatcgttttgaagtagaggtagaaaccctaatttttggggtctgtaaatttggagaaaaaattgaacctttcccttttttgttatattgtgtaatttgggactaatagttcttcgaagctgagtttttttgtgtgtaaattttgtagggtttaacatagttggggctaggaattttcatg

SEQ ID NO: 26827 - DNA, 3003 bp, Unknown; identical to SEQ ID NO: 26826
  misc_feature (1)..( 3003): 2750-1469P.txt file - cDNA_ID_2716274; gDNA_ID_2213667; Annot_ID_182150

SEQ ID NO: 26828 - DNA, 3000 bp, Unknown
  misc_feature (1)..( 3000): 2750-1469P.txt file - cDNA_ID_2716278; gDNA_ID_2213667; Annot_ID_132721
atcttggagctaattcttcccacataatacccatcttgtaaacaaaatcaattgaacgtaagtttactggcttcacggaaatagcacaaataaattcgaagttaagaagacctggaatgaaattttgatgtcacagaaaaagatgaagtgtatgataaagatacctgctcttggtctcttgcatgggagattaatgcttgaataacaaaatttgcacaccgatcaactgaaagctcaaataaagaattcttgaaaactttgttgaacatttcgttatacaaactttcaggggccacttccaaaataacctgaaaatggcatgcaaacgcatttaaagagatgactaagaaaattaacactccaattacagcatggaatcaaacagagaactagcaatccttatagataatattttgcatggtctaaagcaggcaatacgtccatcatcaattgttttatgcaaggtacagaatcttggtataaacaactcagtcagagcagccagaggttagactcagttacctccaccagatgactgaatgaattatccttcatcgactctaaaatttctttggcaacattagtctctatatgaaacccttctacttttttattagtagagttgcagcgcagaataagcggaatgatttcaagcaactgctcatcttgtttcagcattagtctgagagccgtctgtcaagagaagattagttagaatcaccgtgaatcagggagagagactaaataacagtcaatactaaagaaattgcttgaaaatgacataaacgattagacagggacataaaacctacctgtaagaccaaactgctatactgatcgacttgaagatacttcatgtcctctctgctacaacttaatagcccagataaaaggtacgtgagcatacctggaaacccttgatgagggatttctaaattattgtcatctagctgagacatcttcagattcaaacgtttggccagagcttttgatgattttgcgccataaagctcaggggaatctaaagagactcctttgcaaagacaaagaagccttcgtagtacatgcgaaccatagcagttgcacatcatatcaagaggattatccacaatcacctgaccaggggaaatatttcaccatcaaaattgaggtcaattactagactagaagcaataatctggataccttaatatgattgtcaaagccagtaaaaattgtataaagtaccttgcatatagaatgcaaagcctcctcaataacagaataggcgtctggattttctagatgtgtggccaaggatttgagagcagactctgcgacatgagaaccagatctatccattgcaatggctgggaacacactagcagaatttcgtatgaaactgcagagttggtcaagttcacatccctcaagtagagtttgcaagacatgacttatgatatagtctgtagcaatttcatactccctccctcttgtttcttcaagggcatttccacatattactgaacgttcctctaattcaacttcattactatcaaagagattggcaatctcagagaaatactttgaagtctctggatcaatctctttcctgaaaaagatacacccaaatcactaccacttctcacaacaacaaaatttcgactataaattagagcaaaggcccttggttaaaaatctcctttacctgacaaattgattctgatgttcgaattcggagtgtttctttgatgctggctttacattgggggcaccaccggattggttcttcttgctgctatctacatcaaatccacggttacccttatggtccttcctacgcattcccttattcctttcactgtgattgttactagactttcctcgttcacccatcaagctatcttcctcaatggtcctgtgcctcctagatggcaatgatttagaaccaacagaaaccatgaaaattcctagccccaactatgttaaaccctacaaaatttacacacaaaaaaactcagcttcgaagaactattagtcccaaattacacaatataacaaaaaagggaaaggttcaattttttctccaaatttacagaccccaaaaattagggtttctacctctacttcaaaacgataccataactgggttgaataacctaaaacataacaataaattccgagtcccaattctaagactttacactaatccatgtgaagcttgtacaaaagaacagaaacaataaggtgtatcacaaacctttgaggatgcaaaaacacagttgacgttagaggagaaacgaacaagcgtgagctcagactaagaacgcggcgcagagacaaaacgacgtcgtctccgaaactcttggtatacgttggatcaaaatcttcgatgttttgacgttgtacaaattttctaattcctagggttttattctcgtccaacctaatacgatatcgttttgttgacgtggatataaacaaataatgggctttaaatcacgattttaccgacctttttagggcccaattatgtagcccaaaaaaaacctcatcgttagcaatgtgctgctacatgttgttgtgatttatttaaatttagagatttctaaaaatttataactttcaaattagctgtaggttttataagtatctatttatccccaaattagattacgactgtgattggattattcaattttggtccttttggataattaagtcaacggaagatagacttcagacatctttttttgataaaagacatgtctttttttgggattagtcgtgtgtttaacagataaatcaacaaaattagccgcctaaaaaaaacccctacaaatatcttcatcaattagattttcgaaaagaaaaaacgaaaaagcaatttctgagcgtggaggacaaggcaaaattcggtgtgcaaggcactggatattgggacccttgtttcctcgtgagagaattttcaatcctagggcttaaagagcacgttcctagtataaagctgattcacagatg

SEQ ID NO: 26829 - DNA, 3003 bp, Unknown
  misc_feature (1)..( 3003): 2750-1469P.txt file - cDNA_ID_2716287; gDNA_ID_2213667; Annot_ID_132717
tgaagtgtatttcattcccccctgttgtgaagctggaaattgcatgggaccaccttcctgattcataaccccttccatttggtgtggtgaaaacctctgaatacttgtatttggatactgaatacttctgcctagcatgtcttggtgttgtagaagcgtatttttccaatttgtatcggatccatgaaggccatccatacgttgccctaactgttgctgcggaaccccatcaggacccatatgtgaaacccttgttcgcttattcaagccaggcatagaagacatttgtccttcttgactttctctctttctatgaaaagatgtaccagggttcatactatcagagccataaggcagcatcgcatctagtccaccaggcgaagcgccagagacactgacagaatttgatccttgatcctgcgtgtttcttgtacttccaattcccatgtacctttgttgctgaggtggtaccaaggccagagaggaatttggtgcatcttgcaacggctgacttcttaatcccgccagcatattagtaccaaggttttgaatagcctggttgttattggtttgctgcattatcaaatgccctggcaaatttcctcgctctgaactttcaggaagccgatcaatgcacacctttttcccctgaatcttattctgagacatgactgtcacttctgccatttgccttaatctctttctccgcaaagtagaaagcgacaaatcgagctatcgagtagagaaaaaaaaacattttagacactataataaacaactgagaacagaaagcacaaggagtctttttaatgagatattaccttagcagtcaaaggatttttactcagcctatcaagtctgggtaaaggatccagacagagttcaggttgtaaggcttttaatatcctggactccacttcctgcagttgatgtaaggatcagtacagaagataatagtttcagtgctcagatatacgacctataagccacgagctaccatgattaccatgagatcaccgtacgtccatgagttgtctgacattgatggaatatcttttaccacattctcgagtgacatcttaaggcgcaatttatttatcacaggagagacttgagatgaggtatgtttccgatagtcatgcacctacaatagtatgtgccaaaaattaaagaaaacatgatgatgtaagatggtacacagcagtcaattaaaaattagtataactaggttttttatgtttacttctggtcccagttactccattatgtttcagaaacaatcaaatacatgtacaattgagtttggaagataaacttccatgtacttataattacgacatttttttaatcttgattaagtgtagataatttctgttgagctctttttaaatatatttatatacgtttggactgtttccaagaacttatggaaggctttatcccaaaaaataattgcagataactcacctcacatataaccaccccatccacaaatttgcaaggtatatcttccaaaatgtccccaggaagcctgccagcctcaatagcctataaagcgtacaaagggattaaaaacatttactcagtagaatgaaactcagaaagtgtatttaacaaaacgcgagtaagtagtgcagtgaaatgcattattcgggtagaacaagtggggaaaaaaaacatcatcttcacatttactaaatctaagtactttgaattcattcaccaaaactttgattacatgttcaaatcaagtctataataacatagttcgaaagatttaccgaaaggagaccctctgctgccctatcatacggatgtaagacctttggaacatctcgaaacgatatctgttgcatagcctggtattcaaaaactcaaatttgtgaaaacgtgaaggttttaaaactcaaatacaagaaatcacaagataaataaattcatatagactctcagtacatacctcagaggtttttcctatagagtacccatttggatagaggctcaatatgaaggaaacttcatgatctgcagagaaaccaaaatgcactcaattcaacatagctagaatttagcaaaacattatgtgtcaaagtggttcgttgagatccaaacctggagatatatcgggtaaagatggcttcgaaaacccggaaacatcgccaatattgctatcatcagtggcctgaaccaaacgtaataaattttctatataactttccaaaataagcgaatttagttggaacacaatacaactaaaattctaagttaaattacctttggtttcccagatagaacgattgcttttggggaatcaggagtagccaattcagtagaaatcttaggtcgaaactttctaccaaccttcgatatcttaaacgagacacccatggattctctccagagagatgaagctcaaacctgtctaggtactgtcaataaacgatacagaaataaaaaagacacgagaattgaagaaatcgaagaatgaattttaagaaagctagagaaattgaaaccttatgagcttgttacagagaagatcatcaaacaattggatcggatagaaagcgagagaaatcaaaggtgactaagaatagagcaatgaagaattcataaacatggaatttgtgaaacacaggtgggaaatttttgaagaagatgcgatcggaagagaaaggaagagagattattgttagggttcttcttctaacttcaaagtagcagaaaaagaaattatcttttgtgtctctgtgcacacttggatttcggtttaagacaaaacggaagttgaaccagttattaattttggttagcttcgattaaaatttgggtaaccgagtttgggggtagaatagacattttgcaaattagggttttgcttgatatataaaatccttcacccttataagcctttcgtcgcctcttcgtgtgatttactgagtgaaaaaagcttatcgcggcgattagttcccggcgaagaagaagaagagagataagaaaatg

SEQ ID NO: 26830 - DNA, 3000 bp, Unknown; identical to SEQ ID NO: 10661
  misc_feature (1)..( 3000): 2750-1469P.txt file - cDNA_ID_2716291; gDNA_ID_2213667; Annot_ID_132716

SEQ ID NO: 26831 - DNA, 3000 bp, Unknown; identical to SEQ ID NO: 10666
  misc_feature (1)..( 3000): 2750-1469P.txt file - cDNA_ID_2716294; gDNA_ID_2213667; Annot_ID_132715

SEQ ID NO: 26832 - DNA, 3003 bp, Unknown
  misc_feature (1)..( 3003): 2750-1469P.txt file - cDNA_ID_2716298; gDNA_ID_2213667; Annot_ID_132714
gttttttcttaaactattaaagcattaattatgctgggaattagtgatacacatatatacagaaaaaaaaaatccgtggaagaaaaaataaataaattacgttcttcgttatgaacattttttgtgtgcgaccgaaaagaaaaaacatttttgtagattaagaaaaatataggctaaattgagggcgggaggtctaatatgtccaatctaaagtgggccgttaaggcccattagtgtttctcatgttttatcttcttaaattctttattgctcaatggctgctgattaccggttcgaatcgtacggaatctagttttagttaagaagatgtgctgatctaattactctatgatcaaaatcataaaattggagccaacaaaaatatcataccaaacacatgacgtggccatgtggaattgttggcaaccccaaaacatccaaacattggtttgttgcaaaactaatcagataattaatgagattaggtacagtatttcatatacatttaaggacatttaatgaaaattaatgctacattagaatgttagggttgtttgattggtgaaaattacaattgccagcaattatgttactgtaaaattgccattcacattttcacccaattgatcaataaaacttttcatcgtcattcttttttttttccatttgaaaatctgttttttttttctgtgttggatgtaattttttttctttgaaatatttttattacaaatatttaaccgtaataaaataaaatacagtctactatttttagaacgtttattgcaaagttctaaaattgctaataaagtcttccaagtgaaaaatattttaccgttgaaattatgtttatttattactactagctagagagcctaggcttcgaccaatttttagttacgatattaccctcatcgttataggctttattaggaaagtaaaccggtgttgttaaaaggttttgagggtattatggtaaaacgtagtactgcggctgtatcttttttttctttcctaatcgaagacgacattcgtcggaaaagaagttgtctgaataaggaaactctctctctctctaaacagtctccgcatattttctctctctaaagactctgtcttttttactacggagagagagagagagagagagagtgtgcgtgtgctggtttcgagcgtggatattaagggacagagcaaaatcttctttggtgggagaaataaagaaagattttgcattttgagcaaaaccagtagtgaagtgacaacattaactcctgacattgttagggtttcatcttcttttctctctttctcaacctctcttgccgattgagaacttggattaagtttggaaatactgagaattggaaagttcccagctcaatgctggatcggcaacaggaggatcttggtatgttctttatggattttgcatgattttgagttctgagctttggttttttttttccggattatattaaagttgggatttttatggttgggtctttacttagagtagtggaatcagatctgagaagcatcgtgttccgatgaattagatcctcgatttctatgtctggccatttatatggttcatgacctgtttttgtcttccttttcatttcccgagattctttgtttctcatcaaagttatattccgtgattgtcctacttatttcgtgagaatgactctggtttcattcatcttttgctttcaacattgttagcaagttggcttttttttttgtaatctctgagtaacagtttctattattgttttctcaggtttcttggcattaatttgagtttgttcagttgaattctgttaatctcagtgatacttctgctggttggttagcattagcaatctggtcttgtgagaatgaggtcagatacggttcttgactacgtggtattcgaattatcgccaaagcattcaaagtgagtatatgttccacttcaagatttcatgatttctagtttgttctgtataaacaagtgtgtgtttttcctttgatagatgcgaattgtttgtatcaagcaatgaacagacagagaagctagcttcagggttgattcaaccctttgtgaatcatttaaaagttcttgaagcaaaagcgtcgcctgttgctcaatcctctattagattggaggtggagaaaagcaacacttggttcactaaaagaacattagagaggtttataacaaagaattcaatatcattttggtttcttttcacatagccttttttcgatatagtaatagtttcttccaccatttgtcctttcagatttgttcaatttgttaatagtccagaaactctcgaaaaggtcaatacatattattccgagatgttgcagttggaagcagctcgaacattatattcgcaggttgtaaccactattttgaaacttgacttctaattgtgattcttgaccgatcgatctttcctaaagttttgttgtcatttttttggttcttaaagcggagtgaagactcaaagtttggtgcatcaggtgtgtttgattttactgttgttactttgctcgtacattgatctttaacatcaatttgaatcctatttccttccgtttcagatgatggagctgcagcagatgccacaaagtaaagcttctctgcgtttatgtttgttctgtgtttaaagagttttatattgattactttttcttctctatattcaggaaggagctcttaaaggctatagacttaagacttgaagctattaaaaaggacttgacaacgtccatttctcatgcatcagctagcggtttcgaccctcatactgtttccgaactcaaacaatttgctgatagatttagtgcacatcatttggagtaagccttttattgttttgctacttttcatttgatgaaacctatctttcatgctttgttgtttgattgaattggaatggttccatcagtgaagcatgcagtaaatatatctcactatggaagcaaaggccagacttgatcgacatg

SEQ ID NO: 26833 - DNA, 3003 bp, Unknown
  misc_feature (1)..( 3003): 2750-1469P.txt file - cDNA_ID_2716308; gDNA_ID_2213667; Annot_ID_132710
tttctattcgtgacaaaacatttgaggatataggaaattaatagcctataatatgtttgaccataaaaagaatttcttcttcttgaaccatcataagaaaaatgtgtgtttagtctattgatcagttttgtgttcaaaaaaaaaaaaaaaatgtctatcgatcagttaggtgtaaaaaaaaaagttacaaaactcgtgacaaaaacattctatattggacacacatcactgtcacttcagactaaataaaaaaaaagaacacgttatttcgttttctttatttattcgggagaggttaaaagccacagaaacttattggctagaattggttatttataacaacaacacatgagcaaaaagctcaaaacatctacatactctttggaatcctcgattttttgtacgtgtaaagaagtcacacaagaaaatcttgggttgttgtaatcttcatcacactagtatgtcaacgggacaagcgccggagaagtccaatttttctcagagatgtagtctgctcagccggtacttgaaggagaagggaagttttgggaatattaatatggggttggctcgaaaatccgatcttgaactcgccggaaaattcgatctcaaaggtatttatttatttttccctatctattccgacggccgccgcctataaagaccaaagtttatatcatatacttttagtatcctgcttcgttgattattagcataaagtttaactatatattttttttgttgaaatgcaaaattttaaatcatttttttcttttcttttctttaaacttaagcatggtattattttggacagcttaagtatattaaagttagagattctgtgaagttttttaaaaaacgtaataaacatgtaatttgattttgataaattttaatcggtttgcaatttctgttctaatttgttttaggacaacaaaatgtgattaagaaggtagagacctcagaaactagaccgttcaagttgattcagaagttttctattggtgaggcctctacttctaccgaagacaaagccatatatattgatctcaggtactgtacacacaaacttcatatgtattcgaactcctaaagtgtttgttttcacattttgtagcaattgaattagagaaagaactaccggttatagatgtatggactatggagtttgactaattgtaaaaatgggtttgatttgattttagtgaaccggcaaaagtagcaccggagtctggaaattcacagttgaccatattctttggaggaaaagttatggttttcaacgagtttcctgaagacaaagctaaggagataatggaagtagctaaagaagcgaatcatgttgctgttgattctaagaacagtcagagtcacatgaatcttgacaaaagcaacgtggtgattcccgatcttaacgagccaacgagttccgggaacaatgaagatcaagaaactgggcagcaacatcaggttgtggaacgcattgcaagaagagcttctcttcatcgattctttgctaaacgaaaagacaggtaaactaaactccgaaactgttttgtgcttggttatgctttttctaggccgctcgtcaaaatgtatgcatagattaggatcaaagtttcttaaaaaagttatatgtaaaaatagctaataattaccatattaagacttattcgagttattctaggaatcccacatcggattagaagcgtattaccaatcaagtttaagttgaacattcatgaaattgaacatagggtggtcctagtatgtttatgaattatgattcctagagtaagatttcgagatgtgactcaagtgtcatcatttataaagaacatgtaaaaaatcttacaagttacaatgaaattcgagatgggacctagagtagtatataagagatatgagtccatcatctatgtgtccttgatctaggaaaattattagtaaaatgtcgagaaatttctagttaaaaaacactaactaagagttctttgtaaatcaaaacttcaatatctactttgtcttaaatgttgattaattgttttgatttcagggctgtggctagagctccatatcaagtgaaccaacacggtagtcatcttcctcccaagccagagatggttgctccatcgataaagtcaggccaatcgtcgcaacacattgcaactcctccaaaaccaaaggcccataaccatatgccgatggaggtggacaagaaagaaggacaatcttccaaaaaccttgaactcaagctttagggcgtataaaatgcacgatcgagttcacgtttctagttttcacttatttaggatttgaacccaaatacccttttatattttcttccattacttttgaccaatttaagttatttatagtactgtattacgtagctagtatttatatttcaaaacatacatattttgatacttgttttttagattctttaattaaaattgtcatctggattaccctttatcgaaattttttaatcacctgatataatctcaccagtgatggatttgcgttgttagtaatttttctaagtggcaaaagtatattaacctataataggtttcaaagatatacatataatgtttctatcaaagatattagtataatattttaccacatgatcgaaatctcaccagttatggatttgcattgaatgttctagcgattgggctggaccgtctcaggaacccaaccttaatgaaaaaacatcgtctcattgattttaggtcgttaagtctgttttgcccttgtcttatcccgtaattacgaaattagccttctaccatttcctctgtctgcttctctcttgccgttttctaaaaccctaaaaatttctgttgaaccccaaacattgaagtttatctttctttttcattgttcgatctcaaagcacagagattgcttaaacctaactgtctcagttcttttaaaaacagtcatctctcacaaaactctcttaaccctcttcatatgctttgagaaaaaatg

SEQ ID NO: 26834 - DNA, 3003 bp, Unknown
  misc_feature (1)..( 3003): 2750-1469P.txt file - cDNA_ID_2716312; gDNA_ID_2213667; Annot_ID_132709
ttaaaccgtagaagtgacttaattacaagtataagtgttgtaagaacaactatcaagtaaaagtgttgtaaaaccaactatcaaaactatattttttacgtgttacgtgtgaaaactattaagtgatactccaaattttgccatactacaagataacgcatgtaaataaattttatgggaaaaacaaatggttttggcattaggaccaagagcatataatcttaaaactcgtacaacatttggttcagttctagctaacgtgaccttttaagtggaccacttcatcatttggattttcctcctgatgcttagttatgtcggatttctaatttactcactatagcatgacaaaaaatgtatccctatgccgaaaaaagaaagaaatttgataaatgtaaaacaaattgacgccaccaaatgtaatcatcaatcagttttagcttttacagttcctaactatttccaaatatgagaatatcgaaagaatagttataagtttcttatgtatcatgagtaaaatactctaatactcaattactcatgatattatatgcaactaaacaaaatatttgtctaatctattaattttctgtagaccatgacatgtattctaatgatttgacttagtgtccttgttgtatttctatccggtttcaattatgcaattgttgaaaaaatgttattcctgttccgcatgtaatggatacttattaatatgcgataatctttaggcacatatgttattgtcatagtacaagaggagcatgtgaagaagctgcaacattttggtgttcacatccaaagtatctgtcggtgtcaaagaaccaatttgttttagtcattgttgtaaaacggacctacattcgtagtcgttacccctaaattttaaacaaattttatgtttagtattgtcatacgtcaatgcaaatgagttgtataatctttcaatattgtcttctaattttattttattttctgataagtaccattttatttatgaagataacgactgtacagagaattcccaccacaagctcaagctgcaagaccaaacttacccgaagacaacctgttacagagacacgctagctcgtaacactagatagaaaggaaatcttacccagctcaaagattaagtctgaagcacacctaacccaaaactgttgacaccatcttgattatgtccatatatgaacttaggtctcaaaacaacaactatttatttgataaatgttgatatactctattgcttaaaggagagtccaacttcgagtggtgaccggaaggtttcgccgttgccttttcttttttgccgttaacgttggtttggtagtcttagtagaatcttctcacaatcttgatttttgcatatcaaatctgttagaatatgacattcccttattttggacatgatcaaatatgtgatcgaaacccaacttgcgcttccaacaatgtagataatcttcatgtgaaatagcgaatattatttggtcttttgtatgtattagaaaatgacaatggatctatattgtgtaattaaatacacacatacatgtgtatatattagactcaagttgttgttcaactcttgaaatcatatgatattgaagagtcttcaaagttcaaagtattatgttctcattttgcaagttgcgataaataattcaataaaaatgattttttcccttggcgcgatcgtctacgacattttgttttaaattcttttttggtactctttggcattgcctcttattcaaataaaattcaacgctcgacttcattgaacaaaacgattaaaagattttattattattattgttatagaaataatatttaactgagcaagtaacaaaattcatattaggactaaacagaaatcgttaaccttttaccaacatacaaaaccacaaattctaatattaattacactcagtttttgtaattaaaaacagaaaagaaaattaggcctatgaagtatgaacgctataatatcctttagcaaagagggaaaaaaaacgcaaatcatgcatgaaataaggttggtaccgccaagattccgacacgtgttgacatcctaaacgcacataacaatacttcacgtgtccttaaactttgtcggggataagtaattgacaccattcatcgataaatatccactcacaagtcgtactgttgctaatggatcccacatattaaattcgtattagccatcgcagccgacgcgagacttaactccgtcagaactccgttagactatagcgtttgcaaatgccctcatttacgccctttaataacgaatatcctaaccaccactaaacgaattacctcagaagggtaaattagtatttaacagaaactcttgggacccgaatgaattaaatgggttaacgcctttatgtaatgtcgccgtcaacttacaacagtttcttcacggcttgtgcaatgaaaacgtgccggaacttgtaacgaacattgtagtttgatttttgtaatcaaccataggaataaatcattttttccgcatataatttatttccctatttctattcgtgacaaaacatttgaggatataggaaattaatagcctataatatgtttgaccataaaaagaatttcttcttcttgaaccatcataagaaaaatgtgtgtttagtctattgatcagttttgtgttcaaaaaaaaaaaaaaaatgtctatcgatcagttaggtgtaaaaaaaaaagttacaaaactcgtgacaaaaacattctatattggacacacatcactgtcacttcagactaaataaaaaaaaagaacacgttatttcgttttctttatttattcgggagaggttaaaagccacagaaacttattggctagaattggttatttataacaacaacacatgagcaaaaagctcaaaacatctacatactctttggaatcctcgattttttgtacgtgtaaagaagtcacacaagaaaatcttgggttgttgtaatcttcatcacactagtatg

SEQ ID NO: 26835 - DNA, 3003 bp, Unknown; identical to SEQ ID NO: 26834
  misc_feature (1)..( 3003): 2750-1469P.txt file - cDNA_ID_2716312; gDNA_ID_2213667; Annot_ID_182137

SEQ ID NO: 26836 - DNA, 3000 bp, Unknown; identical to SEQ ID NO: 10662
  misc_feature (1)..( 3000): 2750-1469P.txt file - cDNA_ID_2716316; gDNA_ID_2213667; Annot_ID_132708

SEQ ID NO: 26837 - DNA, 3000 bp, Unknown; identical to SEQ ID NO: 10662
  misc_feature (1)..( 3000): 2750-1469P.txt file - cDNA_ID_2716316; gDNA_ID_2213667; Annot_ID_182136

SEQ ID NO: 26838 - DNA, 3003 bp, Unknown
  misc_feature (1)..( 3003): 2750-1469P.txt file - cDNA_ID_2716324; gDNA_ID_2213667; Annot_ID_132706
atacaatttttctagggattcaatataatttccctctcctcttatagatagtcgaaaaatggtagaaaaaggaatatttgagactgtttgatgaaacgaagtgccaatatatgaattgtgatcaaagccgtgacgttatctccaatacaaaaactaatattcttattgtactccattaattaattgagctataatacaaattaaatacgtacagaagaatgtttctttgggcctcgatcgtttgcatggggataggtgcgttaatatgagtgctacgttgtgagctgtataaaagaagagtgtgggaataggttttatctgaacagaacttaaccaaaacccaaacaaattgaaagaaaaaaaaaacttttttccttcttccttgatcctttatctttttcgaagaagtgaatctggacgaagaactaaggccgccaattttggaatttgaaccatcaaattcatcaacaacaaaaaataaagatcttaatctttgaatttctacttgtatttaagcttcttgattcaccttaaacccgagttatttcatttctttttccacctctttctttgtcttcttcttcttcttcttccgggtcactaagacatgaaggttcgtttaatcactcatacgctctggttcattgatttctgatcacataatgtgttacattacttattcataaatgtttttttttcttttcagtttttcgggtggatgcagaacaagctacatgggaaacaagagattactcatagaccaagcatatcctctgcttcttctcgtaagttcaagattacgtattcgttgaaaacaaaaaatttgattaccaaaactgttgtccacagtccacttgagacatgtgcaaaattgcaaatatcattcctaacattcttctttccattgattggctctctgatatttttgttttttcctatttaaaacaagatcatccgagagaggagtttaacgattggcctcacggattactcgcgattggtacattcggtaacaaaaagcagacaccacaaacacttgatcaagaagtgattcaagaagagacagtgtctaacttacacgtggaaggtcgtcaagcacaagatacagatcaagagctttcttcctccgatgatctagaagaagatttcactcccgaagaagttgggaaactacagaaggagctgacgaaactcttgacgagaaggagtaagaaaaggaagtctgatgtgaatcgagaattagcgaatcttcctttggatagattcttgaattgtccttcgagtcttgaggtcgatagaagaatcagtaacgcgctttgtgatgagaaggaggaagacattgagcgtacaatcagtgttatcctagggagatgcaaagctatttctacagagagcaagaacaagacgaagaagaataaaagagatttgagcaaaacctctgtttctcatcttctcaagaagatgtttgtctgtacagaaggtttttctcccgttcctcgccctatcttgagagacacgtttcaagaaacaagaatggagaaggtactactactaaataaagttcacaaccacgattttgatatcaattattttttctatgtctctaaccatttacactgtatatacagttgctgagaatgatgctacacaagaaagttaacactcaagcttcatcaaagcaaacatcgacaaaaaaatacttgcaagacaagcaacagctctcgttgaagaacgaggaagaagaaggacgaagcagtaacgatggggggaaatgggtcaaaacagattctgattgtgagtttctgatctttggatttcttaaaaagattaaactagaaaaattaatacatcaactgattccatttgcttcttctttaatttgcagtcattgttcttgagatctgaatatatggtccacttttcctttttcatgttctttcaagaaaatacaggtaaaataattgacctgatcagtgaatctttgttatattagctttgctcatagtactgaatcttatactaaatattctatgttttggcagatagagaatcttcacaatatcaagacaatttctttttctctctgatgaaaagtttttgggtctctctatctatctgcagagagcccatgagtccctttttttgcatggttgggtccataaaaccaaaacatgttttgggaactaaacatcagacatcgtacatgagatatgtatatgcatacatacatgtgtgtatatgtaaagatagatatatatgcgtacatgtatgtagttttgtattttcaggtggataacctttggtttctagaattcctgtctctgtctctttttttttttaaaactcttttttgtatctttcatttttacatggttttgtttcttcatgtatcacagaagagaactattcagattaataaatacttttatcgtagccttgtaaattattgttatcaatttatcattttgtaatctttgataggaatatcactaaaaccaaataatatccgtaaattaatttagaaactatgagtgtaactatttaatatatagaagtaaaataaacactaaatgagaatataacatttaaaaaaaaaacaaatttatataaattaaagctataactattaactataaacccattcttcaaatataactattaactatatttggtactacgtacttcataaaatgaaagtaaaatccagttttgatggaccatatttcacaaagcaattattggacacacgaacgaaggcccatcctaaaatcgaaatatataaaagttttgttacttactaaagtgtaaccctctaattaggctagaggcttcacttggaacacatgaacatctggagaatgatcaaggagcaatctttaacagccgtccgatcaaaccgacccatttgacacatctcagctctcactgacttcttcttcagtcatcagctctctttctcctctctttcttcagatctctctgcaacgaattgggtttacaatg

SEQ ID NO: 26839 - DNA, 3003 bp, Unknown; identical to SEQ ID NO: 26838
  misc_feature (1)..( 3003): 2750-1469P.txt file - cDNA_ID_2716324; gDNA_ID_2213667; Annot_ID_182134

SEQ ID NO: 26840 - DNA, 3003 bp, Unknown
  misc_feature (1)..( 3003): 2750-1469P.txt file - cDNA_ID_2716328; gDNA_ID_2213667; Annot_ID_132705
ggggaccaataagatatgcatgtttcctccaatgatgttagttcatttggtaacatgaatcgctattggactttcataactcccttagattatcttaattgatatattttatatgttgtataattgttttagaaccaacattaatggatgcatatactagaatgtatttattctaattatattaatatatcacacctatatatctaattatatatctatctatctataaatattataataataatatatttgattaacatacgttgttttttaaagtattttatacgtatagcttgtgcataaactatgatatgtacctagacggctagacccgttcagcaccgcgtccattcgaatttggactagacaatcgacccaccctatacataataatttgttggttcaaaaaatctcttggattttggtgcttaatttgctcaaaatagtactttggctacactggctagtgcatgtggaaactgatagtagccgttgaaagtcaacctgacccctttgggaaaaggattacaaacttagacccaccaaacctaacctttttaccttagaatacgtgtctttctcaccataattagtttgtttatctctagtaagaattggaactacaaaagtagtttatgtaattaacaaaaacaatgctcgtttgtttaagcaaagcgggggatgggaaaaatgacgtggagaatgtcgattggacctgagttcacgtgattgggagtggtgcggtgggctcaactctccgatgataaagcgaaactgctttttgttgctttccttttgtctcctttttttttcttccagttctctcaccctattttgttcctcatccttatttatgaattttaagataaaaaaatatatatttaagtaattaaaatgtcgattttttttataagttcatttgaattttttaggtttataagtaaaaatcaattggtcatgaatagattgatttaaaacgaaaagaaaagaaactaaaacgtattaacccttgtttaaatacctagttatatacaagcaaatcttcaaacgatattattaaagggatgatgcattagataaaacaaattactagcactctagcagtatcatcaatagtttatggtaataacccaaaccgttcaaccattaaaaaacgatattggtatatagatgtgcacaaacttggtcaacaaaagttcatgtagtcaattataaatcggggattagtataaattttcatacggctttgtattctatcgtggcaccgtggtgtgtaatgtaaagatgattagataagaaatgtgttacacgcccacaacatatgattcaattatttgatggaaaatatagataaaatgtatagagaaaaagtactagaagatgcgaaatccagaaggtaaggggacaatggcatgagttccttcgtgggatttgctttcttaatttcactctttctttctgtctctttccctcttagatttttctgaaattctctagaattttatattagctttagtgctttacataatttacatattatttagttcttttgtcaattagaattacttgtggatcaaactttaatgagcaaatatttctggtcaataaaacgcttcgcagtaagaggtcacaaattaaacccattttttcatatttatattttttgacgtttgatgtgtacggtaagttgaaacttgaaagctatattacaaacttgatttcccatattccttttcatgcatctactattactaacctagctagcaaataaaatgacatgtagcatattggttggtttataatgcatttgttgttactctcgagatttaaactcatatatacatttgttgacaaaaaagtaactttaaatagattttttagattagcgcttctaagttataactatacactgatttctagtgtaatttatgcattctagttctatatacttaatagtaacttttatacagtatttgtgtaagtagttttcaagtgaatttttttctcaacatatacaatgtatattacatataatttacgtgcaccttttaaaaatgaaaaattcgacgaaaatcacacacaacaaaatgtgtggaagcctctatatcttcgtgtcagcatagtaaccattcaaggacgatacaatttttctagggattcaatataatttccctctcctcttatagatagtcgaaaaatggtagaaaaaggaatatttgagactgtttgatgaaacgaagtgccaatatatgaattgtgatcaaagccgtgacgttatctccaatacaaaaactaatattcttattgtactccattaattaattgagctataatacaaattaaatacgtacagaagaatgtttctttgggcctcgatcgtttgcatggggataggtgcgttaatatgagtgctacgttgtgagctgtataaaagaagagtgtgggaataggttttatctgaacagaacttaaccaaaacccaaacaaattgaaagaaaaaaaaaacttttttccttcttccttgatcctttatctttttcgaagaagtgaatctggacgaagaactaaggccgccaattttggaatttgaaccatcaaattcatcaacaacaaaaaataaagatcttaatctttgaatttctacttgtatttaagcttcttgattcaccttaaacccgagttatttcatttctttttccacctctttctttgtcttcttcttcttcttcttccgggtcactaagacatgaaggttcgtttaatcactcatacgctctggttcattgatttctgatcacataatgtgttacattacttattcataaatgtttttttttcttttcagtttttcgggtggatgcagaacaagctacatgggaaacaagagattactcatagaccaagcatatcctctgcttcttctcgtaagttcaagattacgtattcgttgaaaacaaaaaatttgattaccaaaactgttgtccacagtccacttgagacatg

SEQ ID NO: 26841 - DNA, 3003 bp, Unknown
  misc_feature (1)..( 3003): 2750-1469P.txt file - cDNA_ID_2716330; gDNA_ID_2213667; Annot_ID_132704
ttttttaatattttttttgtgcaccggaaagtaagaatgatatttaagaaaatataacttgggaattgcatggattaagtctgggggagccggtttagtgtaatttaatataggtcaactcataaactggatgcatatatatacagtatccaaaaaaaaaaagatattacgtaatatacacataattcacatctaaaagtaagacattgacgtgacttgacttatgatgcataaaaaatctgcctggagacaaaaaaacaaaacaaaacattggtctcttgagtgctaaaatctaaaatgtatttatttagttcactagttctatgcgctaaatgggcgcaacaccgaagggtccaattgatattgtattaagccacgggcctcagtttgatttgatctgttgatcatttaaacaatgataatgggcctgggcctctgagagccagatcgagtattttatgtatatgtatcacatgttttagttattttgttgatatcatatgttagctttatcatctacttataagtgttggtaaataattaacgacatacgagtaaattataacacatctataggagaaatataatatacggatataaactagaaacatggcaaaaaaagacatacttatataagcataaaacaatttaattagtttgattcataagcaactttagaggaaatataaacttgagattattataataaccttgatcacgctttcgagatacttacaagcataaataatataaaactagttaaaagttttctcaaaattattatattaaacaaaatgagttggtcatgacacgcacattcatgtcgtttctcaaatgattgtactgagcttgtcagttgatgatacatatagttgaaaataaaatgttattataacttatgagtgtattgacttgaatcatcagaagataacaaaataattaattaattatatcataacgtagaaaaataaataaaattgagatgccagcagcaagcagtgttgtggttggcccgacgccgaatagttagtggttacaacttcattttataaataaggtaggaccgactcaaatcttagtggacctaaacctaaattcagtaattaaacaaaaactttgcccaattttcattaatccgcattactaatggaaagcatggcagacaacacaatccgttaaatcagctttttccctcaaccattaattaaaaaagctaaccctatattttaattttagtttactttgaatgaatctatttttgtgaaatactttggccaaattatgcaaaccaaatttgaaaccagtatgtgaaattgaatgatcaccgatccagagagctagaaatcagaatatacgaataatcgattaaagttgtttgtttttgtatgcgataaatgtgatttattgtacatggcctacatgtccaatgattttgttcgacgaatttatattgagcagtcgatcgtggtccgatgtcgacgtggagagattctgtagagtttttacattatttatttattgaaataaagtgataaatagtagtcaaatgatatttatactttactttcttacacataaaagtatatatattgaggtggtagccgaaatatccaaatccaagtccacactaatttatagaagctacatttgtcatgtaaattctaacattggaagaaaattaaatagtggtatagttggacatttttccctttttaggagtgaatgtaaatatacatggacattaaaactaacgtgcaaaacgtttttttggataaacttcaactcgtaatattttaaaacaaaatgatggagttattaagcaaaattacagaactaaactgtggaatgtaagaggttcttattttatgatcaaaacaacataataattgaacatcaatcatactgtttgtgaaaaaatctttagtttgttcatctcttgaagaataaatacattgcgagtaaaaacagagatgtggacgttttggaacgccatggttataaatatgaagaatttatgaattatgatgcttcagtgaatattcaaaccacttgatttgatcgatagaacttgaaaaatagaaaaataaaagtgggtgatttaaaggaagcataaccaatggagagaaaatgatagaactattcatcaaactgtcgaatttttgggttgatttgagagtgtgaattctaaaacaagaaaatgcgtgaaatattatgtctcccgaaaattctgaagtcttcaaaacattcaaaaaaaaaggtaaaacaaaaaaaaacaaaaacaaagcagttataagttctaacaatataaaaaagatgactagatttctattagatttcgacaaaaaaaaaaaaaaaaaaaaaagatttctattagattcataatttgtagtgttaagagattcgtctaaacagactaaatctaataacacatccactaacaaattcgcgtatgaccgtaggataatttgagccgaagcacatttgcttagtaaaaattgaatgaaccacaacctaatttatgtatttttaatgtcgttttcgtttgtagaaaaaataattttgacccccaaaaattatattctttatcaattgcaaatttcaactcaaaatgatacaaaacttccacacaaaaaaaatgttagttatttacttttccaccaaactattattgtgtttaaagtagaaacattatttagcttaaagttgaaactatttatactacccttgaaaagacaagaagaaatctactattccataaaaaccaataaaaaaattatctataaacaaatccgtgactgttgtggcggcagggatgctttccacgtgtacataaaccattggctacactatcccacttattaaaatctttatctcgccgttcctttcaccggccgattttaaaatccccctttaaatacggacctgataaatctctctttcactttcttcattttcgctctcaccatcgccggtaaaatctcgccggagaaaacaaaaagaatg

SEQ ID NO: 26842 - DNA, 3000 bp, Unknown; identical to SEQ ID NO: 10654
  misc_feature (1)..( 3000): 2750-1469P.txt file - cDNA_ID_2716338; gDNA_ID_2213667; Annot_ID_132702

SEQ ID NO: 26843 - DNA, 3000 bp, Unknown; identical to SEQ ID NO: 10654
  misc_feature (1)..( 3000): 2750-1469P.txt file - cDNA_ID_2716338; gDNA_ID_2213667; Annot_ID_182130

SEQ ID NO: 26844 - DNA, 3000 bp, Unknown; identical to SEQ ID NO: 10693
  misc_feature (1)..( 3000): 2750-1469P.txt file - cDNA_ID_2716373; gDNA_ID_2213668; Annot_ID_132736

SEQ ID NO: 26845 - DNA, 3003 bp, Unknown
  misc_feature (1)..( 3003): 2750-1469P.txt file - cDNA_ID_2716402; gDNA_ID_2213668; Annot_ID_132727
gaattcaagatcttaccttctttaattatctttttaaactactattaacctaattttcgttttaatttttgattagttaattctctaaatgtatctgattcgttctccatccaccacacgaaggattgatcctatccacgatggccattttctttgtaaaaaaccagcacctaattacatctaactattgtttttatttagagagattgtataagttatccgaatattattgttgttgtgtgttgactgttggtataatattaaaattgagctcggtttaaattaggttcgcgtgtgtggagttcatccataagagcaatcttactttaagagaagttttgatttaaggctaagggttcaaaagattggagagatgataacaatttagagttcgagttgattaaccagtgttgtattcattttaattaattgatttgttgttatgttaatatatatattgtgtgttatgattgatgaattgttttgtaatctcttaagatcataatgaattgttagcgtatggttgtggccgaattgtgatttttttttttttttgctaatcgaaatataatgtcacatattcatagatcataaaatctcttgttcaaacattctttggtgatcaaagtaacgtgaaatttaaggattccgcaattcaagatagtgaatagtggatgttgtcaagatactgaatagtggatgttgtcagtacaacaattgtgaacgattagaacgtccatctatctaccaagctatcgacatttaagtggctatagtgctagctatttaagtagttatgctatatgttggcttcaatttatagaattaagcttgttatgagttattattggaattaggattgtgattataattgtttttatatttgtgcaattataagatataccaatatattttaacaaaaagtaaaagaaaagaaataggagtataaatataaacgaaacacaaaatagaactgtttaggagaatataaaacttttacgttgtctctacctcttcaaattcaccaaatttattttttaaatagtttccatcacttgtcaatgtcacatcacctatcatctatctctctttttctccctctcgtcctttttcatcactttcatcattcatgcatctctgcccccattctctattttcttctatatttctctagtcaaccaaaaattttgccttaaggaaaccaaaagagaaatccaattgaaaaggatattaaaattaagggtaatattaaaaagaaaattttgggcccaacatcagaacaccattttatgactgtttctattgtcgactgtttgacaaactgaacaaacaatggctttgattggtgaacaaaatcaaagcactacaatttctacaatttataaatttatcaatcaaatatcaaaattgttacactgtttttttacagtttttctgtactatttttctttttcttttttatacatcattatgtaccatcttaccattataactaccaggtaaaaaacttgtaaatttttatattattaataagacccaatatatatatatatatatatatatatatatatatatataagttagcaatccaatggtcttgcagtctttcattattgtaatgatgcttattaggttttgtactaaaattaatgctaatcaatttagaatttacataataatatttagaatcatctgtttttgtaactatcttagttttagaactaaaaataaaataacccaaaaaaaactggtaagtactagtctctaatagctatgctttctttctacaatattatggtagtcaaattataaaaatatggggatgtttcgaatctttctaccgtaaaactggttgtgtccaaacgtatatatttgggatacaataaaataaaaaataagactattaagccaatgaatcataatgaggccataattttaaacgattaatgggctcctaaatatctatcttcataattcacactccacatgaatctattcctagtaaccctaagtgttttaataataggatctagagatgttcgaagatataattgcattttacttttcgtcgtacttatgacgaagcaagccttggacatctccgttttaaaacagggatctcatgatcttgaaaaggattcttcaagaagcacagaaaaagacaaattcgtatgaattattgactcatatcaaagttatttcatataaacaaaatcctatgaattattgacactagtcaaaactcaatgaacagattgattggccgtgaatgctacggtccatgaagggatcgagtgtggaccagtctctgcaatatatgttgttaggttgacttgttttcactagaatcgtatgtttttccaatccatcagtacgtttaacttcaaaccaccgtcaaatgaaagctaatttaaacttcttctttttttgtaatattttgtgtcaacaattgaatttgatccatggtgagagaaacctctaaacgccggagatatttgtgatgttttaacgtggtctttcatcttcaattgctagttacgcctagaaacatatgtgactttaaactatcagataaagacttataaaacacacttttaaaaagtcataaacaaagacatctaataataatcaacccttaattacacaaaaaataataatgtaaaacaatattagaatgatcaatttttaaaatatttagtttttttttttttttggtgatagaaactaaaaatttagactataagccgataaagctgataagcccattaagtataatgagaccctagttttcaaatttggactagacaagcccatttacggttttggtgtaacaccaaaaaatactgttcaatttacaataatacccatatatcacttcatcttcctcgaagaatcttcataatttttaattcatcctccattagaatccctagggttttcttccatacacaatcagactcaacgataagtaccaatcggagaagagatcacaagtggatgatg

SEQ ID NO: 26846 - DNA, 3003 bp, Unknown
  misc_feature (1)..( 3003): 2750-1469P.txt file - cDNA_ID_2716420; gDNA_ID_2213669; Annot_ID_132756
aagaagcgagctgttcttaaggatatcactaatgttacctgcgagaattcttacacaagttgcttcagtgttgcggttgttaactacacaatgcagcattttagaattgctaagtttatatgacaagaagtatgtttttgctgacaattgttgcttcttctttttacttaggtggagaatatcaagcagataaagaagggacgacagagttcttcttcttccaaggtggcatcttcttcggctacttcacaagttacagatgcaaaggtagaagttgtgtcaaattcagcaggagcaagcttgtctgtttttacagatacaagcttaggcacaaacgaaacatcctatagcattatcgcaaagccaagctccagatcgcctccaagaccctttgggacaggtgaattttataaatggtcatttactgaagcttgagtgggcaatgtataacatttctgatgcatctttattcttgcaaatggtttacagttgagagaagttgtggtggagcaagtagcccgaaattcgttgacattgattcagatgacaaagatcctctactctgtagcctttatgcacctgacatctactacaacctgcgtgttgctgaggtatttatcccttggattttgatatcttacgatgatgcatttgaggcatttgaatccttacgacttgtctacttatcagcttaaacgaagaccatttcctgattttatggagaaaacacaaagagatgtgactgagacaatgcggggaattcttgttgattggcttgtagaggttagttctctacttccagtttgtttgttgcttacttatgaagtctttttgtgtagcttctcacaactcaaaatttcaggtctcagaggaatacacacttgtacctgacactctttacctcacagtgtatctcatagactggtttctccatggaaactatgtggaaagacagagacttcaattgcttggcatcacttgtatgctcattgcttcgtaagttcctcatccacctaaaatcaaataatgctctggtctgaacacaacatctaaaagagttcttgcaggaagtatgaggaaatccatgcgccacgcattgaggagttctgcttcatcacggataacacttatacaagagatcaggtcctggaaatggagagccaagtactcaagcattttagctttcaaatttacacccccacttcaaaaacattcctcaggtaatcttaccagacagtgcaaatgctttatcatgtgttgttgctttttagtctttggtgattcagagtattcattcatttttgcaggagatttcttcgagcagctcaagtttctttcccggtaatgtgcttttcttttatcagatcagatatatctattgctcataaaacatgtagcagaaagattgaaactttgttggtaatttgtctgcagaatcaaagtctggaaatggagtttctggcgaattacctaacggaattgacgttaatggactaccctttcttgaagttccttccttcgatcatcgctgcttcggctgtttttcttgccaagtggacattaaaccaatcaagccacccttgggtctgtaattgaccaactatcttcttcattaagaaacacagcgaatcttgaatctcactcttgtttactttattttatgaacagaatccaactcttgagcattacacaacgtacaaagcctccgatctcaaagcatctgtccacgccttgcaagatttacagcttaacaccaaaggatgttccttaaactctatacgcatgaagtatagacaggacaaggtattaaaaaattattaatcttagtttggttttcttaaaccgaatgaagaaatctggtctgtttcggtttaacagtttttttttttttttttggcaatttacagttcaaatccgtggcggtattcagttctggagagctaccggacaagctattcatctcctaaccgatatgacacacgaatctgtagtaacatttttctgatggtccacattcatctgtctgtcaaataaaacagtgtcttcccacggtctctcatcattaccaagtaaccggattcggtgttagttcggtttagttgtagacaggtttggttctttcaaaccggacttgttcttgtcggtaacacgagttaattgtagtggaatgtacatttttcccccggtttattcaaggcaatatctggtctgcttcgaatattttatctttttattacagttgacagagagacaaagcattaattacacattatccaacggagaaattgtgactcacatagtatgtggcaagaattgctttttcgttttacgaaaaaccaataataaaaaattatcaagttggtcttcttcttcctcgttgctgatgtgtcgctctgcttgagagagtcagagagtcaagagagaaaaggggtcgagaatggcggtcgcaatatctgggagtagtttgatatcgtcgactcttcagcattataataatcggatttatatccgagattatccgattccgtgtcactcttctaatccaatttgcaattcttttaatttcaaaagacgttcgttctctccttcttcccccaaatttaacgaccatgtcgttaacccttcctcttcttatttatcctccaagctttctccaattcgaacccattcctctttcgctggtaaacgcctccaaatataatctcttttcttttcctcgcttccttctaatttttgaggtttgcttttcttttcttttgatgattgtttggctatttcgtaaattttatgcaaaattgctttagaatttcctcatgagattgttttattactctcctcgacgttctctggttgttttgttctcttgttgttgttgttgttaagggtttgattgtttccattgtgttggtttggctctgcaacttcaggttttcagattgtgaccttctttttttaattacgtgtgtagcgtgtggctgctcctggattcaagacaattcaatg

SEQ ID NO: 26847 - DNA, 3000 bp, Unknown; identical to SEQ ID NO: 10700
  misc_feature (1)..( 3000): 2750-1469P.txt file - cDNA_ID_2716430; gDNA_ID_2213669; Annot_ID_132752

SEQ ID NO: 26848 - DNA, 3000 bp, Unknown; identical to SEQ ID NO: 10700
  misc_feature (1)..( 3000): 2750-1469P.txt file - cDNA_ID_2716430; gDNA_ID_2213669; Annot_ID_182219

SEQ ID NO: 26849 - DNA, 3003 bp, Unknown
  misc_feature (1)..( 3003): 2750-1469P.txt file - cDNA_ID_2716442; gDNA_ID_2213669; Annot_ID_132748
ttcctccctcgttcctctgtagacactcgtgctgttttgatatgtgatgatgacgtcgagattgaccagagatcgttggagtttgcgttttcagtgtggaagtcgaatcctgatcgccttgtaggaacgtttgtgaggtcacacggtttcgatttgcaggggaaagagtggatatacactgttcatccagataaatactcgattgtgttgaccaagttcatgatgatgaaacaggattatctgtttgagtatagctgcaagggaggtgtggagatggaggagatgaggatgattgtggaccaaatgcgtaactgcgaggatatactgatgaattttgtagctgcagataggttaagggcagggccaatcatggttggagctgagagagttagggattggggagatgcgcgtaacgaagaagtagaagagagagtaagagacgtgggattgagcagtagaagagtggaacataggaagagaagagggaattgcattagggagtttcatagagttatggggaagatgccattgatgtatagttatggtaaagttgtcaactctgttggggaacaaggattgtgtcgtaaagccggcaaacttgtcttttgtgatcgagattgaccgttttttttttgtgtgtgtgtcaaaatatcgacactaataggatgtgtaagctcatcatcgtgtaatagaaattggcaactagcagcaagttaacaacatggaaaccaagttttgaaccaagcagtaaaaagtgtaaatttgagtttcgctaaaagaagaagctgggcttcgagaatattgtccgtttgtattgtaaatgggccttacaaactatacaggccgcattaacaaaatggaatttcaaattatgaaccaaactcaaattacgaaaatcgtaactaggattttgtttttttttaatataaacatagattgaaaagagatgtattagtctttttcgaaatggtaaatttgtagcgtgtgggcgttactcactatgtgatcatttttgtataaaaggaaacaggaagcttaataataagttcaaaaatggcgtggcaaaggcggagccgtcggaggatttttagtttacgagaaaaaaagaaaaagagagaaatatctgaaaaatacgggaaagatgcaggcagctgtcacagccgcaggtaaagagaaggtgtgtgacgtgtctcaataaaacaccgtttctctctataacacgattctgtcattatgtgtctgagcaaaagtgcctccttatttacatctctagaaccgtttactattggccacgtggaagatatcggtaccgttgcgttgttaaaaagggttactagtactcctcgtgaaatgatttggtcccacttcacaagtgttaatgtttctataagaaaaaaaagagaataaagaaagacagaatcgagaggagagagtatcggatcttcctaagccataaacaatgcagcaatacgctccatgcctttggatatttcttcggcaacttgtaaaactgacaatcggagccgtctctttcatcccacggctctcaattatcctctcgaccatatatatcatcgacaacgtgtatatatgtgtttaccaaattatgttttttattttatttttcaaaaaattgcactattaggtggacctacatatgggttcgattcgactccaataaacaagctaatgatgccgcccgatgaccattcaaatattgttggtagtggctttctcctaaatatttgcattttcttaaaagaccctctttgaaaaaatcataattgaaacacgacgtatcacctacatgcacctcttgaaaaatatttccattttattctcaacgaatgtatttattgatgtatattatttcacaacgaaagttcgcatatatgttttctaattggtccctagaatataattatgcgatattaaagttggatgcaagggaaaaaaagataattctgaaaaaaagataattctgaaaaggataattctgaaaaggacaaaatattcctctagaatgtataagagttggtcattttttttttttggggtgaaagtaaagagtttggtcatcttatttcgtttgacgtccttattttggaccgccgtcggaaataagcggtcaactctgaggaggatgcaaattcttttacgtttaaaaaaggggaaaaattgacatcaaaacaattgagtgtagatgactactttattattgaccaattacggaaattcataaattgaaatatatattttgttttgacattggccacattacacgaatattttttttaatgaaagtttatttttaataagttttttaaataataataataattatatatatattttttgcatttgtacccgaacattacaagttatgtaaaagtcgatgaaggcactattttaaactccctcagattttgaaaagccttgaaaactaatattttaattttaaaaacgacacgtgatttaatatagataaagtaatagccaatttagccaccaactcaaagaaaaaagttgtagccaccaactacaaaacctcacaacaacaaaaaaaaaaaaagaagaagaagaagtaataccaaaaggtcattacagtcatttgaagggtaccctcgagactatttctgtgttggctaccatgaaaaagctcacatgcctcaacagtcaacaacaccaccgtaaattgatctaccccgataccaatttgataaatgcgaaagattagcctttccttgcattaagcacaagttaaaacagtgagcgttaccacatttcatttacaagtgcaaaagaaaatttcaaaaaaatcctttccttttaccggatatatacacatcaccacatttgttaatattcaattggcgatactatattctttcattgcactaaccaaccagtctcctttatcatctctccatctcatcatcctcctccatttctctcccattttttcttctgtgtatctgcgggagagagtgaaatagagagatg

SEQ ID NO: 26850 - DNA, 3003 bp, Unknown; identical to SEQ ID NO: 26849
  misc_feature (1)..( 3003): 2750-1469P.txt file - cDNA_ID_2716442; gDNA_ID_2213669; Annot_ID_182214

SEQ ID NO: 26851 - DNA, 3000 bp, Unknown; identical to SEQ ID NO: 10753
  misc_feature (1)..( 3000): 2750-1469P.txt file - cDNA_ID_2716466; gDNA_ID_2213671; Annot_ID_132808

SEQ ID NO: 26852 - DNA, 3000 bp, Unknown; identical to SEQ ID NO: 10754
  misc_feature (1)..( 3000): 2750-1469P.txt file - cDNA_ID_2716474; gDNA_ID_2213671; Annot_ID_132806

SEQ ID NO: 26853 - DNA, 3003 bp, Unknown
  misc_feature (1)..( 3003): 2750-1469P.txt file - cDNA_ID_2716478; gDNA_ID_2213671; Annot_ID_132804
agcggggctaaactgaaaacacatgaaagtcaaaggagtagatgcgaaacgctcccccagtaattagcggaaatagaaaataatggaacgcaacggctagtgatctcaacggtcgaaaatttaaacttttttataataattgacagacctctctcttttgttaaaatcctaaccttgttctcacattaatcctccgccgagattccttttgtcttcttcttcttcatcttctccatttcaattacaaagatgatgagagatgttttcaggccgactaaatcagccccttgttctcctgcaaagccacttggtatctctcgcactcaatctgaatcatttcatgctattcacaaagttcctgtcggagacagtccttatgtcagagcaaagaatgttcaggtgatttgattatatcccttctatagatctgaatttgtgtttgatttgatttttgttctgtctctgattgttgttttatggatcagttagtggagaaggatccagagagagcaattcctctgttttggaaggctattaatgctggagatagagtggacagtgctttgaaagacatggctattgtgatgaagcaacaaaaccgcgctgaagaagccattgaagctattaaatcactcagagttagatgttcagatcaagctcaggaatctctcgacaatatcctcttagatctctacaaggtccgtcctttatacataaccctgtttcctctgtttcgtttttgcatttggtttgattctgtattgaaatggatttgttactgcagagatgtgggagattagatgaccagattggacttttgaaacataagctcttcttgatacagaaaggactcgctttcaatggtaaacgaaccaaaacagctagatctcaaggcaagaagtttcaagtctctgtggagcaagaagctactcggttactggtaagcagcaatttcaaaatgtgcattatgtttagcaattaccaagtttgtgttaattcttaattggatgatgattggtttgaaacagggaaacttgggatgggctctgatgcaacgagacaactttgtggaagctgaagatgcatacagaagagctttatcaatagcaccagacaacaacaaaatgtgtaaccttggtatctgccttatgaagcaaggaaggatcgatgaggccaaagagactttacgacgtgtgaaacccgcggttgttgatggccctagaggcgtggattcacatctaaaagcttacgagagagcgcaacagatgctgaatgatcttggatctgagatgatgagaagaggaggagatgataaggttgaacaaagaaggctctttgatgcaatctttggatcttcctctatatggcaacctcagccttgtagtgagcagactgtgaaggctaaaccaaagcctggtttaagcaatggtgatggatacggtgatgagaacgtgaagatgagtgtgaatccagtagtagtaaacccattaagggttgatgcaaaaccgttcttctcttcgaagttggtcatcagtaacaacgagaagctgaagagaacgagatcgtcgagccaagggatggggatgttgagtggtattggtggtgatcatgagggagagacaaacacaagcacgagaaggagattgtcaatggagaagaaagcaacggagtgtggattaccagacaataaagactttgaagatgcgatcatggctgctgttttaggaacagaaaccaaagtggacaagaagaggctcaaggtgttccaggatatcactttgtgtctcaatcagagtctctaaccactcttatcattttatcattctaatttataatttagtcaaggaatcaaaaaaggagatgagcttaattcttcttggtaattttattaatgtttttgtcagctttaagttgctgccatttttttcacaattattgtcttcattgaccagtaataaaagctgaagttattattttccttgccattctacaaatatagttattgatcaagaatagtgttgtaaaatgttactaaaatctaatgagatagagagaaacaaagaagatgaagatgacatgagtggttaccatgaatatcccattaattaatccatcagaatcttatttactgcgttaccattaatcagatggttgctcttactctttttattcaccactcactcaacttttgtggtcaagtttgtagcaaattaggggtaattagtatccattaaaccaatcatttgtatctatcaatttggactcttctgcttccaatttgtagtaacgcttacccacacttttaattcggccaaaatacatccgttgaaattgtataaagttccggaagtgcccctcttattttattaaccatggcaaatgaaacggtgtaaaaacttgtttttttcccacttaatctctctctatttgaaagttatgcatttttggtatccgcattaactcgagtcttttaaactttgactgtcagaaaaaggcaaaaaaggtaaatttgttttgataattccatggtacattttgtaatagaattgagaaataaaggatattttagtcaaatggactgttttggtttttggaagaaaagaaaaaagaagagatttaattggaggaaagggctctctgaccaaagcttaaggagagtgtgaggttaaactgaaaaaagaagaatcccaaattccaactacattcctcagggaagccaaagtggccttcacaatcctaaagttaaaactcttgagtgttttttttcagatcaagacaaagtttagatcttttctttttggtttaattgttttgacacaaacgaggtaagcacaagcagaagaagaagaagatagagtttgagttcaaattagatttgttgagaagaaaaagagtgatttttgttttctgatgcatggtgaagaagaagaagaagaatagtgagtgagagaaaaagagtgattttttcatttttcagacagagagtgagtacttgaagaaatg

SEQ ID NO: 26854 - DNA, 3003 bp, Unknown
  misc_feature (1)..( 3003): 2750-1469P.txt file - cDNA_ID_2716482; gDNA_ID_2213671; Annot_ID_132802
tggagttttaggccaatgtagctcatcttgggcccagtacagaaataaatccagtgatgattctttctgattggctggaaggtgtgtgtacgtgaacctgtccgcaggtgattaaaacagagctgggcttttggcttgtcgcctaagtcgggaatcgtttactgtgaaataaaaacgagagagagtttttgaagaagaagaaagaacactcacaagatccagaaaaaggtaaaagatggcgagatacgatcgagcaatcactgtattctcccccgatggtcacctcttccaagtagagtatgccctagaagccgtccgaaagggtaacgccgccgtcggagtccgcggcacagatactgtcgtcctcgccgtcgaaaagaaatccacccctaagctccaggattccaggtattgctccgatctctaccgatacaagatgcttaaaccggatttagtccatttacttttgtttctgcactttgattttggttttaagcttcacctggatagctcgcttgatttactcaattgctacttgtatgatcactgtttcaatccttctgaactaaatcctgatgttgggattttgtatcacttcgtaattgcgaatctagtattgttagatcgtagaatctgagctgaaccctagtttaagtctttttctctacgagtgtacaattacagttcctgtatctcagacgtgtttttttgtataagaacacgtttttggttatactctgcaaattgatcattcactgcgtaaaaatataattttggtgttgaacttgctgaaatctaagcaatatcgtcttcgtatctgttggctgagctcttgctccaatagatctgagtttttttacctattgttatccgtatataggatctggttggtgttccttcccaatcatatgagttttgataatttttttgcttctcagatcagcaaggaagatagtgagccttgataatcacattgcattggcctgtgctggactgaaagcagatgctcgtgtcttgataaacaaggcgaggatagagtgtcaaagccacaggcttacgttggaggacccagttactgttgagtacattactcggtacatagcagggcttcaacagaagtatactcaaagtggtggtgtgaggccttttggtctttccactcttattgttgggtttgatccctacactcgtatacccgcgctttatcagaccgatccatctggtacattctctgcttggaaagctaatgcaactgggagaaactctaactcaattagggagtttctggagaaaaactacaaagaaagcgctggccaagaaactgttaagcttgctatccgtgctctgcttgaggttagtttgctctatcatgttctataactaaaccttgtagttttcttttgagctattgtcggggtgccctgttagtgaatgttctataactaaacctagtagttttagttgacaatgagatctgacctattaattattttgctgcgtgacccggtgattttgtgagcaacatgccaaactttgaacctcattatgattcttcattatttataggtgtggctttaggttaaaagtgaatgttagagaatgttaaagtttttgaaaatgtagaagaccttactaattgagttggattataatgttagatgagcttacttagcaaacgcacaagtagtggtggaacttgtaaagaagctgaaaaggatttgcattttgcaggttgttgagagtgggggaaagaacattgaggttgctgtaatgacacgagaggaaggtgttctgaagcaactagaagaagaagaaattgatatcattgtggctgagatcgaagcagagaaggctgcagctgaagcagccaagaaaggccctgcgaaggaaacatgaaccagatcttaaagtagcggtctcagattatgagttgtaatgctggttcaaagtcagggatattcaagggttgaatagaaaatctagaccgcatgaaatggtttgttggattactagcctatttgacactgttgctttaaatcttaaatgacattttagcggagtttcgatacttgtcagttggaactatggcatgttcagtattctagatgactttgcatttgcgctcaagagttgtagattttgattttggaaacgttgtttcttactaaacatgtctctcttcttattatctccattgtgtaacttaccgtttttaccatctttgtacctccattaacttgttcaccaacgaataacatgaagagaacaacattacaaagtggaactgacataaactatgatcaccaaagtccataagactgccagcaaccctgaagatagttagttgtagtttgctgaaccacaatggttttgaatcaaacgaaattccattaccagacaacaagatgctagccctttcttctctttagctttgtgtgtcaccattgagacgattacctcaaatgacgtaaaggtatccccaataaggcaataacgtaaaggtaacgttaatgatgttaaaaatcttgaaaaacaaaaaagacgccgttgccggggatcgaacccgggtcacccgcgtgacaggcgggaatacttaccactatactacaacgacctcgttgttaggatatcaaataacatggtattaatacaatagtatacaaagatttttctaaaagagagttgaatcttgtgtctaaaggattttcgagttcacaaaaagaatttcctcgctctaccgccgccgtctctcttctctcaggtaagctacttcagtttctctgataaacctattttgctctgttcttgtccgaaactttaccgtatctagtcgatatctagtttaggtgagttatctgttaaaagtttttacctttgagtggtattgtcggtttgtcgtctagggttgcattcaatatcacagcaatttgagaaattgatattttattcagcaaggttgaatcatcagagaagaaagggttttacactgcggcgtaaaggatg

SEQ ID NO: 26855 - DNA, 3003 bp, Unknown
  misc_feature (1)..( 3003): 2750-1469P.txt file - cDNA_ID_2716486; gDNA_ID_2213671; Annot_ID_132801
ttaaaccggcgggagtacacttttatttatagtctatttttacgccacgtcatctctaccttgaaaaattgaaattcatcatttttcttcctccttaagattttttttttttcttttctaattaacgacaacacgacgaagatgaatccttctcacggtggcgacgacaagcaacgaccggcgatgtatccccaagttgatcaatccattcctgataatccttttgcttctacaaatccttacgtcgcttcttcaccttatctatatccttctctatcctctcataatctcggacctaatctcttcccagaccacggagatgcatccaacgaccaatcaccatctgctcctcctcaggcgacggaggaggttctcatccgtgttcccggcgctattctcaaccttatcgacaaatcctacagcgttgaactcgcgtgcggtgatttcaccatcgttcgaattatccaggggcaaaacattgtagcggttctagccaatgttggaaatgagattcaatggccgttgacgaagaacgaggttgcagctaaggttgatggatctcactatttcttttcgattcatccgccaaaggagaaaggtcaaggatctgggtctgattcagatgatgaacaagggcaaaagagtaaatcgaaatcggatgatgagattcttaattacggattgaccattgcttcgaaagggcaagagaatgtattacttgtgcttgatcaggttttacgagactacagttgtttcacagagcagagaatgtctgaaaaagccaaggagactggagaagaggtgctgggaaattcagtggtggcggacacttcgccggaggagcttaagggtgagagaaaggatgttgtggaaggtcaatgtgcggcgtattggacaacacttgcaccgaatgtcgaggattatactcacagtactgctaaaatgatagcttccgggtcaggtaagctgatcagagggatactgtggtgtggggatgtaactgtggagagactcaagaagggaaacgaggttatgaagaataggcttagtcgtgctgagaaggagaaagatgttagccctgagacactgaggagaatcaagaggtatggttatacttaggaattttgcatctttgaccttgaaaataactgcttaggaatctagtagggattctcttatctggttccttgtttcatgatcattagagaactgagtagtaagggatgattattgtttgcagaagaccaattctatgagcagtgatgaaatttcttgtttaaaaatgtttgaacattgtgcattctcatggtagtatatcttgaatgaaatcaatttttatgcctttgcttatctccctcatgtggtttctatctaaagggttaagagagtgacacaaatgacagagaaagttgccactggtgttctttctggtgttgtcaaagtctcgggattcatcactggttcaatggcaaactcaaaagctggaaagaagctttttggtctcttgcctggagagattgttctcgcatccctcgatggatttagtaagtagattacttgtttttggtttctcatatttcctatcccatgcttggagggtcataaaagcttcttgattcacgagttgccttgctttctttcatctcacttgaatacatgttttgacatgaccagcattacaattattgtttatccgactttccctctgatggccattcccataatttttccaatttttcgaatatgacatttagcagaagttccttgatatagtgtattagtgcttggatctgcttcttgcattgaacaagttagtctggtggactttggagcattattctttttgtgggtttttaatttcaaagttaccaaatgttttgtaatcgctggcttcccttatataccgaacccttttttgtttaaggcacatgggattagtacccttcttttcatgtttacttcttgttgcaggcaagatctgtgatgctgttgaagttgctgggaaaaacgtaatgtcgacttcatcaactgtcacaacagaattagtcaatcacaggtattgattagcaaaggcatatataaacaatcacatatctccgcatgagtgatcttcagcaagagtgatcaaagtttccttagatcttaaagaaacctcatggattctgtttcgaaattacaggtacggcacaaaagcagcagaggctactaacgaagggctagacgcagcgggacatgcatttggaacggcatgggttgctttcaagattcgaaaggcatttaaccccaaaaatgtcataaagccttcatcattggccaagtctgtttcggaactaaaggctaagaaaggctccaagtaaacactaaacagccttcaactgttctgtgttcatctaaacttgcatttagtttttcattttggaaaagtatatgaagattgattgatgtaactctatatttagttttctgtgtatattgtgattctatgtaaactatataaacagtttcttccaatcttctcccatttatgggtttgatttgtaacttcttaatgcatcgagaagcagtattagtactctttatctttcttttgtactgctatttcttaccgctaactctcatctctggtgacttatcctgccttcgtttaccttttttagtgtttgcttagaaacactaattgcacctatgttatgtattctaccagattaatttgacaaaaaacaatgttaggagttttaatgttttgaagaagtgggccagatgtttggagttttaggccaatgtagctcatcttgggcccagtacagaaataaatccagtgatgattctttctgattggctggaaggtgtgtgtacgtgaacctgtccgcaggtgattaaaacagagctgggcttttggcttgtcgcctaagtcgggaatcgtttactgtgaaataaaaacgagagagagtttttgaagaagaagaaagaacactcacaagatccagaaaaaggtaaaagatg

SEQ ID NO: 26856 - DNA, 3003 bp, Unknown; identical to SEQ ID NO: 26855
  misc_feature (1)..( 3003): 2750-1469P.txt file - cDNA_ID_2716486; gDNA_ID_2213671; Annot_ID_182314

SEQ ID NO: 26857 - DNA, 3003 bp, Unknown
  misc_feature (1)..( 3003): 2750-1469P.txt file - cDNA_ID_2716508; gDNA_ID_2213671; Annot_ID_132791
ctttgttttcgagagattccaaactcctcccaatgcagtccttgtcaaaacagcagtcacgtttgcagttcttggcgttctaaccgttctgttcccgacagaagaaggaccgaccttgcaggttttgttatcactaatagctaccttttacttcatccaccaaaggctccagaagaagctctggactttcctttacgggtaataagctgatcttaattgtaaaaccgttgctacctacttgattagaatccacacctgatcaggttgatattttgaaacagagcgggagctttcatcttctcgtggctggttgggactttcttgatggtatctgtgatcccaccgttcatcaaaggaccaagaggttttgaagtcatgtcttcgctcctaagctatgttttgctttgggtcgcttcgagttacctccggtagcgtgctagcttttttcttttccccgtcttttgggccagaaattcaagtgttatctcggatatatgaaaacacacgaacagagaaaaaatgcatcattttcatgtgacagagagagagagagagagagagatatgatttgtggtcttggagttgttatttcacggagacctcattaactttcaaagctcagtttccaagttgtggctacaaacaaagaatagtaagagttgattacggaaattagtcggatactagtctgatttcataggaattaggaaacatggcctcatagcacatcatgtgctgtctcatacataataactatggctgcatgattttgtccatggcctcattatatgtgcatggccctcttatttatttctgtgtctaatttatgtatatctccaccgaaataataaacattttagatcaaaaccatttgtcagcctcacgattaatttttttctttcttatcaacataattctttttttttggcaatgtacggccttccaaactagtgaacgttgtaaaattgggctatcattagaagttcaataatttgaaacgctaaaaaggttggctaacgcaaattttggtcgtttcaaatataaatataaggtttatttattaattaatccatctagatgattaactagattggtaacgacgactaatctttagacgatattttcattgaaccactttatgtatgttagtaagaaaaagcaaatgcacatgccttcatgtgctctgcttcacttatcaatagtgaactaaaaattcgttaaccataccttaaaaacgcgaaaaatgtaaataaatgcttgtataaaatagttgcttgcaaaatcatataatttattgtgtggtactgatgtgatgtaccattaattaagatcgaaataatgtgtgttcatcataggtgaccgtttaatgatgtgattaatcaactttagactgattttggattaaaacattattattagataatgtgcataattattttttggaataagaaagatatggcctagacaaagtcattattcttttttgaaaaaaatatgtggataataaaattgagacacatttatggcatatattattaatgaggagaaatctttgaaattttgcaatttggttattaaaaaaattggcttcatttggtaaccttttaattaagctgaaaccaaatgtagataaattacagaagctgatccatttttttttattttttttttaatattcttggacaattgtctgatttacgagcaacaagagagagtctctctacacaaaaaaaaaatcattagctgctctaaatgatgctttctttagcgcgctaatataattagctaattccttaattgtaccaatgaagacgaagaaaacaaaaagccattaacgatttaacagctccacaattccgactttttttgaaaacacctgaattattttttatcgctgtagcgaaagcgaaataggtcgcctgagaaatctctggtttctccgaatcgcctccttagcatcgttcctccgtcggaacaccgtcgcttctgccattgttctccatctcgcatttggtctcgtttctcagatttccatacctcattcgctgattcgcaggtgagaacaaattcgttgattgttcttgatccctttaccggattttatgattttgtggcattggttcgtcttaatgctttgcggttccggtttctagtagaactacgcacgatggttggattttggtagttttggttttgaattttgtgagattcgttgatttgaagttctagtgtgagtctgtgagccggtgaaaggaatttctgagctcctcgccgaaacttaggttcatgttccggcgaggcatgtcacactattgaaaggatttgaaatttgtttgggtgtaattgcgtcgtgttcgttattatattagtactttcttggatcttacggctaagtttgtgttggattttttgttctttgttgtttaccagagacatgtgtaagtagtcacaaactttgtttcctcactgtgcacatggagttaccaaagattcttggctccacattgaacattctgcagaaacggctgtgattattataatatcaaatctgttaaggtaactgatttcttttgtttaagtgttttcttgtggttttaggcaataaaatatgagcgtaggcttgaaacttatgcaacatgcaaggaagactttttgacagactgtttaggagggggaccattgcgaaaacacacaaaatcctctccataatattatatgaaacttgggtttctttatgtctcaaacaatgatgagaaaaaccatgttactgatttcgttgtcattttctgctgagatattttggatataaaacacgtggatagagacaatgttcttctgccaaagacatgaatatagacaagttgataagtagtctgatgatctttagtgattgatttgtcctcataattcctgttcgctctctctatatgtatgacattgctttgttcttgacctggtttcttttggggtaggatgcgggaagggaggtgacgggtgaagatg

SEQ ID NO: 26858 - DNA, 3003 bp, Unknown
  misc_feature (1)..( 3003): 2750-1469P.txt file - cDNA_ID_2716512; gDNA_ID_2213671; Annot_ID_132790
acagatggtcacattgttttaccattaatgtttgaatttgttctatcaatgtttaatctttttaactattgcaggggctatccttcgagtttccaattccaaaccagtacacggactgctgccatgatggagaaggtttgttcttctccggactccagtgaaattttgtttatattttttgtcttgtccgatatctaacttctcagatttttttttctcctttacaaagcggcactaccgttagagtttccagatggcaccacaccagtaacatgccgggtctctatatatgacaactcaagtgacaaaaaagttggtgtcggaaaattgatggatagagcttctgttcctcctctacctcctggcagtctgtatatggaagaagttcatgtcaaggtttggcttatcttcatttacactcgttcctctttgtgtattttaatatctcgtagcctaacttaattagcagttaaccggttccttactcttcgcatgacttaatttaatatttatgcagcctggcaaggaactatactttactgttggaggccagcatatgccttttggtgcatcaccacaggtaaagtctgtaccttgtcttattttgcttcttctttgatctttggaactaatcatttcgtgcttcgagcaggatgtatggactgaattaggtcgaccttgtgggatccacccaaagcaggtgatctataccgtatctctaaacttgtttgtatatcacgatcagatgcttccattagcttctcttactatgttacctgcgttatctgttacagttcaatactcaactggacatttgtatttctgcttctgaattgtcctttgctttccaggtagatcaaatggttattcattctgcgtcagatcctcgaccaaaaacaactatctgtggtgattacttttacaactattttactcgtggtttggacatcctgtttgatggcgaggtaggaaactcatcaactagagttatatgttccattcgtacgttttctttattcacaactctaccttttctgcagactcacaaagttaaaaagtttgttcttcacaccaactatccgggtcatgctgatttcaactcatacataaagtgcaactttgtgatttcgggtacgtaatacttatgaagcagctcatgtcagtcaatatattcaatactcgatatatgttgtctatttttccaacaaacctacgctttcatgtcacttttcagctggagcggatgcggcagaagcaaacagaagtggaaacaagatcactccaagcactaactgggatcaggtcaaggtaaatcttcagaccaatgtgataaaagcagaacagaaaattgaatgaaaaactagtctatgttagggcttgaccaattgttcgtgagagtttttactgacgtaaaatctctttaccatcccatcattgatggctctaattgcgtaatgggaagaaacttgggatgaagcattaggaaattgatctgaatagttaaatctgggatcagaacagattgaatgagtcatttctcatggaaatgtctttatgcttaggaaatactcggggaatgtgggccagcagctattcagacgcaaggctcaacgagcaacccttttggatctacatatgtgtatggctatcagaatgttgcttttgaggtaatgcatttttgtaataaccctagattcagtaactttgatccttgttatatacttgcagactgttaagtgaaactttatgttgggttaaaatatttgcaggtgatgaagaacggtcatatagccactataaccttgttccagtcatgatgcgtatccaccgctgaggtatatgcccgttactaattcttcgtttatgttgaatttggtcgtaatgaatattcactgtttggttttgtagaaaaaatggctcagattaatgtcttgtgttatatgctacttaacaaagcttcttacatcaatcaatgtctttgtaggggctcaagatgctatcttcaaccagactctgtaaatctaacgtcacaagaagctacgaaaactatcgatgataccaaaaacgacaaatgttgtacagttatacatttgtctagttactatcacccgggttataataacagttattctggttataattcttttcagactttattatgactaattatatatcatttatctgttaaaagttcataaaatagcctcatcatttgagttttttgcggtatcgataaattttaaggttttaaaaaaagaaattgaaaaaacaaaaaaaagctccgtcgccgggactcgaacccgggtctctcgggtgagagccgagtatcctaaccagctagactacgacggaatgttgcctactgatgacttaaattttatatagcacactactggtatagtcgagaaggttgtgcggtatctcttctatccgttgcgtagcaaggttttgtctttcgtgtatggttccgggaaggaaaaggggaagtggattgttttcatcggcgataagtctcttctcctctggtacttcttctttcgattctcttctcttttgtttcgggttccacttagatactctgtagctgctttcatttcagaattggcttttggttcaatccattggtagtgcgagaacttgaattccgaaatagttccgatttctcttcagattttggatgttatcttgctaattgagtttagaatccatagtaatagtgcgattattgatttagcggttgtttagggtttaagcctgtttttcatttgattttagggattgaggttggtggtgtgaggtaaagcttcggtagttagagatgaatgcgtccggcttaactgttactccgcccagatttcactttcgatggcgttctgatcgttttggtacatctcagagaagctctcaagcttttactgttcttagcaaattgaataatcgaaattccgcttggcctgttcttaaaaggtagtgttttttggttattgtttcatttagcatatg

SEQ ID NO: 26859 - DNA, 3003 bp, Unknown
  misc_feature (1)..( 3003): 2750-1469P.txt file - cDNA_ID_2716516; gDNA_ID_2213671; Annot_ID_132789
aactcgaacctcgattcttaaacctccatagatagctatttttaacattaccctcttgcttgtttagaaattgagtagctctaacctatgagcattaaccaacgcataatcgatacttagaatctcgataatgagatacagaacataatagaatatccaaaaaaaaactacgaaattaagctcttcttcgttgtgaaccaactaaaacatatggcaaggctctaatctcccactagagcatactatctaacagaattattatcactataagctaacaatcacttaccggcgatcacagagaacaaggtctccaccgtcgaagcaaataaagcaaacatcttcttccttgtcttccttcttcggcggcggtgggggtggacgaatatgcaacggcgtattagcctgtgcccttggaggcctcccccgttttcgttttattggggcagcttcatcaataactttaacctcttgctcattggacataggcacagcaaccgccccagcaaccgtggaggcaggtacagagagagcaggacttggttaacaccgatctcttcacattgatcaactctcataagatcgattcctctgacggaactctcttcgcgaccagccaaagaagccaactccggcacgccttgctggagttgcttctgttgattctccatgattagtgaagaatttgaaaaaattgtgagcagtacttgcagatcaactagtgaaatagaaaccctaatctgaggttctttggggattttggcgatgatgaatgatgatgatgatggagagaagtatgggtgatgtgtttagaaaacgaagactagtgggaagaaaaaatcatatggactttttttttcttcttctattcttttccacttctttagttcttactttgttatgaccaaatgtataacaaaaatgttgtcacttctttctgcttatagaatttttattatttcaaaaatactagtaccaatttctacagattccaaaaatactataatttctagatttcaaattcatttctaaaatcttatgttagatttcctagcttggttaaaccttcaaatatttatccaaaaataacatttgagttaagtagatatggaattccagcttattaggtagatagttattttcttaaaaaaacataggtagacatctatttgtggtgtccaatttagcaaaatatatggagcattttattttattatttaagaaaatatgatattatgtaatatacaatgttcatatacaataacgtaaaatttatcaacatcatttaaaaatcttacctacgtaaaattccttggccaaaaaatattatatagtattaaaaattccttggcatattcttgaatgttttgtaagaaaaacatgacaagaaaaaatgtaaatttggttacattccacgtaaaacttctacctacgtaaagttacttcacaaaaactaaaaatagaaaagttatttgtattcactatgaatattcttaaataccaacacacaacaaagaaatcatattcttgtatgttttaataagaaaactgtgatgcgaaaacaatgtaaattttgttaacagtccacctaaaaaccctatatttgtaaagttgcttagcaaaaaaaataaaaataaataataaaatagaaagttatttgcaaataaccttctacaatttgggtagttactatgatttttttgtttttttcaacttggtagttactatgaatattcttacatattaacaaacaacaaacaaacaaaaaaaaaaaaaaaaaaaagaatccaaccaagaaatcaagtgtggaggataatagaatttttttttgactcaatatgttctaagttttcacatcattttacgcatttcacacaattagtatcccaaggttgaagaaacaagtaccttaaaacatctatttactaaaataaaaacataaaattgtaacccaaaggagtgtaatctcatagaaatttcatgatttggtcatctatgcttgaataacttcattcgcgacactcacatggtattgtaggtaggctttgtacctttgttgggcattgttcacgtgcatgttagacttcacttttgttataaagttttgaactttgatctttttgtttatagtaatatattatccttttactatttctaataaaagtatacatcggtgatattcggagtcttacaaactttggaaaaaacacattttctgttaaaactacattttgtagatttatattttctttgaagttttcaaaattttgtagatgacatagctactgagattattgtagtcaaaattcaatttattttcttttaccttgaaggtactattcaatcgagtcaatatctttgatttatgatgatgctaagaagtaaaaaaagaaacgagctaacaaggaaaaaagagtacaatccaacgtgagggaatgatttcagatctcaaatttatttggttagagtgcttaaatatttgtcaccttacaaattaaagatttctaacacacaatcttctcaactaatgatgttaaccacaaaaccgtattaattaagtgtctgcagaacaacatcacataatttatgaattatttaacaaaacattaagtatatatctctaattatttttttgaaaaggtgtacatttttagtaaccagagaacaaaattgtaatggtaggcagctagagcatatttttcatatttgtacatttttacatggtcaattggtcattactcattagcttaattgaaattatttctgcctatatagcttaatttttcgtaaatttattagagggagtaggtgttaaattctgattggtggggaagtaccatcatatatggataggtcaaacaacaacccaaacccgacccgtgcagcaaaagtttgtaaaaagaggaactaaagtggacccgacttaattcagaacttcagaaatcagaaagcaaaaacagaattgtgtattattctcttctattcaggaaattgatccaacaaatg

SEQ ID NO: 26860 - DNA, 3000 bp, Unknown; identical to SEQ ID NO: 10738
  misc_feature (1)..( 3000): 2750-1469P.txt file - cDNA_ID_2716520; gDNA_ID_2213671; Annot_ID_132788

SEQ ID NO: 26861 - DNA, 3003 bp, Unknown
  misc_feature (1)..( 3003): 2750-1469P.txt file - cDNA_ID_2716528; gDNA_ID_2213671; Annot_ID_132782
cctctctttttctcctccacgtcaactctgattcccaccttcctctatttatttaattataaattagtcttccttatttcttcttaattagtattctcttatttttattactcctgaattctaaattatattctgaattcctgctatgtcattttcttttattttgggtcgaatatctatctctcattggcaatggttttgagatcattggcctattggcaatggtttagaattccttagaattattgtaacaatgatttcagaattgaaaaaagctgtttactaactccatgcattttgaatttatttgagggaagaaaagctttcgttggattttggagtattgattgacagaaagcgcctagagaattgagtgataagcaattttgttttatataaacacttgcccccaaaataaaaatattttttctttaataataaaaataataaataacgacttagaaaaaaagaagagaatgttatggacaaaaaaagagactgtggttagactgaaaaacgcgtgcagagaggccgcgacagtcttatcatcaattaaatttcttcttaattagggtatcctaacttgcattttactctcagttacgttctacacagtattacttaattattcatattatacacgtataggtttttaatgcatacgtgcaacgttgacatgtagaacagattttgaaaagagaaattgtttagtataagtgttgtttcgataacatcctaagtttcgtcatagtccaaatctactccagattcataggcttctcagttccatccatctcttattcaaattccatacaaattaaaagtttttttttgtgaaactccgttataaattttgtgtgttggttgctggttggttctgcctgaaactattattccgaaatgatgcttatacttatttgacatttatatatttttgtaatgtagcaaataaagaatagactactggagaaaaaaggtcttttttttttttttgtcaaaagagaaaaaaggtcattgtctcgattgtaatgtatccatcacaaccccttgaattaattgattccctctattaatctagtatactcgaatattttgtggttttttacttacctctaaaactatatcgatatataatgaacaacctaactattgttttcaaattgagagcaataataatcattcgattattaacttaaattattggatttgtaaattaaatcaagaaccggtacggaagcgtagggcggcgaggcaatgcttttaccctgtctcaaactattcattattcccattttgaatcttaatacttttgaaatgtctcatttaaccccttctacattagtcaactctctctactcttttggcaaaatccttttaaacgtccccatcttttactttatttttatttcatgtcctaacttttttatttatatgacacccatacatacttctctagatttcggatttatcgggacatattttttcgtgccgttattctcaggcaattcaaaggataatacctaaaaaaatactcagctaattataatgattagttaaattaggatccatgatgctcacggcacgggcatagaggtgtgtttgtctgtatataaattctgtaaacatttagtagtactattatacaaaaagataatgcagtaacatagggcacctcaacaaaatcgtacgtttgtctctctacaagagagagtatgtttacgtgcatttttatttatatataaaatattactgtgatatactactagtatatacagaaatgtgtatatcataatgtttttcgtttcctcggaaacatggacaaaagcatctgcttttcagctacaaactttaaacacttaatttaagccacaggtgcacccaaattaatattttttaaaagaagattatgggctaatggatgattaatgcctataatttgcaaatcctccttactttaaagtaattagttagattatttaatccacatgtttatctatttgatgaggatttttgaaaccttgaagtaccttacattttttcaggcatttttagtttgctgatgctcctaactcgtagacaataatatatttgcagcatttgtcacaattagtctcatagtcactcatatatacacaaaatgaaataaaaatgaatggacctatggacttttgacaaggttttgtagtcagttctagatcatgattaggaggtctaattaataggtcccgaaatatatatagaactatcttaggataatcaaaaatagtattctgataccgtaatgatattatttttactcctttttaaggaaaattagttattcacattccaccatttatacatataaaaatttcatatatgtaagaaaaaaagaagaaagaaaaaaagcgggtttcccggaatgaaaaggaccaagagagaaaaatccattttatgctaacgtggcagcataataaccgcccgattatatatcaacgataagagatgaattgttttcattttgtaacaacaaaacatgagagaaacaaaattatatttttgcaaaatctggaaaaacaaaacaaagaaacaaacaaatgaagaagagatgagaggagacagagaattaaattagaggagcagaagagagagagagagagatatagagattaataaggtcatggcggcgttgcagagcgcaagaaagatgatttaaatctctcttcttcttcttccttcttacatatctctgtgtgtttcttaaatactctctctctcgtaccgacaaacaagttttgctttttcatcagagtctcaaaaagctattccaacttcaatacactacaaacccagagaatgaattcaacctaaaaaccctagaaatcctctaagatctagagtgagaaagttagagtgtatagaactacaaaacataggatctttggttttgggttttgttccattttcttgattggttagtgggtgagtggtggttatgggtggtggttgttgtcttggtgaatg

SEQ ID NO: 26862 - DNA, 3003 bp, Unknown
  misc_feature (1)..( 3003): 2750-1469P.txt file - cDNA_ID_2716532; gDNA_ID_2213671; Annot_ID_132781
ttatagaccggaaccataacaaaggggaacaagttataacatgtcaagagtaatagaacaattaatccaacatcttaagagatatataagagtggaaagcttaagccaagtgtttggcaatggtagactgaagctcatctttcttggctccaacaactttgtccaaaatcttcccttccttcaaaaacatgaaggttggcatcgcctgtatcgcccaatcacttgccaccgactgttccaacaaaaccataaaagagattgtgatcgaagaaaacaatatctctcaagaagaagggaaaaatgttggtgaatgtaccttcaattcatcagtatcaaccttgaggaaaagcacgttaggaagtttcttagccaaatcagcaaagaatggagcgatgaaacgacatggtccacaccaagaagccgtgaaatcaaccaccaccttcaacaatataaccaatcatgaatcattttcattgaaaaaccatttacactaaaaacatatcatatcgtaagaattgtgaacattacatctatcttcagcgtaaacatttttctagggatcccttagtttcatagaattatcaacatgactcgtaatataagtcattatgatctcctaccaatcctaggatctaatctatggtaatgcagatccaagaattgtcataaaattcaaacatgaattcatacaaaaaagaatcatatcattacattgcttaagtatgagagatcaaagactctatttaaaaacgcaacccaaaacaaaccaaatcaagaataataacaaatccatatctcatcaaaaacaaaatgaaatcaagaaatttgggagaagaagattacaagagttttggattcattagccttctgaagctgctcgttccatgtctcaacggtgtggcaggcgatcacttgtccttcttccgaagccatcttctctctttttcttctctgttctgtttcttctcctcttgtgttttttttttttcaattacttagcatgcgcgtcacctaccaatcccaattttgcccgtcaatagtttttctcttctactttattcgacgcgtgattttgtttcccataattacacccaccaattgctactttccttctttacccaaatcataaatattcacacttttactcctcaaagttttacttgtaacaaattaaccacacacaaagcaaagttgtaaatatccatcgtaaaaagtaaaaaacattttgtagacatcatttgtacattatgattcaaatctacagctgaatcagtttcttgaaacaatacgttccaatgatgaaccacccggtaagcaaaaccactagaatcgagcaggaggcaatgaaagtccaaccaccgagtaagattcctatagtgtagactatgagtggaggcaacaaggactttactatagccgttttgttcacccaacgtcccttgaaaagcactagtgtcgcgagattcaccacgttccatccgcctgactttatagatagacggttcaggttgttggctacaaaggaatgacagttgcatgtgagtatgttatatgagtgatgttggtactcttgcgtgctttttctcagtgcatcatcccatgttggctctttctcatgactatcttcttcttgctcatatctcctctcaccattgaacataccagaactggaagaacgagatgactcctgattcaaatccaaggccaatatgaataaattgttactttgtatcaaggttgaaaatgaaagccggcatcttgcaaacgttaccatttctttgttgatttgaatatatcgagaaacagctccaaatgcaaaattatcaacacagacaaaattaggtcctgcaaagtcgaggatgacaccgtcttctctgcagataccgacgtggccgatgaagggaaccagccatgaaatgaagggaagaggtgtccaaacaatgcagcatggaaaccggtctcttttgggatcaattttcataggatccgataatccgatcatcatgcgatgttctgaatctgttgctgtctctcccatatccaaatccagttgagctcaattatttgattctctgtaagcaaaaaacaacacgtccagtgatccccatgtaagtaagattcaataaagcacttggatttgatatgtaaaagttgttcttaatactcgaatagctgatgcatatcatttacatcgaacccaaaacataaatgcatatcatcccatcatggaagtccgagttgggactgagccttccagaagcgataagcagctccttctagccctgtgctgctttggatttttgcatataccaagctactaccaattcattgattactggataaacttgaaacaagagtcgtctaattgatattcaatcaacacattgtgctaaaacactacgaccactacatagaaaagctaagtaaacaattctcgtagttctacgaatcgcgagtcttaaacactaaacgatgaatccatacgaacatggcgaacgagggatccagaaaacgccattaaagatacataatccaactagcaacgagtcaacatcaaagcatcttcatagacattgattccgaaactttttcataaagaatagatcaaagcatacataccagttcaagcgaccaggaagacgattaatcggatctaatacaatcttcaatcactgcctttttcctgggaaatttttgtttctctctcggccccaattttacgaacgatgacactaaagaacgtgtttggctccttgtttaaactaatcctctctcggatatcttcaccgtttcaaggatagtagtataaacgacataacgttcggtcaaagagaacaaaaacgtcaggatgttattctattaaacgtctgatatatctatacggcgtagttttgaagttgtcgactattcttcatcgttctctctgctctggtaaggagattgctgctacctactgatgcaaatctgccattgatacatctgcttgcggttagggcaaagatg

SEQ ID NO: 26863 - DNA, 3000 bp, Unknown
  misc_feature (1)..( 3000): 2750-1469P.txt file - cDNA_ID_2716536; gDNA_ID_2213671; Annot_ID_132780
gggcatgacactaagaattgattctctaaattccctgcactcaaacttcagtccagcaaagctttcaaattatgatagtgcaatagaaatctcttccgaaagaacgaaggaaaggttaactatttcgctcaataatcaatggagaacgaattaattttacctctcctgggtgacggctatttagagcatgcacatcaagcttgtaattgtgttgtggaattaattgtgatgcatctgaggtgtgagcttcaacatcctagatgagaagaacgaaaaaaatctatcaatctgaccaccaaatttgttgcaggtacgaatgtagttaaggaatatgcagataaagaagtgagcagaaaagaataaataactgacatcagtctttttactccatcgaagaaggccagtcttgccagcaaatgcatagacagaaaagtgacgcaagtttatggctccagaatcttcagaggcctgaaaggaagcttaaaattcttctaaactgtccaaacaaagttcttatgcacattggaacatgtataactacaaacgaatagctctttcttcagaattgttcagttctagagaaaatgtataaggaaactataaatatacacagctacgaaacagtccaaggaaactatcatatagtcgtacctgattctcagtagcacttcttctgtgttgatcagcattttgtgctgtcatgccaagttcctcaaatgggtccatgtgattctaaaacgaaaagaataatctattggtaacatatggaagatacataggaaatcaacagaggaatttttcatcctacatacatatggctgcatctccatccgtccaccaacaataaccaaacccgtatcaccatgcttcaatgtgtaattgcttatcgaaattgctatctctctatggtgtgcattatgtgggaaatcctcctgtcattccaccaacaaaggtaagcaaaaggagaatcaatactactgaaccaagacaaacttttatgcagaacgttagacaaagaacgaagaagataaaaacctgcagattcgtttcccacagctttttcaggttgtgatcaaagcagagcacagaccaacctgaggtaacaacgaccacaacctgcttctggggagttccatttttatagtacctatcaataacacctgtggccatggccacagcacgtctccctgacgcaacacggatcttgtcaggcaaaagagtgatttccgcaagaacacgtgcttcactaaaaccttcatccacacgcctggaatgaggctccagaacctaatccaacaaaacatcaacagtttcagaacttaatccaacacagaacagcaaaccatagaagagaaatgcataatcaccaagcctcacatcattagttcgacaaaaaggctctaaaacaataaagagcaatgcataagcactgaactataagctgcaatcattcgttctaacgaccgaaatagccagatagactctataaaaattggcgagaaagatcgaaatcagaaatgtttttacctacaaaagttagaaaatttcatatgatacctgaattttggcatcattagtagcaacgagaacctccttctttccatcaccattaagatcagctacaataggtggtgggagacgatcagcttcgtatttgactgggtattcatcatacaaatgaaaccatgcttctttgaacgcaaaatcaccctcgtgctgcaaaagtcatcaagtcccacatatcaagtaaacgcaccattaataagaaaattgaatccattggttccatctggaaattctacaaattcgctaacatgacactacttacggatcgaattagcagtctaagttctacccacaaaggaaaattcaaagctttctcaagtaacagatcgatcaatgattctagatgttcagctacaatttgattgaactaagaaagaataagaagacgattagtgtgtaaaatcacctgaagagtgaagaatatagcaaatccagagagcatcaaaatagccaaatcgcgtttcctcatctttgccctaaccgcaagcagatgtatcaatggcagatttgcatcagtaggtagcagcaatctccttaccagagcagagagaacgatgaagaatagtcgacaacttcaaaactacgccgtatagatatatcagacgtttaatagaataacatcctgacgtttttgttctctttgaccgaacgttatgtcgtttatactactatccttgaaacggtgaagatatccgagagaggattagtttaaacaaggagccaaacacgttctttagtgtcatcgttcgtaaaattggggccgagagagaaacaaaaatttcccaggaaaaaggcagtgattgaagattgtattagatccgattaatcgtcttcctggtcgcttgaactggtatgtatgctttgatctattctttatgaaaaagtttcggaatcaatgtctatgaagatgctttgatgttgactcgttgctagttggattatgtatctttaatggcgttttctggatccctcgttcgccatgttcgtatggattcatcgtttagtgtttaagactcgcgattcgtagaactacgagaattgtttacttagcttttctatgtagtggtcgtagtgttttagcacaatgtgttgattgaatatcaattagacgactcttgtttcaagtttatccagtaatcaatgaattggtagtagcttggtatatgcaaaaatccaaagcagcacagggctagaaggagctgcttatcgcttctggaaggctcagtcccaactcggacttccatgatgggatgatatgcatttatgttttgggttcgatgtaaatgatatgcatcagctattcgagtattaagaacaacttttacatatcaaatccaagtgctttattgaatcttacttacatggggatcactggacgtgttgttttttgcttacagagaatcaaataattgagctcaactggatttggatatg

SEQ ID NO: 26864 - DNA, 3000 bp, Unknown; identical to SEQ ID NO: 26863
  misc_feature (1)..( 3000): 2750-1469P.txt file - cDNA_ID_2716536; gDNA_ID_2213671; Annot_ID_182292

SEQ ID NO: 26865 - DNA, 3000 bp, Unknown; identical to SEQ ID NO: 10731
  misc_feature (1)..( 3000): 2750-1469P.txt file - cDNA_ID_2716544; gDNA_ID_2213671; Annot_ID_132776

SEQ ID NO: 26866 - DNA, 3000 bp, Unknown; identical to SEQ ID NO: 10769
  misc_feature (1)..( 3000): 2750-1469P.txt file - cDNA_ID_2716557; gDNA_ID_2213672; Annot_ID_132840

SEQ ID NO: 26867 - DNA, 3000 bp, Unknown; identical to SEQ ID NO: 10777
  misc_feature (1)..( 3000): 2750-1469P.txt file - cDNA_ID_2716560; gDNA_ID_2213672; Annot_ID_132839

SEQ ID NO: 26868 - DNA, 3003 bp, Unknown
  misc_feature (1)..( 3003): 2750-1469P.txt file - cDNA_ID_2716564; gDNA_ID_2213672; Annot_ID_132838
tataattgctctcgactatagttagagcatcttcgttggttaaaatacttttgtataatcataaacttttgtattcctctttagagatacattaatagattctttaacaagaacccttatatatcacttttttttttcctactcttttctttgttgtaattttaataaaggtatcgaaaccattagtggagactacacgtttccctctcacctttctagagtcaagagtgtcaccccttacacgtttaccttcatctcaagagtcaaggggggagaactcacggttcaactactatccatccctcacagtaagattttagctttcttattctcgaatcaaaatctcgatttatatatatctgaaatttgaatccgaccttgtctctagctaaattcaggaaagcaagattcaagtggaactaagtcatggcagagaagaccgagatattttcatcaccttcctcacctccaccatcattttacatggtagataagaccgggaaactttcatcaccttccttaccttcctcacctccaccatcatattacatgggagaaaagaccgagaaatattcatcaccttcctcacctccaccatcattttacagaaaatatatcatatcttacatcaatgagcaggtagagttagactcaagaagtgagaaacgagtgcttctcttggaatcagctggtaaggaatcttgttgcatcttcagagtccctaaaagcttcgcagaaatgaatcctgaagcttataagcccaaagttgtttccattggtccttaccatcacgggagaaaacacctcgaaatgattcaacagcacaagcttcggtttctacaccttttcttacgcacggcaagcgtggatagagatgtcttgtttaacgctgtagtggattgggaagatgagataaggaaatcttattctgagggtcttgagggaagtccacatgaactagtgtatatgatgattcttgatgggtgcttcattctcatgttgttacttatcgtgtcaagaaagatagaattgtatgagagtgaggatccaattctcaccatcccatggattcttccgtctattcagagtgatctcctcctcttggaaaaccaggtccctttctttgttcttcaaactttatttgacaaatcagagataggtgtacctggtgatctaaacaggatggcttttagcttcttcaacctctcaatggataaaccagaaagatattgggtcaaacacagaaacttcaacgcaaaacatcttcttgacctcattcgtatgagcttcttacctatggatggatacgaagatttccaactcactaagggtaaatctagaaagaaatcatcctccggtcttacattgctattgtcggctacaagactttctctccaaggaatagatttcagtttaaggagtggtgcagattcgatgttagatataaggttaaagaagaacaggcttcaaataccagtgttaagattggatgggttcattatctcaatcttgctcaattgcgtcgcctttgaacaattttacgcaaagagtaccaaccacataacaagctatgtggttttcatgggatgccttctaaacggcaaggaagatgccacattcttaagtcgtcgccggatcatagagaactactttggcagcgagaaggaggtatcaaagttcttcaaaactatatgtaaagatgtagtgtttgacatacatgcaagttatttacggaatgtgtttgtggaaattaacgagaacacctcaaaatggtactcaatatgtcgaagttttttactgtcaccaagaaattttgtggcattgcgctttcgtccaatttatcgattctaaataccattcttctaccttagcaacagcaacagcaaaaccgcatgatggaacgtcctccaggcaaagcaaacatgctcgagcttatgtagaaacaatggaattaaagtcgtttttatcttctacagaaacatcattgttccctgttttttatcagttgtgtaacttgtgttattgctatctttttcgttttatgatgttatcctatatatgtatttaagtattttgttactcttgttaatttgcatgaaataaagcttttctactttcctttgatgaaataaatttgactttgctttgtcttctcgattatcttgcgctatgagaagtcttgaacttgtcatgcagctgccctgacttagggtgaacgggatataacttcatgctaattttcagtgaagtccaaaactttatcgaagtcgagtctctatttttcttatatcaaaattcatcattttcattttataaagagagagttgttgcatttgatttgaatataggacaaaaaaactcatttttttagtgaaatggatttgaacgataacctttttaatttaacttaattttaatcgataattattattaatatataatcataaaacatatacacaaaagaaaataaaagtaaaagtggtaaacaagccaactaggatgttgatgattactatgtaataaaatggtaaagtatgatacatgttgatatttactaaacaaaattattgattacatattgaattaatagatagataaaagaaaagattaggtgaagtgttaaaaaaataaaatcatagtacatagtctaaaacaactggcacattattaaaaaaactacgtacaaaccaatcaaaacaaaaagttaataatacacatcatgttcccacggtgacgttccaacagaaacacatgagcccaacgcataaacaaaacaaaaaaaaagacaaaccaatgaaaccaattttaactatttaaatttcaaaaagaaaagaaaaaacacttgagggtcaatgatgtaaggagaaaatgggttagcaattatccattggatctatgcttgcttgtacctcacaaaccgcaaaatctttcttgaagtcgtcttaggttgaccaactaaaaaaagcgagggatactttggtttcgtccatttttcacaatatg

SEQ ID NO: 26869 - DNA, 3003 bp, Unknown; identical to SEQ ID NO: 26868
  misc_feature (1)..( 3003): 2750-1469P.txt file - cDNA_ID_2716564; gDNA_ID_2213672; Annot_ID_182379

SEQ ID NO: 26870 - DNA, 3000 bp, Unknown
  misc_feature (1)..( 3000): 2750-1469P.txt file - cDNA_ID_2716568; gDNA_ID_2213672; Annot_ID_132832
gacaaatgaaacattcaagtacttgacaatgaagagatctagctagctatgtcatgtcaaaatataatggaatcaaaagcaaatcaacgtcgtaatataattgcatgctatgagcagttgatattatggacaaaaaggaggatcatgaaagaaagtctattgaaaagtggacacaaagtaatgattagccaaaaatggaaaagaagaaatagacatataattataatctctagtagagatatttggactagtagtctatgcacatgatgtgtaaaaccagtggaaaataaatgagtctttatgtgaaagaatagtgaaattaatgagattttcacaaagataagaaatgtattatgaagaaatatattctcttgtggtggatgtaatatttttaagtatctaaagtctgacaataagagatggaacactggatatgacatttatatgaaattcttgaaagatataatctctgaaggattaattatatgagaattatgttctctacaactctactcgatcgaataaaaagaaatatgtaacatgacatataatcatataaatgtatatttatgttgagtttgtcaaaatatattgatcaaactaatatttgttttgaaaatcattaaaactcgtacagagttatataagtaatacgatgacaataatctatgataaaatatcagtagataatgatatttataagtctatatgaaaaccatataattttgatcattaagattatggttattaatttcaacgagatattgtatttgattgaaaatcatctcctgaagaagatgtttccgagggggagattgaatgatatgcgtggatgtaccctttttccttatcatagtttttatcccacatgatttttctatgacaagatttttaacgagacattaaagaacacgcaaataatacacttgatgaatattaagaaattctatcaatcatccaaatgaatattatacactaatgatatttagagaaataaataagatggttaagatgaatcatctaaaagattcatgagcagaagaatggcgttgtactttattagaaatttgttcaagagaagatttggcagacttattctcaaatactgtttattctctgccacatcttctaatcatgcagagattttactaattcatgaagctagccgcgagtgtgtatggctaagatccatagttcaccatatacaagaagactgtggtatgtatgcagggaaaaaaactccaacaattatgtacgaagacaatgcagcatgcatcgcacaactcaaagacggatacatcaaaggcgatagaacaaagcacatcctaccaaaattcttctacacacacgatctacaaaagagcggcgatgtacgagttctacagatccgttcgaatgataatctggctgacttattcaccaaggcgctacctactgctactttcaagaagttagtctatcgtatcggattacgccgtctcaaagatctcgacgaatatactcataagggggagtaattgtatgttgcactctttttcccttaaccaaggtttttcccattaggttttcctggtaaggtttttaatgaggcagcatttcaaatactttacgagttatggtactataatggtcatcaagggggagtgttatgaataaagatggatgcccattataagacccatcatctaagcccatcatctagatgtttgtagggttttaccttttccttatactcctatagaaccattttctcaatggaaaacacactcatttcttctatctctttctctggttataacagatacatatatatatatatatatgtagagattttgatactgttacagcactgttgcggtgcgattttgggtgcggtctatgtcaccattcacagtcttagtataccaaaatccgcgaaaaaaaaaaaaaaaaaagtataccaaaatctgcaaattgttaaattgaaaaaacttggagcaaaaaaattgatatcaattatttctctatctttattttttcacttgttctcataagttttcctttttttaatttgtttgcgtagaaaataacttattataaattagggatttactgttacttttcaaacttaacaataaatatataatctgataaaaaaaatatatataatataaaaatatataatataattgaaaaaatagtgttatgaaatcatacatttctccaaacttttaacattgtttaaagaaaattcttagtaaacaaaaatattatttgcaaatttatattaaaattatattgtcaacagttaagaagtacaatatagatattaaatatgtataattaataatctagttgaattataaaatctaatatcttgatgaaatcagtattaaaaataatattttcctttattgttttcttatatatcaatttgtttcatttgtcatctatccagaatctgttttctagtaatgtattcaatgataataccacaaaacaaaacaacaagtgggtgattgacttttcataattaaagagatgacaaatgattgttaagcctaatcaagcagatatttaatccttatcctccacgtgtcaaaacactattgcaatgcacaaatcagacacctacgccataaacagaagataactcccgacaagatttttatatctctctctctaacattagccgaacaaagggcaaaatggtcaatcttgtaacccacttccgcgtcttttctcgataaagcttcttcgagaatcgtaactgaagtttatctccatatgcaaagttactaaaataccattgtctcatacccgaatttacgaaaataccattcttctctctcatctctgatcatcgaatttgggtgaagaaatatcttttctatctaattgctaaaaggaaaagcatcaaactttgttttctttgcttcttctatcttcttcttctttcttcttctcgctttaatactctttgattcctctgttcgtttgatgagaattagattttaaatg

SEQ ID NO: 26871 - DNA, 3000 bp, Unknown; identical to SEQ ID NO: 26870
  misc_feature (1)..( 3000): 2750-1469P.txt file - cDNA_ID_2716568; gDNA_ID_2213672; Annot_ID_182369

SEQ ID NO: 26872 - DNA, 3003 bp, Unknown
  misc_feature (1)..( 3003): 2750-1469P.txt file - cDNA_ID_2716580; gDNA_ID_2213672; Annot_ID_132826
tccataacttagcttttcatggaaaatctccaatgtaaaaggagctgaattattgatcttctggttgttctttctttttttgaaccagcttagagaaactatgaacaatagcaaaagcaaagctatgcctacgctgaccccaatcgcaactttcttcaaaagagatggatgccttgtctccactggtggtgcttgggcaatgcatggctttagtttcagttccttgatgcttccacaaagatttttgtttccgaatactgaaactaaagtagcattttgaaatattccttctgttgggactcttccctcgaaattgttatcggatagattgagatattccaacttggaaaagttttcaaaatattcagatatacttccagagagattattgtttgacaaatcaacgtttttaacacccatcaacccttttatatctggaatggttccatcaaaatggttttcttgtagataaataacttccatcgaaagacattttcccaaagtttgtgggagatgtcctgataagttattattcccaagtaatagctcaacaagattttgtaatcttccaatatcgtttggtagagagccactcaaagaattagattccatgttgaggtgaacaagggttgggatttgcatgatctccttaggtatagtcccatttaacttattatacccaatctgtaagtcgagcatgtgactacaatcaccaagactcggaggaacgattccttcaaaactattgttggataaatatagttttactaactgagtaaggttgcctataaaagagggtatctctccagaaaacctatttgaaaacaaaattaattccccgagccctacaagatttccaagagaggttgggagtggtcctgttaatagattatctgccaacaaaagtgattgtaggcctatgagatttccaatatcatgaggaatgcttccataaatgaggtttcctttaaggttcaaaacggtgagttccgtggacatattgacaatggatgtaggcaaagcacccccaagcctattgtaactcacagataacccatgcaaatgggagcaattagtcaaagcatcaagaaatgcaagatctccaaaagagtaacttcccaaagaattgttagcaagttctaggtaatgcaaattctctagttttccaaagttgggagagatacttcctgtcatcctgtttttaccaattccaaacatttccagagttgaaatattggcaagtgttgttgggatggctcctgttagaaaatttccatgcaaagataactcatgaatgtttggtagcagattaccaaaatcaggcttcaagttacccgagaaaccattaccaaggaggtataaattctcaagtgaggacaagttgtagaaagcaggaggaaaaacgccagagaagttgttcattgttaatgtaagagacaccatttgactcagcatagctatatcatctggaatttctccttccagatgattatatcccaagttgagcactattagagacgtcaagtttcgtataaatacggggaactttcctttgaggtcgtttagaccaagatatagataaagaagctttctcaatgaccctagttctgaaggaacaccgtctccaagattgtttgaaaataaatcaaggtacaacaatctagagcagttggacaaactggctggaatctctccttccagataattaaagcccacagccaaatatttaagtctaaacaagtttcccatctcttgagggatggttccaccaaaagagttattagagaggtcaagatatatgagaaacgaaagattaccaatagatggtgatatcactcctcccaactgcaatcctccgaggtccaaacgagtaactctcttgtgtttgcggccacatctaacccacttccagctgcagagagggaatgagttattccacgcggacaaggcatcccttttgctttcagaaacttgagacttgatctccaacaacgcttgcctatcactttcatcggtaaaaccatatgcttcgagttgcatgagagcattgaaagcaagtaaaagaaatagtctcatgcttctcttttctttttttgttggttaaaatattgtggttcttctcaaactttgcaggaagtaaatatataagagacgaagcaattgcaaaatgcctacttgtagtgctaacgcaacttgaagccaaataggaatgatcaactaccagatttttccaaaatataagtcaagaagtcaactgcctaaaaagacaaggaaagattaagatgcgcatttaactagtctttctgacttttctataggcatcatgtggtggctggatttatcggtcccatatgtctggaatctgaacaattaattagcttaagcatggaacattactatcacacggcagtcatcttttgtcttaaaccacacaacactactttatgatattgagcaaccatacatgtgacaagccctttcattgcttgcaaactttgtagaggaaaccaaaaaaacacttcagcctcgaaccaatagcttgagcgaaggtgctcgcagttattcttcccagtaactcagatggacaaaaactacagaacacacgttacacttacatgacagaaaatctgaaataacactaaataatcaagcaatttacccaaataattctttgattccatttttgcatagaccaagtcaataagattgaattaaaatgaaaaagaagaaatgcaatttacctcttaaacttgctttctaaagattaagacgagaattgattgatcactgcaatcatgaacacgttcaaagctgctggttcagaaaaaaccacagaaatatatagcaaaaataaatggttgcagctttaaaagtttagcatgatcatcgcagaaaaacacattttcagtttaaaacttgatcagctctaacatcacaatccagagactttttcttactcttcggtaccaaaaaagaagagaaggtaaagaaggtaagcgaatg

SEQ ID NO: 26873 - DNA, 3000 bp, Unknown; identical to SEQ ID NO: 10767
  misc_feature (1)..( 3000): 2750-1469P.txt file - cDNA_ID_2716586; gDNA_ID_2213672; Annot_ID_132820

SEQ ID NO: 26874 - DNA, 3000 bp, Unknown; identical to SEQ ID NO: 10766
  misc_feature (1)..( 3000): 2750-1469P.txt file - cDNA_ID_2716601; gDNA_ID_2213672; Annot_ID_132816

SEQ ID NO: 26875 - DNA, 3000 bp, Unknown; identical to SEQ ID NO: 10766
  misc_feature (1)..( 3000): 2750-1469P.txt file - cDNA_ID_2716601; gDNA_ID_2213672; Annot_ID_182352

SEQ ID NO: 26876 - DNA, 3000 bp, Unknown; identical to SEQ ID NO: 10764
  misc_feature (1)..( 3000): 2750-1469P.txt file - cDNA_ID_2716612; gDNA_ID_2213672; Annot_ID_132812

SEQ ID NO: 26877 - DNA, 3003 bp, Unknown
  misc_feature (1)..( 3003): 2750-1469P.txt file - cDNA_ID_2716632; gDNA_ID_2214456; Annot_ID_132954
gaattgcccaaatgaagctgccaacaatgaccttttaaggaggcaaacacacatagttaagcataagaaatctaaattcatctaaggaatttgataacaagcgtaagctcacctggacttggcttgctgctattagaggacctccaattccaccaccaatgacacgaccatcggggctagcaagtgagaccgctagacttccagtgcggtttgggtagtcattgtcagttgtgttcagataagaagttgagagagatatgagctcgaatagaccctataagtttcaaagtatacaccaaaataagtaatgtttttgtcttctaaaagataataaaatgtgagtgatgattcaataaaacctcgtatataatagttccatgagaaggtgctggctgaagaagagttgcagtagagacagcaccacttgcggataagacacatatcgctcgtggaccttgatgcgagaacgatataacctttgaagcaatgtcctgaaagcaacaccgagagtatggttatctcaagaactagaggcaagattacaaagaaaaaaaagaacagatttattcaagaggagacagaagaaacatacttcaccaatggaaactacgattacatgcggtgtgaagctcatcccagttgatgaaggcatcatttcaccttacaaaaaagaatcaaatgtcttcagaaaaatcacagctaattgtaatcagggagaaacagagcaataacaaagtttaagagaaaggccaaggaataataaaagaataaatattgaattcaacaatttgacattataaaattccacagctttaattaatccttaacagttcgaattagcttataataaacttcccaccaatgtcctcatttgaaaaactatatcatcaattaagctcaaaacttcccaccatattcagagccaatgtccttgtcggaaaataaaactcataagttagagattagggatattaccaatggaagatagccgttgcttcttgccggagccaggaggtcttccacggccacgtttgttagagttcggggaaacgttggagatagaaggagacaatgccaacgaaacagaaccaccatcttgtccatattttctaggccgtcctctcttccgcttcacagacgtgtcacctgaaggaggagcaaccaaagctcccgccgccgccgctgacgaatcagccggagaagagtcaacgggtaaaggaggagacacgaatccagtagagacacctccagggtttggatttgggtttgggtttgacccaaaaggagagatggaattggtgaaatgatgaaatccttgtgatccgtgaaacgttggttgagtttgaggaggaggaggaccagaaccggggattcctctttggatatagtaagaacccgacccggataacgccattgcgtctcttcgatccatagcttaaccaaaaagactctgactttaacttagtaaaattcgatggggaccctaaatggctaacttataggaggagggataagaagagaacaaaatcagaatctaaaagggttcgatagacttcaagagcaagataacaacatgcaaccgaaaatctctgaaaacttatcaaaacacacaaactttcatttcacctaattgttttttatgtagctttagtatcaagctatgagaaaatctcaagatgaaattagatccaaaagagaaaaggaaagaactttaattttcttcatctcttcttctctgtttcattctctcaccaaaagcaaagaaatgaagtgtgaataagctttctcatccatcaatcaacaatggtgaagaaaaaaaaaagttttctagggttctctctctttctttcttcagagtgtatgtgatgttgctttttttcttttactgggtgacagagggaaaacagaaacaaacaaaaaaagatcctttctccaagcatttactgtggattacaatacaatgggatgatgaggcaggatttcaaaattcgaaattaaatttgaagtctctgacttttgactgtgatataagctctctctctatctctctaatagacttctttctagcatctagcaatttgtaggagggatccatccatccatcatcatcatcatctttgtgtggctcattctcaacgctatagattaggtgcgtgtatcaaacgaagcattgggaatgagagagtgaatctcacgcttctgatgtcgagagtgagagaatagtgatgtgatctagtcaagactttctttgttcctcactggcttccacttcatcataagctttcaaaatttatgaatcccccaatctatctttagactctattttaccataaatacttgagactaatgattatatattggcattaagagacatataacatgaatataaattcccattttgtggagtaaatattgttcttgtctctgttctgttcactttaaatcttcatttttctctacaaacaataatcattaggacccaagagtttatcaacaatacagaatctgaacgtttagtactcatgtcatgtgaagtgaagtgaagaagatcaacaagaacattaattgtttgctataatcttctatgggccggataggaataattaggcccagtatctaacacatcaaacaaaaacacatcgaagtcgaatcgtcggtgggataattaggcccagtatattcaaacaaaataacatttaacagatccaagtccaatgttgtcgtggaacgaacgtcgtttagaataattaagcccagtatttaacatatcaaagcccaatgttgtcctaaaacgacgacgtttgaatgtggaacgtaaacaatcctggaacaaccgtttcaactacctttttcctatcacttgttttttcacctctcgaagtcctccgatttgctacccttacgcagcctcatgtgtcaaccaccatttctcttcttcatcttcgtctctatcaaaccctaaacctaaaaccccttattttcccgccaatgtatcaatccatg

SEQ ID NO: 26878 - DNA, 3003 bp, Unknown
  misc_feature (1)..( 3003): 2750-1469P.txt file - cDNA_ID_2716655; gDNA_ID_2214456; Annot_ID_132947
aactcacgcttatgggtgtcacgcaatattatgcttttgtcgaagaaagacagaaggttcactgcctcaacacacttttctctaaggtcagatgtctagatttatccctgtaactacagaattatgaggggcttgatttagatgttctaaagtggttatggtttttcaatcccagctgcaaataaatcaatcgataatcttttgcaactctgtcaatcgcgtggagctgttggctaagaaaatcacagaacttggttattcatgcttctacattcatgcaaagatggttcaagaccacaggaacagagtattccacgagttccgcaatggtgcttgcaggaatctcgtttgcactggtaagctttgtgttttttagcatgtactttgaacattgaccaagtgtagattatgatgatgatgatctggcttattggaaaatgactgcagatctgtttactcgaggaattgacattcaagctgtgaatgtcgtgatcaactttgattttcctaggacttctgagtcatatctacacagggttagtcgaaacaaaactggtttgtgatctagtttcttacatgttcattttaactcatgttgcgaaatgttcaggtgggtcgatcaggacggtttggacaccttggattggctgtgaatttggtaacttatgaggaccgtttcaaaatgtatgtcgttccttcttttcaatgttctaaccggtttttctattctgttaaagttttcttagtcatttatcatgttttgaaaacaggtatcagactgagcaagaacttgggaccgaaatcaaaccaattccttctaatatcgatcaagcaatctactgtcagtaaacttgtaactgtgcatgaaacgtgtctccacccaatgagaggtacaagatggttaaaatggtaagagtaagacgaatcctctctcttaggcttaacttgtcaaaacaacatttaaaatcaaaaagctatattgcatgtttaagaccagtgtgcccaatatttcaggtgtttctcaagctcgaggggaggagatgaggcaactagtacttggcggttcatgtaaagactcgttactcagtggtttggttcctaatctctcttaaagacacttgttatctggttctatggaaacctctttacgctgcacttattatgagactccctttgacttggttagtaataaagatagaacgtatgactctcctcttttttattttcgtgttgggctctgtttggaattatgggctttatcctatttaggatctatttatcatgaaagttgcacttcttaatttttgcttccacggaattattttgatttttccaaaatattttcttccacatgcttattattctagtttggtattaagctattttcgtcaaaatgtttgaaccgtaaccaatcttgttttatagtgttatatccattgagaaattatagttttcacgtgtttatttatttatttgggttattaaacataaatcatgtaaatctgaatcctgtggagatctctccctagttgatgaatagatatgatgaatttaattctttcatgaaataaaaatatatgaaacatatgtagcagaaaaagaagcatatctatgaaacaacaaacattcaaaaaaaaaaggaaaacggaaaattattaatatgaaaactacggctttgacttgtagctgactacatttacgacatatatatataaatggaccccactgagtgtctgcaaggtctttacacaacagtatcttcttctgtttctttgactctttgtgatccctaagcctacccataatacgtgtctacattttattggattgtttcgtgactctgtaatcttttttataagaaaacaagtaatagtgaaattgaagtaaatagctcagcacagaaacttcgacaaaaataactcacagattagaaaagaaaatatatgcataaatagccatggttcatttatgaacaatttattcgtttttttagtttataatttcattaaaacatgtttgtcacatcacatttcatgtccttcggctcctactacaacaacaagtcactgtcatctccattacttccacttctgctcctttctttattaacttgttcaaaaacaattctaagataaataacaataaatgttggtctctctttattatttcccggctaaagaaggaggatgtctcgtattatccgccatcaatgctcttttgtttcctgtttcttgcaatttgaatccctgagaatcctagcccacttatttactactttgccttagctgttttcgacatcaaaattttggtcatatgactcatatcaatcttcaaatttgataaaatatgttcccaattcacaaaaacaaaaaagttttcgaaagctcaaaaacctttaccatttcaatagtagataggattcttttagatttgcatttcacgaaaagagaagaaaaaaaatcgaaaaatatttgcaatcatgattttttgtttctgaaggagacctgtagttgctgtcatgaacattaaatacaaatctaataaatgttgtacgaattttgcgtgtaataaatggtcagggccggctcgaagctcgctgatcgtccttttttcgtgtctctatagcaacacacaatcgtatttatttcaaactttttttactttgtttcccatccatcaaatataagtataaaaatgtaaagaatcatcatatatagatcgtaaattcattgcttcctttggctttttatttcatctagacgacgttaaaaccagaccagaccaaatacatttatcatttttcccttttttctaaaattctctctttgattcctatcttcttctctttattttcactttgtgctttctctgtctctcctattatgagtctaaaagtctactagctgttcaatagttttgtctttctgtgtttcttcttcttcaaaaccgaaagaaattcaaaaagagtctttcgctgcttgttagtggggtgaggaacaaatg

SEQ ID NO: 26879 - DNA, 3003 bp, Unknown; identical to SEQ ID NO: 26878
  misc_feature (1)..( 3003): 2750-1469P.txt file - cDNA_ID_2716655; gDNA_ID_2214456; Annot_ID_182655

SEQ ID NO: 26880 - DNA, 3003 bp, Unknown
  misc_feature (1)..( 3003): 2750-1469P.txt file - cDNA_ID_2716659; gDNA_ID_2214456; Annot_ID_132946
caattactttcatgatattattagtattgatgatcttctgtgaagtatttaaatgttttcttgttatattcgacatggcaggaaggtttcaagtgggatgaaatcatcacggagacttatgagttaactgaagaatgcatcaagataaactactatggaccaaagagaatgtgtgaggcgtttattcctcttttgaagttatctgattcaccaagaatcgtcaatgtatcatcctccatgggtcaactaaaggtaagtaagaaaagattagatatcaaggaagcttgagagatgtattgttggctaagaaacactatttatgttacaattgattattgtttaccagaatgtactaaacgaatgggcaaaaggaatcctgagcgacgcagagaatctcactgaggaaagaatcgaccaagtgatcaaccaacttctcaatgatttcaaagaaggtacagttaaggaaaaaaactgggctaaatttatgtcggcttatgtggtttcaaaggcaagtttgaatggttacacgagggtcctggcgaagaaacatcccgagtttcgcgtaaacgctgtgtgtcctggatttgttaagacagatatgaacttcaagactggagtcttgtctgtggaagaaggagcttcaagtcctgtgaggttggctttacttccgcatcaagaaactccttctggttgtttctttagtcgcaagcaagtttcagaattctgaatcttcttttgtgtgagaataataagccaaaaatgtagtaatttaatgagaggattatcgtttgaatgtcgaacatatactcttagataaacaaaaacttttatgagatgttttggtaattactcataaacttgaatataattactttacaaacagaataatatatagttccataagaagaaactaaacaaaatttgagtctacttcattgcattagttaagaaattatctctttaacaatttatgattatatatatttcacaaaaggaactcccggatatttcttaggattcatgttcttcagctgctgcatcagaagtttcttcttctgtagggtttgcttcatcttctttgggttcggttttgtcttcctcagccgtcgagcgacggtggttagccgcggcttggaggacatgattgtaattacctttctcaaggaaaagctggctgaagtggaccttacagtaaaggacgccatcgagagcagcatatgaagaatgtgttaatggacaaccactatgtgcacatctgaagcaagtcttgtggtaagattctccttccattgtcatcttctctagaggataaactgttttcttacaagctgcacatttgtcttgtgtgccgctaaagaaggatgataacctgtttggagccttcgtctatgcaaatgatcacaccaagaaatcagattagaaaacaaaaagagaaaacagaggaatgttgatgaattatgtgcttaccgcatcattcgatttctcggtctttccagctgtaaaagaccaagaagagaaagtagcaaagattgttagcttttcaagagaggttaataaaaaacagagcaaagaaaacagaggatttgttagcaacctgtttggaaattcttgctgaaatttccagattctttgaagagctgttcaaaatgggtcttgcaatacaaaactccatccatggatgagtagttacatatctgaaaaggagaagaaagatgttctctttgtgttttttttttcatgagggaacaatggaggaaaaggaagatagatagataccacgagagtgccattgcaatggctgcacctgaagcatgacttgtgataaggcattccttccaaagtcatcaagtccataacgtataccgtcttgtcacacgccttgcatttgtctgttgtccctgtaaacgccgccattggtatctcttcttcttcttctttcaaattacgaaagagttggaagatggatcaaaagttttcttcttctttttgttgttcgtttagacacgaatcaaggtttgttttgccatcatctatgagctctctgcctttttattatatcaaaatcatggattgagatttttaggggtaaaattttcttctgatggttgagattcaaatgaggagagcccttaaaatgttcttctacattctaaatctatttctggctatattttattttatttaacacttatttttgttttgctttctaaattatatcgtgtaaaccaagggattaggtgcaaagtttatatatagttagcctccgattttaagatgttattaattcatatacacaattataaggatctttatacaaaataagtaacacctaatctaacatcacaagactgccttttaagcatagcttttaataatcataagcataatttgttttgttagatatcattaatcaaagggcaaagaatctgggggtctaaaatgacaaaaacaatacaacatggggtgaatacctgaaagaaaagtaaatccgagttatactgtaaataatataaagcttatgggtcatgtatttatttaacgtaaacataaaaggccattttgataaatagtgagagtctgaaaaaaagaaagaggagaaaatccattgacgccctaacaaaagacgccggcgagtgtattcgtcactttctctagtttcctgtaacccaacccactcaaacgaaattttttcttaatctctctttcgttcttcttcttcttcttcttctttagattgttgtaattccaatcggaactctcgattcgctttcttctccgttcttctgtggcggaccggttttgtggttttttatttgaacattcccgatcttgccctgagttccacgatcagtttctttaaaccctaggttttacacaagcattctgtttctccagattatcgcagactctttcgttctattctttgtagttttgtaaaaggtatttcggtagatttagggtttgtctgtgtctagttttcgagatcgagagagatttgtgatg

SEQ ID NO: 26881 - DNA, 3000 bp, Unknown; identical to SEQ ID NO: 10862
  misc_feature (1)..( 3000): 2750-1469P.txt file - cDNA_ID_2716663; gDNA_ID_2214456; Annot_ID_132945

SEQ ID NO: 26882 - DNA, 3000 bp, Unknown; identical to SEQ ID NO: 10862
  misc_feature (1)..( 3000): 2750-1469P.txt file - cDNA_ID_2716663; gDNA_ID_2214456; Annot_ID_182653

SEQ ID NO: 26883 - DNA, 3003 bp, Unknown
  misc_feature (1)..( 3003): 2750-1469P.txt file - cDNA_ID_2716667; gDNA_ID_2214456; Annot_ID_132944
gaaatataacgtctaacatcgcatttatgccgcaatccactataaaagaacatgttttattgttattcctcaccgaattgaaggaaataacgattatcgcataggttaactacgttacagatttgtccgtaaataataaactccactaaaatcatacatgaaaaactctacgtactaaataaatacagctttttttgaagtaaatttcagttcagattaacaactggaaaaatcttgaagtaactagaaatcgaatagaataataataaaataaagggaatgtgacactatgaggcacttttaagaaatgtttttccgttttagacacttttaagagtttaggcactttatcttgtttttggtgagaaaatagacaaaattacccttgagattttgtctctctctttttcgtatccattctctctctttctctcgctttatcaaaaataaaaaatcaagaaaacaaatcttcaaaatttacattttttttacgccattaaagagagaaaaaagttgttgaacgtttgcaaagaagaaatcatcaacttctttctttcttccttcttcaacaaatcatcagctttctacaaaaagagagattgattgaacaatcagattcaactttatttttccagttaatcggatctcccgatttctccgtgtctgctttgattaaggagaatttttcagatcaccaacttcagaatatgaatctgatttttataagagaggatctgttggatttaaagaactgccatggtaatatcatcacatattcacatcctcttcgtttttctatcgttttctgtttttgctcttaaataatttatttttcgatttcatgaaccaccaggttgtgaataaaccaaattggccaattccagtattgaattttatatccatttgatcagcttgtttggtatcatatgattttggctcgataaattgataatatcgttgaacttctaagttaagagtattttactttgcatacgagaatcaattatttccacatggtcacgtctaagtggacatgttattatcaaagcttccaacacgatttcattatgtagaaactaataatcatataggtctccaaaacacaagaacaatctgtagacattactttcaaacatcaacacgctaaatccaagtagataatgatagtttgtgtccatgataactcatccacttaaacttgaccatatggagtaatggtgaaacatgacaaacacttgaacacaaatgattcatgtttagagctttcatcaattataatttgaatgaataagagtatcattggtgatgcaagaatcacaacttggtcaaaacaaatcataccaacacacaaaagttcatacatcaatgaatatcaccaatttcacgagtagcgtccattttttgttgaccactagttcacttgtttatagacactctcatcgttatgtgggttgatcacttgtttatagacacatatgctgcaaacaaaatacgtggttgtccattacggattgtccaaatgttgtagtccaatagagaacatcaagtactgaatttcaaacaaacggggcagagaagttatctaacattatcatagaattatgaacaagatcaccaaacacttggaagcttttagtaaaccaaaccattaatctttagttttataggagaaataaccacacaaaaatcaagggatgcacttcactcctccatatcaaacctaaagagataaatgtgtctcaatcaaatactatatatgtgtaaattgacgctaatactctccactagcaaaatcaaagtctgaataaatcgttcaaatcaatctaatttcatcataagagttaaggttagtttataccttcaattccaaacaatttcaattccacaatcaatcaaatccacaatctcacaacaatttttcaaatttctgcaacattgaaacttcctgcatctcgtcacatcaaactttccactataccgattctagaaacttccaataacatcaaaaccagactatgacacctcaaaaacacgaagaatcacgaagcaagacaaaagtaaacatgaatggagatgagtaaactcaaatcaccttgagtttatgaacgacgacgacgtcagaagcgccggtgatgttgatcaagcggtcgataacgttctaactcatgtcgccataagaaagaagatatgaagaatcaatttgagcgagaagcttggttcacaacaattgattgattgtgaaattttgtttttggagtgaggaaggagaaaagaaaaaagattttgttttgttgttgtgaaattaccgtgaaccgatggattgaattgggggagatggattgaattggagggggggaagagagagagagatgaattgtatcgagaaagagagagaattataataagaagaattgttagcgtaaatgtaggagagatatagttaaagggcaaatcgagaattttgtctaacaaaagtgtctcataacttaaaaatgcctaaatcgacaaataactttttaaaagtgtctcacaatataatattctctaaaataaattataataacttgtaagtttgtaattaaccatcgcccaaatatgataactatcatcagtaacgttttgttccaaacaaattgcctttattaacgaaaacaaattgcctttattaacgttttgttccaaacaaatataataactttagttatctcaaatatgtgtcaatataatgcaagaaaaagaaaaaaaaactgtaaattatgaaaatcgacgtcacaggtaaatatactaacatgttcaactttaaataatgcaagactaaaacaacggcgtcggattagaagtctaatctcccatgaacatcaatttctgagctacgtggcttcgtttgcctccacatttcttcgtatggtttctgtgcattcactgcatgcgcataagaaaaaaagaaacgccaattattgatattctttgtctaaaacccagaaataaaaaggttcgaaaatg

SEQ ID NO: 26884 - DNA, 3000 bp, Unknown; identical to SEQ ID NO: 10858
  misc_feature (1)..( 3000): 2750-1469P.txt file - cDNA_ID_2716686; gDNA_ID_2214456; Annot_ID_132939

SEQ ID NO: 26885 - DNA, 3003 bp, Unknown
  misc_feature (1)..( 3003): 2750-1469P.txt file - cDNA_ID_2716690; gDNA_ID_2214456; Annot_ID_132938
tctcatgtcctccactgtttccacttccactaatccatcccgtaagctccctcaaacgctgcgtttctgatttattttgtagaaatatatatttgtttgttgttgttgacgtgattcatatcttatcctaccagaataaataagatttaataaatagtatgaactgttgactgagtcacaaagaaaaagatgatagctgttgattctgtaattatcaaactatatagtttaattaatctttttttggttatattaatgggcacagctataaactgcaatgggagaaaaagcatgctaaagctagcgaagaggatgactgataatttctgtggaggggtttgtgcttcgtcgttacagaaatggagcaaactcaacgttggcaacgtcgacgaagacgttaggataatgactaggaagagtgtaaacaatcctggcgagccgcctgggataattctaaatgcggcgacgtcagtttggatgccggtatctccgaggcggttgtttgacttccttggaaacgaacggcttagatcggaatgggatatcttatccaacggtggaccaatgaaagagatggcccatatagctaaaggccatgaccgttccaactccgtctccctcctccgtgccagcgtaagcattcatatttattacactttctatttgcatgcgtaagtagctaagctaatctccaaattttagtttaggttttggtgaatttagtattttataaacattagatggttttggaaaacttgaaattttagtcggtttagttttttgtttacggttttcaactttttctgatttttttgggttggttttagataaattaaagttaaaccgacttgtgtggacattgaatatttgatctataaacagtgtatgaaaggactttgttgtgttgtgtgaccccaggatggtgttgtcatatgaatcttgtcgcgtgtgattggaaagtgacaaatctagaatttggaagtattgtgtgataaaagtcaatagtaataagacatttttgacctttttctttcctttttggctccgacgttttgaaaaatcctctgtttttttctctctttatttctgcattattggtgtcttttctccgttgtaccccttgagctttttctggcttgtgacggtgacactgtaaaagtctcctcgttcatcatcttttaatttattgtttccccttttgggatttataattttctcttctaccaccaaagtttccatttatttaattttgttttgattttttcatgcaggcgataaatgcgaatcagagtagtatgctgatattacaagagacaagcatagacgctgcaggagcggttgtcgtgtacgcgcctgttgatatcccagcaatgcaagctgtgatgaacggtggagattctgcttacgtggcactccttccttcaggattcgccattctccctaacggtcaggctggtacgcaacgctgcgccgcagaggaacgtaacagtattggtaacggtgggtgcatggaggaaggagggtcgttactaacggtggcgtttcagatactggtgaatagtttgcctacggctaagctaacggtggaatctgtggagacggttaataatttgatatcgtgcaccgttcagaagattaaagctgctcttcattgtgatagcacctgatcatcgagatcagacgatggaggagattgagtcaagaacgaacctcattttgtgatgaatccgtttttgtgatggttcgggtattgactcgatgaaatttaaaaaaaaaaaaaaaacaaagaatgttgtaatttggatcggttttattttggatcatgtcgatgaaatgtaattgtttcttgtttctcttcttgtaatgactcgataatatcgggacagcattatatgaaacacacaagttttttttaggggagctcaaataattagttataagcaaaaacgtattatcatttttttggttataaatcaaggcaaccagaagcacaatccgtgtttacttttgtggtagtttataatgtgaaaggattggtttggaccgtgtcctttatttaatgttgttccaagtttacagtacttttctcaataagatggaaaaggaacgaacgaagaagagtgaaacacgtgagtgcatgaatttagttgcaatcccttatagttattatatccatgcaatgtagacaactacaacgaaaggctaattgattaggttggtttagagattgtttgataatgctagcctagatccaaaggtcacatcagaagagaccacaggctactaatgggcttttatctaaagcctgtcattaactactctattatggctaccaagtaagtcttctcaaagtgtattgggccaatcattaactaatttattgggctagattttaagtccattggagtatatactattattacaaacgacaataatattattattacaaacgggccgaaagaaaagagtcaaaaggaagagtcaaacttccgaataatccgcgcgcttaacgttcgatcgccaccgttgaatgaacaaacggtcacgatcgtatctaatacagattatttaattccatttttttcttgtggggtgatgatctctgaacagaaattaagggtatgagaatgattgattggtcttggaattgtgtaatagaccaatggcgagaaatgccatctgttcttttttagtttaagctatatccgctccgccgcagagatatatatagatatttctataaatatgtttttgtatatatacacagagagttttgattaaggaagaaaaatccttagatcattttttttttgttatctttgtttcgtttttctggtagaagagagaagaaggagagacgaattggcagctaagcgattctctctctttctctctttctcttctcgtgtaatcttttggtgttcttgaaaccacttttttttttgttaattcctctgtttccttggaattgttttctgcttttttaagaagaaaaaaacgatg

SEQ ID NO: 26886 - DNA, 3003 bp, Unknown; identical to SEQ ID NO: 26885
  misc_feature (1)..( 3003): 2750-1469P.txt file - cDNA_ID_2716690; gDNA_ID_2214456; Annot_ID_182643

SEQ ID NO: 26887 - DNA, 3003 bp, Unknown
  misc_feature (1)..( 3003): 2750-1469P.txt file - cDNA_ID_2716694; gDNA_ID_2214456; Annot_ID_132937
ttcttagatgttaacccagaacttggaaattcctataatgaagtcattgctcctcaagatattgccacctatggtggactctgtgccctggcaagctttgatcgatcagaattgaaggcatgtatcctatttagcatttcttttaactctgccatttttctccaacacttggtctataacttagtctaattttgcagcaaaaagtcattgacaatatcaacttccggaatttcttggagctagtgcctgatgtgagggaacttatcaacgatttctattcaaggttgcatattcttaccaagactctcgtctatttcttgcatagcaccaaattactaaccttgaactaaggattattagtgtgaatacccactaagaccagatttacccaacgaagtccctcataattattatgtcccttgaatccactatttattctaatcactgactctgataaactgaagtagctgttgtgacgttagactctaatcctgtatcgattatgaaggcttccaatgttgccctccaaattcttatctatgttaacaatgcgtaagacatgcaaactcgacccttttagactgtattctcgttgaatctaattattaagtttgcttgttgcagccgctatgcttcctgcctggaatatcttgcaagtctcaaatcgaatctgctgctggacatccatcttcatgatcacgttgacacactatatgatcagataaggaagaaggcactgatccagtacacattgccatttgtctctgttgatttgagcaggatggccgatgcattcaagactagcgtctctggtctagagaaagaacttgaagccttgatcacagacaaccagattcaggtccgtagtgtttcccgaaataactttgttttatgttactgtcattttaaaaaccttaatagaggcaaaatcttttttccatcccggacaggcaaggattgattcacacaacaaaatcctctatgcaagacacgcggatcagaggaatgcaactttccaaaaggtacttcagatgggaaacgaattcgatagagatgtcagggcgatgctgttaagagccaacctcctgaaacatgagtatcatgccagatcggcaaggaaactttgatgacatctgctttgctaaactgagaggtaatggcctattccaagatcataagatatctgttaaaatttaatttggtttagttactggttagctttctatctgaccttctctgttctctagttatcgctttgttttgtcaacttttagtttaagattctttgaattatctatggactttgaatgaaatcccgagtgtgaatctatagacgcatgaatcacactgaaagtgaaatggtcaaagagtacagacataagtacacacacttggtttcatgggccgatatgatttatgatctttgtatgcatgtgggtggtgggatcaaaaatctcatctcccaactaatatccatttcattttgtcaactaaacgtcgtatattatatgatagtttgtggctttgtgcacagttgtcactctatagttgaagacttttttttttcttatctacaagaaataataatcaaaacggttaggtcttttttttataagtagaatctcgaaaattgcaaaaccaagatttgatgtcggcaaacgcatcatgtagactaagtgtgaacttttgattttcttgtgtcaaagaacttttgatattaatcactcgatagctacgtttcatcattattagtttcttctatagaatttttatcactgaatgggatagttcacattatctggtactattatttttactattgcaagtagttcttttctatgcatttctttgaagttgttctctttgtagtttgaggtatcttatatatatatatttctatatgtttgtgtttgccaggaatattcaagggtgttttttcaagattcgaaccaaacgagaaattgggcaagattacttttttgtaagaaccaagtgtttcaatgagtcgatgacatttagagtaagtaaaggttttattctaagatggacagtccattattaatcaactattgaatgatattgccttttaaatgagtcttaggtagcatcgcaataactccatgtttactcaaaactcacaaaccatgaagttaagaatccgccaaatttggaagatgggccaactctaaatttactcaccccaatactccatttattttgggttgcattgatgaaagtaatttgtataattgataggttgtgtatcaaaaaccggatctcattatttgtgatctttgcattagttatttttggagactaataaccatctttctaaactgtgagtaatacaaatataaacaacttcttgttcgctatggaaaataaaacataactctttaggtacgattcacgatgcaaaaacaatagtcatcgtgaataaacatgtccgaaatacatgaattaacaaatgaaacgctcaacaaatgaattgacaaatgaaacgctcaacaaacgaagaatctcacatcccatgatgaaattgggatttacaaataaaaagtagcacaagaagaagggggtagaacagtaattttaaaagaaagacagcgttgattcaccacttgaagtggacttttatagcaaaaagagttgagtaacgtcaaaagagtcaaacccaacttttcaaaggttgtgtaaggctttccatgactccacatcttcttcttttccctttttatccttttctcttctctctcttttattttttcttttgaagtaaattaatttcacgaaacaaatcagagaaccttttatatcttcctttttcgtcgttactatcgtcctttacctttttcatttactgttctctctctctctctatctctatctctatcttctattcatggacatgcaccgaagcgacaaagcttagggcttttctctcatccatggcggatttcttctatcttcattaaatatttccctctttattaaaatctcatg

SEQ ID NO: 26888 - DNA, 3003 bp, Unknown; identical to SEQ ID NO: 26887
  misc_feature (1)..( 3003): 2750-1469P.txt file - cDNA_ID_2716694; gDNA_ID_2214456; Annot_ID_182642

SEQ ID NO: 26889 - DNA, 3003 bp, Unknown
  misc_feature (1)..( 3003): 2750-1469P.txt file - cDNA_ID_2716698; gDNA_ID_2214456; Annot_ID_132936
atagttttcatcttttgctgtacttgaggcagaatccagcaactcctgatgtcaaatctaataacctgaatgaaaaacgtgacagcatttcaaaaggtagtggcttttaatttaagtggcatctctgatttgacgttttccatctctgattcttctatatattgctgatgcagatagtatccatcagaaagttgagacacctacaaagattcacagaagggtaactattatttattaaagttcaatgtcatgatgcatcaaatactctttagggacttcttgtgtctttagtatttcattatcaacattttttttatccatcttgacatttcagcaactaagagagaaaaggcgtgagatgcgggcaaatgagttagttcagcacaatgatgacacgattttgaaactcgaaaatgctgccattgaacgctctaagtctgttgattctgcagtccttggtaaatacagtatttggagaagagaaaatgagaatgacaactctgattcaaatatacgcttgatgcgggatcaagtaataatggctagagtctatagtgggattgcaaaattgaaaaacaagaacgatttgttacaagaactccaggcccgacttaaggacagccaacgggttttgggggaagcaacatctgatgctgatcttcctcggaggtaaattactccttttggtttctactacttgccttttttcgactgcttgtgtacttcttaaagtaacatgctctctaaattacttttcatatagtgcgcatgagaaactcagagccatgggtcaagtcttggctaaagctaagatgcagttatatgactgcaagctggttactggaaagctgagagcaatgcttcagactgccgacgaacaagtgaggagcttaaagaagcagagtacttttctggctcagttagcagcaaaaaccattccaaatcctatccattgcctatcaatgcgcttgactatcgattactatcttctgtctccggagaaaagaaaattccctcggagtgaaaacctagaaaaccctaatctttatcattatgccctcttttccgacaatgtattagctgcatcagtagttgttaactcaaccatcatgaatgccaaggtaaaatcattagctcttatcacttgattcgtcctaatatctgtatgtttaattttagatacgcattgcagagctgaaattaaaaatgtctttattccctatatgtgcaggatccttctaagcatgtttttcaccttgtcacggataaactcaatttcggagcaatgaacatgtggttcctcctaaacccacccggaaaggcaaccatacatgtggaaaacgtcgatgagtttaagtggctcaattcatcttactgtcctgtccttcgtcagcttgaatctgcagcaatgagagagtactattttaaagcagaccatccaacttcaggctcttcgaatctaaaatacagaaacccaaagtatctatccatgttgaatcacttgagattctacctccctgaggtttatcccaagctgaacaaaatcctcttcctggacgatgacatcattgttcagaaagacttgactccactctgggaagttaacctgaacggcaaagtcaacggtgcagtcgaaacctgtggggaaagtttccacagattcgacaagtatctcaacttttcgaatcctcacattgcgaggaacttcaatccaaatgcttgtggatgggcttatggaatgaacatgttcgacctaaaggaatggaagaagagagacatcactggtatataccacaagtggcaaaacatggtaaataactctttaattctttgcaacaaatagtctaatgatggtttattattttatttattgtggtttgctcattttggcttgtgttgtttagaatgagaacaggacactatggaagctagggacattgccaccaggattaataacattctacggattaacacatcccttaaacaaggcgtggcatgtgctgggacttggatataacccgagtatcgacaagaaggacattgagaatgcagcagtggttcactataacgggaacatgaaaccatggttggagttggcaatgtccaaatatcggccgtattggaccaagtacatcaagtttgatcacccatatcttcgtcgttgcaaccttcatgaataaaatcaaatctttgttagatgatttgaggtaattacttctaatgttctgttgttcccattccattgctctttattccacacattgttaattgtttattcatatcgttttttagtcattcttttcttctcttcttctttcgggttaaaaacacttatgttattttttgagtttttctaatgatagtaatatgtttctggagattctcttgatggtcttgtgaaaaaattgaagaacacatactatctctctatttactatatactgtaagtcaaaataataatccaattttttgttgatgtgtcattaataaataaataactatcattaataattggattggttacacattttaaattttatttatgtttggatatccaatttttttttttccattgctaatttaattgttatcattatgatgttcatattcttttcttgtattggatcatattgtatatctttattttccaattgtaaatattcaaaataatatattttcttggaaaaaaatctattgtggtttctctttttttatataagcaactatttaatggtaatatgacatataataataatttaaaaaattagatagtatttagattttagactattagtggaaaattttacaaaataaataaatcccaactatgatagaaacccaaattgagtgaaaatagaagatgggctttaaatcggaccgacgcttattgcttactaatacaaatcgcccttccttaaggtctgaagacgaaacgaagaacaaacactgaaacaaaagagaaaaatcccaaagctagaaaccctaatcccaaacgaatcaatg

SEQ ID NO: 26890 - DNA, 3003 bp, Unknown
  misc_feature (1)..( 3003): 2750-1469P.txt file - cDNA_ID_2716702; gDNA_ID_2214456; Annot_ID_132935
cacctcttgacgcaagccctgcaccaaaaagcagaagattaactacaatttatcttagctctatttattttatacatcgttataatataatagttagtttgactatgtatacacttagaatgaacaaaggtcaaatttcgtatatatataaagataaaatgaacatacttaagaaaaaaaatgattgacctgagtatcttcaagcgtatcattgtccaaaagattgtctttacagcgatagtacctctcaatggttctgccaactctacagtttataaaacaaaagaaaccacaagatattttaattaataatctgaatttgcttaaattcaaaaccaaagaacgaaaaccttaagttctgtgttaacttttaatgcatgtctaaaggaaattctaattacacaaaaatctctgggaagatatatctgcgtaatggattatagatctacggctacccatgataaaccctaattaatttctctaattagaattagaaagacatatctatttaaagaggcaaaacgtatatatgaggtttcatggatcttaaggacatacacatatcaaagctggtgataacaattaaaacccaaaataaaacaaagaagttttctttcaaaagatttaccggatctaaaagctaaactgacccatatgtccgatggatcctgagagatcgatggatggtgatcaaccttaactagttagggttagaataaaaagacataacctttttcagatacccacaagacagaatttggtttcttgatcttaagaacagacacaaatcaaacatggatgatcttaatcatattacccatgaaaacctaggttttcatcattaggaaaaccgaattaatgatcttgaatgaatggatatacgtacccgacattgctgaactcgtagagcttgccaccggtggagaagattatgagagaaacctctgcatcacaaagaacagagagttcgtaggctttcttgagcaaaccactttttcttttggagaaggttacttgtctagtgatcttgttctcaattctcttcacttccactttgcctcttcccatctctcactcgctctctctcttctttctacgttgtttcttgtctttaatatctctcaatgttggaagtttacatgtacatatcaatcaaaatgaattactttagttctattgctggatatacgtaaaaaaaaaaagcgtatttattaaccctatagtttctctttttcttatcaacctatttcaaccctacatacatagtggaaccgagttttatctcaataggacaatatctcatcataaattacaaagttctcatttcaattaccatgcaagaagaattcactttccgtttattaattatagctagagtgtaaaatggtaatgatcttactgttgtttgacccaaatgaaaattcttttggtatataaaaaattaattgataggaacaaaacgaaaactttctcctacctagaattagaagtatggaaatacagttggaccactggaaaaatcatcattatttcttttaatatcagtatttgatgacatattgttcaaagttcaaactggcactcaagaaaaattgatattcttttttgatatgcaacagttggaccaaacctttttacttaataaagtttacatctattgtgattcttcaaactaacacttatataaaactgttttttttttgttcaatggctatgatttcgtcaaggttaatttgtacatgtaaacaattaaacgttcatccactaaatgttgttcaacctgaaccgatgtggagtcagtaaaaaacatataagacatcgaccctaatgacaaaaaacagagtgtaactatattacgtgtgtgaagtttattactagttcgggaagttttaattggtcaaaaggcgcaggaaggttcatcatttgttgttgaaaagttgcattccttttcaaaagaaaaaaaagtaaggtttttatgaaaaagcctttcaagagaaaacaaattttggttatatcttatttatatggtttgacaactgaatcaaacatttaccaaggttgtatttgatcattattactaaaaataaaatcagctaaaaaaaaaccattactaggtctagttacagtgttacactgtattgtaaatcatttagtaataaaccaaacaaattactatcatcatttttaatttgtgtagtcattacatacatgcaaaattgtaaattaaattataaaatcatgccatactatactgctagatgaaaattgaattgtcatatcaaattaaaaattaatgtattttcatgaaaactggaaaaaaaaaactattaaattagaaaggcgaaattcaacgtgacgcatctatctatataggcttgggcttataatatatacaaaagcccagttaattattaatgggtcgaagtcgaaacttgaaagcaagcagtgtcatcgttctatttatcatcagcccaaaaaaggaagaaaaaacaaatcaattttatgttcgtttggtataatatcgattttaattttaaccaagtaaaccggataggaggagattcgtaaattgtaatcgataaaagagatctgtgtcaaaagtacgcgtgaggttctctcttctctgcaaacaaaaatcctggcgttgatagcgattggttaattgtcggtgaatcaacgtttttctgttacacatatcaatcaatcatcatcctcttcatactctcttcttcttcttcatcgtaatcattagcttcaattccgagttttctcttcgtcgccgttgtgctagagttttgtcagatctcgccgggaaattagcaatggcgttttagtctgtttacctgtgaagcttttgcgtaaacgctggattcttctcaaatctctctcacctgatctcttattagattccgagtatgatttgtttctctccttcattatattcgggttgcttccacgatttcgttgcttgatttagttttttttttgaatttgatagggatg

SEQ ID NO: 26891 - DNA, 3003 bp, Unknown; identical to SEQ ID NO: 26890
  misc_feature (1)..( 3003): 2750-1469P.txt file - cDNA_ID_2716702; gDNA_ID_2214456; Annot_ID_182640

SEQ ID NO: 26892 - DNA, 2096 bp, Unknown; identical to SEQ ID NO: 10885
  misc_feature (1)..( 2096): 2750-1469P.txt file - cDNA_ID_2716713; gDNA_ID_2214460; Annot_ID_132972

SEQ ID NO: 26893 - DNA, 2096 bp, Unknown; identical to SEQ ID NO: 10885
  misc_feature (1)..( 2096): 2750-1469P.txt file - cDNA_ID_2716713; gDNA_ID_2214460; Annot_ID_182731

SEQ ID NO: 26894 - DNA, 3000 bp, Unknown
  misc_feature (1)..( 3000): 2750-1469P.txt file - cDNA_ID_2716728; gDNA_ID_2214460; Annot_ID_132967
accaaacttctttctcgaggcaagagcagtctccaagttgatagcccattcttcatagttatcacctcggagaagtggatgggagatgacatgtcccggatgatcacttgcttttgaataataatatgacacaatatcttcaagtgagtaatgtgcgtttaatggggatggaattcagattaaagttttaaaattatgttttcttgttctgaaaccagatatgatactaattaattgctggagtagtaacatgatacaattaatcgtaagacaataaatatgcggtcgattcataagaaccacgtctgatgctctaaagatttgtgagactcgtttttatgtaaagcataaatgatatttgttttgttttcataattgtatataaaaatgcaaagaaataaacgatttaaactacgaattaaaaacactgggtcatacagtaattcagagatcaataaagaatgaaacaacaaaacagaaattcaacaattaaacaccatgactggataggggcatgcagaatccactgatggactaaagccaatcttcttcacaattaatgcaattgtctatgtagttcaggtatattgttatatcgtataattttgtttgtaaaatctataagaagtttgtgaaaattcaaaatgtaattttgtatgtataactttacttttagatatctctttggttgcttcggatgtggaagtcgagttatgctaatcctacctatgatgttcttagcatgtaatttggttccatccaatttcaccaaaagtatatatttgtcttgctatatcatatatggtactttagctgtctcaactctcttgtgaatataacataattctaggtgtttcattgttcgtcgcctttggatttttacgttatggtagaaggtaatctgtcgctacttgaatatatactacatttgacattagaatgtaaatatgctcatcttgcttgcattctagttcaccccgctaatgcatggatagactagattccctcttggtgctaaagccgagtacatctacgtaccatttaaaatgatcatggcatgcattggtttatcaaaaaagagcttgatttcttatccttgtattatgtctatcttttggcagcctaatgttggatcggtttctagtagaatttaaagggcatagcaaaaaagatgaaagaggtgaaacatcaaattgtacaaaatcataaccaatcaatatttacaatatgacgcttcttgactcttcacactctttctctcttatgtatggttggttatgtgacaacaatttgctttacatgtttcctcatccgttgtatcttggtagagacacacacacatacacatgtttatcttgatatctattaatccttaccttcttggtttaaattttagactggacaactaaccaaaggtttattcatttaatatggtttagatatgcttcgctgctttctacgaggaagaaacccatgatatgatggatcatccaatccttaatctcatatattacctggtaagctctctcttaaactaatcataaaaattgatcatgaacatctgtctcatacataatcaaaccattgtttctgcttgaaacctaatcttgttgctcaattacagttggtagagatattaccgtttctctggttctgcccaccttgagaaacctgccaccaaaacgacgtgtacacgaaagttaatgatccttagaccagtttaatcccataatttctctgaagaatctcaagctttctatctcatttggatgttagcttcaataatctaagctttaaatcttgatggtctaatctccatttacatgcttttgaataaatctgtttgacacaattttttcaagtctaatgcggttaattaattgattgaccccatctgttttgacataatttcttcatgtcttttaggttttttaaccaattatgatacaaattttaaatattgctaccccaatgtctttgtttgtaactttgtgttaaaggccggatctaccaagatagccctgtctaaatttgatttatgttagtcatgtaggtgatgtatgatatcttataatggtcatgtaggtgatgtatgatatcttataattaatcatgttggaaatcacccccacaataatatatgtaaatatatatcttaattatatcttaaaatatacaattatggtaatcaaacttaacctactaaaagaaaaacattagatgataataatggcatctttgtaatatttgataaaaataaaagttgttatagtctatttatttgtgaagatgtataaaatattgacatttctcttctctatatacgattttcatgtatcttctcctcatacttaatttgattataagtttaaacacttgctgcaattacaaggaaagaagttgacaaagtggaatggtcaatccctattggcaaaaatagatattttatatccagaacatccaaaatggaattcataagtttccgattaaattttgagtgttgacaaaaatagatatttttctatataaaaaaaaaaaattggtatctatccaaaacactacttgtaccaaaatattatatatatatatatatatatatatatatatactatgtattgatgagtatactaatgaatctaattaatttgtttttccttgcaacttgttttagaaaataaattatcaaaaggataggttcgagacgttgactttgattgagacctttactcagtattattatgggtatccattgactttaaacatatcgaccgttgaaaagtcaaaacttaaatgtgaactacgtcattcaaaatttcttctttcttttcagcatagaagtttattcgttaaatcaaaagaaaaactcaatttttctattgaatattatttgattaatttcatggcttaaggaaatatagaatccttctccttctcaaattctcctataaatcaacccttcacgtcaaaactagcttgctacacttaacatatcaaccaatg

SEQ ID NO: 26895 - DNA, 3003 bp, Unknown
  misc_feature (1)..( 3003): 2750-1469P.txt file - cDNA_ID_2716736; gDNA_ID_2214460; Annot_ID_132965
ccaccacacaaagacgcatgagcacaaaagcggaagaagacataagctcattattgtgagtagaaggagaaagtgtcaagtgattgaagtattgaacatatattaaaaaaaaataagagaaaattcttttttaaaaaatgtttgcagaagagtgggtgaaaatttgagtcagaacttagaagaaatgagaccgacaaaaatctaattttttgagtaaaacaatgaaggaaatatgagtctgatgaactctgacacaacttttgtttattatttggttgcaatgaaataaattggggttaacgtgcaattcaagcaatctctcagtgataatgtattcaactattcatatactacagtcttctccacgaactatccacaaacattaccatatatataatataatatatacacccacccacacatatggacttctgctcccccattaaaaaagtatctaatcaagttttcagttttatatcagtttttagtttggacaaacaagattttatagataggttacatccattgaaagaggagttgattacacaagataataacaaagccataacaattttatatcgttttgggttgggaaataatctataaaaaaaaccaaatagaaaagctgttacagttttgcttaagttgggcttcttaacaaacaaaatctataatatgaaagtttttttaaagatcagtttatgtttagcttctttcggtttatagatgtagatattttctagcataaacattagactaatgtgagctatgcctatgagtttctcgtaattattcgcaattctttttttatcatccctttattagtctctatatcttcatttctttctttctttctttttttttctcttcatttcacattatatgaagatgttttctaacataaaaacttaaaattacataatccgaattagattgctacgagctatgcattttcttgtgatatttcacaattctttttagtaaaaatgtctcattcagtgctaaatcacctctaggttttttcctctttttttgaataccaattcacctatacgttagttgtcataaatacgtcttttctaacgttggagactaattggagtagttaaattaaatgactcgaactactactactatagagaatactagttacttaggtataataacatattatatatttctatcgaactgaaaataattgaataagttatagtatatccaaaagaaaaatagctttcagagtatccgacacccacgtgcaaggggaatgaataaagtcataataaatatttttctctttaagactcccacattcattcgcatcattatcacttttttttattcaccattttttcaatgaattgcattattgtatatttacttgaatacttccacacattagtttactaggttatgttataatataacaaacacatacagttaatcgacaatgtgtaaggataaattattgagctaaatttattcatcaatgtatgagttttttctgtcagactgtttaataagattgacttatgatatgaataaatgactgatgggtcgaaaccagaataaaaagctattttaattatgattgcactaactttaacgtgtcctttatttctataaaagataaagaataaataatcaagaaaaaagtccttaacagaaaaaaaaaaaaaaagagaaaaagaagtgagagacagcgaagaaaagaaaagctggtaacctcatgggatgttttggctttgctcaattatttcgaacttttgatatgattttgttccattccttttcattaatcggatgtgaaagctatctacttcgtttattgtataaagtgatgaagaattcttacaatctgaatgtgaaaagtaaacagttctttggctatcaggatttggagcagcgtttaatgcggcatggaaacggtgaacatccgtgatcactttaaaaaaaactatggcatacacaaaacttctgttttaaaaataagcgtataattggcaatgacagaatttagcaaaaaatgatgatgatacaaattaatggtgattgtgtgacgaaatttgacaaattagttaagagaataaatgataacaaagatgaccgaactaaagatttagttaattaaagataactcaaaattattgaataacatgcatgcgatttctctggttcacatattcttgaataagattacaaaaaaaaaaaaaactaatagaacaaatggataattaattatctgacgatttaacaagaactatattaataaaggttatcaaaagaataatgttttgactcgtaaaattaaactagtcatatgtgagctattttgaaatattcaaagatttacctagaataagaatttattgagaattatttcacaaacttaagttgtgatattggtttgttcgtcgcgttttttgtttcaaccaaatttcacccatttaacctgattaaactattatatactataaatgtgaattttcttatattttggttaacaaattatattatattatatgggttaaaacttgtgtaataacgtagcgataccactaacataaaacaaaatattaattttagctagtgtaacaacagtttcaataatattttccctttgatgtaactaagcatataattttagcaactataacaacagaaaattctatccgaatagcaaaaagaattattgaagttgatgtcattaatgttaacacagtctaaattaaaaattattttcataatttattattttttcacttaatgttttttcctcttgtcccctataggcgttagttactagtattaattgtccactcgtcgcggaaatgtaacacacattcctcgctctctctctctctcaaatcacttgcaaagacaaagatcttccacttcctcttcttcttcctcttcctttttgcctttctctgtctccctctagagtctcttctatataaatatcactagatttagtgtttgatcaaatcacattcaacaatg

SEQ ID NO: 26896 - DNA, 3003 bp, Unknown; identical to SEQ ID NO: 26895
  misc_feature (1)..( 3003): 2750-1469P.txt file - cDNA_ID_2716736; gDNA_ID_2214460; Annot_ID_182724

SEQ ID NO: 26897 - DNA, 3003 bp, Unknown
  misc_feature (1)..( 3003): 2750-1469P.txt file - cDNA_ID_2716766; gDNA_ID_2214461; Annot_ID_132980
tatgttttgctaaaggatgataaaagacttaccaggagaatgtctgctccttcagcctcgtcttcacgtgcctcaatcaatgcctctctgtagtttgctgggttcatctgatacctgtagttcaaaacgtcagtttgtaactgttagtgttagcagaagaaatgcaaattcagtatcgatgagggttgatgggatttacgttttcttgtctccgaaacgcgggtttgagtccagggcttcacggaaaggaccgtaaaacgaacttgcatacctgttggccgaagattcattcaattagacagaacaaacaagaacatgcttccagaaaataaatgtatgattacttacttggctgtgtatgacatgatggagacgttttgaaatccttcagcatcaagagctgagcggattgcacctactcgcccatccatcatgtcactcggactaactacgtcagcaccagctcgagcctggaaagagagagagaagaagaaatcaacctcattggtaagaaaaagtttcagacattttaactctttgatatcgaaaaaaattacctgggaaacagcttgtttacagagctggtgtactgtttcgtcattcataattacacctacagagataaaattgtatcaaagctccagttaaaacgttatagatggaagttgggtataaatacttaccatcctctctaactatcccatcgtgaccatcagatgagtaaggatccaaagccacatcagtgtagataatctagcaacagaggagaacattagtcacaattgcaaattaaccaatttttcatctcctggtataattaacaaaactgggattacggatcttacaagatcaggatatttgtctttaagaagacgaattgttcgaggcaccaaaccattgtcattgtatgcctcatcccctgttgaattctacaaaatgaaaaccaaaacaaagcgttaaatatacaactcaagaacatatgtacacaaatagaagagaagtgtgaaacaccttcaaagcctcaggaactttagggaacaaaacgatactgtttaccccaacagctcgagcctttgcaacctgtttgcatataaaatcatgttattgtaacacagcggcaacagatacaggaatcatcatatcaaaacataaagccaaacctcttgtacaagaccatgcctccagccaagtctgtagcaaccgggcatagctccaataggcgtgtcttcctcacctgccacactccaaaaccttataatgtttcttaaagacaagagagagagccattgaatgtcagaatacaaaagaaaataacaaccttcatgaatgaaaagtggatatacaaaatttgcaggggagatatcagtttcctgaaaggcagctctagtaacaggggaagcgcggttacgacgtgggcgtcggcttagattctgaaagcattcagtaacaataagccacttataagcttcaaccttacagctaaacattagattctgaaagcatgaagtaacagtaagccatttaaaagtttcaaccttgcagctaaacatcagattatgaaagcataagtaacagtaagccatttaaaagttttaaccttgcagctaaacattagattatgaaagcataagtaacagtatgccacttaaaagtttcaaccttgcagctacttattgttcactatacggagatacagagatagctaatacacaagagtgatgaaatcaattaaagaagtatagattgattcaaattatgttcttagataatagcaaaatcatctatacaatgcaactagagcaaattcacaatgaaagtaagagacttggatactcacaagaggcttaattatcggtgtcccaaccggagcagccggtttaggtggaaccggaggagcttcaggaacatttccagcagcaacggcagcttcacactcagcatcactcattccaagcttcttagcatgtccattgccggattcactagctcttacgacaagattacgacgttgactagttgcaatgcgagaagaagcaacactcactttactcacattcgatctcagaccaatatagcttttgcaatcgattcctctagtcgaaggaaagctgcaagaagcattaaagatgggtgtagtagccatgaatctgcaacacacacacaggaacacattgaggattttataagcaaattgtgatattgaatttcgaaattgaggtttcttagatgtacccgtgactaagaatgcaggtttgaattgaaagttacagactttagatcgtatattgactaaacaaagcaagatttaggtgaaaaatgaagaagaagaagattaaagctgttttgttcaaaatgaaaacacagaaagcaaagagaaacagagtaaagttgtgttattcaaaccttgaattgttaagaagttgttgggattaaggaagactgggaaaaaaattgggtttatgagaaagatgataactttggatgatcgccgattttgacattgacaaagaagatagagactgatgttcacgcgctttatctacgagtttgagaactgggaaattttaagtgttgatggttttggaactgggcttgatagagttttaatgggcctgtattaattagatgaaactgggcattctaaagtattgtccagttacaaaattttaaattctctaaaacggtctacaactttatatcggtactctttttttttttttttttaaatttatcttgcaaataatggaggaagaaaattcaaaagatggaagaagcgagattgtttcagtaggcctacgaacacatatagccataaaggcatttcttactagtcttgattgagaaagacaaaagataaaagacaaaagacgaagacttgagacttaatttctgtccaaggaaacggaatctttctaatctacctcttcgtacaaaaaattgtctgctttacaaaacaaaaatattcaggaaagaacaagttctcttgagcaaatcataaacatg

SEQ ID NO: 26898 - DNA, 3000 bp, Unknown; identical to SEQ ID NO: 10896
  misc_feature (1)..( 3000): 2750-1469P.txt file - cDNA_ID_2716770; gDNA_ID_2214461; Annot_ID_132979

SEQ ID NO: 26899 - DNA, 3003 bp, Unknown
  misc_feature (1)..( 3003): 2750-1469P.txt file - cDNA_ID_2716778; gDNA_ID_2214461; Annot_ID_132976
aaggaaaaaaccaaacaaaactactatttgattaaccccacataagagctgttctatcttgtctctccctcctttcctcttccattcctttccataatcaatctttctttttattttattttattattttcttaatttctcttcccaacatcccttgtgccgtattcatcgatgatgtttactctaacatcatcaaccacataattattaacattttaacgttcattttcactttcgattagactactattcattactttgagactacttatccgtctctaactgacatttcacgcatcacatcgtgccgttctgcaatcaaaacttttgtatcaaagtacttttacttatccatgcatacatatagcttcacaaatacccgaatatttattgaatgagtatgatttaatttttattttgtatggaatgtgaatgacccaaaaagttatttttttttttggtaaggaaagagaaattaaagaagttataaacaatctggtttttagaagacgagtaaaaattgttaatttcaactaattatttttagtactcaagtatatattatatttattggcaaaacataaaagatgtaaacatctagatacattttaatccattcgaagaacttaacaaaaaaaaatttcatacattatattacattcggtgtggtacagatcgcacggtcaatcaatctaaagatcacttgcggtgattgagcgacgttgtatgattttatccatacttcatattgtttactgttatgatccattcttcacaagattgactagacgcgatatatgtgcactcttatcatcaagaagtgaaatatagcgtatgattagatatgtgaatttaaaggctagtcttacaagttgctagcgaatttggaaaacttgtatagtcgtttttttttttcggtatgatcacccaactttgacgtatctatttcagacactataaaagcatatgtttcgattactgtttatccaaatggaaatgtctcgcccaaaacctcaacatgaaagtcaggaaagtccaacaacgtagttttcaagaagtcacaatatgtccctcctctcgtgtcacaccactcctagtcctagcgaactagctgcatagtgtaaaatactttatatatgaaaaacttagacataaatatatatatacgtgtgcgtgtgtgatgcatgtttattgttttttattcaggcctatatgcattctacatgttttagatcaagatggtgatacagagacactactaatacaaacacttgcataaatcctctatgattatgtcattcgtattcattattttaaaaagaaaatttacgtcaatacttgaaatacattaattgatatatgttttcctagttttggagaaaagggtggtgttcatatgttgcaaaacacaaacatgtaaatacagcaaagaagacatagtggacccatgacaagaaataaggcccaaaagttgggctaatttcagccatcacgacaaaggctacttctcatttcgacatccatattattctattcttgtacacttctctttcattcactcgtcattaatatgccttcaatctaatatatttaaggacacaattatacacacgtccatatataaacttatattgttgccttgttggatatatataaaagttattgtaattagtagttactagttagagtaattttcaggtctaatagtgatgagattaacgtattttcttctttaaatttcagttatttgcaaataatgtcactgctcgatttcctggaataaaggagctaataagagtatcatgttctccttcatgttaccatttcacgtttgcacgttttttttttttttattatgaacaagattacgatcacacgttcggtttgttgtttagtcgttccaagtgtataggagttttatccacacaaaaaaaattttgataggaatgtgtaattccataaagatttccatcgttacacactaaagttttatcttacgcgccacgccgtttgtggagtaaccgagtaactaatttactactagtcttgatgttggtaggattaaataaaagaatcatggagataggatacgattgtgtttgaataattcaatatgtttatatctggaaagatctacaaatttgatatgatcactaagattgtgggaatttattcaaatccaaaacacatagttacaaatcatatacaaatatggaaaataaataatgtctaataacatttgtgtaacatcatctttaatgcgagtcatttagaaatgtaactttttttctttctgatatgtttatttctggaaatatatacaaaattgacctgatcactaagattgtgggaataattccaaaccaatatagaaagtgataatttattaaaaactgaacatttgtgtaatctttttttttttttttttaatgtaatgtcaaattatattcaaaaaaaacatatacttttttacaacttgtgcttcatgtgtaagaaagggagagtgctaaaaaaaattctgaaattgtccaaaaatgattagatctttcgtagagtcgatgttgactaccccgggaatgaacccatttgtgtaatcttttaacatttattaaaaacaaatcatagatagctaagattgtgggaagaattccaaacgaaattaaattcacactaacacatttactaaaatcatagatagatatagaaagaaaaaacttttctactaatttttttgacatttgtgtactcattatagcgagagaaagagatgggcctcaaaacttttattaggcccaaacgttttaaattcattataaaaataaaacaattccacgaaaatttcgaaacccatcactttggcgcttatgtgacgcgcttatttcgccctcaatctcagattatttagtcctcacactcgtcacacccccgcttcctagggtttcatttcgtctctttatcttccttcgtctctttagcttccttcgattctctgactcaatcatg

SEQ ID NO: 26900 - DNA, 3003 bp, Unknown; identical to SEQ ID NO: 26899
  misc_feature (1)..( 3003): 2750-1469P.txt file - cDNA_ID_2716778; gDNA_ID_2214461; Annot_ID_182774

SEQ ID NO: 26901 - DNA, 3000 bp, Unknown; identical to SEQ ID NO: 10892
  misc_feature (1)..( 3000): 2750-1469P.txt file - cDNA_ID_2716786; gDNA_ID_2214461; Annot_ID_132974

SEQ ID NO: 26902 - DNA, 3003 bp, Unknown
  misc_feature (1)..( 3003): 2750-1469P.txt file - cDNA_ID_2716794; gDNA_ID_2214462; Annot_ID_133008
ttcgattcaaattaggtttttttccttagagaatcatatctgtttataaagagtcggctttgagttgtggtacgatttcgtatttggtctctttactagatagttcaccaactgctcgacgtaatttctcaatgaatccctactctctttttcataatctccggcgaaactacctgtagattgttttagatattcatatataggttattgagctttattctgtctgttatatactgtcactttctcaaaattcaaaattttggatatcagaagtcccaattctgttcaatgttttcctattgtaaagaaattgactttttacttcaacaatccaaatttcttcaccatttgtctgatatttgtatatatgtttacttattggatgatttcatcagtaatttgtgggatttccaagctccagtttttcgaatatggcggaagtaagtcttggtatgcttatagacattgtggacgaagagtggatgagggacactttgcctgatgatggtaaccctttttcctcctacattatacctcaagatcattgtgtttctcctattttctatttcataagagattattgttgcagatcttccattgcctccagtgcttgctgttaaaactgatgatactgaagaaaccagtatggctctttgtttttttctttgctttgctttacagtttacatagctttatgattcttaaggtctaaattctttggaatatagtcttttcttaaaactgctagctgtgaatccacactggtgatgcatttctgatccaagatgttaaacacccatattgagaccttgaaatgtcataaggaaagtaatggagacacatacgtcactttttgtgtatgtttcaaacatagtaaagctcaaatttgagctttgtttcagagggtttctgagatttaacaactttcacttccaagatacctatgaatcttcatataagcagcttgactaatataatccctcacattgtgattgtttcagatcaggaaactcagcaagcagatgctgaaacttggcgtgatctagctcttgatacacagtaatagcctcttaagtacaatggaaaattcttacaagtcttgtttctcgttgtgtatgatcaaaaccaaaactgttcctggctttgtatttttttttggtagaagaggggggcgaacccccatttttattaaaactgaaaaactaaaaaaaattacacttgaacgttccgggggtacgcagaccccgctacattgtcgtgaacaatcgacataacactatctggagtagaattaaacaaatgaaaacctaacggtaaaagaaaagcatagttagctaacccatccgcgagatgattagcttctctataaacatgcgaaatccggactgaccagtcctttgaaagtaagccatggcacaaccgcaccaggaaggacagcggatgcgaatcatcaatccctgtccgaagaaaacccactaccatctccgaatcaatctccatctccaactgtgtgacaccgcgctcccaagcgatatttaaaccgtaatatgctccccatagttccgcaagcggagccgaacaaatcccaatattcaacgaaaacccataacaccaatttccatccccgtctcgaactactccacctactgtagctagtcccgggttaccacgcgaagccccatcagtattgagcttaaaccaacccacccttggcggagaccacgcaatcaatctctcctccctagctgtccgcgtcgtcactcccattttgtgcacatgcgccttctaaacatccaacgcacgatccttaataaaacgaacccgatcccgacacttcctgttctcgccaaagatgttaccgcaacgccatttccacccccaccatatggcctgcgaaaaagtgaccgcccatggacaaccattaatctctatctcctctcctaaatttgcatagatccattctaacagcgatttcgaaaagaaagaagagagtctccgtgctggtaacaagcgggtccaaattcccgccatcgccggacagtcccgtaaaatgtgtagaattgtctcctccccactcttgcatactgaacataagctcgaatcacataagtgccgtctgtgtctctcaacattcgtcatcaacacctgatttgcagccaaccatatgaacactcgaactctttcatgagctacaacacgccaaattctagagaaaaaacgcgccatctgctgcttcgaactccagtccaagcttaaaaaagaataagctgacttgactgtaaatttaccattggaacaccctccccaagacaaacgatccctagcccctgtcacattatccaccaccaaagatagtaacttgagcttcataccttctgtgatatacggcgtaagcctctgtaaatcccagcccactccatctctccaaacatccacaactttaaccgcctcccagttcgccggtaattcgcatgttaccacctcacataacggggtctgcgacatccacctatctttccagaagaggatatcaacaccatcccctagaacccagctcaaacccgagaaaaccacctccttcagacccacgacaacgctcctccatgtagaagaccatgtacctttagacaccatccacgctctgttatgaatatcaccgacacggtacttgcttctcaagattttcgaccatagactcacatcatcatgaagtaaacgccacccaattttcgagagaagagccgtattcatctgtgtagagcaccagatgcctaaccctccatcctgttttggcaagcacacacgatcccatgcaataagatgttcctggctttgtatgatgaagacataattgctactctacttaatattaaaaaaaaccttggtggcataaattttaagaatttgtcgctgacgtgtctcgtgatgattcgtccacgtggttggcaaacggctcctatttaaaatctcaaaaccaaaaaaaaaaatcaagcgaggaatatg

SEQ ID NO: 26903 - DNA, 3000 bp, Unknown; identical to SEQ ID NO: 10915
  misc_feature (1)..( 3000): 2750-1469P.txt file - cDNA_ID_2716798; gDNA_ID_2214462; Annot_ID_133007

SEQ ID NO: 26904 - DNA, 3003 bp, Unknown
  misc_feature (1)..( 3003): 2750-1469P.txt file - cDNA_ID_2716804; gDNA_ID_2214462; Annot_ID_133005
agatgagtgcgtatggctttggcacacaggttgatttaaacaatggcgaaaccgttatgcagtactacgtcccgtacctatccgctatccaaatccacactaacaaacccgccttgctttccaggttacgtttcccacttgattctgtgacattttagtctgttgtgatgaaagtttgactatggaagtattagaacatctcttgatggtttgttcttgggtgttgcaggaaccagaatgaggtggctgaatctgagagtagcgagggttggagcgatagtgagagtgaaaagttgttgtcaaggtcaatgagcaatgattcaagcaaaacatgggatgctgtctctgaagattcggttttcgatccggatggttcaccgttgctgaaagatagacttggtaaccttgactttaagtacattgaaagagatcctccgcacaagcggattcccttaaccgacaaggttctcttctctcctttcattttcatttcttagtaacctcattctcagttttgaaacgaaagtaacgttcttggttcttgttcagataaacgtattggtggagaaatatccgggactcatgaccttaaggagtgtcgacatgtctcctgcaagttggatggctgttgcgtggtaagtagttctttgttaagttaacaaaacccttcctgtttggttaactgctagaaatagtgattgagtgatggtttgatgaattaggtacccgatataccacatcccaacctgcaggaacgagaaagatttgacgacaggcttcctaacttatcatactctatcttcgtcttttcaaggtacgtatgatcacttcgaattcattgctcagtaacaagcaccattttctggttttattaatggtgttaaaaatgctgcagataatgtggtggaaggagatcaaagcaacaacaatgaagaaacagagttttgtgaagattccgtaataaacaagagaatgccattgcctccgtttggtgtaacaacttacaaaatgcaaggagatctttgggggaagacggggtttgaccaggaccggttgctttatcttcaaagcgctgcggattcatggctgaaacagctcaatgttgatcaccatgactataacttcttccttaactcgagcttctaaagatcaatcgggtcgttcgtatgtttatccttctccaaaccttaaacaaaaaaaaaagacctcataaccctttttctttgttgttttcaagctccttttgtttctctgtgttttttgttctttttgtttttgtctggctcgttgtgttgttttaggtagcaaccgccatcgcggagttttttctccttttgcaagccaatcatggaagtttctaagaagaaaacagagcttttttttctttttttttaacggtgttgagaaaacaagaaagttgttttcttttcttgggtgagagatcatgtaaattgaccttgaacagaggactctgttttgtacttttctgtctaaaatatataaaaaaatctgtctttcttgtatgtcggtatgagtggaagaagaagactgtttttgatagatttgatatgtcctttcgtttcttttcaagattttttagtgttgaatatgatgacgatgttgtcatacaatatttacttagtaacagttgttgcatacttttttttctatgttctttataatttaatttaaattgtttctatgttcttttcgaagcttaaaagaattgtgcaatcccaaactgaaacagtcaaacttactagttcaacaaaattgttttgctatatcgggctgatatttactgtcgaacacaggtaaaaaagtatttattttatttttttgttgaacacaggtaggtatatgcctacatggtatacaaataatatagacagtttcataacatttacaattgtaacatactgtttttacaatttttgttgtcgttttcttatttatcgtattaaaattgatcttatcctgaattttaaaatttagataactgacaaacgaaaagattaatgctaattgtatatgaaatgaaatgtattgttgtacattttaaattatatagacaatttaatgatatttacaatcacaaccgatcgttttgtcaatttttgttgtcgttgtattatttattgcatttatatcgatcgaaccctaaattttacatgtaattcacttacaatcaaaaataattaatgctaactttatatgaaattacatgtagtaaatttaaaattatattgacaatttcttctttgcatttttgttggcattttcttatttattgcattcaaatcgattaaaccctgaaatttaacatgtagatcattaacaatcaaacataattaatggtaacattaacatgtagtaaatttaaaatacaatacacaatattttgatataattttgagtttaaccaaattatccaacctataaaaacacatgcaatggattcttgaaatctttatgtctttagcgatttgaaatgaatttatgtagattttcatgtgtacacacaataagtaataaaatctaaattatcatctacttaaaataaaaacataaaatttaatcataaaatcaatactaaatatatcaaatcagtaaacaaaaaatcctatttcatattaatatgttaagaaataaacttttatgattttttttttccaaccactacatttatggttgtttttcaaatgttttcttatgattttctgagtcaatttttcgctttttgttagctggatactctctcttctgataatggtcttttgtttttcaaaaaaaaaaaaaataataattcttttttgagcaaattatttggttggaaattgcaaagtttatcaatcaaattaatctcatcctccttcttcttcttcttcttccaagtgacatgaactatacaacattacgcgttttcttctcttattgattccttcgtaagaaatcttctccactagttgaccaatcgagagacttgtggtcttcccggagatg

SEQ ID NO: 26905 - DNA, 3003 bp, Unknown; identical to SEQ ID NO: 26904
  misc_feature (1)..( 3003): 2750-1469P.txt file - cDNA_ID_2716804; gDNA_ID_2214462; Annot_ID_182808

SEQ ID NO: 26906 - DNA, 3003 bp, Unknown
  misc_feature (1)..( 3003): 2750-1469P.txt file - cDNA_ID_2716812; gDNA_ID_2214462; Annot_ID_133002
cacgcatcgtgctcttcgtctgcgctacttccctcgctggattctgctcctctgctgtgttttgcttgtctagtgattcgtttggacccattggaagaatagggtttaggggattagtgactggattgctttacgcagtcctctttgttactaagcaacgatgggttttggagtttcctatcattcaggttttgtgtctttgcttcttgatttatggaatgtttcatcaattttgtatctttgctgattcttacttgtgttttttcaaaacagcgtccaccgttcttcagcttcaagattggtcttccttcggctctaacacaagctttgaagctatctggtgtgctttatgtgttgtcgacgataatgctattgtttctgctagactggtcaggtgggcttgtgtctgtatcgaaatttttgggtgagcaggtcttatcttatgccggcagtttctgtttgattctctcttgggaagtcactcaccatatacataaggttagttaagttttctctgttgatttgctattgatagatgtaattggttggtcgtatagccgtttagattggtggtatagtgtttagtattttaagatccctgtagcttattagtgaacatagttgaggttagcactcagtattacttgagtgatgcaaaacttaactgagaaaaatttgaaaagacgacaagttagctgtgtttgcaatcaaatgttgcattgatagtatgtgtagaattgttttcctgttttgttagtcatttctgtctttactatttatgttttggaagcctataccaaggtctgtctgtcttctgtgtatgtggatcagttcaaagaagactcatataaatttgtatcgatatgtttacttttcttgaataacttaactctattcctacctaaacaactttaagtattcatcggtgagtttgctctgtgtattacttgttacatccataaacttcagctacttttccaggttctagatacaaaagaagttagttataattgttgttttcatatccaggttctgcacacaaaacggttcagctttgctcctccaaaaggatctgctgcagcagaaacgaatccaagcgagcctcttcttgctgctttagaagggagcgctccaggttccctcgagcagtctcttgcataccttgatctctacatggtgtctcagaataatgttgacacatggcgtcgtgctgccttctttgaggagtccaccgagacgtacaaaagagtaattactctatgcttgaggcctttggaagagcttgcctccaagttagcttctgggctagaccacacctttactgaaaaaggttatcagacaccactccagccaccaaccgagtcctttattgatccaaaattcggcgaatcacttaagtctttccaggtaaaacgaaattcaaattttgatcccttttctatgtgataatttcttcatgtagctgtaaccaaaatctgtttgctctgtatccgatatttgcagctatatgcatggtgtgctcaaacatctgcatccctgacttcaatctctcacaaggaagacaggctcggagtagctcaactgtctggtggaaacgctgatgttgtctcaacacttctatcgcttttgctagctatcgaaacgtttatggggaagaagactaatcttcaatcacctcaacaactgatgggacctgctagtatcaaatgggcgacctcgagtatggtcagaaaagacgttaaacccatcaaaaggagtattggcgcaatgtacgcctacgcatatgcagcgacagatgttttgaggatatcagtataccagattctatccacattccgcgatgaaatgctcaacagcgacagagccggacttcttggtagagattggattggaagcaagaaaccaccttttggaacaaacgacatgctcctacagaagcttaagctcttcctcgagttccaagcttgatggaagattaaagaggtacaattcctcgattaaatgtggtaacaagtgtcatcatgattcaagagctggatagaaaaaggaactagagtattttgttacatgatcaaaaagccttgtattggaaaatgaaatccctcgattttgcagaaatttgggattaatcttgtttttggtaaactagaaaattatataagaatcaaactttaatggtaagttttgcatcttaaatcttgattacataaattttgcagaagactctctatatgcttaacagtaactaactcttacgcaatttacgaaggaaaccaaaattagaatctgaaatgggccagagatttattagggcccatggcgtggctaatagtaatatcgaaggagagatcgtgaccgttggatgatgattaatataataattgtatagtggttaaagcttagattggctacattacacatcgcatttacttaaagggcaaaaccctccagcgccgcttggatctctctctcctctgttctctcttcccttatcttcttcttatacccttcgaccaacgaagaaccctagaaatcgattaacaaggtaagcccacttcagcaaatcgttcactcatttcatttccaagatattcgattgtttccttctgatttagcacaagggtcaagatcatttttttgtttttgttcttcctcgattcatatgttttttttcattgattactgtttttgatattggttatcttgttttccaataacttgttagttagttaaaagtaatgtttgtgtaatggtgacctaatcgattgaaaaaattgaaactttaggttaagctcattgtaacaatacgagctttgttcttctcgctgcactgttctcataatcctagtgtaatcaatttgtgggttgtgactattgctcagtattactgtttttgtcattggctaattaataacagtattagttattgtatatgcttaatttataagatacattttgggctaaatgggtttagctttgtgtgtttgttttgaaaaacagatg

SEQ ID NO: 26907 - DNA, 3003 bp, Unknown; identical to SEQ ID NO: 22734
  misc_feature (1)..( 3003): 2750-1469P.txt file - cDNA_ID_2716816; gDNA_ID_2214462; Annot_ID_133001

SEQ ID NO: 26908 - DNA, 3003 bp, Unknown
  misc_feature (1)..( 3003): 2750-1469P.txt file - cDNA_ID_2716823; gDNA_ID_2214462; Annot_ID_132998
ttatctacgaggtgggagaatcaagattgcgagattttccaattaaaaattgcaacaaggtttggtcatgtagccaaaattgaaagatagttggtaggcgactttttttttgttttagtataaaaatgtaattattgtccttaaaaggcattattgctacattgctaatcagaaactgaaaaaaacaaaaaacaaatggctagcaactacgttttctctgttctgaggtcgctgcttctgttaattcacactgtattcttaggtcagcaccatgttagttctgccacaattatcaagtctcttcctggttttgaaggccctcttccctttgagctcgaaaccgggtttgctttggatgtcttcgttttattaaatccgtgttctgaatctgagtttggagataatgtaaaaaaattaggttactgtttcttgtgaatgaaggtatattggtgttggtgaggaagaggaagtgcaactattctactacttcataaagtctgagaggaacccaaaagaagaccctcttcttctctggctaagtggaggacctggctgctcttccatctctggccttctttttgagaatggtaaaattgaaaaaatcgataaacttgttcttttgcgtctctgattactcgttgtaactcgatatatgtctatataagcagggcctctggctatgaagcttgatgtttacaatggaactcttccttctttggtctctactacatattcatggacaaaggtaatacaaaagtgtctagtgatacgactatcaacaaaacccgattgatcatcattttcctcaggcctcgagcatgatattcttggatcagcccgttggagctggcttctcctactcaagaactcaacttttaaataaacctagtgattcaggagaagccaaacggattcatgagtttctgcaaaaggtaaattaatgataaacttaattgcctcttgaagccaaacggttcttagtaggagcctttttcttttttttgttgttgtggtgtagtggctaggcaagcatcaagagttttcctccaatcctttctatgttggaggagattcttactctggtatggttgttccggctaccgttcaagaaatctcaaaaggtatatatatatatatatatatgattttatgatatcaatccccaagaccttttctcagtcttttattataacaaaaggtatatatatatatatggttttatgatgatgattgcaggaaattatgaatgctgcaatcctccaataaatcttcagggctatgtgctcggtaacccgttaacagactttgtatatgattacaactcccgcattccatttgctcatggaatggcactaatctctgatgaactcttcgaggtatgaagtatgacatttgcttttgtttcgtgtcaccccaatgaaaagcggttcaaaacaaaactttttgtccgcagtcattgaagaaaacctgcaaaggagactatagaaatgttcatccacgtaatacagaatgcttgaaattcattgaagaatttaataaggttacacactcaaagctgatgttgtttgtgccgtacgtaaataaatattcatccctaaattcatacctttttgtgattatctttatttagtgtacaaacagcatatgtcaacgacgtataatagatccattttgtgaaactgaaactccaaattgctatgtaagtaattcatacaacttattcttgccctctgttaaaccatttgagaaaaatatatgtatacaaggttgcttttgcagatttaccgttttttgctagctgcctattgggccaatgacgaaaccgtacgcaaagctcttcaaatcaagaaggtaacaatttattttaattttcttggtaagggaacaatgtttcttggtaagagaacaatgtcattcttataggaggatctatgattgcaggagactataggggaatgggtacgatgtcattatggtattccttacaattatgacattaaaagtagcataccttaccatatgaataacagcatcaatggttatcgttcactaatctacaggtttagagtttataacccttctgtccctaccaagattctagtcttttgttaaactttgtgcggtttttggtgaatagtggtgatcacgatttcgaagtacccttccttggaacccaagcttggataagatctctcaactattcagtcatcgatgattggaggccatggatgatcaaagatcaaattgctgggtatatataaaccgaatttgttcttccgttttatgagattcactttgaaatgtattcttgattcttacttgaatggcagatacacaaggacttatgccaataaaatgacatttgctactatcagagtaaagtctttcttcttcttttttttatccgctccaatatttttttattgcggttttctaacttgtactgagatgtgggttttgattgtagggaggtgggcacacaatagagtttaaaccagaggaagcctctatcatgtttcaaagatggatcaaaggccaacctctgtaaaagaggggagtaacgtcctttacgtataaaggaaaagaaaagtatgattctagtaacacatccaaaaatatatacataaggacccttggccttataagtgaatagaatttagggttaagttaaactcataatttgtaagcaaaatgtgtgttgctctattcaacaagcttggtacagttgcattttaccttcttttttgtcaacaagcttgttttccatttgtttgaagcaaaagttaatttacatgtattgttattaataagtgtcactaaagatatttaaattatatttttaatgataaaattatatgttggtagaggacaaggttggtcatgtagccaatatttaaagatagacttggtagacgactttttttagattttagacttttagtagaaaaatgcaatagttgtccttataggcattattgctaatcagaaacaaacaaaaaaatg

SEQ ID NO: 26909 - DNA, 3003 bp, Unknown
  misc_feature (1)..( 3003): 2750-1469P.txt file - cDNA_ID_2716827; gDNA_ID_2214462; Annot_ID_132997
tataagcagggcctctggctatgaagctcgatgtttacaatggaactctcccttctttggtccctactacatattcttggacaaaggtaatacaaaaaagtgtgtattctggatatgacgatcagcaaaacgcaatgatcaataattcttgatcatcattttcctcagacttcgagcatgatattcttggatcagcccgttggaactggcttctcctattcaagaactcaacaatataataaacctagtgattcaggagaagccaaacggattcatgagtttcttcaaaaggtaaattaatgacaaacttaattgtctcttgaagccaaacggttctttgtggatagacagtttagaagaattttcttcctttgttgctgttgcatgtggtgcagtggctaagcaagcatcaagagttttcctccaacccattctatgtcgccggtgattcttattccggtatggttgttccagctaccgttcaagaaatctccaaaggtatatatggtaatgatatcattctccaaaaccttagtatcttctaagtgaagaaccatgatgatgcaggaaattatcaatgctgcagtcctccgataaatcttcagggctatgtactcggtaacccgataacagaacatgcaatcgattataactaccgcattccatttgcacatggaatggcattgatctctgatgaactttacgaggtatgaaacataacatatattcatgtccccacaattggaaaatataaaataacaagcaattcaaaaacattgtttcgttggcagtcgttgaagagagtctgcaaaggagaatatgttgatccacgtgacacagaatgcttgaaactcgttgaagaatttagtaaggttacatattcaaccgaagaatcatattttagctgttgtgtgtgtgtgtgtctgtctcccttagtaaataaacaacatcacttttgtggttattgtgtgttttagtgtaccaaaggagtatgccaagaagttgtaataaaaccattgtgcgtaactgaaactccaaattgctatgtaagtaatccaagtatcttgccctctcttaaccgttaaaccatttgagaaaatatatatatatatatatatatgtatacaaggttgcttttgcagatttatcgatatttgctaactacgtactgggtcaatgacgtgaatgtacgcaaagctcttcaaatcaacaaggtaccagtttgttttttaagttcatggtaaaaagaacattgtcattcttataggagggcctatgattgcaggagagtataggggaatgggtacgatgttattttggtattccttacactcatgacattaaaagtagtgtaccttaccatatgaataacagcatcaatggttatcgttctctcatttacaggtcagagtttaacctttttacgatcatcgttgtccctaaaaaggaaccaagacttatgtaaaatattgtgtgggtttttggtgaatagtggtgatcatgatttgaatgtacctttccttgcaactcaagcttgggtaagatctctcaactattccatcattgataactggaggccatggatgatcaaagatcaaatcggggggtatataataataaactgattttgtttttaaatggcttctcttattctttcgttttataaggctcgatcacttcgaaatttactcttgactcgtcttacttggcagatacacaaagacttatgccaataaaatgacatttgcaactgtcagagcaagtctttcttctttcctttttttaatccactcgaacatttttattgcggtttaaggtgtattaagttgtggattttgattatagggaggtgggcacacagcagagtacaagccatatgaaacctatatcatgttccacaggtggatcaatggccaacctctttaaaagaagagagtggccttttatgtataaaggattagagtttatggatctagtaacccattctccaaatatttaagatatgatcgttgtatgcaagcttggtttgcctcaagataattgcaaaagcttaggttttttttccttatcttctgacctgtataaaaatcttctaaacaaacgttgcacttgatgtaaaaaagttttttcgaataaatttaacattttattcaaaaaaaaaaaaaataataaaaaaaaaaaaaataagaaccctcggcctcataaagtcataatttgtaagcaacatgagtgttgcttttcaacaagcttggtacagttgcatttcactttatacaaaatatatccgttgtccttgccaaaaaaaaaaaaatatatatatatatatatccgttgtctgaattaaggtttttcatgcttttattgattgctggatcattgaatgtatgcaaatgagatttgaaaaaaaataaaaaataaaaattctgagatgaatgggatccaaattggatgaaatgaaccagttttctggaaagtaatctaagaatatttacaacattatatttgtgtacaattgcttgatttttcatgtacgattataaacaaaattttatagtcataactctctttgtgtttctctgtttactttgttcatcaaatctggaataaaaacatttttcctatgtttcttttaacatttttacagatcacatatgtatttttatatcaattgtttttaaaggtaatcttgaagaagaacgaaaaaaggattcagatcattaaagatatgtaaaattaaaaatttattctaatacttctatgatcgtgatcgcgaaaaaaacgaggaattaacaaataatttttgtattatctacgaggtgggagaatcaagattgcgagattttccaattaaaaattgcaacaaggtttggtcatgtagccaaaattgaaagatagttggtaggcgactttttttttgttttagtataaaaatgtaattattgtccttaaaaggcattattgctacattgctaatcagaaactgaaaaaaacaaaaaacaaatg

SEQ ID NO: 26910 - DNA, 3003 bp, Unknown
  misc_feature (1)..( 3003): 2750-1469P.txt file - cDNA_ID_2716831; gDNA_ID_2214462; Annot_ID_132996
tctactacttcatcaagtctgagaggaacccaaaagaagaccctcttattctctggctaactggaggacctggctgctcttccatctctggccttctttttgagaatggtgaaatcgaaaacattgataaactccttcttatgcgtctctgattagtcaattatatatatatatatatatatatatatatatatatatatatatgtgtataagcagggcctctaactatgaagcttgacgtttacaatggaactctcccttctttggtctctactacatattcttggacaaaggtaatacaaaaaagtgtgtgtattcttgatatgacgatcagcaaaacccaatattcaatatattcttgatcatcattttcctcagacttcgagcatgatattcttggatcagcctgttggaactggcttttcctattcaagaactcaacaatttaataaacctagtgattcaggagaagccaaacggatccatgagtttcttcaaaaggtaaatggcaaatcttgatgcaacgtttctttgtgcatggagaaactaggagcctttttctatatttattgttgttgttgtttatgcagtggctaggcaagcatcaagagttttcctccaaccctttctatgttgccggagattcttattccggtttggttgttcccgctaccgttcaagaaatctcaaaaggtatatatggtatttttaatatcaatcccacaagcccttttctcaatcaattattataacaaaaaatcatgcatgatgatgcaggaaactatgaatgctgcaatcctccaataaaccttcagggctatgtgcttggtaatccgttaacagactatgcaattgatagtaacagccgcattccatttgcccatggaatggcactgatatctgatgaactctacgaggtatgaaacatgcatgacatttgcttcttttttcttgtccttacaacgaaagcggttttaaaaaaatactatttggttcgcagtcgttgaagaaaacctgtaaaggagaatatacaaatgttcatccacgtaacacacaatgcttgaaattcattgaagaatttaataaggtttacacactctagcgcctttagtaaataaaaaggttcatgatcactaaattcagagttcagacactttttttttgtgtgtggttatttcattttagtgtacaaacagaatactccaacaacttatactagatccgttgtgcgaaactgaaactccagattgctatgaaagtaatctatatatctaaatgttctctgttatactttggtagatttatcggtattcgagaaaaggaatttgtatacttttgcagatttatcggtatttgctaactacctactgggccaatgacgcgactgtgcgcgaagctcttcaaatcaataaggtaccaaatttatttttaaggttcttggtaaaggaacagagtccttctgataggaggatatatgatttcattcatgcaggagagtataggggaatgggtacgatgttatcgcactattccttacgataatgacattaaaagtagcatgccttaccatgtgaataacagcatcagtggttatcgttctctcatctacaggtgagagtttaacacttgttttgtccctaacaagattcaagactaaaacttttgcggtttttggtgaatagtggtgatcatgatttggaagtaccttaccttggaactcaagcttggataagatctctcaactattcaattattgatgactggaggccatggatgatcaaaaatcaaatcgctgggtatgtaaatggattctttttttattctttccctataggagactcactttgaaattcactcttgactctcttgcttggcaggtacacaaggacttatgccaacaaaatgacatttgctactataaaagcaagtctttcttctttcctattttatccactcgaatacattttaattgcggatttttttaacttgtattgagatgtgtgggttttgattatagggaggtgggcacacaatagagtttaaaccagaggaagcctctatcatgtttcaaagatggatcaatggccaacctctctaaaagaggggagtacctgccttaacgtataaaggaaaagaaaatacgattctagtaacacatccaaatatatataagaacccttggccttataaatgaatagaatttaaactcataatttgtaagcaacatgtgtgttgcttttccacaatcttggtatagttgcatttcacctttttttttttcagcaagcttgttttctatttgtttgatgcaaaagttaaattacatatattgtatcaataagtatcacaattatagagctaaattaaagttatatatatggttatcataaaatgttttaaactaaaatattatacagtagtataattaatttgttatgatcgcggtttattctttaacatagttttgttgtttagtaattttatacatggagtgaggatcaagattgcgagattttaatatttttatccatgaaaaaatgggacaacgttggtgaagaagccaaaactaaaagataagagtttggtaggcgacttttttgggttttagtataaagatgtagtaattgttgtccgtaaagacattgctaaccagaatccgaaacagggaatggcaaacaactacgtttcctctgttctgaagtcgctgcttctgttaatttaccttgtattcttgggtcagatccatgttgattatgcctcaataagcttatataatcgtgatcgtgaaaaacgaggatgatgaacaaataactttgtattatctacgaggtgtgaggatcaaggttgcgagattttccgataaaagaatgcgacaaggttggtcatctagccagaattgaatgatatatagttggtaggcgacttttgttttgggttttagtataaaaatgcaataattttcaagccatatattattgctaatcagaaacttgaaaagaaatg

SEQ ID NO: 26911 - DNA, 3003 bp, Unknown; identical to SEQ ID NO: 26910
  misc_feature (1)..( 3003): 2750-1469P.txt file - cDNA_ID_2716831; gDNA_ID_2214462; Annot_ID_182799

SEQ ID NO: 26912 - DNA, 3003 bp, Unknown
  misc_feature (1)..( 3003): 2750-1469P.txt file - cDNA_ID_2716835; gDNA_ID_2214462; Annot_ID_132995
ccctttgagctcgaaaccgggtttgttttcaatctcttcgtttaattaaattggtgttcttagtttggagataatttaaaatccgtcagatactgtttcttgtgaatgaaggtatattggtgttggtgaggaagaggaggtgcaactgttctactacttcatcaagtctgagaggaacccaaaagaagaccctcttcttctctggctaactggaggacctggctgctctgccatctctggccttctttatcagaatggtgagatcgaaaacatggataaactccttcttctgcgtctctggttactgtctgtaaccctatatatgtaaaatataaccagggcctctggctatgaagctcgatgtttacaatggaactctcccttctttggtctctactacatattcttggacaaaggtaatacaaaaaagtgtgtagtcttgatataaccatcagcaaaacccaatgatcatttcttgatcacttctctcagacttcgagcatgatattcttggaccagcccgttggaactggcttctcctattcaagaacgcaactttttaataaacctagtgatacaggagaagccaaacggatccatgagtttcttcaaaaggtaaaataatgacaaacttaattgtctcttgaagccaaacggttcttagtaggagccttttcctattgttgttgtttgtgcagtggctaggcaagcatcaagagttttcctccaaccctttctatgttggcggagattcctattccggtctggttgttccagctaccgttcaagaaatttcaaaaggtatatgtatgttttatgatatcaatcccctaagcccttttctcaaataccattattgtaacagaagaaacatgatggtgatgcaggaaattgtcaatgctgcaatcgtccaataaatcttcagggctatgtgctcggtaacccgttaacagactgtgtatatgattgtaactaccgcgttccatttgctcataaaatggcactgatctctgatgaactctacgaggtatatacgatgacattttgttttttttcttgtcctcacaatgaaaagctgttcaaaaacactatgttgttcccagtcgttgaagagaacctgcagaggagaatatgtaaatgttcatccacatgacacagaatgcttgaaattcgttgaagaatttaacaaggttaaacactagagctgatttcgtgttgtggatctgccttaaattaataaataaagattcatcactaaattcagaccttgtgtggttatttttatagttaacaaacagagtatgcgaacgacatatattacattcatgttgcgaaactgaaactccaagttgctatgtaagtaatccatatatcttgccctctcttatctgttaaaccctttgagaatatatctatcatacacggttgcttttgcagtcttataggtttatgctaactacctactgggccaatgacgaaaccgtacgcaaagctcttcaaatcaataaggtaataatttattttaaggttcttggtaaaagcacagtgtcattattataggaggatctacgattgcaggagagtataggggaatggacacgatgttatcgcggtattccttacaatcatgacattaaaagtagcgtaccttaccatatgaataacagcatcgatggttatcgttctctcatctacaggtcagagtttataacccttttgctgatcttttgtccctatcaagattcaagactattgttaaactgtaaggtttttggtgcatagtggtgatcatgatatccaagtacctttccttgggactcaagcttggataagatcgctcaactattctatcattgatgactggaggccatggatgatcaaagatcaaatcgctgggtatatacgggtttttttttttttaaaacgggttctcttattcttttgttttatgagattcgctttgaagtttattcttgatacttaactggcagatacacaacgagttatgtcaataaaatgacatttgctactgtcacagtaaatctttcttcttctttttttttttttttttttttttttttttttttttaattttcttttaatccatctgccatttttattaacttgtattgagttgtgggtgttgattatagggaggtgggcacacagcagagtttacaccaaaggaaacctttatgatgttccaaaggtggatcaatggccaacctctgtgaaagaagagagtgacttttacgtacaacggacaagagattgtgtgtgattctagtaacacattttccaaatcaatgctgcctctcggcccaagtttctcatagagacaaatcaaaatgatgtggattcatcatttctaacatcgactctatgaaactgctttagctatttctcgatatttcagttgtttcttccagatacaagtgaggttcctttaataaacaatggtgaaggaaaatcgcagattttaaaagttttaacgaataccaaagtagtaaatcgaatgtctaacacgttaagcttgaaatgaaatgggtgctataaaataattaagtaaatctcttaaaaccacacgagtccaaaacaataatattagtggattggttaattggtctatttttgtgtggacctttttttttttttgttttttggtgctttaaaaaatggattcagaatttcagatcattgaagatactctggtttgcgttttgaatcagatacaattatagagcaaaagattaatagtataattatatttctatgatcgcaaaatgcgaggacgattatttagtaattttatataatactcaataattttatagtccgtttatcattgacaattcattgttaatttgttatacagggtgtaaggataaaggttgcaagattttatccattagaaaactgtgacaatgtgcgactttttttgggttcaagtataaagatgttgtctttaaagacattgctaatcagaatctgaaatacgaaatg

SEQ ID NO: 26913 - DNA, 2532 bp, Unknown; identical to SEQ ID NO: 10910
  misc_feature (1)..( 2532): 2750-1469P.txt file - cDNA_ID_2716839; gDNA_ID_2214462; Annot_ID_132994

SEQ ID NO: 26914 - DNA, 3000 bp, Unknown; identical to SEQ ID NO: 11056
  misc_feature (1)..( 3000): 2750-1469P.txt file - cDNA_ID_2716859; gDNA_ID_2214477; Annot_ID_133141

SEQ ID NO: 26915 - DNA, 3000 bp, Unknown; identical to SEQ ID NO: 11129
  misc_feature (1)..( 3000): 2750-1469P.txt file - cDNA_ID_2716869; gDNA_ID_2214479; Annot_ID_133223

SEQ ID NO: 26916 - DNA, 3003 bp, Unknown
  misc_feature (1)..( 3003): 2750-1469P.txt file - cDNA_ID_2716875; gDNA_ID_2214466; Annot_ID_133038
tttcagttgatttctttgtctcttcatccccctctttgtccatgactattcttgatggagcttcggttttggtttcagtcgatttctttgtctcttcatcaatcatttcattggcttcaatctctaaacctctgattgtttcatatgttcttgtgtcttttgtctctacactatcctcctcctctctagcctcatccatgaccacaacttctggagctttggtttcggttctctctgataaatcatctgcagagttgttgtctccttctttgatgaactcgcctatttctaaaagcttctgcgcttttaattcgccttcttcattaacattgtctgctatctcagcttctgaaactttctttgcagcttctttcaccattgcagcatctacttcttttgaaaccaatttatcttccggagcttctctcgcggtttgctccaatgtaacagcttttaagttactcgtctctggtttttctttaatctcagcttcttctaaggctttcttttctgtattttcaggtttatcggattccgagtcagtaacaatctttggtttgatttctaaaggccccagctttccatcaatttccttgaccagatttgttagtgatcttgcattacgagcttcagataacctagtagacaactgcaacataccacaaaaagttttaagcaaaaagtcatgttttgcgctcaaagcagtttagctcagaaaggttgaaatggagaaaaatgtatttgctgatatttcacctgctgtatctgttcagctcggggtttgagatcatccagagatgcttccttgtaaatactccgaagaatgtacatcaaatgagagctaacattatccaaatgatgttgttggacctcacattgatgtacatcagagagacaaccaacagaatgaaatggacagttgacaagtttcataggacatacggttatacaatgcctatccatatcacgtctcatgatactctctgagcagttctgctcacacggaatgatcttgaacgggcaaacagaatcgtgattctccatctgattcgcacaaaacaccgcagtacaaccctcattctcacagttcattgttctatacccacaattcatggcgtgctcggcgagttctccttcggtttggaatttcatctcacaatgtgcactgcttttaaaatcaacgtttttaagcaaagtctgagcgataccttctctatgatcagtcaaccaaaacccgcttatctccatctcttgcgcgaaatcatcgatattatcttctctcctttcgctaagcatccaacccgaaacccggctgaacaaattccgcttagaagtggcgaaatcatcgatgaaatcagatataatgtcaaaaggatcatgagaagcttcaatctcagaacctccttgaagaacaatgtgttcagccacaaaggtttcgcttctacgagtcaagtactctatcatttcttttcgaatgtcagcagcaacagaaccaggactcctgaagatatctccggtagtgttatcgacacaagcagtggctaaaccagggagaaaaacctgagcaatcttgtgaactacttgtgtatcgtaaagatcacagtgaaaggaaggtcctccttctttctgatcttcaatactctcaagatccgacacaggaggatccattgcctgtatatcaaaaatcgtctgcagaaacacacacaaattgaatagccaaatatcatcactagatcagattaaaaaaaatgcaaagcattgaaataagacacaaactccataaacaccattaatcaaaatctctactttttttttcttctggaatcgctagatcagtagaatcctaaaatccgatcaacagccaatgatcacgatccgtaaattgacaaattattaacgaaagtttcagaattgagtcaaattacaagcaaaaagttcaactgttggattgataaagaaatgtcaaaacaaaaaaacgagaattaccctagaaagaaatcgtgtcctaaacagacaatgacaaatcggagaaaggaactaacgaaagcctgtaaggaaatctgacggtgagatcaaaatggaacaagaatggaatgagagaaagagagagagagagaagcacctctctggttttggcgcaataaacgggtctctttttctcttttaccacaacttcgtcgcctcttctattaaaaacggactctctcctcctttatttttatttttttataactggtttctttcctacaacatttttgtagttagtactgtacagtgattattagtgattttacaagcccaataaactatttagaactaaacaaatctaatggaattttaataacattttttttcttatctaatcaccaacccaatgaagaaacaaatttaccctttaaattttttcatgtcacaaagacacttcattattaattatccacaattatactactacacatcaaatacaatcaagaataacaaacataattaccaattaaaaaaaaacaattttctcttgcgcattttccaaattagcaaatcctttatgttgtttttttgaaacatttttaactagcaaatcggtcttatgactagtgactaaaaaagttaaattccaatagatctttgaaactgtttaatatatcatcgaacaatactaacaatagaatagatgatgaatatattattaaattatcaaacttagatataaatctaaattataacacgttacaatactaatacaaaccactatatgatagtatattttttggaacatacaaatcatcgtatattttcaccaatttttttgtagggtttatgttaataagtaataactgattttttaacgattgttatatggatttaactgtttttttttttcttatgataaaaaatgaaacagtgtcactgtaagatttgggtcccttttttaatttcacaagacggagaggaaattaaagaaggaaaagcacgacctttgccgacttccttctgttaatcatg

SEQ ID NO: 26917 - DNA, 3000 bp, Unknown; identical to SEQ ID NO: 10941
  misc_feature (1)..( 3000): 2750-1469P.txt file - cDNA_ID_2716879; gDNA_ID_2214466; Annot_ID_133037

SEQ ID NO: 26918 - DNA, 3000 bp, Unknown; identical to SEQ ID NO: 10941
  misc_feature (1)..( 3000): 2750-1469P.txt file - cDNA_ID_2716879; gDNA_ID_2214466; Annot_ID_182856

SEQ ID NO: 26919 - DNA, 3003 bp, Unknown
  misc_feature (1)..( 3003): 2750-1469P.txt file - cDNA_ID_2716883; gDNA_ID_2214466; Annot_ID_133035
caaatcttaaaagattttctttccaatggataatttgattgaccaattaattctatttatttttggttaatttagtttttattttttggcaccatattcaaatatcaagtaattagatttatattttcggttattatgcaggctgttgaaataggcaagaggttagccgagaaacactttatccaccatgtctttgggtacgtacatatatataaatcgtgtcctttttttctttggtttacataattgaatattcttgatttagtgaaatgttcataaactgtatgtttgttgaatagagagaacgagtttgaagatggaaatcattactaccgtttcctagagcacgagccgtttgtttcaaaatgttacaattttagaggttctaccaacgacatggagccccaaagtgcagccattgttgggcagaagctattcaaaatcatgacagctattctcgagtcttattcttccaatgaccacactagtgttgattacatgagaatcagccagagtgaagaattccgaaggtagaatttggactcaagagtgcttaaacggattttagtctaggaatgcttactttagttctatcgacattaatttggttatgctttaattgtgtataaacgaaggtacttgaatttggctcaagacttccaccgtttgaatcttgtggaactctcaacggaagagaagttagcattttttttgaatttgtacaacgcaatggtgattcatgctttgatcagtatcggacgtcccgaggggttgatcgcaagaaggtcattctttacggattttcagtatgttgtaggaggctactcttattcacttagctccatccgaaatgacatccttcgtcgcggtcgaaaaccctcttatccatttatcaggccaccttttaataacggcaagacacggcatgaggtaattttagcgttccatgtttgtttgtattttactcatatcggtgattttcggattatcctatagttttaattctatggtttaatgtcagcttggtcttctaaaactgaatccattagtacattttggcttatgcgatgggaccaaatcaagtcctgtggtgaggtttttcacaccgcaaggagtcgaagctgagctcaaacgagcagctagagagttttttcaaaatggtggaattgaggttgtcttggacaagaggaccatacatctatcaagaatcatcaagtggtaatcaattctctttacaataatgtctacattgaaatttataaatagtgagacctaatgagacttatatgagtcattttggttattagtctaatgagctaagaaaggatatacattgatgtgtatatgtttgttgcggtaggtacaaagaggatttcagtgaagagaagaaaatgttgaagtggataatgggttatatagattcaaatgatgcaggtcttttaacccatctgcttggtgatggaggtggttcttttaacatcgtttaccaagattatgattggtctaccaacaattgaaatttaacaacaactcttctttttggtggtatattgacattaaactattggtccataaattttatgttaaaagtcatctatttgttattcatgagatttattcatgaatcacaggtatagtactactatctgaatcccggattttggatctttactctataagaatcgaagacaatagatgatgaaagaaaacttaattactactattcactattttaaagacaaacaaattcaaattaatatgcatatatagaatcgtacgcctttggtgtgttcctaatatacacacaacttattatttggaacaaaaaaaaaaataatcatttaactaaaatactatccggataatgtcatatatatgaattatcattcatctatgaatatatgtcaatttattcttacgtggttgaagtagaagcctcttctttttggagaaatgagtagaagctttttatgttatcataacatcatcgtcttacttttctccttttctttctttttcttcacatttttactttctttggtatcgaaaccttaaactttcaagctaattccgagaaatgaaattttatactaaaaacgtccatgattcaagattattacaagaaaaattgacatgaattatcgttttgctctggtaacaaaatcactacgtacttaaagcaaatttgaaatatcatttctgtcttctgatgacaataagttaacggtttggtagaactttttgtagggaaacttgtgaagatagagttagcttttagatgcaggtaacgtataaacttatttgaacggttagattgagaaacgaacaaaatacattggatgcaatatcttcctttgtactttgcaagtgttgtatataaagaaaaaaaaagtgttgtatataagtaactcatattctgatattccccacttccatttcttataaacaacataatttgagtataatcttcattttaattatatatcaaacaatagaaccttaagtttttgattataatctctgcctaatcggcagctaaactcatataacccattgtttagcccagttatataactttggaagttgcataatcagcttaactattttctactacaaaaaactaaacatttttctttttgagctcatcaaattcaactaaaattgtctctcagcttcttttttcccttttcctttatagtgagtggcgttttaaaactaaaagcaaacggatcaagatagagaaagccacgatcaaagcaaaaccataagcaaacaaacaccaaaccactaaaagaataccgcacacaacttctttctatcacatgaatctccttttaacaaataaaataataataaagtaaggattatgcatatcttattgcacgtggccggtgccctttgagacgtatcaccctctacatgcaatataaaaagcattgcaaatgaaccaaagtttgatcacatccatcacttataactaaaaacacaaatcaagataaaatg

SEQ ID NO: 26920 - DNA, 3000 bp, Unknown; identical to SEQ ID NO: 10951
  misc_feature (1)..( 3000): 2750-1469P.txt file - cDNA_ID_2716891; gDNA_ID_2214466; Annot_ID_133033

SEQ ID NO: 26921 - DNA, 3003 bp, Unknown
  misc_feature (1)..( 3003): 2750-1469P.txt file - cDNA_ID_2716895; gDNA_ID_2214466; Annot_ID_133032
aaaaagatttggtccggtcggagagagatctgaacgaaagaaagtcatcgtcactcccagaaagaaagaaactcaaaggtatgagaagactatccgactcgtagctgcttctggatacgaattgtttctccactatctcaatttgtctccgtctgctaagaaaataaaacaatttgtaattctagggtttgatcctctctctttcaatcgtccctaatttactggtagtttggattgtaatatcttaatcccgcggattatactaagattacaagttcgagaattgattcattcactgcaaatttccttcgtttgctttgatttcttggaaacttctgataacaaatcgtttctgagaacatgtttttcttcttcttgtgattgtgtctttcaaagcatacttctccaattctctttggtttcttccttgtgatttttgaataaattgtgttattttggtttccttttagcttgatgttgttgttttgaaatctcaggttacaatggcgaagctaaggcctagacagttggaactgagcaagactgttccttccaagttgggttttgatggagaagaagacgcttgggtctttgttaaaaagcagaaaatcttcattgtcttgccttctcttccacttcctcaacaacagcatttcactttggagaaacctgcaatatctcctcaattagaagctgggtttagagaaagcatggaggttacgcaagatagtacctttgttcacactgtggtgccttctcttcctctgcctgaaactcctcaatcacaagctgagttaagagacgctcttgcggatacacactttaccactcctgttcccactgtggtggtacctgctcttcctctacctgaacaattcattttgcacaagcctgaaacttctcattcgcaagttcagttcagagattgtattgcgaatacgcataaaactactcctcttcacacagtggtgcattctcttccggtaactgaacattccactttgcagaagcctacatcttcccagtcacaagttgagttaagagagtctattgcggatactcatggaactactcctcttcaaacagagatttcttctcttccattacctcaacacttcgttttgcagaagcccgcaacttctcaatcacaagcggatacacacgaaactactcttcttcacacaatactgccttctcttcctgtacctgaactatgtactttgcagaagcctgcaacttctcaatcacaagctgagttaagagcgaatacgcgcaaagctactcttgttcacgcagcagcgatgccttctcttcctgtacctgaacattacagtctacagaagccttcaacttctcaatcacaagctgagttaagagcgaagacgcgcaaagctactcttgttcacgcagcagcgataccttctcttcctgtacctgaacattacagtctactcaagccttcaacttctcaatcacaagctgaggtaagaacgttgacacacaaagctacccatgttcacacagcgatgccttccctttctgtaactgaacattgcactttgcagaagcctgcaacttctcaatcgcaagctgaaactagtcgtgttcaaactgtggaacctgaggcctgtcctgatttcacctcagtagacaaaccggagatagttatgagtcgcagtctcacaaccaggaaagctccagcaccaaagagatcactgcaagaaagtaggaagaatcaggatagaagagtggagatccacaggaggcgtgcgggtcacaagcccataaggtttccaagagtgatgtgtagctctgttgttatggataatgagaagctgagagtgttgaatctggagaagaaggttgagaaagcgggagggttgaacgaatgggttggatctataggattagggagagagtttgagaggatgttgagaggacagaggatgagtaagtttcagatggcgaatttgacaatggagaagcttaagcagatgggtgctttagccgttgggccaagaagaaagcttatacatgcaataggttgtgtctatcacccacattgtctacgtgcttcctttaactgagaactatctgttagagtttagttgaggccaataaaacttagcttacgctttattgatgttcaactagtattgttttggttattgatactctttggaccatatatgtaaaacagagcaacaatccactgtttgatgtgatcattgcatcgtgctattttgtatttgactatttggggatcagtcgtctattagcgttgcacatgcaatatcattatattgcttcttcttctttttttcaatcactaaaggatctagaaccagaaacaaaaagtccaaaattcaggttaatcattatagttttgctaattggaaacgtatgcaatgactaaacataaaatttatagtagaaacactagaaccctaattcttcaatttcaacataaatctttcaatttgagtggaatcattcaaaacttgattcccctaacttgaaagtaattatttgaatgtaagaattaaaaaaagcgtattttgtaaagtatcacgactaaaacatgctagttgagttaaaccttcataaaaaatgaaacatattatttgagtttcgagaaagaaaaaaaaaaaacattttatttgagttgtcgcagacacgatcacgatgtaccctatatatagttccaattagcattatttatcccatcaacaacaactattatgtcagaaatattgaattagtaaaagaaacaaatcttatctgggccatccatttgcacacagaccaatggacgtagagcgtggtaggcacgagccagatgtgaggtaccttgaggtgccacgtcacattgaggaatctttggcggggtttcattgtttacctataaaaatggcggccgcaaagtttcgtacgtctccgatgtttcaatcgtgaaatcgaaacaaacaaaataattaaaaaaagaaataagaggaggcgatg

SEQ ID NO: 26922 - DNA, 3003 bp, Unknown; identical to SEQ ID NO: 26921
  misc_feature (1)..( 3003): 2750-1469P.txt file - cDNA_ID_2716895; gDNA_ID_2214466; Annot_ID_182850

SEQ ID NO: 26923 - DNA, 3000 bp, Unknown; identical to SEQ ID NO: 10948
  misc_feature (1)..( 3000): 2750-1469P.txt file - cDNA_ID_2716914; gDNA_ID_2214466; Annot_ID_133027

SEQ ID NO: 26924 - DNA, 3003 bp, Unknown
  misc_feature (1)..( 3003): 2750-1469P.txt file - cDNA_ID_2716918; gDNA_ID_2214466; Annot_ID_133025
tgttcttctggtaaacccgagcggtttgtagctggtcagttccgcctctgataaaggagctagctcgacccacatgactctcgatgtcatcaagctgagctccctggtgctctaccagcacggccatgtctagaaacacctggtgaagctccctgagattcttctcaatgtctttaaccgcatcatgcctttcttgaatctcgttaatggtgtctaacacccttcctcttccttgttcttgtattgctttctgcaagaatctctcactctctcctgcaacaaaaacagtatcaatgtcgcaccaccactcatgtaacaacatgtctaagtatccagagatcaattccagctctaacagctaggaactagcacaacataagatatacaaatccattttcatagtctaaacgcaaaatctgaagttactgttcttcacaaccacaacactgtatactaagaagcctggaatcagtgttcggaaaccaattggtcatcatatgttaacctagatgatgattctacttgaatctggaagtgatttgaatggaagattaaactaaccagtggaaatcagtcgatctagggttcgttcatccggattctcgccggtgacggtgaagtacctcctctgtacagtttctctatactcggacgagataagctccctcaatcggttgaaactatccatagagtccatcaatttcttcctgagaccattgaggacagaggtcctggttcgatcggaggaagaaccaggtccacagccagggagactccgattagcagcattggcacgatctagcgcctcgagtttaactttaatcatcttcgccttcttcaacgcgactccaacgtcaccgtccattttagaccggagatctttaacggctttagcattgtgaagcgtcttgctctgctcgtgacatgaagagagtgtttcgttgagccgatctagctcctttagctcttctttcacagattcaacatcttcgaagaacttgtcgaggttcacaccaccggttgatcccgcgggattcgccatctgaactccgtcgccaccgccggcaacgtctcggcgaggggatggttctccgctgcggaagcgagagaatgagctggaaaacaaatcgttcatttaaaattcgaaaaatagagaaatctagagagagatttcagatcggaatgaatcaacgggaagacttaaagaatggaaaaatgagaagaagtcgtacagattcaagtaggcggttttattgaaaagtccaaaaggaggattatgaggtaagagaggaagaagtcaaacaagtaagtctctattggttgacttggaagcttctgagaaagtaacaatggcggagaagggaaggtgaagttgaaagcgaaaccgtgtgcccttgtcccgtacgtgtaagtatatacggtaacagatcccaaaatcatatataaattggagaaagaaaaaaacattcgtaatttgaatgatttttaaaattttattttgtcggctttggatactttaagtttatcatccaaaggatacattagcccatacgaaacacttattgataaattgacttcagcagaaaacatttaaaaaaacaaaaatgttactgtatatcaaattaatttacataatttagaatcgtccatcgaaccaaatttaaagaagcccaccaaatccttgcttttctccgttaaagggccaagcctaaacccatagcccagtctttgagcaccggaaagcaattgtaatacttcgattgttcgatttgtaagatatacaacatcctaacaaccatacaccgatatacataaagaacaagtcaaatgttcaatatgaacaaccatataaaaatagaatcactttcctccctaatctataggatacccatatgttgtataaatcgttgattccaagtttcctatttaaagatctcaaacaaacaaaaaatatacaacatttttgcaaaactaattgttcctgatttgagatattttgtcatcagctggtaggttaataaatcagacatgaagatcatcccattgatgtccattgccttggtcatattcatgacgtcatttccggctcccatcaaagtagccggtggtgtgggtaattgtgaaaaggacatgcaatggtgcatagacaaaactgaattctttactcacggttacatttatgagcgttgttgttataatatgataatgaaaaaaaaatgtatgtgtttgtttctcaagtcccccaagctaaagatagctgctcgcaacgttaacaatgcgtgtggtcgtggtggtcttccaaaggatgcattctctgagttcaagtgttaaatatatagatacataaaagtaaataattaacaacaataaagcaaacatatttttgatcagatttgtactatgtagtttaatggtttgtactttgtagtcgttatgtttaataacttgtcaattgtccttatagttttgatagaagttagaacacataatatataagaacaattgtctagagagactaatgactaattaaactttgatttatcatgtagcttagttacaaacaacaagtattgcttcaaaaagtataatccttttgagttcctcccaaaagagccacctccattgccatcctttccacattagagtttaccaaattctaaattaacagagcaaaagtgaaaaatcaacaaatatatgcgtcgaaagccaatttttacataattttgtgtctgcataatttaactccattaaaaaagcatggagaaacttttaaataatttaattatgactttctaagtggggtccagaccataaaacgctgcgttttaagtgaaattatcggttcaaccggccggtccggttctaagaacatcggtcgatctagttgctcctatatgaacaacagaagacctaaaccctaactccccccctctctctctctctctgctccatttctctcactttcttcacatctctgaagctcttcgtcacgcatctacaatg

SEQ ID NO: 26925 - DNA, 3003 bp, Unknown; identical to SEQ ID NO: 26924
  misc_feature (1)..( 3003): 2750-1469P.txt file - cDNA_ID_2716918; gDNA_ID_2214466; Annot_ID_182843

SEQ ID NO: 26926 - DNA, 3003 bp, Unknown; identical to SEQ ID NO: 16739
  misc_feature (1)..( 3003): 2750-1469P.txt file - cDNA_ID_2716924; gDNA_ID_2214466; Annot_ID_133022

SEQ ID NO: 26927 - DNA, 3003 bp, Unknown
  misc_feature (1)..( 3003): 2750-1469P.txt file - cDNA_ID_2716946; gDNA_ID_2214467; Annot_ID_133050
ggccatagatgtgttaattttaaaattttgccataattaggtttaggtgttctgatcgttggttaaaatttggtgtttaaaaagagttttgttttgttggacacattaattagcctatagtttataggatgacactcaccataacaaaaacaccttcaaactctaataatcaccaaactcgaaatgattgatgattttggttgtttactggtgaaagaactcaagaggtttgtttggttcagctaaatccaaaccgggatagaaataaaaccaaaaccttaaaccggcttggaatttctctatccatgcatttgcatgatcataacatatacaatattaaaataaataaataaacatttggggtcaagaacgtacaaaattagatagaatatgggactcaataatatattcataaattttcaagattaaacaaattccatccacaataatgtcccaagtaagtccataagatggtggctgaataccaactaagcaaattcccaaaacctcttattcaattatacaaaaacatgcatctaagcacgtagatggtgtaatctcttgattatttaattaacaatactgaccaaacacaacctcaactgcttcaacattattccaatctgtcatctctgtttgtcttcacatgtttttaataacttcttctcttccttcttcattcctttaatccatttttctcgatcttggctaatccatcatgactgtcaaggtaaacatcctagtactagttccttttcaaatccgacaccgaatgtttgagtttttgttgtggttgtgagcagaaagttgagatcaaggtggatataaactgtggaaaatgcaacagcgcaatcatggaagcagtcacagagatagaaggtaatgaacgaaaaaagactcaagaaatatgtgctcttaagtcttaacatatcatcttgaacatgagatttggtgcaggtgtgaatcatatttcattagatgaaggaaatagtatacttaccgtggtggggacaatggatccggtctgcgtagcaacaaggctgaaaaagattaaacagaaacctgtgatcattagcgttggaccaccaccaaaacctcctgagccaccaaagcctccagagcctgaaaaaccaaagcctccaccagcacctgaaccaccaaagcatgtatgcaagccaccttactgcaacagttgtgatgttgtgtctgttactacctatgaaagtggaagcggctgcaccattctttgagtcatatatcgcgtaccatagccttcatgttaagtcctgtatttagccaatactaattcatcatgttctcatgcttttttgtttatttctttttctcaaatatgaatctctgttgtttgtccctcccctgtttataattagtcgcttctttgacacaagaagtctcatgagttcatgctaaagaaaataaaagttcaaattaaaacaccaaatgtttgattaatttccataaacctgtgaagcagaaagttagtcatgttgacctgaacagagcttaggaagtccttgaaggacatatcttcaagtgctattgggtcgtagcactcttaggcccattaacttcattgagcccattaaattatgcaaaacaagaaatgagacatatggaaacattagggttcttacaggaaaaaataggaaaaagcagggacaactaaacaaaaattcagaaacaagaggcaagtggacgaccacggcgtaagatcaacatgtggtgatgtgcatgagaccaagaccattttttctcgttcttcaacgcacacttggtcttttcttatgtttgttgcatttctttattaggcagaccctctctcttttttaataggatagtaaaaaatatatgattttattttgttgaaacattttgagttaaaacctaaacttatagtaagcatttgtagagtgaatttcctatacgacatctatcaacatgacctctaaccaaaaaaatattgatgaaactactttaagtagtaaaacctaaagcaattaaaatttcctttaaattagtagtttgtgtaaattaattgacatgattgcgtcgaaagaaatcaaaacagttatatcgtgaacttaggagaatgttttatatcgtgtttcaacacatgattgctagcatatgtgtaggtgtcgtagacgttacataacaatcatcactcgtaaatatcaaagtggtttctgagagaaacaaagggttatgattttcccaactgcactagttgtgtattgtttctttcacacgtatgcttctgagttctgcccaaagtggaaattaaagcagagttgggagagatcataatttattagggttcgttatgctcaagtcatgacgtaaaatgaaaatttgtttttattctttcaccaacacaaagaatagctagttatctctttttttatatataacaattcatgaagttgatcagctttatacacatcatccaatcgaattgctaatctagagatggaaatatcaggatagagccaataagatatcaaatccaatggacccattttctccatgtgctaattcatacaatctgtttttgtctgctttatttgatgatgatgctgagcgtttttaagtgtgaactaagatctagctaaccaaacaaaagatggtctcttctgtctttgtcgtataagagcaagagagtggtttgattcaatttttaaaattctaaataaaactccaaccgtgaatccagccatgaaactctttttagaaaatccttttttataacaaataattcctctgcttcttcttcttcttcgtttatttcaccttttttggtttctttagctcagaaaaagcccattctttttttctattcttgtttattttaatcatactgtgcgtttctacaaagtttgttcctttcttcttcaactctctcactcacagtcacagagatctgtttcttttctttttttgctttcactcttctcttccagtgagagagagtgagagaaaatg

SEQ ID NO: 26928 - DNA, 3003 bp, Unknown; identical to SEQ ID NO: 26927
  misc_feature (1)..( 3003): 2750-1469P.txt file - cDNA_ID_2716946; gDNA_ID_2214467; Annot_ID_182888

SEQ ID NO: 26929 - DNA, 3003 bp, Unknown
  misc_feature (1)..( 3003): 2750-1469P.txt file - cDNA_ID_2716954; gDNA_ID_2214467; Annot_ID_133047
aaaacgcaattcttttttacaacaaagattgaaaattcaaatatgaaggtggcctgtaatccaataattaatattatagctcaacttaagatttagataattattattgacttaatcacttaattgtgagaaatgtggatagagcactcaaacaaaaaatagcaatatgtcaaacatttaccctctagcctcctttgtttttttctaaacttcaatttgtgaatgtcatcagcatcacatcagttttttccatagttgggggaaatattattagttttttcattgaggcaaaagatgaggtactaattctagatttataccacacttaagtagtgaactatataagaaaattgccttttttataattatataattcactatataaatataaacatgtacgcaaaatctaaagtttttaagtattctttaatctcagtgataaaaataattgtcaattctttgttttgtgaaagaattctttctttgttcattcgcctaattagtcgtgtaaatcaaaaataggagattcaccaatgagatgtaacctttcgtacgactcttaattaataaaactcccattaaaaaataaatataactttattgtgctatatatagcgcatcattagcgtgcaatatttctcaattccttaccacaaagctaaggataaagaaaataaatagtaaatggaagggtttcttcgctttcttgtagcgaaagccatcttattggctttagcatcttcatttgtatcttgttacgacccaagtcctcttcaggacttttgtgttgccgtcgatgacgctagtggtggtaatctctctaatttactatacatactccttaatatagttcctcaataccgtactaattatgatttatgagatactatatctttactctctaacatcaattagttaaatcaataacatcaataagatcttcatctatttatcagttttcgtgaatggaaaattctgcaaagacccaaaatacgtgaaagctgaagacttttttacttccggactaaacatcgccggaaacacaataaaccgcgttggctccaacgttacaaacgttaacgttgacaaaatccctggactcaacaccctcggagtgtctcttgtccgaattgactttgccccgggaggtcaaaacccgccacacacgcacccacgagccactgagatcctcgtggttgtcgaaggaacactcttagtcggttttgtaacatcgaaccaagacaacaacagattgttctcaaaggttctttacccgggagacgttttcgtgtttcccataggaatgatacattttcaagtgaacgttgggaggacgaacgcagttgcgtttgctggtcttggtagccaaaatcccggtacaatcacaatcgcagacgccgtttttggatcgaagccttcgattatgccggagattttagcaaaagcgtttcagctggatgtgaacgtggttaaatatctcgaggcaagattttcttccaattatgatcgtcattattaacaagttaagagaatgaagggaaatgtaccaaaatatgaataaaaatataaaataaaatgtattatagcgtggtgtgagaactaaaataaaacaattaagactgtaaaaaagaaaaagaaaaaaagagatgtgtcttttatagtataactttttaaggtaaggtgcttgaacttgattacaaaattaaaaaacacaattttgctatttattaatataattatggttgaaaagctggagtacgtgattttgattaatgattttgcaatcaaaaatctaaatagaggtatatttaaaaaacacaattttggttgtatcctctctctttctacaaaatgtttatagaactaaaaaattgttctataaatttagtatgatctttttattttattattattaacgattatataaaagacataatattttgtttgcgaaatacattcctacatggcggactgatcctgtttgtgttgtgatttgatgtttttgtgtcttgtatgctgataagtttatggcaatccactcaaacttaaggtcagatagcagagaaaacaagctaaatacccacccttagatataggtagtttttttttttttttttttgtatattttgtgatataggttgtcggagctaaaaacttcaaacccacaaaagaacattcttatcgaacaattcaaaaatagaaaaattgttcttcgttggtaagaaaacttggttggtaagaattgaaatcccgatggccgacatcatttttaattgggccggttctaggcccaaaccatatatcagcccaaactctagattttactgcataatggaaattcccaggctggaacttaaatggattatataatttaattaatgataaaacatattccttaatctcgactctgctgcgttgctttatcaactgaggaattttgaatttcatatctccaaagtaatctcttttccaaggaagatcagtacaaatcttaaaacccccgatcagagtaatccggggaactatctccgccgttgaattcagtctgagggtttctccgatttcagttcgatctgtgtccgggattctctctgtgttgctttctcattgcgtttacgattcttcttcccctttcaaggtacgctcttgttggttgcgttctaatcactctcaaattccgggttttggcttcattactgcaaattttccccttttattcacttgcttcgattcaacaattgctgaaagctaatcgatagttaaatgcttttgaatcgtgaaattcgtttcggatttagggttttttttctccgctataagcttcaatccttagtccactgggattcttgagcacctcccggagaatttaggagggaattagctcttctccagatcttgcttagctcttgtacaggtacttacctttagcatttctcttgtttagagtttgacgagtttgatcagaacttagttacgaattgtctacttttgtctcccagaatg

SEQ ID NO: 26930 - DNA, 3003 bp, Unknown
  misc_feature (1)..( 3003): 2750-1469P.txt file - cDNA_ID_2716962; gDNA_ID_2214467; Annot_ID_133044
cacacaaaaataaaaagccattacatttcaatcaagaagatatcatattacgagtccaaaagtacctgcagacagctttaaaattatactcatttctttaaaatatatctatttatgtataaatggaaattgtgtttttgtctactatttgacaatataagatactaatagcaaactattgggtatggacaaacaaacagacaataataatttaaatggggtatatattgaaataatatggtataagaaaaattaaatccaagtaatatacttggaagcacgttgagctgtgcgggtttcttggtgttggaccactcgttttggttctagttttctttcttcctttttttttggtatgtcaacgttttggttctatagtttagtctgattattttatcggagtatttactttgaaaagtattatttattatcaactacgagttgcttttttcgttttttttttacgtgaagagtaaaaaattattactaaattttgttaagattagaatttacgatttggtgttaatcttattttcaggttttctgatatatatatacctatgcaatcataactagaagaataagaatcaatagctaaatagatatttgtgtcaattattcctaagttcaaaacttttttttttatagttcaaaacctatcaaaaacatattccctaaacaatgataaacgaaacaaaccaactaaagtaaaccgaaccaagatcttgttagcttgattctatcatcagtttctctaatccgtgactgttgtctgaagaggcaaataactctagactcctcctttagcctcagtttgctgcttctccgcaacagcctttgataatccaaacatatatcttgaaaaaccaaaatatattactattaacaaagtcataagtagtggttcagtgatcaagatctattatgagtttagtaaataatgaagaaagataaccttcttaatggttttgttgaaacagttcttgtgatcatccatttcttaacctcgtctacaactgcacattaccaaattcgaattcgaattgaaaccatgttttttataaaaaaattcgaattacaacatagcgaatataatagtaaaacaaacaatttaattaaacatattttttcttttatgtaatccatttaaatgttcaattgaatcccagtagtcattttccacaagaacaagaattagaggaccaaaagatgatatgcattccatggtgtctcaaaacaaatgggcctttagttataatgcccacttgtctctcctacaatatatgggcagcacagaacattagcaagtggccgcttaacattaaaagaaaaaaaaccaactcaacgaccccgttcaacgatttcatcttcgttctttaatttatgaaaatttacttaagataaacaatttagtataacattttttttatattaattaggttttttaattttgtaagatcttgaaatttattagaacaatttaagagtatatataatgtagaaactggtatgataatacccatatgtgaccaaataaataaaaatttgataccatttgaactaaaaacattacaatttaacttatatggatctgatatggaatatgaatacatataaaagcaaaaaatcttaaagtaatcaacgagtcaaactttaggtggctatatgatcaatataaaaaaaaggtagaagaaaaagaagaaaaaatcttttagaaaaaaataaaacttttaagtggctatgttttgagagaaataaatattcagctaaggaaccatatctgccaaattaatcaagtttgacttaacaataacatgtgtccaaagtaaaacaataacaataaccaaaaaaaaaacatccgcctaattactgccataacccataaatgataaaatgaatgacagattgtaatccgttatgaacagctcaatgtcttcacactccttcttctttatttatccatctttctatgcatttctgtaaaacctaaacatttacatacaaaacttaatccacataaaatattataaccatgtccaagcgacgcatttgctgcatagtttccggaatcatctttgtcctcttcgtaatcttcatgaccgctttgatccttgcacaagtgttcaaaccaaaacatccgatactacaaaccgtctcttcaactgttgatggcatatctacaaatatatcactaccatacgaggtccaactaaatttcactcttacgctggagatgctgctcaagaatcctaacgttgcggattttgaatacaagacagtggaaaacttggtttattacagggatacactagtcggaaatctcacacttccttcgagcacattacctgccaaaggttcagtgcttttgccatgtcctctatttctccagctcgataaatttgtcgcgaatttaggtgatatcgtgcaagatgtattgcatggaaaaattgtgatggagacaagagcaaaaatgccaggaaaaatcactttgttgggaatctttaagatacctttggattcaatatcgcattgcaatctcgtactcggctttccttcaatggtagtggaggaccaagtgtgtgatctcaaaactaagctgtaaatagttttttcaggtaaacatttaggcttaagagagcagtttaattctagctagtttcctgtaataataaagattgtagtgctcttgatcgctgttctttaatcaactccatttttgtgagttcttgaaattaaatgtattcctttgaatttgaaataatgaatttgattcaaaaatctgaattattttatttttacctccatttgaaaaaaggaaaaatagtgtattattattattattattttatgacaaataatttggagaagacttgaaaacacgaaatcaacggatagcgacatcatgaaacagagttagaaaagcgtgcctcctttttttagtatctatctttctctctttcggatcattctctcctctgattccgaatcgggtaaattattatg

SEQ ID NO: 26931 - DNA, 3003 bp, Unknown
  misc_feature (1)..( 3003): 2750-1469P.txt file - cDNA_ID_2716970; gDNA_ID_2214467; Annot_ID_133042
gaacgcaagcaacacaaagacatcaacgagcaaaaaagtgatagaatctatccaaactgtgagtgatgggacgagcgaggaggatgaagaagagcaagaagaagaaagagcgaaggagatgagtggaaaacagagagtggacaagtctgaagaggaagaagaagaaggtgaagaagagaatgatggaaaggcaatattcaagtggaatactcataagaagaaaaggtctagatactcttttacgtgttcttcgtctgactctagagctcaaagttccaatggaagtagacgaaaatgaagaaggtgaggtgagatctgagtttgactttggtctcttcttctacgtgtttgtgtgtcttcttgccaatgtaacttatcccaatctaacatgtaatagtaatacatgtattttaattggtctctggttaagtttagctttttgttgttgttttaaggtactactaccaatgtatatgtttcttatgtagaatgatttattcgggattgaaaaacccttttcacctaaaagaaaacatacagcatgtaataatttgttcagaagatctaagagaccaattcattttttgagctactctaaatgtgcccttgccaaaatagcatccaaaccactgtctatgagtacaatacaaactaataaaagataaatacactcacaaattcatcttcatcattctctcttaaatcatcatcatcatccacattatatacgttcttatccaaaggtccaagtaactttggacaattcgtgaatatcactttgatttcctcaatgcctttaagagagatcatatttccatcaatgttcaacatcttgaaacttcctttcttgacaacaacacgagccaagcgcaatgctccttctcttctcaagtcattgtagctcatatcaacatattctaactcccaatcttccatactctttacaatctcaacacatccctcatcttttagatcattttcagacaaattcaactttttcagatgtctctttgctgccaaacaaactgcgatagctgtagccgcctcataagttatgttatttccagccatttctataacttgaagagatggagcggagttcttgagagcgtttactaaagctatagcacctccattctctagatttgtataacttagattaattacagtcaagaaactgaagcttgaaaatggtttgctcatagaaactccaacttttatatgagtacaagtctcgaatgcagtctcctctatagtatcctcattggttaagctagtgtccaccatattcaccaggagctcctttatttttttctcccaagtgaaccagaagcccaattcttatagttaaccatagataaatacagtttctattttgaataataataacagaggtgttataggaccatagaacctaaactccaacaaaatctgttgttatttattattgaatttaaaatcttcaagatattgacaagatatgtctaaaaatttgtatcattggttgaaatgtgtaagccatcttaaagagtttaattgatcccattagtagatattttactcaatatgttatgaaaagaatgataggtaattaaatcagaggaattgtataaaatccacttaaaatcaaattacataaggaaactttcgatataaaacaaagtttcctaaaacagtatgatttcatatctatctgtaggtcgggctcttgtatcaaacttaatataaacaaatgggcctcttatcccagtggtgaacaccaaatataatcttctgatgaacaccaaatatttttcactaaatccgatttcattctttgtaaacgaatttgtatttcaacatgttactattttgttctgtagagtttatcaagctaatgtttttttttttatgtagacgcctaatttattaaataaacgttatcttagcatcaacatcctcttattacgtacagctctactcatcctaaatattcattgagatggatgttttccgtattttaacgatagtttacaaaataagtaatattttagagactttttggaccgttgtggtaggccacaaagtaaacgtgtatgagctttgaacaaaatgcaaagagataccaatgttatattttattaatgcgagcacatgaaatgaaatcttgtgattcaccacgagcacgcttagcatccgaaagctttaatgcaatttttcattgaagaagcaaagaaaagtgaggaaacgtaaacactacttaaaaagagcctccaaataatatgaagtttaagatataataattaaagttattaatgttaattagaacaggtttggttatgtagggtttgatgtttgatctcgatccataggtgtgatttttagttcatgatggaccaaaagatttcatcgaggaaatagtgttagaaaaacccacatatatataaaataatatcgtcatatatgtatcaatccattgattggtttcacattatctaccaataaaatgtgaaaaaaatattaggaaatcgaaagattagaattcatatactaaaggttgaaaaatgaaaatagtaaagcttagattgatcttttcaaaccgcatatcaaaaggggtttttcaaccaccattaggtaaattaccgaatcaacaacataccaaaattacataaatcataatatcacattctgatactttgtggaagaaattacaaatgtaataatgttttcgtttgaggaaattgaacgaagacaaaagaaccgggccggtcataattccactttaccaatgtagaccgcaacagaaataacggaataagataataattttttgtcgtcttagaaaaaataaacaaaagagacaaaacaagttcatcatcagctacctctctgacctgttcctctaattctctcattcttcaaattctctggagctggagggtcaacccacccccctccttcttccaacctaaacctctcttttatgctaacttcttctctaccaccgtcgtctccgccgccatg

SEQ ID NO: 26932 - DNA, 3003 bp, Unknown; identical to SEQ ID NO: 26931
  misc_feature (1)..( 3003): 2750-1469P.txt file - cDNA_ID_2716970; gDNA_ID_2214467; Annot_ID_182876

SEQ ID NO: 26933 - DNA, 1314 bp, Unknown
  misc_feature (1)..( 1314): 2750-1469P.txt file - cDNA_ID_2716986; gDNA_ID_2214471; Annot_ID_133106
caagaactattggttctaggatctacttcagtaccaacaaactgttcgtcccaatcaataaccacatcagcggcagtaaacacctggatcagcataaagggaaaacattttcagaaccatcagctataaactaaaaaaaacaaactttatgattcaaatctctcccttgacacgtctcaaaaagtattcagacattatggttcctaagagtatccagaatctataacaaaatttatatggtaacataaattacacaacaccaaagtagattgaaaaaagggacctgcttgacagattcagcgatttcgggaccgatcccatcaccgggaaagagagtagctttgatcggagtggaggaggagaagaaagccctagaaacggaaatgaacggaccggagctagaactcgaagtcccgagaatctggctcgatccgttaccgataagccgtctcgcgagaaatgctgtcatggtcatcgcttccagcctcagaaggacgcagagagagaaagagaggaaagaggagactttttgctgcgttggacctgaaaaagtttacttttataccttctctagctccagcagagaagcagagaacatttcgatttccatgaaataaaacggcacamagttagtgtctgaaaataagaaacggcatcagcctatgttcttaaacggccatggtcaaatgaaccggatatcaataaattataaaaaccggtcagatgaaattaagcattcagatcccgataagcagtgtgacactgaaacagcgaaaggagctctctctcactccgaggcgatttcttctgtctcgacgatcttgcgcttttcacatttgaatcctccaatccattacttcttctccgatcttttattccggtgatcctttggattatgattatcgagatccattgctgcctatttgagtcttgaatcatttgtttgcgttctcatctgtgcttagttatgtgattctccgataagatttagttatgtgattaatgcatgtatgtatcaatccgaattttggtgattcgttgtctattattaaatacgtcaatctccatttgtaatccctggttgaaataatagctatcttgtcatggagatcatcaacattacatttactacactacacacataatgtcacatatgatcttagtatatgtactcttttgtaccagtgactagaacaactgtgagtgtgggttgaagtttttaatatcttgttaaaatcgaaagtttttgactcagatactacttggttttgtttttgtcactgtttcaggtacatctcaagtcttacaacaatg

SEQ ID NO: 26934 - DNA, 3003 bp, Unknown
  misc_feature (1)..( 3003): 2750-1469P.txt file - cDNA_ID_2716986; gDNA_ID_2214470; Annot_ID_133066
actccactcagtagcaaagctgttgggttcgccaggttctacacaacaccagcaaagaataacaaacatgtggatcataagctaaaaatcgaatcaagttctgatattgaatagtggcaagataatatctaaacccactgtatttgaaaacatgatttatttattagactccttaaccctcaatgctaggttggccagttattaacatcattcaagtactacaagcacgatcatccagtaagaaccattctacaatataaactagacaataatccattctacaatgaaagcttctgaatgttcaaccaagaaatggcatagaagagagtaatggagaatcttctctcaggaacagcttctatcatacttagttttagggtaaaagtaggcaagttcacttaaatttgtcaaaatctgtaatgcagtgtctaaatcctatttactctaataatttaacaagttaacaacaactctatgcatcaaacgaatttagaacgatgataacatctaagaatgatgactaaccattccagcaatatcaggtgcagagccgtgaacagcttcagcaagggcaataccatcctccccaatattcatactggaacaaaacataataagagcataagatgattgcctcattttcatactagacaataatctgtgagacgaagaaacaaatgttacctaggagtcagtcctagtcccccaacaagtccagcacacaaatcgctgataatatctccatagagatttggcatcaccaagacatcaaaaagtgctgggtttttcacaagctgtcagaattaagattatcaatcccacattgttccataagtaaaattagcgaaaagcagacccaagtatgggttgctgggaaatctaaccttcaaaatcaacaagattatcccaaatactaacttaattaacaatgagattgacctttacataatttggaacaaaagatagggtggatatcatgttatagcttaccatcatacagcaattgtcaataacaaccttctcgtaatatatctcaggatacttcgcagcaacttcatcacaacactgcaaagcaggaagcaaataaaaacttgtctcagaacaaaggttaagaaaaagaagccagtgagagactagaaaaattgctatgttcccctaattgagaagtgctaatgtattctgagttccaaaatgagctgacctgcaggaaaagaccatcagttttctgcataatgttggctttgtgaattgcagaaactttcttccttccgtgagtcttggcataaagaaaggcatactcggcaactctcatactcgccttacgggtaataattttaagactttccactacacccttgacgacctagcaaataaaaatgacaaatcatcaacatggctctaaaaatgatactagatacagattcactaaaatgacagaacaatagactaacctggtgttcaagcccactgtactctccttcagtgttctcacgaatggtaatgagatcaacatcatcataacgggttttgtaaccaggaagactgtaacaaggcctaacattggcatacaaattcagctctttcctaagagtaaggttcaaggaacggtgaccctttccaattggagtagccattggtcctttcaaaccaaccttgtttttaagcacagattgaagattatcccatgtcaagaaactattggttctaggatctacttcagtaccaacaaactgttcgtcccaatcaataaccacatcagcggcagtaaacacctggatcagcataaagggaaaacattttcagaaccatcagctataaactaaaaaaaacaaactttatgattcaaatctctcccttgacacgtctcaaaaagtattcagacattatggttcctaagagtatccagaatctataacaaaatttatatggtaacataaattacacaacaccaaagtagattgaaaaaagggacctgcttgacagattcagcgatttcgggaccgatcccatcaccgggaaagagagtagctttgatcggagtggaggaggagaagaaagccctagaaacggaaatgaacggaccggagctagaactcgaagtcccgagaatctggctcgatccgttaccgataagccgtctcgcgagaaatgctgtcatggtcatcgcttccagcctcagaaggacgcagagagagaaagagaggaaagaggagactttttgctgcgttggacctgaaaaagtttacttttataccttctctagctccagcagagaagcagagaacatttcgatttccatgaaataaaacggcacaaagttagtgtctgaaaataagaaacggcatcagcctatgttcttaaacggccatggtcaaatgaaccggatatcaataaattataaaaaccggtcagatgaaattaagcattcagatcccgataagcagtgtgacactgaaacagcgaaaggagctctctctcactccgaggcgatttcttctgtctcgacgatcttgcgcttttcacatttgaatcctccaatccattacttcttctccgatcttttattccggtgatcctttggattatgattatcgagatccattgctgcctatttgagtcttgaatcatttgtttgcgttctcatctgtgcttagttatgtgattctccgataagatttagttatgtgattaatgcatgtatgtatcaatccgaattttggtgattcgttgtctattattaaatacgtcaatctccatttgtaatccctggttgaaataatagctatcttgtcatggagatcatcaacattacatttactacactacacacataatgtcacatatgatcttagtatatgtactcttttgtaccagtgactagaacaactgtgagtgtgggttgaagtttttaatatcttgttaaaatcgaaagtttttgactcagatactacttggttttgtttttgtcactgtttcaggtacatctcaagtcttacaacaatg

SEQ ID NO: 26935 - DNA, 3000 bp, Unknown; identical to SEQ ID NO: 10987
  misc_feature (1)..( 3000): 2750-1469P.txt file - cDNA_ID_2716988; gDNA_ID_2214470; Annot_ID_133063

SEQ ID NO: 26936 - DNA, 3000 bp, Unknown; identical to SEQ ID NO: 10988
  misc_feature (1)..( 3000): 2750-1469P.txt file - cDNA_ID_2717003; gDNA_ID_2214470; Annot_ID_133057

SEQ ID NO: 26937 - DNA, 3003 bp, Unknown
  misc_feature (1)..( 3003): 2750-1469P.txt file - cDNA_ID_2717005; gDNA_ID_2214470; Annot_ID_133055
caactgatgctctggaaagtgtagctgaagatggtgagattctttttttcatcacctgtaaaatgattcatactatttttcttctactgatgatgatgaaagcagatacaatcgaggacgacatgctgtcttaccacgaaggattggttctcgttcctcggggaagtgaaaatactgtaactggccctcacatcagaggcagcagattacgagcatccgctgttggtgatgaagaagtagatctccttcttcctggaacagccaggtaactaactctcacctggttggaaaaatgaaaaactaagacttaacaaatgctgatgacaaataaatggaatacatatgatccagacgacatggaactgattgaaacttagtccagttcggtttttgaaaagaatctctataaaatgcaggctgcagatacagcaaggagtgaacatgccggcaagagcagagctgataccgggaagagaagataaagagaagcagattttacatgactgctgcgacgtcgtactctaccttggcattatagacatcttacaagagtacaacatgaccaagaagattgaacatgcttataaatctcttcactttgattctctttcgatctcagccgttgatccaacattctactcccaacgttttcttgagttcatcaagaaagtatttccacagaacaacaaatcatagacagagaattgagtacagagttttatgtttttttttgtagagataaaaaagaattctatgttgtaagtatgttgtatacagatcttgagagcttcaataaataagtaaaaaactaattctccttttcttgattgcatgaagtatttggtttaattattaaaaggcaaaaatataaataatcaaaagtcacagaaaagccctaacgtgttgtcttcttcttcttcttcttttgaagagtaagaaatcaatgtcgtccctggaaaagaagaggaagaggaagactacgactaggacaaagaagaagaagctgtccccaaatcagtcaatccctatgatttgctattggacatcatcgcacgcgtcccaagattgtactatccgactctctcactcgtttccaagagctttcgatccctcctagcttcaccggagctttacaaggccagcaggtcattcttgggtcacaccgagcgttgtctctatgtgtgcttacggtgctgtcctggttatcgctggttcaccctgtgtcggaagccagatcaaaccctatccaatgacaccactgaaaagaagtcaagtgggtatgttttggcaacagtccccattcctagttttcataaaccgcgcttttcgagtctcgtggtggttggttctgatatctactacatccacgggccctcctctaacgtctcgattctggattgccggtctcacacgtggcgccaggttcaaagctcgattctagattgtcggtctcacaggcggcgcaaggctccaatcttgccggtggaacattcgtcacttactgctagcgtccttggtgaaaagatatatgtagcaggatgttacagcgatatgcatttaggttcttctttctttgaggtgttcgacacgaaaacggaagtttgggttagtgagcccatcccttacagcgacagaaaatacaactttcttcaccccaaaagcatttgtattgatggaaagatccatgtagtgactgacagtgagggggttgttgcttacaatcccaaggaaggtatatggttggatttggatcagtatatgcgttcagattcttattgtgagatagatgatattttgtactctgtttatagcagaacggttatatggtatgacactgaggcaagcaggtggagatatttggagggcttaggacaacttacgtttcctcttggtgcttctattagggcttaggaaagttagcggttttgtgggacgaggatttgctttatggtttgactagtttcgtctataagaagaagatttggtgtgcggagatttcgcttgaaagaagcaaaagttgcgaaagttttgggaagttgaatggtttgatcatgtgcttacagtgcctaaagaatgtgaattggtgaaagttcttgctgctactgtttaataattgcgtcacaaggcttgaaacgaggtctctttgtctctttattcacttgtaatcatttgatttcacttgctgattgattgttaagcttactttgttgtgaccaaaatgcttttgataactacggtcgtctctttacatatgtgtaaacaaaacaaaaaaacactttggagagtaattgatttgaatggttaattttgcaacagaaagagttttttttttttttggttatgttttaaagtgtaaaaaaagcctttgttcatgtacttgttccaaaactgatagtaacttgtaatccatacaagtgaacttgtgaacactctttataacaacttatctttcatgagagcttcactaagaaaactagttttcctttgtgtttttttgggtctgaatcgccgcaaaccgcaaaagataattgcaaacgtaacagtagtgctttgattgcatgaaatatttggttttataataaaaagctaggaaaaaataaaaaaaaatttgggagggagcaacaaacacgtggatacaaaacaagacggactttggaagaaacgttgaaacagaaacagatacgtgtcgtgaagcgaaatgtcggagaaaggagaagaagcagtaaagagttctttaatgtttttgacagtatttgttcaacaattctcattaacgtttttcattatttgttttctgctctgtaaagaataaagtttcttaatttgttgtatgaatcatagatttctctgcagaggcaaagttttctctcttcttttttcgattcattcttttacaagataacataaaaatcacttcttttgtttgtttgtttatctaagttgaatttgatttgatctctttactgtagtattagatagagtgagagattgtagaagaaaatg

SEQ ID NO: 26938 - DNA, 3003 bp, Unknown
  misc_feature (1)..( 3003): 2750-1469P.txt file - cDNA_ID_2717012; gDNA_ID_2214475; Annot_ID_133133
taagtttttgtttggtgatctgatcttattggttggatgtgaaatgcaaagatcacggagagctcttctggttagaagaagagtttctgagactacttctaatggaaggaatcgcttctacaaagtttcattgtctttggtttttctcatatgggggcttgtcttcttatctacattgtggatcagtcatgttgatggtgacaaaggtaactttttgagttccttatttggacagaatgcaaaacagttattagaatatggttagagaactgaacttaagtaatatacgctcttagagatatgacaatcatgaagatgtatagaccatatcttaagtgtatctaaggcttactcttgggcatttgcaggtagatctttagtggattcagttgaaaaaggtgaaccggatgatgaaagggcagatgagacagctgagtctgttgatgcaacatcactagagtctacctctgttcattctaatcctggattgagttcggatgttgatatagctgcagccggagaaagtaaaggctcagaaaccatcttgaagcaattagaagtcgataacacaatcgttatcgtaggaaatgttacagaaagcaaagacaacgtgcctatgaagcaaagtgagataaataataacacagttccagggaatgatacagagaccactggttcaaagcttgatcagctatctcgtgctgttccgcttggccttgatgagttcaagagcagagcgtccaattctagagacaaatctttgtcaggccaagtaactggcgttattcataggatggagcctggtgggaaagagtacaattatgcagctgcttcaaaaggtgcaaaggtcttatcttctaacaaggaagcaaaaggagcttcaagcatcatatgccgggacaaagacaagtatctccgaaacccgtgttctactgaagggaagttcgttgtcatagaactttcagaagaaacgttggtgaacacaatcaagattgcaaatttcgagcattactcttccaatctgaaggattttgagattttggggaccttggtttacccaactgatacgtgggttcatctagggaatttcacggctttaaacatgaagcacgagcagaactttacatttgcagatcccaaatgggtgagatatctaaagctaaacttgctaagccattacggttcagaattctactgcaccttgagtttactagaagtctatggagtggacgctgtggagcgaatgctggaggatttgatatctatccaagacaagaacatattgaaactccaagaaggagacactgagcagaaagagaagaagacaatgcaagcaaaagagtccttcgaaagcgatgaagacaagagtaaacagaaggagaaggaacaagaagcctcaccagagaatgcggttgtgaaagatgaagtatcacttgagaaaagaaagctgccagatccggtggaagagataaaacatcaaccaggaagcagaatgccgggggacactgtcttgaagatactgatgcagaagataaggtcgctggacgtgagcttatcagttcttgagagttacttggaggaacggagcttgaaatacgggatgatattcaaggagatggacctggaggcgagcaagagagagaaggaggtggagactatgagactagaggtagaaggaatgaaggagagggaagagaatacgaagaaagaggcgatggagatgagaaagtggcggatgagagtggagacagagcttgagaaggctgagaatgagaaagagaaagtgaaggagaggttagagcaagtgttggaaagactggagtggatggagaagaaaggtgtggttgtgttcacaatctgtgtcgggtttgggactatagcagttgtagccgtggtttttggtatggggatagttcgagcagagaagcaaggtggcttggcttggcttctgttattgataagctccacattcgttatgttcattttgtcactttgatgagagaagagttctcagttttggtctttctttttgttttctagtttttttcttactgtagagttagctgagtcttctttatacccaataaaactatagaagttacctagataagttatgatgtgcctatgaggtttcaaatacaagagttttgtccggttcaatggaaaaaactcttatcaaatcaaagcttatacgtagaaagagttttcattgcagaaagttgatttacaaacaaaactattattcacagaaaacattttcttatgaccaaaataattataaacattttctttcaataattaaccctagcttcgtcattgccacagagcaaagatagttttaaaattcgaatccaatcaacctcttataccaatctctcacatgtcatctcctactcttcatagttcatccaaagtggggttatttgtcaacgtaacttcagcataaaactgagctttatactagagagaaataaagttagctataatcatttataaactgaagattgatggaggtttattaatggttaataaacctttccaaaaataggcgtatgccgctaagaacagagaagacacggtattctttagtaaaaggcgaaagaacagttcgctttgtcttcactgcacagctccgtgactcttgaaggcaagctctcgatctttatttatactaaagtttactcactgttctcaagaaatgagccgatgtgggatagtacaatcaatcaaattaattcatgggttattaatagcagtatatgggccatatcttgtttatttttaagcccatcccaaagcctggaggtttcatcatcttacaattctagactggttttggtgaaccggtttgatgaaattagaaattacaatgcaagagacacgtggcaggcttagaaaaataaccgaaagcaaaaacaaaaaggtttaagagagagacgacactagtctggttttggttcgagtcccgcagtggtaaagggacgactacaagcgaacataatg

SEQ ID NO: 26939 - DNA, 3003 bp, Unknown
  misc_feature (1)..( 3003): 2750-1469P.txt file - cDNA_ID_2717032; gDNA_ID_2214475; Annot_ID_133127
tatgagcttgacctagaaaaagagtttgcgtcggtggagcttgaagtcgccgctatcgctttagggtttcggttctgacattcaatttataattcccaaattatgaatttattaagtatcgaaaatattttacataacgtatatggaaattgtactaactacaaaatagtaacttccgctctttaaccgcttgttaaaccgacagctttgatttaccctacccggttggttcctcaaccgaatcgcagaagatctatcttgatcaagcagcaatacccggtttactttacctcttaacttttttatcttaccatctcttaaggaaaaacagaggatttagggacaataaagtagacacaattccgattagtttagttacaaaaggcgtttctgtcagacgaaacagttggttacttaatttgtcttcataaacaaggtaatgaatttcgagcgtcgatgattacaagcttatctcaaatctcttttgggacattgaggcgctttggctcttctgttttaccttctgcactgaaacgcgaatttgttgaaggattgcgtacgttagtaaggtctggtgatatccgtcgagctgtttccttattctattctgcgccggtcgagcttcagtctcaacaggcttacgcagctctgttccaagcatgtgcagagcaacgcaatctcctcgatggaatcaacttgcaccaccacatgctctcacatccctattgttattcacagaacgttatacttgctaatttcctcattaatatgtatgccaaatgtgggaatatcttatacgcacgacaggtgtttgatacaatgcctgagaggaatgttgtttcatggactgcattgatcacaggctatgtacaggctgggaatgagcaagagggattctgtcttttctcgtctatgttatcccattgtttccctaacgagtttacgctgtcaagcgtgttaacttcatgtcgatatgagcctggaaagcaggtacatggacttgctctgaaacttggtttacattgttcgatctatgtggcgaatgcagttatctctatgtacggtaggtgtcatgatggtgccgcagcatatgaagcttggactgtgtttgaagccataaagtttaagaatttggttacttggaactcaatgattgctgcttttcagtgctgcaatcttgggaaaaaggccattggcgtttttatgcggatgcatagtgatggagtgggatttgatcgtgccacgttgcttaatatatgttcttccttgtacaaaagctctgacttagttcctaatgaggtttcaaagtgttgtcttcaactgcattctctgactgtaaaatccgggttggtgactcagactgaagtggctactgcattgattaaagtttattcagaaatgttagaagactatactgactgctacaagctttttatggaaatgagtcactgcagggacattgttgcttggaatgggattataacagcgtttgcagtgtatgatccggagagagctattcatctctttggtcagttacgtcaggagaagctaagccctgactggtatactttctcaagtgtactaaaagcttgtgcaggacttgtcactgctcgccatgctttgtctatacacgctcaagtgatcaagggtggttttttggctgacacggtgctgaacaactcattaatccatgcgtatgccaagtgtggctctcttgacttgtgtatgcgtgtatttgacgatatggattcgcgggatgttgtttcctggaactcaatgctcaaggcttactcattacatggccaagtagactcaattctaccagtctttcagaaaatggacatcaaccccgattcagcgactttcatagcccttctctcggcttgcagccacgcaggacgagtagaagaaggattgagaatattcagatccatgtttgagaaacctgaaactcttcctcagctaaatcactacgcttgtgtgatcgatatgctaagccgagctgagcgttttgctgaggcagaagaggttatcaagcagatgccaatggacccagatgctgtagtttggattgcattattgggatcatgtagaaagcacggtaacacccggttgggtaagttagcggcagataaacttaaagagctagtcgaacccacaaactcaatgagttacatccagatgtcaaacatatacaacgcagaaggtagctttaacgaagccaatcttagcataaaggagatggaaacatggagagtacggaaagaaccagacttaagctggacagagataggaaacaaggttcacgaattcgcatcgggaggaagacaccgtccggacaaggaagccgtatacagagaattgaagagactgattagttggttaaaggagatgggttacgttccagaaatgaggtcagcttcacaagatatagaagacgaagaacaggaggaagataatttattacatcacagcgagaaacttgcgttagcgtttgcggttatggagggaagaaaatcgagtgattgtggtgtgaatttgatacagattatgaagaacacaaggatctgtattgattgccataacttcatgaaattagcttctaagcttttgggaaaagagattcttatgagagactcgaatcggtttcaccatttcaaagattcttcttgctcctgtaatgactactggtaattttctatgttactttcatcacaagacaaagacaaggactgatttggcaaataaataaaagtataagaaaatgtgttaattaagggaaaaaaagaaaaaaaggaaaaaaaacaagttgcagaaagagagagaggtgggggaagaagacgatcttcgatccagagttgagcttctcttctgccatcgtcttcttcctcgatctcggtcaattacgcattctctgatctgatttgtgagatctctcgtcggatcaccgttttttacatcgtcgccgacaacacttaggagtaattggatccagcagaaatg

SEQ ID NO: 26940 - DNA, 3003 bp, Unknown; identical to SEQ ID NO: 26939
  misc_feature (1)..( 3003): 2750-1469P.txt file - cDNA_ID_2717032; gDNA_ID_2213625; Annot_ID_195818

SEQ ID NO: 26941 - DNA, 3003 bp, Unknown; identical to SEQ ID NO: 26939
  misc_feature (1)..( 3003): 2750-1469P.txt file - cDNA_ID_2717032; gDNA_ID_2214475; Annot_ID_183087

SEQ ID NO: 26942 - DNA, 3003 bp, Unknown
  misc_feature (1)..( 3003): 2750-1469P.txt file - cDNA_ID_2717040; gDNA_ID_2214475; Annot_ID_133124
cttatttataggtgtggattagtatcttaacagcagataaactcctgtgtactcgttttaaaatctcaaagcctccaaagttagcttcgaggaaacttcaaaattgttatgggcctttgtgggtgtaacaagtgttatctatttagtatcaatgcactgtagattccctcaaatagtaatatgagtaaactaatgagaggttttaggaaagaggcagaatattaaggttttgttttaagagattggatttgctatagtagacgcggttttcttgcatcatctatgggacccttttgtgatccattccataactttgtgatgctaagagttggtgcaaaagtgggatttatcctaaaacaaatgtcaaagctcattgggtcataataatcttccttttcttgagtcaattgatcaattaaaacattggtcgtaatataaaaaaacattggtaataatttattttactaatcaagcttactaattctaagacattttggttgcttcaaggatgaaattttgatccctagcatctatctacaagatatgcccttaatcattaggctaccacatttgattgattaccacatttgaattttattgatagttcttttgtgtgatcaatatatatgagttaaaaaaaaaaatctaactatgtgtagctttatttagtctgattttattttttagattttagattccattatatagtcatagattgtggcaaatatctctctctctttttttttaataaagaagtaaacaaaatatctcttaagctttggaattatgcatttttgttatcaatgaagtttttttttagtcggacattatcactgaagttagacaactagatgctcttagactgctttagttgactcaacacatacgataataaatgatcatttaatgttcaatctttttttttaattgattgtgcgcctcgataaattatttttaaatttcgttcctactaaaacatgacattcttaattctttgaatataatgttttgtctaattctcatatatgatattttttaaaatattatggtttgctatttgattatatatatatatatatatatgtctatatatatacaaatattatcagtgataatattttagatagtttcccatgtatctaaatatctaatatatattgtttcatcttaacacgtttagaaaatgagttatatacgttgggtagttgcttgcgtagtgttttattttttaaaacagttgttgcaaccatttgagatatatcggcctatgctttaaaacaaatattacatttctttgcatcacggtcttttaagtaagacggtttagacaattttttgttttgttttgagtaatagaacgaacgtgtataaaatcacatctctgtctgctttgcatgagtgtcggagggaagagtcttggtttgaaaaggatagctttttgttttctctggcggaaaagacagaagatataaagttaacttgaaatgagacagaaatagaggaatttgaataacaaaaaaacaaacaaacagaaactaatgctgtgtaaacatgtgtcattgattatatatgagtttagaaagttagaagctagaagaaaacaaaagtttctttagaccaccgacttcatttttcttatatttctgatttgataaaagctctttagtatatagttcgtacttgtaaataactcaacgtaacaatgggacgaaaaaataattcaaatttgattggttcttcttcttctttcccttttgttgtttgttttctactcagcgtaagcactaaacatgggtcttacgcgttgaggaaaacaatgaaacgagctccaaaatttctcctccttagaaaagatccaatgatgtatgctttgatatattaacatatacctttatattttcatatatttggttgtatcaagaactaaagctaattaacaaaaaaaaggaactaaacccttttttatttaaatttagaaggaccaaatatatgaaaagattatgtcatactcaaattcaggttttggagaattaaattctatttgaaagattttatttagttaaaatactaaattaaacaaaagaagtgtggttctcacttctcaacaatggaagatgtccattgggcttcgtaaagatgaacattgagagaaagagatatgtgtgcgtgcgtgaattcgaattggtggtgaattgcaagctggattcctaattagagaggattttttgtactaatggtgtgttgcagctggattcctattttgaggacttaagtgtctattatcatcaaaaaaaaaaaaaaaagtcttaattattagtttaatccaaaacttaagtacactcctttcgtccgaacatagccaaaacaaaagttgccactttaagttcctttgaccactgtcggcacgagaatcgtttgacttctttctcatatgggctttaaattagcccatctctataattttacttttgttgagggttttataagcccattaagtttcggcccactcttgacgttaatctgacgtcagcttgatttttccggcggatttctcaaatcgacaaattcgttttcatcggttgtttcagacgtaatttccaaaaatgaaggctgagtctagcaacgagtctttcataatcgggcagcgagtccactctctcaacgattcgcgtcgtgtgggcaccgtgaaatacgtcggagatgtggagggatactccggaacttggatcggcgttgattgggatcaagacggtgatggaaaacataacggttccgtcaatggcgttttctactttaacggtcgttctcagagctcagcttcatttgttcgttcccagaatcttagtcgcggtatcacattgcttcaagctttggagcttagatacagaacaatttcaactaaggacgaagaaggtcttgaaagagaatgttatattttagtttcagtgagtttttggaatttgaaataatgaatcttcttctttgtttttgttagatgaaatg

SEQ ID NO: 26943 - DNA, 3000 bp, Unknown
  misc_feature (1)..( 3000): 2750-1469P.txt file - cDNA_ID_2717068; gDNA_ID_2214475; Annot_ID_133115
cccaacagtggctgatacagaatggaacggaggtggaagcatcaaaagacaaactaatgcagagatgaagtctaggacatctcaaacaggagacttgtctggtgaatcttataggagagatcccaacagagattactcaaccgtaagtctctcctcttgttatatcgtgtaccttaaaccttttggtatgtaattattaagttgctttgggctgtgtcatcagggcaatgcaccaaggaaaaacagaatcaattactcaggaccattgatgcctcctggtggaaatcttgaagatttgcttaaagagcatgagaagcagatccaacaagctgtccgcaaagcacgtgtagaaaagtctgcatcaagaaaaaaccaagctttaacaggacaacaacagcagcaacgttacacaggaagaaatgctcggtagctgaaaaagggaacaagaagccatagaactcataagcgtttttgttgttgtgcctcttctgtgcttgaagccagggattgatacaatgtatagtcgaatttgtttcttaggccaacaagattgactacactataatgtcaagctaccttttgtatatacacaaggtctctctattgagttgagtcaaacaaacaaagatgtatctgcaagggaaagcaaaaaattccaaatttgctacattctatgattctagctcagctcaagtaattaaaacctaccattagctgaaaatctcataccacataacctctgcaacaattccacatatcaagctaaagctactgagcaaaaaactcacgaggaaaaaaaaggctgaattcttgagaaattagcaaacttttttgcataaacaagttcgctctgacctagctactgagtagtgagtactgagcaaacattccacgagaaaaaaaaaaccttaattcttgagaaattcgaaaactttttgcataaacttgaaaagcttaaattagaatcagataatgaattcttcaaaccagaaaaacttcaccgatattcccaaaaccaaatcatatgttttcaatcgaaagactaataaacctaaaccctctgttttctatttcccggcgaagtggccggcgatatcttgcttttttgtaacctctgttttctgtttggcccaaatccagaaaagcccaaagcccatttgggaagatattaataaaaatattttaattaaaaaatagacgggtatgggttcaaagacccgacaacgtacggtattcgggttacatatgaataattcgggtatatatatgtttttaaggattaattagaaacaaagagattacagtaatatactatgtatggtcaaagttgaaactcgtaaattgtgaatttgtgatgttactagatgagctgataattttttccttttttttttgcaaggattgaatccaaatctcttatgatgtttttatttattttccattttataagtacaagactttattatacttttaaaaaaacgtaaagtataataaaattgtaaattttcaatgcgtacttaaggaaagtcgttaaaaaaaatgtaatatttaacaggatgtcaaaaataaaacatatttggtcatacttgcatattttactattgatgatatccttacccacaaaagaaaagtaatttgtctggtttgaaaatcttataatttatgtattttttataaattggtaataaactgtgtaattatatgaaattttcttagtttaaattgttaatgatttgtaggcttattgaagtgcgaaaaagtcgggatgagtaaggctagaaatgttagtaaagaagaaaatatctgaaaacaaaataaaataggcaatgtcttgcttaccgtgaagaggaaagggcattaacccaatgccacacaaaaaaaaactgaatttcgtaggccataattttttcatttttagccttatgtatttaaattgtatagtgcatagtgagtatttgtttgggaagtccacacgctatgtattagaaatttatgcacatgctaatggaagataattttaataacataagtacataactaaaataacgaaaatctcttttggaataatcaacatattaaaagaaaatgaaaattaaaaagaaaaagagaaattgattttgtgttatcaatgggccacttaaaaaaaaaaaattataaacaaaattagtagtaaggttaatctttgtaaccgtgtcttcttctaaatcataaacttctttttttgcttcaattttataagagtatttggctatcatatctatagagagaaaattggtttgataactacgtgagtttgttgaataatttttttaaaggaaagatagataaatagtggtttgaatattttattttctttcatcttatcactatcgaatatgtttttcgttatttggattatttttttaataataaaagccacatttgtttattcgccctaagctatatttagccttagcacgacactgaaaatagaaagagaccagagtcgttagattttacgagtgacttctaacttacgagattaaccgcagactggttcaaaagaccatcctcactttcctaagatccaagtaatcaaaattcactttcactcaaatcacctctctatttaaacaacaacaccactttttcaatcctcattaacaaagttaaaaaaacaaaacaacaccatcttcactttttttttttcttcttattttttgttttctttctctatacatattgtatcaaaaaataaatacattttcctgtattttattttttttgtgagtattaaagaaaacacaagacaagaatgacatacacagcggtaactatgctctctctctgcctaataaatatcttttcatcttatggcaaagagtgtcgagttttggcccgacttgtaatgtagtttcatcaatgagactcttaacattatatcatatcattgcctcactttattacattttttgtaacgttacgcgctgttagttctcttaattcattatattaagcatg

SEQ ID NO: 26944 - DNA, 3003 bp, Unknown
  misc_feature (1)..( 3003): 2750-1469P.txt file - cDNA_ID_2717080; gDNA_ID_2214475; Annot_ID_133112
tgaccattaaaagagctaaaaaaaaaagtaaatgaactttaaacttgaggctgattttttttccgttgagttttgggaaataagaattaatagttgaaagtttggaattactttggattaaaatatgaaagtttagttggtttcttattgtaagatccatatattcgaagaaataattggttagaatgtctaacaatactagttagatttttctagcatatatcaattaattcatatattaatgttatctaaagaaacccactttctcagatcgcaatgcacataagctcatagttaaattaaaagcatgcattaggataaataatatacaaagaaataaataaattttagggagtggagaatcaaaagaaactttatgcccctaaaagacatgaaaatcaaacaagtgtcaatcatagatacgatcttgatcgagccaatgagcgcaaagatgcgaggaaaaagaagcaacagatcgatcacacactttttgcgttttgcatgtttgatgcattttgatttgacaaagattctttatttacttccttcttccttacttaagctgaccctctttcttaaagtttaaactgtttttagaacgatcaatcatttcaattttggaagcatcgaaatcaaaatgtccaaaatacatattttgacagcgaaatattttgactagatttcaatagtttagaactttggttccacaccagtttatgttgtaatggcaaatgtaaattatttatagaggaatcccattctaatactattttgaatactaaccttggccttttcaacaaaaaaaataaatcgaaatgtgtacaatcaccacgaaattatcatattttttagttatggattctgtaaagatggattaaattagttaaagggaatatactcttacattagctatattaaaaaaaaaaaaaattagctgctaaggggatttagtccatggaaaatgttatttaattctagtttgattaaaccttactttcttcatggtgaaatttaaatttgatgatataatccacgctaaaaaataccatcgtaaaaaacgttgctaaaagctgtgtctttttttttttttttggtaaaagaagctgtgagtcttttgttatatgatgagttaaaccgctcacagaataccagttagtgaccttaaccaaaaaagttccatcgttacagagtatcaatctatgtttcaatgtattatgtatttctttgaaatattgatgtcgaatataaggtggattttctactcagaaataagagaaaaatcccatattccaagaaaaaagtgagttgaaaaaccccgtaatgttgaagaagaataagattcaggagtttgttatgtagaccaaaggcaaagcaagatggtcaaaaaaatatttagaaaggagaaaaacgacctacttaatcaattaacaagcaaaaaggtgaaattcaataaattaatacacctaacaaaaaaaaaaggctacattggcacctaacatgggcaggtcattggttctccaccacgatgagatgcacatgatacccgctttaatatgggctaagtatgcttaatgaccatcacttaattgttctttttagttgttaaaatgggttaagaattccacgtcgttaaatgtgagaaatgtataattcaatacagaataaaaagctcggacgaaaaaaaaaaaaaaaatacagaataaaaagctcaccatggatttttaacatgacataataatgatgagcagttctatatataccacaatgaaaattctttgtaaacttctttctattagtctgctttatattttctagtaatcgaatttcatatttagacactaaatagagatcatgtgagtttcaactctagatcaaatatggttcgttttaataataacaaaaatatatacatataatatattttgttattattcggacggtaattcgatagtgtaaatacattaaacttttgcttaatcaatagagcaaaaacctcccacttttttttttttttttgataacttcttgtttattattagttgattttaagatgaaattttatgtatttttaatgatttacatcaagtcatcaacccaaaataaatatattcgatctttggatccagttaaagtaaataagatatgagaggtacgtgcagagatatattcagaactatacattagtaaatataagaggcaaaataaatgatgctatgaataaagatgctatgaatgtttaactaggaacagaactagtttttgtttcattgttgaactcttatttactctaaatccttcacataataacgctttgtttataaaaaataaaacaaagaattctttttttaagaaagtgaatcgcatgccatttgggaactcaatctttttttatatatatagtcttgcacatatcaaatccagcctccatctcttggtgtagaatgtaaattgtaccaaattagattgttaaatatatttggatattgtaacaatagtgcatgtcaggtcatatgtcacatcagatgtaacatcaatcaatcaaaaagaaacctaggaaattatactacaagctagaggaggaagggatagtacaatacaaaccccttataataacaaagaaagacggagctttcgcatgtaaagctatatactattgtatgaatgcatacttaacatataacgtatatgagcgcatacatatataagggaaaatgaggctgatgtggaaaaggtgctttaagaagcagtgaagttagtgggagaatatgataatggagattatatataaagacaagaaggtggcatgagattggtaataacttcacagttgtctccgaagaaacagagaaaccaaagagttaagtggggaacctcgaagctagttcaaactagtgggaggttgtttcacgtttcaactttcaagtcataaaaccaaatccaactctaaacgtaaacccaaacgtcaaatcatcagatagaaggaaatattctgattgagagatg

SEQ ID NO: 26945 - DNA, 3000 bp, Unknown; identical to SEQ ID NO: 14832
  misc_feature (1)..( 3000): 2750-1469P.txt file - cDNA_ID_2717080; gDNA_ID_2684228; Annot_ID_192123

SEQ ID NO: 26946 - DNA, 3003 bp, Unknown; identical to SEQ ID NO: 26944
  misc_feature (1)..( 3003): 2750-1469P.txt file - cDNA_ID_2717080; gDNA_ID_2214475; Annot_ID_183070

SEQ ID NO: 26947 - DNA, 3000 bp, Unknown; identical to SEQ ID NO: 11149
  misc_feature (1)..( 3000): 2750-1469P.txt file - cDNA_ID_2717109; gDNA_ID_2214480; Annot_ID_133241

SEQ ID NO: 26948 - DNA, 3000 bp, Unknown; identical to SEQ ID NO: 11149
  misc_feature (1)..( 3000): 2750-1469P.txt file - cDNA_ID_2717109; gDNA_ID_2214480; Annot_ID_183310

SEQ ID NO: 26949 - DNA, 3000 bp, Unknown; identical to SEQ ID NO: 11141
  misc_feature (1)..( 3000): 2750-1469P.txt file - cDNA_ID_2717124; gDNA_ID_2214480; Annot_ID_133227

SEQ ID NO: 26950 - DNA, 3000 bp, Unknown; identical to SEQ ID NO: 11141
  misc_feature (1)..( 3000): 2750-1469P.txt file - cDNA_ID_2717124; gDNA_ID_2214480; Annot_ID_183296

SEQ ID NO: 26951 - DNA, 3000 bp, Unknown; identical to SEQ ID NO: 11163
  misc_feature (1)..( 3000): 2750-1469P.txt file - cDNA_ID_2717144; gDNA_ID_2214481; Annot_ID_133263

SEQ ID NO: 26952 - DNA, 3003 bp, Unknown
  misc_feature (1)..( 3003): 2750-1469P.txt file - cDNA_ID_2717154; gDNA_ID_2214481; Annot_ID_133255
cacaaactaaaataaatttataactataatatcaaacatgtgagtaaaaaataaagaaaaactagaaaatcaccccgtgataaataaaataaaaaggatcagataaaagaagaaaaatatgtatgtggtaaatgaacaaatgataatgatgggaatgggaccaaagttgaacatgaatgtcgtgaagaccagagagtgggtgtgaattgtgaaatgtggtgctgattagttgagccgaataagcaaaaaggaaatggggacacgtgagttgttgggtctctcttcttgtctctatttttagtgagcccctctcttttcttctaatgagcccctttaatttcttatcataactatccacgtggcgtctcccctgccttttgtcttcttctctttgttcacatgtgattcgcttctgtttccacaacatttataatcccttactcttctcacatgctttggtaattgtttccatcaccacaattattgacttaaactactttttaaaagtgagataatatttcacttgcttctgatggttgttcacgaaacaaaacttatctgatggttatactgaggaggggaaaaagaactttatttcgtttgtatgtatctcgtgatccttctctttacgagttacatgcactagagattagtggacgtaatttgcgatcaacttcgactgtataattactttatgtgtttatgaagttactaacttttcttttttgttgaattctgaaaattacaattcgaatgaaagaacattttgtgcctatataatcaccatatggttgattgattactcaatgagcattagtagcatttattatacactgatcgcagcgccatataaaccaccacaatcatttggagcctttcgttctataggtacaaaacaataagatgggaaactaaactagtgtcctctcttatcctgcttttattacatttgactatgtaacccacatcatcaatagaagaataccataatggtttggcatcgatacccatgtcatgtgaccatcaccaaatctgaatgtcatctttacttaacatgacacgttcatgtgcataggtgttttaacatgacacttttgtctccatttgacgccggcgcaccatgtatatctatcaaagtcatgttaatttgtcaatgaagccaattagctcatcaaaagctggaccacgatcattttcgttcataatttcatttttctctccactagaatattcaagaagcaatcttcttttggcttctacaatatttcttctttttgatttcttatgttgtgtattttagctgtttacagcaaggatctttcgaacaaaagctttatatgaggattggttatcaattttaaataattagcaaaaaggaagccgtttatgtaatcagaactataaattattttatttagctttgtcatttgctacttttgctaagtaaacagatcaaccaacccattatattacgatactcgtaataagtcacaatatgtcaatttcttacaataatttaactgaatttatacatataggtctagagtgaaattagaaaataatttgcgatcaatacattacaataacaaaatttatgtaatgtattttacttacatacataaatcaaggatggatgctcatgatttcgtctctaagatttgcttcatctcactgacatttgtcgatcaagctataggaagttaaagaatcacacttttaatttgcttgccaatatctacaaagatcaaataaaataaataaaaacaaaatgttgttgcggaatctaaagtaacttgtcgtattaaaaatttgtttttaagtcgtagggaaatgtaaaactgacgtggcgcatctcgaggccaacgacttattggcaggccgaaggtgaattgtttataattagatttgtaaataaatcactgatactagttcgtctttaacctacataatatttctttattaaattaagtagtacatttttaattatgttttagttgctgttgagtacaataatcttgtcagtaaaataattgcagcaacctaacgagtttggagcaacgacttcttgttgcggccgcgagaagttagatgtgaaaactgaaaatgtgtgcatacacataactactatgtatgactaacatatttaaacaataaaaatgtatgactaccatatgtaataataaaagaaatatttttgattaaaaaacatatttttaatataatatacatacgagtattattgtacgaatttttttatacttttagactacattttcttttgttttatggataattttttattatggtatgtaagtcagaagaccgtttaaaattttaaatagacgaattggtagtcttagttttttaaaatcatattaagttcaagtgacgtatgatggtacgtaatttcgaaaatttcgtttcatgctgagaaaaataactagcgatgagttgtatcaatttgtttatttgtcaacagagttagatttttttgtcttttctcgacgcaatacaagaagttactcacttactctccaactcctccatacggtagcaaagtctagttctaaactacattttgatgaagaagtaagaattttcaaggttaatttataaaaatatgcagattacaaatcaaatgctaattttgtatgttacgcttacggctaaaaaagcggtgggaataataattcgcgaaaaggtgctctctgacgactgattcgttgatctagattctagccgcacatggtgggccatactctccggcccagtatacacacatccatgacatgtcatcatatattatatcataacatacatacacataaattgattagtgaccacatgattagaaagagacaaaaaataattgccgcccgataataataacttctttataaagcaactcttcttcttctttctctcttcactttctctctttttaacctttttctaattaccactttcttctccatatacaaaaaaaacagagaactcacaatg

SEQ ID NO: 26953 - DNA, 3000 bp, Unknown
  misc_feature (1)..( 3000): 2750-1469P.txt file - cDNA_ID_2717164; gDNA_ID_2214482; Annot_ID_133279
gtgtgccaattaatcatcacaacacaacaacactcacacacaagtcccgttgcttcatcaaaccccttttctttcacgtctctagcttcattcatttgattttattttactatttcatctcatcttcctcctcctatacgatctgtttcttttcttttctttaatttagggtttggtgcaaaacccttgattgtttccacctctcgtctactacatgatccatatatgtgtatggttcgatagatatctatattataacaaatgatcactaataagtcaccatatatatgataaatgtgagtcacataatcacaattgatgtttgttgttgactgacttggaccagaaaccacatcatcagggttccaaatccaatttacataattgctgagtctatacatattgttgatcggtttttacattttgtaaaatgtttatacataagagttggtatatgttgtaaccgaagttttaagctgatgattagaattatacatgatgggtttataactttatatatgtgctagaaattttccataagctttatcaacactgattaattaacatatacataattaatgtagttggattatctatgttcacaaaccgtgatactattgttttcttcttacaaacatttgattggaaattaaaatatacgtggaataaatgagttacactatagagaaagggtcgctatcgacatctgaattctaatggctacaaggagttaccttgtcatcgtttcgcttctaaaagttttggcttagaaatgaccattttagaaagacaagtattttcctatcatattatctattcatttaatttatgtcattatgtaaatatatatttaaaaagaaatcgtaaaagagtctcgtgtttgtgacagctatatctcctttgtcttcccccccccctccccccccgtaattatatatttacccgagacaaattgagattagtatcattttggtttttacaatatgcacataaaatcatgttataagcaaaatttaaaaaaaatatccaatattcgtacactcataatcagtagttccacttgcaaaacggtcattggtttgtttcctacatattaggaaaggattctgattgtacttgtaaatttaaggctaacataaatagttaagtatacaataacttagagtggtcactcgacccattatccctagtcctagttttagtataaatatggcataaattttctaaatggttatgaattttagcaatttgatttttcttaatataagaatttgacccaaaaaaactttgtagtagcatagttttgttaaaaacgaaaattgatcttttatatgtagcattaaattagtaaggtttgtttttcttcgaaaatatagtattagttattactaccaaaaaacggaatttataccttgtttttgagaaaaagtgatgtcatcatcaaactaacatttgattgttctctacaaacattacatttatacacacacaattttttttttttaagttcgtatttgaatatattatattttgttataaatttggacatccagaacaatacaaaagcatatgtacttatatacacatatgtttcgtcattttaaaattcattacaattatatatatttaaacaaaatcacaaatgaaaaaaataaaaataaaaataaaactaaaaaatatgatggtcctatggaatcgtaaatacgtatgcagaagtaaaatgtttagaaatataaacacggtttttacaaaaacaaaaattagaaaacgcaagaaccttaaaatccgtcgaaagtatcataagttacataattcatgtttgtcaagactcaagacaatatggtgtatgaatacaatcatatccattttattatcataattctcatgtttgaatgtccaaaaaaaaaaaaaaaagaggattttcattacgatcatcatcattataacacgtatatttctctctcgttgtttcttctccatgttggcacatcaatgttaaggacgactcattaattaaactccaagatataacatatcggatggaccatacgtgggatttagaagagaccaaaaggacaaaataatattgaacatatcttaagaagaatttacaataatatgttgtagtcagggtttagcaatttgatctaccccactctcctcttgaatgtgacaaaagaatcaaatgagaattaggtcacgggggcggctttatgctatcaaacatcacttgttttttttcttatctctcgatattttttgtatagtatttgatcaaataatagacattgttcaatcatttacatcctcatatatatcaaaatagaatactgctgagacaaaaaaaaaaacgcgtttatcattaaggttatgactacatatgcttacatgtacatatatatgcgtgacgtttgcatgcctaattataaactagttataaccaaaacttatttgttggaatcccacaaaaatgggagagaactcacgttaacaaaatatatgctcaagtttaacatattgatcaatgttgtttatttacattagaatcagacgatgtccgattttccgtaatgatcaatgttatcacttcaatttttttatttcactaacatgtaagacatgataacattttatactgtgttaatctttttatgataaaattttagttttatgtacttgattttttttattttttatttactaaatactttgatggtttttctgtgagtatgaaaaagtgttattgttgcaaaatgaaaaaaagtagtatataaccaagaaaaaaaaacaaaactaaatatatgtggaaaggaaaatgaatgtacgtacgtcgtaggaattaaaaagtatatgggcccattaagaggaaatggagaaacgtaaggcccattatgtttctctctaagccctacccctagtgtgtgtcctcttcttcaatcatcatcttttcgataccgaagcagcaaccttcgcgccgccgagagataacgagaaaaaatg

SEQ ID NO: 26954 - DNA, 3000 bp, Unknown; identical to SEQ ID NO: 11206
  misc_feature (1)..( 3000): 2750-1469P.txt file - cDNA_ID_2717174; gDNA_ID_2214483; Annot_ID_133307

SEQ ID NO: 26955 - DNA, 3000 bp, Unknown; identical to SEQ ID NO: 11206
  misc_feature (1)..( 3000): 2750-1469P.txt file - cDNA_ID_2717174; gDNA_ID_2214483; Annot_ID_183424

SEQ ID NO: 26956 - DNA, 3000 bp, Unknown
  misc_feature (1)..( 3000): 2750-1469P.txt file - cDNA_ID_2717181; gDNA_ID_2214484; Annot_ID_133330
ataaactttacttgtaaatgtgctttagaagtttctgataccaatgtgaagaaaacaaagtctgaaagttagattttttcttggttttaccttagtctgttggttgctctttgttggtttttttatttgaagtttatatttttgttctgtttagcacgaacctcacagtgggctgaagagttctcggaatagccatggatggggtgggtgaaagttcgactcaaaatgaggtagaagagaagcctgtgattgttagagttaagcgaaaagttggacagtctctgctcgatgctttctgtaagtttcttctctcttcctttgatgtttggtagagattctgtctttagcaatcgtgtggaagtggaaaaactgatattgctttggcatttagggttggagataaatgaaagaccactcaaacggccgactctggatttctcaaagctatctatttcagattcaggggagagaggtaattctatattatctcaggctttatgtgcttgtacgatgatggtttcgactcagtggagctttaatatgtgtttacatggatataggtccttctgtggcagaggatgtgaaaccgaagaaggtgctagtgcggcatttggagacagttacggactctgaaaccacagctgatattatccactctttctttgtgagtgtactttctggttaaattacaaaccctgcaggttattgttgttgtttgtatgttcttatagttgtcactttgtgctctgcaggagtctgatcataatgagaaaagttgcagtaaaggaaagtttgaggagaggaaaattgctttcaagaaagacaatgtatcttctttcattttgttttagtcctgattccagattgtctatctcttgaccgttgcttgaatgatggcttgaattcattttctttttggcctgtagagaaaggaacagcgcctgaccaaatctgtacaaaagcaacaggtatcgggctattggtcaagaacattgtcaaacagtttctctgagattaccatcttaagaaaagatctaacaccactttacatagctaagttgagacttctgtaatcatttaataataagttccactatctgattagattgcttcagagaatgctcggtttgagcaaatatggcggagtaggaagggaaacaaggaaggcatccatgagaagtgtcatttctttgacgttattcgtgttgatactgaagaaagacgagacaatgcacaagagtaagtcccctagtaatgtgcatttgtaattaagatctcagagtcagaaatagattagctgtagttcaataaacacagtatgtaaaggtttactctttctgtaggtttacatccctggaggaccagaaaatgctcgctagtttcttgcctctccttagagaatgtattccaacagcagctgaagagattgaagctgatatacaatctagtcacaccgaagaatacgtttatgattattatgctgtgaacgaagagatggatatcagcgaagatagttccaagaatcagtttcctctgtgcgtattcgttttcgtcctttactttttcgtctttgtctcttgtgtcacacctgttaatatggtttttttgttgtttttcagtgtcatagtagaggatgaagaagaattctgtgatggatctgatgaatcagactacgactctgaagattcaaacggtacactttaatcatccatatgactatcttcactcttatttaacgtcttagacccttgaagttctggttgtgtgtttcgtttgcttttcaacgctcctgttcgtgctagtactcgctagtcttttggaagcagaatcaaatcagggcattgttttcatttgatactacaatctcttttctcttgatatattttctctaatgagttaacgttgaaaacaagtatcattggcatttttgatttatggtttcactctgtgttgtataaaccgaaagtcaagaaagaaagaatacttactatttatttatatatttgtgtgctcagctgaagatcatccaaagactgattacccagaggaggaagaagaagaagaagaagaagatgatgatgatgatgatgatgatgaatcagaagaagaaaagagtgaagcctctgatgaatcagacgacgaggagacttcaaaacgacatgtgagaagtgtccttggagatgacgagtttgatgattacgcagaggatgtgtatggttacagcgagagcgatgaggagtttgagtcttagttaatgcctaaatgtgtctactattcttattgagagatactaaagagaattaccgtaaggctgtgaatcaaaattgtgtctccacttttaaacgaaattagaggtgaaatcactgaaatgcatgtaagggtgatgttttgaacagagtagatcatcatatatatattctacagaaaacataaaaaaaaaataaaatcaatacattttgaaagattatacataattcttagtttttttaaaacaaacatttgagagggatggaaatgcaaaaaaaaaaacctttataaatcaattcatgtcaaaggtatgttcactaaaaatgtatcttttccaacaaacacatatgttaaaccatacgtttttccaacctaatgtaagtaacacatttaccattttctattaatttattaatcaagatcaaacatcaaaaaaatgtgttattactttttagtttttttttttgcatttcagttttgtgtgaaaaaaaaaacaagaattggtatctcaagaacgtaaaagaaaattatcattactattttattatctttggcttctacatccaattatttacttgcttaattttattcatctgaattattttttggtgtaagaagaatgtttcgccgcaaaaaaaaaaatctgatccgacatcattagaacaaaaaaaaacattggcgttgaatataagctgcttctcttgttcttcttctaccttacgcttctgactgttattagagactatgtaaatg

SEQ ID NO: 26957 - DNA, 3000 bp, Unknown; identical to SEQ ID NO: 11233
  misc_feature (1)..( 3000): 2750-1469P.txt file - cDNA_ID_2717194; gDNA_ID_2214485; Annot_ID_133341

SEQ ID NO: 26958 - DNA, 3000 bp, Unknown; identical to SEQ ID NO: 11262
  misc_feature (1)..( 3000): 2750-1469P.txt file - cDNA_ID_2717198; gDNA_ID_2214486; Annot_ID_133372

SEQ ID NO: 26959 - DNA, 3000 bp, Unknown; identical to SEQ ID NO: 11262
  misc_feature (1)..( 3000): 2750-1469P.txt file - cDNA_ID_2717198; gDNA_ID_2214486; Annot_ID_183519

SEQ ID NO: 26960 - DNA, 3000 bp, Unknown
  misc_feature (1)..( 3000): 2750-1469P.txt file - cDNA_ID_2717208; gDNA_ID_2214488; Annot_ID_133408
tttcctcaaaaaaccaaactttaaaaggagaaagcagaactacaaaacctccaataaaagcatcttaaaatacatattgaaacggcgcctataacaggagaaacaataaatgatgacaaaccagaaggagaaagtgtcatccatacctgtgtaatatattctgccagttgtttccaccattcttattatgctttttctggtgtatatcccttgcatttggatcgactttgtttgctacttcaccaactgaagccatttccatcatcttatcagcaaaactgtttgcctctttcttgtttcccatcttacctaagccatctatcacaggcatcaatgctgcagggtcaaatccatatcctctgtctatcatcttatgcaaaattccactagctacttctagttcatccttcttacataagctctcaacaagatctttataaagaaaagtccccaactcaaaacctctatctaaaacagcttcgagcaactccgtagcctttagtagttgccctgcagcaagcaactcattgaacatcaagctgtacaggccttctttctgtccacagatacttacagcagtctcaaagacttcttgggccatatcaaaatcagggaccttacagaacgcttcaatcaaatatttgaaggaaaatacatttggggctatgttcttttgcatcatttcatcaaggaggttagttgcatcttcaactttttctccctcacaaagatactggattgcagtattgtaggtgcatatatttggtgaaatgcccttttctttcatctcatccatcagtccatgaatttcaaaaatctggttttttatgcctaagcccaggatcagtgagttataagtctctaggctcttatgacaacctttcttctccatgtctttgagaacgcgaaatgcagatgatattttcccctgtttgcagaaatgatgaatgaaaatgttatatgcgaccgagtccggttgcagtttctctcccatcatctcggcaaacaaattttttgcttcagcaaaccttccagctttgcacaaaccattaagtaaagttgaatacgtgatcaggtcaggcaaacagttgttctcgatcaagctatcatccaccagtccgatatatgaattgcctaagttaccaagagcagcacttccatgcacccgcattcccttaactatctcaatagctttatctaattccccgcttccacagagtccgtcaacgataatgttgcaggtgacagtgtctagtccataacctttctcattcatctttcgcagcaactcttccgcttcagatattctccccatcttccaaaggctatgtagcaaaatattgcaagtataagcatttggtaaacaattattcctcatcatctcctgcaacaagcttttagctgcatcgactttcccaacactgcaataaccatgaagaaggcagccataagttacagcatccgggcaaacaccatttcttttcatcaaaccaacaatagtttttgcatcggatagcatgcccaatttacacaatccatccatcaagatattgtaagaataaatacttggtcctattcccttatcagtcatttgcttcaggactgtttcagcctctataaacttcccatgtctgaccaaaccctgcagccaaatattgtaactctgcaagctagcgagatcatcattttctctaatcgactcaaagagggtcttggcatcttccagcaaccctaccttacagaaacctttcaacatcaagttatatgttatactattgggacgaggaagacccagatactcatctagctccatatcactgaaaattctagacgcatccaaaacctttccttctttacaaagcgctgatatcctagagttaaaagtgacaatatcaggcaccaaaccttcctcccgcatcttctccaccatcttttcagaatcatcattcctaccttctctacagaagctcgaaacaatggtgttatagataactttattaggcaaaaccccaaaactttccattgcattcaacaattcaagccctttatcagtcaaaccagctttacaatacccacgaaccaaaatcccaaaagtaaactcatttggcttacaacctttctcaggcatttcgtcgaacaactctcgagcagcatcaacacaacttgaatcacacaaagcacgtatcaagagattaaaagtataagtctgtggagcaatcccacacaaaaccatatctttatacaaccacgaaacgaactccacacgtcgttcctttatgcaactttcaagcaacaaattatacagataaacgctaggtttgttctcaggaaaccgcgaccgtactaactgaaactgcggaaacgccttatcaatgtgattcgatttcgcgaagatggatacaacagagagaagagacgaaagtttcgtcttttggattgaagaagagagtataagattgtgaagctcttggatttcttcgtgcattttggctcgaaccaggatacgagcgattgtaggagtcgcatctaaagaaatgccatggctttcttctgaaggagaagagaatatcctcttgaagattctccatgctaatctcggattgttcgtgttcttcaacaaagccttcacaagagattgttccatagaactactacagaactcaaaaattcaatttttccaaattggtcttataagcaaaatactaaattacatacggactaaaacgtataatgttaagaaatcgaggactattatgttaataacagaacatggttttacccaatttggtcttaatgtacaattcaaattataaacgggctaaacattaataacggttaaacatttggggctattatgtaaacaataaaagttatagactaaaagtaaacgcttttcttgttctttcttcgttccaaaaagtcgcaactcttcttcatcttcttcctctgacgatcattttcagaagaatctgattccgatcaaaattgcagaagaagatg

SEQ ID NO: 26961 - DNA, 3000 bp, Unknown; identical to SEQ ID NO: 26960
  misc_feature (1)..( 3000): 2750-1469P.txt file - cDNA_ID_2717208; gDNA_ID_2214488; Annot_ID_183574

SEQ ID NO: 26962 - DNA, 3003 bp, Unknown
  misc_feature (1)..( 3003): 2750-1469P.txt file - cDNA_ID_2717212; gDNA_ID_2214488; Annot_ID_133407
tatttgacaaaacgatgttaaggttgtatcacaagattaacatctcaaaataacaaaaagtggtaaaccaaatagtggtttgaaatcacaaaaagggataggcaaaaagttgtgtgaaataacaatgacactataatggatgaagatgaagtcaccttttaagtgtttgatgtgtaagtgttttgaaaaacaaacaactatcatagtttcatataaaattttaagtgcatttaaagattaaattatgcaatttaacccaaaaataaacaaattctcaaacaatatcaaatctacatttttcaaatgagattcaacatagatatggtcaaactttcaaaacttagaataatcttcaactattatgattataaaagtttaacctctataagaacataatataataataaattcatgcaacgcgtgagtattttttagttcatttaatcacactaataacatgtacaacatactaccatcaacaaaagattgtgtcgtactaaaaaataaaaattataacaccaaggaaagtaaaaaaaaaaaaaaaactaattgacttatattaatggatgaaaacccctaaaccattcacctacttatctcattcgttgttcgcctagttaacaaatttgatattgttcaatcaattacatctgagatatcttaaagagaaaatggtttattagcttgtttagtccattacatgcaaaagtatctaaaactcctgaaagtgaagacgacatcaacaacaactatgtcaaacccatataaagaagaattgtaacctcctagtgtttctcctgatcgataataccaacaacatataatgtcttacaaacaaccttactattagagttcgtacttctacgtacaaccatataatcatcaattttatgctcataaaagcattggttgtggcttttgggactttgaaaccttggacatgccacaacattttgatctcgcaagtctatttaacacagtaaatggagcagtaaagaagctgaaccactcttattcgattagaaaatttcatgctattaggatgccacaaagcattttgaaagcaaatatttgccaaatataactatatttttcaaataagctagatttctagtctttgaacaaaggatgcacaaaacgacatttgttgtgaaatagagggagtaataatttttttttttagctcctttagattcaatgaatcatatggttcgtagagaaattaaagttgaggttttgaagtgaaaatgataaaactttaaatagttaggtgatataaacaaaaaaactaaagcatggttcaactatagtttgatttttcaacctcaaagcttagacagtggtaggagaaaagtgtatcatttcacgaactctcacaaatatatctcctaaccgaatatttaaactgatttcagaattacatacatataaagtaaaagtagcaaatagataaaagagttttaaatagagatattcttttccgtacaacatgattccaaccttaaaataattatgtattctagaatctactagccacataatggacattcatataaaaataagattattaatattaataatttttatattttttttgctgcaacttttttggagggtggataaagtccattcaagtacaaatggtacccgtccattaaagcaaatttgttcattaaaaatcttttggattgggttacgtaaaatgcgactatattgccctagttcttttcatatttggttaagatttaaaactgtaaatctccattcatctttgtttgattttttcaactgttttaaatcatcctataatatataaagttatgaaaaactcaatctttttctccctatattgtgattcaaaattaaaaaaacggacatatattacccaattaatggaaatgatgtgtgttcaatgtcccacatcgactaaaatattcagataatgatttagaataatattatatatatgattaaaataaattcaaattcgaatgtataggaaagcttaccttaacaagcatccaaatttaaaattttgtatatgatttaattcagtctttagttttattgtttagttttaccgagaatattaaaattttctaatatcaataaaaggttttataacattataaacatttgaacaaataaaaataaaataaataacatgggacaaattgtattgtggtatacagttatatggtgagatgaatttttgaatcaacattaataaaatttagaatatcatcaatctgccgctttattatttttaatactaccaatattagaaatatctaaacaacctaattaagataagattgtatataccaaaaatttctctgtgatatacagttacttaataacaatcgtatattataaaatataaatttcttagaaaattttacaatttgcaaacttatgtatataataaatagtcatcaatttttaaactactatttttagaaaacaaatcatgagatgtgttatattacagaacaaagttatatgatggacgggtttgaatcaatatttataaattttttgaaatcattaatatgttgtttcaatacgggttaaattctcagtttattaacaattgttatgtggacttgtgatatatttttacttaataacgattataaactaaaatagaaatattttataactaaatataatttataaaattttatatatacaaattttaaaatataaattgtcttgcagtttacagctaattaaaatttagttgtgatattatatccaattatccatataactacacttttttctccacaattagggcgtgacaaatggcaacacttcaatcaaggaacagaacacaatgtgaaaccagactgttctcatttattttccagcaagtcaaaaagtcaaactcaaaaagtcctctctcggtcaactttcttcttggtccccatcttcacaaatcacaactctttttatttccaaagaccaaaaacctgagaacacaccggcgacctgaaaatg

SEQ ID NO: 26963 - DNA, 3003 bp, Unknown; identical to SEQ ID NO: 26962
  misc_feature (1)..( 3003): 2750-1469P.txt file - cDNA_ID_2717212; gDNA_ID_2214488; Annot_ID_183573

SEQ ID NO: 26964 - DNA, 3003 bp, Unknown
  misc_feature (1)..( 3003): 2750-1469P.txt file - cDNA_ID_2717227; gDNA_ID_2214488; Annot_ID_133399
cgttacgtgtacataatggcatgagattataaacaaattacaactattatattatttacgataatgtttttttaacttactatgatcaatactggtataagagattcaaatctttatagtatagcaaataaaattcatattaaattgaaccaaaaatgataattaaaatccaaaactatttcaccttaaatattttattttcttttatcaaactctaattattacaaaaacacacacaacacaatctctagatatcctttattcaaataatcaagaccagagttaaagaaacaagagatgattagaacaacaacatcaccaacaacaacaacacaacactaataacaacaataaccataagaactaagaaagaaaaaaagaacatcaaaagaattaaaacctcaagtaaagatgacgagaattggtatttacccaaatagcttcagaattatcagtcttcttcacttgcgtcttcttcactctcgtcttctgcatcctccatttcaacatcaccttcgtctccaagaatccactgttcaagctcatcttcttgtgcttctatgtgttggtgtatgtctgcagagtcccagtcgtcttccccatcatttccaagctcttctccacggcaagagacctgcaaatgtggtcgtctccttgccaaagcatctacgatatctctgtttacacttcctgtgatccctaaccatttaagcctcgggaaaaacggtttctttagccatttgaatgagagttgcgtgatgccaccacagtcgtaaagatccaacaagcacaggctacttccaggacattcgtcttcgtaaacccgggtggatgcaagagccatgactgaggcatcacctatgagtctacattctcttagttgcagttttgtgattggggctccagattttgctagagcaaaaatggcagcatccgttagattaggaagattagacaagtcgagttcccgcaacgccagttttgaggatccgtcaaataaggtagacatgaacttatcggttaaatttctgcaccctctgacagataaagaaactagggagtccaaaactccctcttttaggtacgaaagccctgtgtcgctaatatcagcgccatcaagaagtaaaaccttcagttttggcagatgagatacagctgtcaaggtttcatccctcaggtttctgcaccctctgaggtcaagattctccagcttgagacttgatgccagcttttgaattgcgtggtcagtaagaagatggcaccttcttaagctaacatgactaagcgaaagagtagttgctaagatgtcatggaagacaagatccgtcaatttaggtccatgatatatactaaacttggagaggctagcgcaagagtgaagaatagtcttgaaaccagcatctgttacccgacaaaagccaccaagacaaatggtttccattcccaagcatttgtcagcaagaaaaagcattccttgatcactaactcgccggaagtaagtagggtgaaactcctggctacggattagagacaggtgcttcagcttaccattctgattgatctcatgaagcccaaaatccgtgaggtctgatacttgtcttggatcctcaagaggcgcgtctcttatgtccaaatctatcaaagatggaagagatttcgatatcgccttaaccacagcatcagtaatacaatccactgagaggcgcaaccgctggacattttgtagcacagtagatgtagtaactcggttgctgtcttgccccgagatttcagttgatgtgagtagctgagtcatcatccttgacgtgatgtgtcctagctccagatgagtcaatctatcagataccaatccaaaaatgcgaccatcaccaggacgcagatacaatgagaggtcaaacatgagtgctaagacctgccaaatacaacacatatggcatgattccattacacagacaatcaacactagataataagatcaaaagagaatctattaaggattcaaacctctaaatgggagcaaccattaagtaaatcctccaaagcacaacggctaatacttcgaccaactttctctgctactgaacccaaacataggagcctgaagtttaccaatccgtcagacacagcaacagaaagattcctcatattatagcagatgcatcatcacacacatacctcaaatccttgcatttcctaccaatttcggagatgagatctccgctgaaatcccgacaattgtgaagagaaatctccctcaaagaaggacgtaccaatatatcaatagctgaattaccaagccttccacaatcaagcttgagactagaaagttgttgattcggaaacaacaatggtctaacagtttccattgacaatgaaacattctgaaatccaaaaagactaaaactttttatacagtttcagtttgaaatcgaaatccaaatcaaacccttaaagaaatgtggagacttacgaagatgtggaagttgggagtgaaggtgagaacacgagtgacacagctcttaagtgttttgcaagtagaagccaacgagcagagagacgcaacatcgagtttcgtcataatagtctccaagagagccgccggtaacagatccaggcttctctcgccatcgcaaccctcaacatctcctcctccgccgcatacgacggtggtggtagccatcaacggagtctctctttcctgatcaagtaaattgcggaaattgtggcgatctcgggttgtgtccgaatctcatctttaaaaagtccgaatttttagatccatttttcatggacattaaaatattgatatcagacaaaacggtaacggtttatttcggtttgttcagttagatttggttcggttatagttaaatttgattcggtttgataaaattatggctcggctcggtattagattcgggtcgggtcgggtcaaatctcaccgtcgataactgttatcgagttttcatttctgaagttcaaagctattcaatttcatcaatg

SEQ ID NO: 26965 - DNA, 3000 bp, Unknown; identical to SEQ ID NO: 11306
  misc_feature (1)..( 3000): 2750-1469P.txt file - cDNA_ID_2717251; gDNA_ID_2214489; Annot_ID_133415

SEQ ID NO: 26966 - DNA, 3000 bp, Unknown; identical to SEQ ID NO: 11306
  misc_feature (1)..( 3000): 2750-1469P.txt file - cDNA_ID_2717251; gDNA_ID_2214489; Annot_ID_183586

SEQ ID NO: 26967 - DNA, 3003 bp, Unknown
  misc_feature (1)..( 3003): 2750-1469P.txt file - cDNA_ID_2717255; gDNA_ID_2214489; Annot_ID_133429
acaagtgactctccttttccatgtcactaaatatttcaagagcttccatgtgatacttgttttgaacataaccagccatcatagaattatatgccacaacatctctatgaggcatttggtcaaacagagtcttagcgtgatgaacaaaacctaactttgcatacccatcaatcatggtagcccaagtaactacatctcttctcggcatcacatcgaataaacccttagcatcttcgattcttccgtgttttacatatccatctatcattgagttccacgaaatcaagtccttctcaggcatatcagcaaacagtttagacgctatgtcaactccatctgatgtctgagcataaccacttatcatagagttccaagatatcaaattcttcatctccataggcatcaaatcgaacaattcacgcgcggatacaatcaatccacatttgacatacccatcaatcatggaattataagaaacagagtctctcttcggcattctatcaaacatctggcgtgataaacctaaacaaccacatttcagatacaagccaatcaaacaattctgtagaaacaaatccgaccaaagtccagtttttttcaaaaacccatgaatctgcattcctccttttacaaaacctaacctcgaacacgctttaagaacaagtgacagtgagaatttgtccacggaaaccccattctcgagcatcaaacagagcaagagcagagcttgtctcggatcctttccatgagagtgagacttgatcacggcgttccataaaaatggatcctccacctctccaaatgaaaacgaacatacgtgatactcgtggaagacacaacgcgcgaaatcggcgagatacggacgtcgagaagaggcaaaagccagaacaatcctcgtagtgagatttgagtttttgatgattcccgtcttaatcaatcgcccgtggatttggttcacgtcatctgaagttttgcagcttccaaggacatgaatggtggatgaaatcgaacactccatggttgacttgaagacaagcatcagttattacgttcttctgttggagatgaaccggattgggtttattatcatcgttttaacggctatgtggaagtcgctgagcggatgagttaaacgccgtcgtttttgtatctgcctataaaagggctcttaaattaaggcccaataataaatattataagcccaatctcaatatctgtccaaagattttccaaacagcagtgaaactgaaacatttacccaaaacaaaatggaattaactattaagtcagactaacgttcgaatttaggcttatacagttatacttcaacacaaactagtagatcttaaattttaagttgattacattatgaccaacatgatctataggaaataatatatgtatagaaaagagaaaaactgatagtgataaataggatattgataagcaagtagttgataagcattgacttcctccataagtcatagtcaggatggagtggtacgacatatcgtacatttttctcatttatcaaattggttatagttatatattttatataattttaatgtatagttgccatttaaatatcgtgcgtctttaatataaaacgaaagcgctaatttgtcgtttactcaatcgttaatctaattaaatcatgtcaacgttagcttaagagtactttggtaggtatttggttcttctactatttcagcggccatggtacaggcatgtctcggcctaccaatgggtgttatttccttacacatttttgggctacactcatgcacaaatacatctctattgtatgcagttcgagtaaatttatctgtttagttattttttcgtgtaatctgatcaataaacaggttataagatgagaaatcaaatatatttgttaataaaaattttatacgaatattttacataaataatcggctaagttacttttactattttaaaagtctatgtgtgtgtctgattggcgaatataaacgagttattaaaaataaaggtaggaatgttgtacttttggttcatttaaaaaaaaaaaaatcattttcgctctatcttgaattttgattttaaactacgaaatgtatataaagatacatttttagtttttttaataaagatataaagatatattttcattgattaaactactaatatatacatccaacattcttatattatatatacttatatatgtaatttatagatattttgtcgcatatctgttagctttatatgttacgtgcagaataaacaaaactaggcggcgttaaattatgtttgtataggcttggtgtttcttatataacctttgattatagattcgttggttggcactatgaaagcgagtgtcaaagaaaaaagatagtatatgaatcgcgtcattaagttgaaataacaaaggctttaatcaaaagattgaaaatttagaaaagaaaaggaaaaaatcaaagattgaagctgaccatctcatgtaattattcaagttgtctcactaagtccacaatgtcagcaatcaaaaattatcctttgatctactacaggtatttttcacacgctagctacccttctgacgaaactgaaataagtaacaaaataaaaacattcaactgctatctattataacaaaaccaaatgattcaaatatgtaattcatgtctagataaattttactgtgtatatttatggatattggtttgcataggttgtgaaaagagcgtgggctaacgcaaatcgacgacataaattctcgaatttttattaggatggaattataaattagattttattgattgtaacaaagtgttttttataaaaaagaagatggtgaggctaaataaggagtaataaatggaagcaatgagaccaattgacacgttgttattagtgtaagcaaatgtcaacgcttcgtttgtccatttataaaacctaactacttcttcttcttcttcttcccaaatcatcaaactccatttcactttcactatg

SEQ ID NO: 26968 - DNA, 3003 bp, Unknown; identical to SEQ ID NO: 26967
  misc_feature (1)..( 3003): 2750-1469P.txt file - cDNA_ID_2717255; gDNA_ID_2214489; Annot_ID_183602

SEQ ID NO: 26969 - DNA, 3003 bp, Unknown
  misc_feature (1)..( 3003): 2750-1469P.txt file - cDNA_ID_2717263; gDNA_ID_2214489; Annot_ID_133427
tgtaattttttctctaagaaatgtgatacatttgatgtataatattttatactaaatcgtattgattgaggtggaacattatggtctatcattagaaaccaatgaatcgagtgacgaactatacggaaatggcatacagttgtcaactatatgaagagttgaaattatttacacaataatcaaatacttatcttattttcatatgatgcttgacacaagcatataagtttttcacaaaagaatttgattaacaattattgttcttcacaaatttttgtatatttgtaatcatgagcttatatactgtcttctgttttctatcatggacactacttcgttttgtcttcccgtgttaggtgagacagaagaatttatttttttatatatttgaattctctgaatttgaaatatgatcttttcagctggtggaattttttgaagtggcgagcttatcattttctgaatatgacaaaaaaaagtcttatttactgtagttataaatagtttaactaattaacacaaatgcgaatcgaaaatttgatatatgtgacgacgaaacaactaaactagtacagtataatcatataattaaagatttgatgcatttgaaaatgtacgcgtttgatagcatatcataattaatttgcacgcctatatgacatatagcgtttggaccaattttagatgtaataaatcaaagaacacatcgaacacacataagttcgattttcaacgtctaaatttacgagaagcaaaacaaaattatgtataataataaaaagactaatattaccactcacaattagacacgatatatagcaaaacaagatacatagttttgctcaaaaacaaaacatggatgataatcagtaaaatgcggtgcctaccaagtaccaacatacaattataatgattattgataaatttttgaagtttttgtaacaatatacgaaacatcgtactcatgcattcaaacaaaaatgggacaggctgggttagataacgtgtgagggatggatttctctagagacgaagccaaatataaggcgtgactttaaatgatatcacactactgtttcatcttataacaaatcaaaagagatgaactagtgatgtaattctataaaatttaccacttagatgtactgtgtatcggctaattaattggtcataaactattactttcaaatgagttctacgtactattactatagtttaaaagtaaagtaaaatcatattcaatcaacttaggaactcaaattaatattgtctaattaacacaatgtcatcatcatatagagatttgactgcactaattaagttatcatggacactttctttctgaaaattctcattttctcactcaaataataatttcattctataaatagataatgaaatacacacacatctatcatccaccaaaaatatcatccaccactacccacgaagtaagaaaattacagagaaaacggaatatcttttaagtagaccttagccttttgctttattctcttgctttatgtctttcttgtttctgtaaattcacatgttacacttagaggagagcgaggtgttggtccattttaccttttgctatgatcagatatagaagatagcaaaaacattaactcaagacaagttcacatgtttgtaaaattttacgtaaatttgtttattaattgtgttagaaaaatgttcacatgttgctactattgacttgcctccatcatcttctttgtcccatttgatgtactcttagccccatgcctcttggatgccttttttaccttttaatttgttcttatataatataaaatattagctacccttttttttgttattcatggaacaattatttgcatcaaatatagtaatttaatggaataatatcaagaagatcccatttatctttgtaccttattctccatgtgaacatataaagcttgttatcaggttatttgtacatgtaatatctaagggtgtttactgatgatgatcggataaactcgaggtttgatttagtcaaatatagttcttttctaactaaaatcccaacctcacaattttgatgtttttcagtaaatatggtcattaataagttatgaattcgctaattaatagaaatttataagaaaacatatatccaacatttatggatatatgaaaagttaaaaacaaatgatataaaaagtacaattttatagctggtgcactgaaaaagaaacaacttttcttaccattaaatccagggagaatggtatcattttcaattttgaaaaaaagctaagattcgcctaactattattgttttcctctgaaaagactttaaaagtaatctttaccgtataaagtacagaaaatgaaatgaactcgtggacttcaatgttttcaattttcatgagtcttttgttttccttcaatttccaaataaacttatatatatatactaatcaatcaaaaacaatccactcaaaatgtgaaactatacatgtagaatacttgatgtaacatgaacaaacaatcaaaatattgtagttaaaaaaatttactgttgattttgatcagtaatatgtgtaattaaaaagtgataaaaagtcaagtggtttaaaattatcataagagtaacatatggactatggttcaaatactttcattgcaataacaattatgtatagttagctactatatgaatgtcttaatacattgcaataacttacattggagattagtctatatacatttatatattaaaaaattagagttgtgatctatatagttctctatgttatcattttacattttcatagttgaactaactttttattattattatgttcacgatatctatacttttgtggtttaagcttttcttagtattaacaatcaagaactactattttataaatacaatggacaagattttttcttcaaaaccacaagagagagtcattttcattttcttcctcatctctctctctctcttctctccaaccaaacatg

SEQ ID NO: 26970 - DNA, 3003 bp, Unknown; identical to SEQ ID NO: 26969
  misc_feature (1)..( 3003): 2750-1469P.txt file - cDNA_ID_2717263; gDNA_ID_2214489; Annot_ID_183600

SEQ ID NO: 26971 - DNA, 3003 bp, Unknown
  misc_feature (1)..( 3003): 2750-1469P.txt file - cDNA_ID_2717267; gDNA_ID_2214489; Annot_ID_133426
acaaccacatctatggattatctctaaccggattaagatttttcaccgtgtatggaccttggggaagaccagacatggcgtatttcttcttcactaaagatattctaaaaggcaaatcgatttcgatattcgaatcggcgaatcacggaacggtggctagggatttcacttacatagacgatatagtgaagggatgtttagcggcgctagatacggcggagaagagtacagggagtggagggaagaagagaggtccggcgcaattgagagtgtttaacctcggaaacacgtcgccggtgccggtttcagatctggtgaggatattggagagacaattgaaagtgaaggcgaagaagaatttgattaagatgccacgaaacggtgacgttccgtttactcatgctaatattagtttagctcaacgtgagcttggttataaaccgactacggatttgcaaaccggtttgaagaagtttgtcagatggtatttgagttattactccggcgacaaaaaagccgccgctagatgatctttttttctggttgatgatgatcttttgatttcttgttttttaattgatttgagtaatttttgggaatttgttgtaacagatttgaacacataacccatttcggtaattttatttaattcatttattttacttctaaatgttgtctgttctagttgatttgatcaaataaaagagattaacgaaagaaaaaaacagagttgtcatcgtcaacaatcagaaatcgtatttagttcttccactacctagaacaagacacaacatatctggaatgtttgaagtagatttgtagaagttccatgcctcgagcattaaacgttttcttgatcctttgaagtgaacaatctgcaaaaaaacgagtaatgagactctgatgatgctttgagggtttatggttttagggatttagagtaccttgacatctaatggcatgccatgaaactgaccagcaccttcaggaggtgtccagttgtatagagcacatggtagaaataacactgaagctccagctatttcttctgtgaaagcttgtggctttgtgaatctctttgcgtcaaaggaagcatgagatttaacaaccgataccagagccaactgatcaccaagcatgcgcgaagctttcatgtatttggttttgtaagcttttaggacttcttcaagaaaaactttggccctgcattgggatcacatgtaagacaaagtcatcaatatgctgagacaagtatgtcttttaactataatagatttgcttcaagtttacgaaggataaatgcaaaccttaggatcccttcacgtgtgcctctcactgctataaatcctgaattcaacggctgatctttattgttcctgaatgtgagtgctagatggaagcttgaatgcttgtcaaatatagtcccgacgtcgtcaaccacagctatatcagaatcagtgaagatatagtggtttatcccaccctcattcttctcgagcttcatctcaagaaaggtctgcagagacaaattttaacaagaatcatgacccaatgagcattcatattctctcaacaattcagctacttcactaaacactttctaagaaatgaataaaagaaaattagatgggctcttaaagaaatgggtgccaaagagatagataggtaaaagcaacaaatatattctacctaggtatcagtgcgagtttgctcttacaatgtaagacctgattctttgaagcatcaggttaccccgtgaataatcaccctgaacaggctgtaatatcacattgctttgttggatggagagatcagaagctggatcagtcaatatgacaacattgctcttgggcatagtcacctaaaaacagatttttcagtagtaatcagtctatgagatagcaaacgcagcagctaagaaacaccaaaattgttaaatacagaggaaaactcagcaagttacctgaatgaagttggcgaatgcatttagaacagccattgacctctctggcttgctgtaggtaacattcccaacaacagaaaccggattggaggatttcacatttccgagcgacgtattataaacagtaaacaccgtcacaaaagaaacgccatttccagcaccagacacatgagaagttgaaccatgagtcttgttcagagccttcgtgcctaaacaaatatgaaattgtaaaacacctgtcaataccattctaatggtgcgtcaagttgcatgaaaacaatgctacaatgtttgtgaagcagaacaatggctaagtgtatgatgtatctcattcaaatggttattaaaacaaaagttcctgagattcacagagacgagacattgtgttcaaattgctggacaaaattgctcagatctgtgcctatacaaaagtgcttaattgtagcaaacctaaaaatagaagaatacgcaaaatctaacctcggcaatgaaatcgatcagacaagccttgtccagctacaggaccgagcacaaggtgatccaatttcttattaggaatggttcgcgcgtcgttcctcgtagccgaatccgaagaaaaatcaacaagtgaagagagatgaggaagaagaaagagcacaggaataagtaaaagaattcgacgccatccgctacaagatctcatgctccgataatctctccgggaacccattaatatcgtattttcaaccttcaacgcaatcgccgatcaaacgaatccgcggaggaggactgactactgaccgcctgaaaaaaactaaaccgggaagaacccaaactacgtgacgtttatttgaactgtcatcgaatatcatgccgtctcgtcattcacttatctgagtgggctttataatagaaaggcccagtacataatgtatatcgattcctaagttggcgaatacataatgttgctgcgtctctgtcgtcatcgacttcctcttcctctgactttgagcagctctgtcttcttctcgaaatcgtctcctgtttcttctgctttcatg

SEQ ID NO: 26972 - DNA, 3003 bp, Unknown; identical to SEQ ID NO: 26971
  misc_feature (1)..( 3003): 2750-1469P.txt file - cDNA_ID_2717267; gDNA_ID_2214489; Annot_ID_183599

SEQ ID NO: 26973 - DNA, 3000 bp, Unknown; identical to SEQ ID NO: 11337
  misc_feature (1)..( 3000): 2750-1469P.txt file - cDNA_ID_2717289; gDNA_ID_2214490; Annot_ID_133450

SEQ ID NO: 26974 - DNA, 3000 bp, Unknown; identical to SEQ ID NO: 11337
  misc_feature (1)..( 3000): 2750-1469P.txt file - cDNA_ID_2717289; gDNA_ID_2214490; Annot_ID_183639

SEQ ID NO: 26975 - DNA, 3000 bp, Unknown; identical to SEQ ID NO: 11375
  misc_feature (1)..( 3000): 2750-1469P.txt file - cDNA_ID_2717337; gDNA_ID_2214492; Annot_ID_133498

SEQ ID NO: 26976 - DNA, 3003 bp, Unknown
  misc_feature (1)..( 3003): 2750-1469P.txt file - cDNA_ID_2717367; gDNA_ID_2214494; Annot_ID_133543
aagaaaacaaacaagtaacctgcatccagaagaataacttgcggtcatcactgttgaacttcagaatatacaccctgtctgaggattgattaaccttttcaaatagagcttcatctgggaaaacaatttgatcctataaataggtatggtcaaggagaaaacttcgtaactggaacatctggtagcaacaattaataaatccttcagtttttgttctattcatgcatggcaaaaaataaaaaaacctcctaggtggatagagctaagaaatttgaccgtcttgggtcacgaatccactggtatagcaaagacttgatactaggagaatctctagtccttttctaaaattcaaaaaaacaagtgcagaggatacatcttctactgtattctggtttcgatcaagccactggaaatgaatcagtccctcgtcaccctaaaagaaaggataacaggattaaaaaacctaggttaacatttacagagaaccagtaataaacgtgttctgacaccaacaattagattccgatatgctttaacttcaataggaaaagctgatacactccaacgttcaatggaaacgaataaattcaaattactaaatggaaactaaaagcgtcgacattactctagctatgcggacaagtccttttcgtgcatcagggacaactcttgttccctgcaaagacatcttcccagcacgaaactcaagcatgatctcctgccaaaattagtccaaacataagtgtaagaaccttcgtaattagtctaagaacaataagagaaagataaacaccacctatagttacctgcatcacgggaaacgcttcgcttgaactcataatcaccacctctttctagtgaacactattcagtaaacagagaaatcagaataaattcagcttggtgctcttagatcaaggcttaaaacaagttcttctgcaaagtttattgacaacaatcatatgtatactaaagataacgaaatccgtgaaaattgcaaaaccaaatctcgaacagagcagattgaagcgaagataacaaaacgctagggttaccaatcttcgtagaaattgaaaaaaagagagagagagagagagatttacaaccttaaggctagtgtgttgacaaggttaaagaataccttagcagaggaaagttcgcgagtaatggattttggagagaaagaaaacgcttctcgtttttttttttctttcaattgcgtcgtctcttgtgttttttctttcttcttgtataaacaagggcccctataaggctacaaacaacaattcatccgaacaactccaagcccaatccgaatttttcttcattaggcttttaatttttgggtttgctgcaaacaaaacctgtaagtcaatttcgtttacaaatctaccattcatatccgaactatacaagttaatcatatgaactctaaagtcatccgcaaaataaacttcggtcatatcgatgacgtgacatcgctaaaaaggacatgaatttcattagtttcttgtgccataaaacataacaaaaaatgacatgaaaattaaagaaaatatccattgaaatatcgatttgggggaaacattaaggtttagagagtagttcatttggaagaattcgatatgggaaatgatggtatcgtgatccacttagattacagagtggttcgattgaggtcatattattaatctatattaagagagtcaaattgatttagagggtttttcgaaataactatcttttttatataaattttaaggtgcaaatgattgcctagaattaagaagttgaaagaattgaatgagcattcatctaatattttaccatttaaaatgaataagttggaaaaataatacaaccatttcaagttggaaaaatgaactaattattaaaaataaagttataacttgttcatctcatatttcgcagaggaatgagttgaatatcgcagaggaatgagttgaatagtattcaacttttttttttcaactcaaattttctattttttttcatcgttatccaaccatttgcagccttaatatattcagttcaagtgaatgatcagatcacttaacttagaaaactcacattatttattgcaaacttaatcacttgattattccataatctaattaggctaattctctaccaaacctctctcatatcacttaacgcagccaatatctaaatagtctgctaaattctcaatcatccatctttctatacaaaactaaaaagttaaattataaagtctacaagaaaagttggaaccctagtaaacaaacatacattttacaaacagaaaaaaagcacttgagaaaaagtaatacaatgaggtccatacacgtctgatttagctgtaatgttggtacgtccaaagaaactcaccgtccaaccacatcactacttaaccactacgaaatttccatcttattattcttctttatcatttcttattaaattcaatttaacttcttattttaataaccaaataaaaaagtttcaacaagaataaaaaaaaagtaaagtgttattcatatattcgacagtgacgaaaacaagaaactccaatcaaacccaaaagcccaaaacccagaagaacaaaaaatctctcttttgaaaattctccttttgcaaatcattcaagtgaagcacaatcatcttcttcttcttctccagcttcatcaatctcttctagactttttgcgtttacctgaaaaactgttttgatcgtaagtatctgattgcttcgatgtcgctgtcgaatcagattcccgtttactctcgatgaccctttgcttcttcttccactttttttccacagttttctgataactcttctcagatgagaagttctaagttacttcttctcaagttcttcttcttcttcttcttcaatctgacttcgcttggtacagtgtctttctattattaattctattgctaaaaaaaaaattctaggttaagtttaaatttcaattttcaactcttattacgatg

SEQ ID NO: 26977 - DNA, 3000 bp, Unknown; identical to SEQ ID NO: 11406
  misc_feature (1)..( 3000): 2750-1469P.txt file - cDNA_ID_2717371; gDNA_ID_2214494; Annot_ID_133542

SEQ ID NO: 26978 - DNA, 3000 bp, Unknown; identical to SEQ ID NO: 11404
  misc_feature (1)..( 3000): 2750-1469P.txt file - cDNA_ID_2717375; gDNA_ID_2214494; Annot_ID_133539

SEQ ID NO: 26979 - DNA, 3000 bp, Unknown; identical to SEQ ID NO: 11404
  misc_feature (1)..( 3000): 2750-1469P.txt file - cDNA_ID_2717375; gDNA_ID_2214494; Annot_ID_183774

SEQ ID NO: 26980 - DNA, 3000 bp, Unknown; identical to SEQ ID NO: 11396
  misc_feature (1)..( 3000): 2750-1469P.txt file - cDNA_ID_2717386; gDNA_ID_2214494; Annot_ID_133519

SEQ ID NO: 26981 - DNA, 3003 bp, Unknown
  misc_feature (1)..( 3003): 2750-1469P.txt file - cDNA_ID_2717398; gDNA_ID_2214495; Annot_ID_133549
attttgcgctaaattctaacatgctaaaacacattcattaatagacaaactaatatgttttcttcccctaaatagcaacattatttgtcttcttaccctaaatagtaaattgacaactttatataggtaaaaagcatatgttgaagatttgcttgcaggatttctttgcaataattaaccaaaaccaaatgaaataagaactaatatttctttggtgataatggaactcatagggtctacaacattttttgtttcttcacgggtgatacaacacaagctatataggcaaattggtaagtaggttcaaaatcctaaaataaaattttaaaaaacttttaagaggaaaaatggaggggaaagaagaagaaggagacatatagttttctgaaacgaaagaaagataataacccatcactgcagcaaaaggtatctctaaaataattgaagacaattgaaacctaatgtcaacgaactagccaatgagctcaaactccacaaatcaccacctcgacattctatcttgggaccatttctttctctctttactttacctctctctatataacttgaaattgagatatctaacaatttacaatggtgagagacaagaaaaataagatacatgtatcacatacatagagtaatgattaaatacgttttgtggagtttaaccttatttctgcggcaatggtggtagtttaatatttcatattgtgctcatcatgatgctatctaaacagtcttaatgcccaactatctacttattgcaatcttcacggcgatttacctgtgaaatttagaaaaaggaaaggaaaaataaatataaagaaacttttaagtggaaagtgacactacaatgagacctgcaaaaactcgacaagtttgaaataaacaactaaaaagaatccacacacagaacaataaacctttacaaagaaaaaaccaacaactttgtgccactaaatctatagagtgtcaataatgttgctgtacggaaagggattcacttggggtctacatgaaattcatggtgttctttgatgatgcattgattctctagaacaagaaataggagatacatcattcatattaaccgatatactctgaatttttaatacgaaaactagactaaaatgctctgttatcaatgtgtctaatatagaagaaagtatatcttacttacatgagaagaaaaatgtttctcctgtgtatttgtccactagagcgaccaaggtattgtgagctacgattacaataacaaaggtgaattagccaatgcccccaataattgggacaatgtaatcatgaaaatataaaaaaaacaataaagcaaacagaaaatagaatgtaacaatgaacaattaaaggttgcttctttagtcatgaaaaaggagtaataatgtttaggccactggttttcattgcacacaaaagtcacataagacagatacacgacgaagggtagttattcactgcaaatctattgacataattggttactgtaaactttttgctctcatagactcctttgagtcattatatcctaagactctacttgttggatggtagccacttaatgttactaaaaaagaaagtaaaagtagaagaaagaatgaaacatatcagtctacaatttcaacactctcctattccaataagcaatatcaataccttttcatttatatttattcgtaatgcctcctttgttcaaactgtcactccacattaccatcttcttcagcctttgcttccatttttcccgactatgtaggcgaggcccctacatctttcaatcacacaaaaaacagaacatgacgttattggaagaaacaacacatacccacaagttaacactatacatacatcatatcttctatgtttatttattgcaagtagcacaaagtggtatctatttttctgcacatctttttatgaattttccttttttatgataattctgagcaaagaacacatatcacctccaactaagatctaatttactggagaagaaaaatcatgataaggccttacttggtctatcaggaccaccaataagaacatcaaacttttatatgccctgttcaatatgtcatgctgaaagttgagatttctgtagtactgagataacgcaaagcggttccacatgcagctgtggtacttttttcctttcttaagcaatttacggcaagagaggatacacatgaacgtcaccagggagacctaaaatatgtatacacaacacgattattttctctcttaagatcatgaaaaaaggaatgctaggttacaacatgtgtttaggacagctctgtatccatcctgcaaagaagagtagccgatgctgatgtttggtcctaaggggtaacttacttccaagctttatagtcaaatttatatatactgcaagaactgacaggatcaagtgatgcaaaatggtcccaataagcatgatccaatagagtttaccagtgtagagggtggtgggcaagattgtcttctcttaaactgagctcaagtaccatgagacccaagtaggggccctagtgtacatgctctgacaataaacttagccaaaagacaaaataataacaagtaataactatgcagtaaaataaagtttttacctattatgcagtaaatcttggcagggagagaatgtatgtacccgcgatgtgaattactaacctaccataaaaaagatgagaaatagaagttagaaatacttttctagtaactttcacactatataatatgcaagaaattaattaaaaacgtcacaaagatatcttaatttgcagcaagagacaaaaagtaatggcaatccagctatatagtgaacacaagtatatgactgtaccgcctaaaacctttcctttaaattcccctttctacctctttttttttttccctcagagtagtactctaaacctcaagtttacctctacttctcttataccattccgcctcttattctttgcaatttctctcaacaaagtagaaatg

SEQ ID NO: 26982 - DNA, 2655 bp, Unknown
  misc_feature (1)..( 2655): 2750-1469P.txt file - cDNA_ID_2717402; gDNA_ID_2214495; Annot_ID_133547
aagcttctttgctatatcctcaaagtttagcaatccatgaaataaacaaacgtgttcacaacgtaattcagatataagccgtcactatttttccccgttcacatcagcctcacttgtagttttgtctcaatcgaaatcattgtttttatatttactacaaaaaagaatctaataattgagatcgaatatagaagaaaaatgaaatactcgttgttacatttgaaattcgtaacgtatagtgtctctgtctgtatggatgcgtgacatgtaacgttgttacaatatatcttggttatctatattttatttcttactagataaagcccgcctaaataagcgggtataagatgtaaatgtaatttttatcgataatatttaaattttgaatagtaaaataataatcgatacattgttcttgatatataattttgaatagtaaaatagtagtcttatgcattttattttgttatacccattcaatcttattgatgatatttgaagtctaaatagtaacctacacactttttctttattgtaatttagtatttagaagaaaaaataaaattttatcttatacattcaattttgtaatacaatttaactatctatttcataaaaaactcgattttaattttacacacttcatcttacttgataatgatttcatgtcaaaataatatatatatataagatcaaatctatatcttagttaatattaaaaattattaacaattaacaaaacataattcataataataaaacatttgttaataccatatatattaaaaatttgaccaataacatatatatatattttttttgttaattttccttttggttaagaaaaataaaatgtaatattttttagatatagaaatatgaattagtatatgttaataatgatttctttttttagttttctatttctttaagaaaaaaaaagttaattattttcttacacatggcaacatctgatcgatagacttgacacgtggcataatcttatgagttagtaactttgaaaaccatactttatataataagatttttttttgttaatttttcttttggttaagaaaaataaaatgtaatattttttagatatagaaatatgaattagtatatgttaataatgatttattttttagttttctatttctttaagaagaaaaaagttaattaatttattttttagtatttctatttctttaagaagaaaatggttaattattttcttacacatggcaacatctgatcgatagacttgacacgtggcataatcttatgagttaataactttgaaaaccatattttatataataagatgttgatttattcttactttttttgctatatctttccttatatttcatacttaatattttttttttgtttctaagatacatacattaactctcatatttattgtcttaactaaattttacttttatttgtacacgtggcttccccccacaatatttttgacccaaatccaaaaaaaaaaaaacactatcaataatatttcctcttaccatttatgtcttacacacaagtgtcaaaatatagtagaagacatagaaaatgtttagattatgattaaatatcacaaaacttttgtgacataaatcatgatccatatgcatccaagttctaataataggtcgattcgatcttgtaaaaaaaaaaagtaattaatagtaaaagattttgtattgaattttgagatatttttctctcactataaaaagatgaattgtgtagctagagatcataacaaactctgaggagattcaagctaaggtacatttacaaaaacttattttaaattacaatgggttgttgcattttcgaaactgatcctacagaccaataagtactattcagttaatttgaaaacacttacaaaaaaaactaagatataatttagcaactttaacattttttattatgtttgtagggacattaatgggaaactggtgtagttgtgtaacaaaagatgaaaatagtgataattctagtagctctcaaacttctacggataaagaaagtagtgtgcaagtttcttctgtgagcactacgtcttcttcagagatttcatctgaatgttcttcttcaaaatgatcatctcaaagctcccaatgatggaagcgtaactagtgagcaaatgtcgcatggatcatcttcttcatcttatcaataaaaaaatcttcaaaataaataattttctatgtcaatttttatattaaaagaaactttgttaaaaattatgactattaattaataactatattattacataatcttttaaatataagttttagttttaatttttaatagttgctttatgtcatgctgatgtgttgctacaacaaaattcttagcaaaatttatgcatttttttcttaaaaaaagagagttctataagtataatccaagatatattcttgtacttaatacgaataattaaagttatgattaatccataaagttctatttcgatgacacggtgtcgtatttgaagcgacgtggcaaatccttattggtctatatgacgcagaacgggaattgctctgaagaatcctttctcaggcgaacggagtttggagtcaaaatccagagcgcggggaaacgaaacgagccaacaaatccgccatg

SEQ ID NO: 26983 - DNA, 3000 bp, Unknown; identical to SEQ ID NO: 11445
  misc_feature (1)..( 3000): 2750-1469P.txt file - cDNA_ID_2717410; gDNA_ID_2214496; Annot_ID_133578

SEQ ID NO: 26984 - DNA, 3000 bp, Unknown; identical to SEQ ID NO: 11454
  misc_feature (1)..( 3000): 2750-1469P.txt file - cDNA_ID_2717413; gDNA_ID_2214496; Annot_ID_133577

SEQ ID NO: 26985 - DNA, 3003 bp, Unknown
  misc_feature (1)..( 3003): 2750-1469P.txt file - cDNA_ID_2717417; gDNA_ID_2214496; Annot_ID_133574
aaaagcacaatacaattacaatcccttaaacattatacataaggcctgatacaagtagcaacaattgttcgaagaagcaccaaccaaaatagcttctgaaacggtatccaaatgcttggtcaagttcgacactgcattttccatgttccgcttcgttacacacatgatatcagagaatgaaattccctaccacagaaacaaacatcagcttcagagaaaatttatcctacaaaagactttagtgatataactgttattggaactctataagataccttgaaccacatatagccatagcctaatgctcccaatgtcgctgccgggacaataaacggtgtaaaatcagctggaaaatgtagaagtgagaaagttagagattaacaatcgttcatcaaaactaccaaatcaaaaactagccgagagacaaacctccctgagctccattcataacagttatctgccgcgacgaagccaattgccgaacctccattgctaatcgttgcatctacaaaatacccgcacatttatatatgattgttccaaaaatttgatcttttttaacaaacagatgcacaaaatatacctgagtagtcatggcatcagaatcatcatctacatgatctccagatttctcaaatcgcttaaccaaagccttcgaatttgaagtcaaaagaacaaactttttactatgtcccttctaatccaaaattgagaagaacaaagaaacttttactaatcgtacctgaagctcacccaaaatatctgccatcttcccattcttaaccagaatcgtactagtataaccttcagattcaaagacaacaaattagccaaaagggtcttttaaatcttcaaaattggggaaaatcacaagctcgagaaaccctagatacctgctccagctagaatcaaaatcttcgataacccaataccagattgcatagccatggtcgcagactcacaggtgcaacaaaaggaagttgtcttcttcgtcgagttcgctcgccggcgtaagaaactgtcaggtcaatgtcggtttctgttgaacggtgtcgtttcctactttataactcagttataaactctttgaccttgcactaaacgtaatgaataaatctgtaccgtgcattaaagtatcttagtcaactttctagaaatattgggtcaattttgtaaggtttttaatattgtcgggtaaaaacgaattaacgaaaactcatctcccataaaaacaatttatttgaatctgggagtatttttttttttgaatcaatcaaattttctataaaaattaaaatatatataatgctaggaaccaacatcaaaagtttaaaggatcaatgctaatatataagatacattgactaatctactcattgtcaacactaatatataagatacattaaaatgttgttgatttttaactttttaatgattttatcagattttaggtataaacaaatgaatcatatttactattttaattagaatttagatgttgatataagactacactagatttagattcaatttggttgattagtttttctttcaaatatagtagttgatttggtcacgattaaatgaaattatggagttgttcaaaaaaaaaatatgcagaataattttcatttgttgatgcatatcatcgtagattatataaatacatctattgtttgaatgtttaattgatagatcaaatagtgaaatatgtatagaaaatgattacaaagcaataacattatagccaaaagcaataaatttatatgctactcgatgacatgttagagagaagaggcaaattaatgacacttcgactcttgaagaacgaattattcagtaattatctgttgtttacagaagtttttttcacgtcgaatacatttttttggaagttacagttttataaaagaactttaatcttagagagactttgtttttgtttttaaaaaaaatacataattaagattttaatatagtttctgaatgttatctaatactttaacgacacaagaaatttgttaagtcatacatttgtatataatcagatttaactattttcgagattagcaaacttttgacttagatgttgaaaaacaacaatccatccattagagtatctcacgaaactgaatagttatcgtgtaagcctaaatctagttagaggatgtaaaattgttactttttctgcagttgaggtacaaaagttcaatcagtttagttttgatgtgtctgtagatttcaatatacactttttttttaattctttttaatttcagatccttgggaatgagtcatctataacggtttaattgcatggttcccctcattaaaattgcttgggagaggacttacttgctgagtggatgcatcaaactctaacgtcaatagttttttttttttttttttcgcaaacaccattttaagtcaatagttgtaactaaatacaacaaatacatttttgttgaattagattatatgttttgcaagattttttgaaactctggagtagctaaaaaaaaaatagtatgcaatatatttttttctattgatgcgtatcatcgtacattatatatttatatattgtttgattgtttaattgatttatcaaatagtgaaaatatgtacagaaaatgacttaaaacattataagttagaatcaagagcaataaactcatatgctactggataatatgttcaagagaagagacaaattaatgatgcacaaactcttgaatatgaaattactaacgtcgattcttttctcgttaatgtttattttcatgtttcgaaaatgtttattttcatctcttgttaatgtcttgcaaaagttggagggctttcttataaacgttggttatattggggcacatttgtaagatgttaaatatgattgggtaaaaaacgaattaacagaaagtattctctcctaaacccttttcgtcatcgtaatcccgcggtgaagaagacgaagaagcattgagagtgaaaagaaaaacaatg

SEQ ID NO: 26986 - DNA, 3000 bp, Unknown
  misc_feature (1)..( 3000): 2750-1469P.txt file - cDNA_ID_2717420; gDNA_ID_2214496; Annot_ID_133573
attaagcaaaagactgtttctttcaccaaagcaaatcatgatcattatcacaatccatatactaccaagttaaagatccaaacctacatcttttctacatcaaaacataatcttaccacaatcataatatctttcaccaaaccaattgattttcatcatcacaatctataaataccaagttcatgataaaaagtagacctgcaacatttcaaatcaaacatatctaactaaccacaaacactatagaaagtcaaaaggctgctgctttcaccagatcaagtcatgaattcttctatcacaatctatgaagtagtaagtgaaagataaaaaccaaacctgcttcctactccaatcatattgacgaacaccagctgcaggagcaaattggagcaacaaaaaaccttcctttgtcagcttgaacgcaccagactggatcagaacatgaagaatggagatcaatctaagatcaaacaaacaatacaatagagtttttgatcttcgacaaagacacatacttccaaagccacaaactctggtgctcgtggttctatcgtaagagcagctttccctttgtaaatcgaatgacccacgtaaaatctaggagaagatacttcagctataaaaccaaaacaaacaaacaaacaaaatttcaaactttctgaatttcaaagcttcccatttttcaaagctcaaacaatgagtgaaaaccctaccgttttgcgaagaagacgagtcaccaaacctctgtttctcaaagtaatcactttgtcgagacttcaccgttaatttcaacctcgccgtcggttttaaaggaataatttttccggcgaatccaccggaggtgagaattgagtgagaagagagaaaacgagcatctgaaaacttatggtttatgaaggttttggagaaaaccgccattggaggagaagataacagctgcgacattgtttttcttttcactctcaatgcttcttcgtcttcttcaccgcgggattacgatgacgaaaagggtttaggagagaatactttctgttaattcgttttttacccaatcatatttaacatcttacaaatgtgccccaatataaccaacgtttataagaaagccctccaacttttgcaagacattaacaagagatgaaaataaacattttcgaaacatgaaaataaacattaacgagaaaagaatcgacgttagtaatttcatattcaagagtttgtgcatcattaatttgtctcttctcttgaacatattatccagtagcatatgagtttattgctcttgattctaacttataatgttttaagtcattttctgtacatattttcactatttgataaatcaattaaacaatcaaacaatatataaatatataatgtacgatgatacgcatcaatagaaaaaaatatattgcatactattttttttttagctactccagagtttcaaaaaatcttgcaaaacatataatctaattcaacaaaaatgtatttgttgtatttagttacaactattgacttaaaatggtgtttgcgaaaaaaaaaaaaaaaaaactattgacgttagagtttgatgcatccactcagcaagtaagtcctctcccaagcaattttaatgaggggaaccatgcaattaaaccgttatagatgactcattcccaaggatctgaaattaaaaagaattaaaaaaaaagtgtatattgaaatctacagacacatcaaaactaaactgattgaacttttgtacctcaactgcagaaaaagtaacaattttacatcctctaactagatttaggcttacacgataactattcagtttcgtgagatactctaatggatggattgttgtttttcaacatctaagtcaaaagtttgctaatctcgaaaatagttaaatctgattatatacaaatgtatgacttaacaaatttcttgtgtcgttaaagtattagataacattcagaaactatattaaaatcttaattatgtattttttttaaaaacaaaaacaaagtctctctaagattaaagttcttttataaaactgtaacttccaaaaaaatgtattcgacgtgaaaaaaacttctgtaaacaacagataattactgaataattcgttcttcaagagtcgaagtgtcattaatttgcctcttctctctaacatgtcatcgagtagcatataaatttattgcttttggctataatgttattgctttgtaatcattttctatacatatttcactatttgatctatcaattaaacattcaaacaatagatgtatttatataatctacgatgatatgcatcaacaaatgaaaattattctgcatattttttttttgaacaactccataatttcatttaatcgtgaccaaatcaactactatatttgaaagaaaaactaatcaaccaaattgaatctaaatctagtgtagtcttatatcaacatctaaattctaattaaaatagtaaatatgattcatttgtttatacctaaaatctgataaaatcattaaaaagttaaaaatcaacaacattttaatgtatcttatatattagtgttgacaatgagtagattagtcaatgtatcttatatattagcattgatcctttaaacttttgatgttggttcctagcattatatatattttaatttttatagaaaatttgattgattcaaaaaaaaaaatactcccagattcaaataaattgtttttatgggagatgagttttcgttaattcgtttttacccgacaatattaaaaaccttacaaaattgacccaatatttctagaaagttgactaagatactttaatgcacggtacagatttattcattacgtttagtgcaaggtcaaagagtttataactgagttataaagtaggaaacgacaccgttcaacagaaaccgacattgacctgacagtttcttacgccggcgagcgaactcgacgaagaagacaacttccttttgttgcacctgtgagtctgcgaccatg

SEQ ID NO: 26987 - DNA, 3000 bp, Unknown; identical to SEQ ID NO: 11451
  misc_feature (1)..( 3000): 2750-1469P.txt file - cDNA_ID_2717424; gDNA_ID_2214496; Annot_ID_133571

SEQ ID NO: 26988 - DNA, 1020 bp, Unknown; identical to SEQ ID NO: 11457
  misc_feature (1)..( 1020): 2750-1469P.txt file - cDNA_ID_2717438; gDNA_ID_2214497; Annot_ID_133584

SEQ ID NO: 26989 - DNA, 3003 bp, Unknown
  misc_feature (1)..( 3003): 2750-1469P.txt file - cDNA_ID_2717445; gDNA_ID_2214499; Annot_ID_133630
tcaaattcgttctaaaaaaaactgacataataccatccctttaaaaacacagaattttttttatcatctctgaaacaaatcatttacagtagtaaatgtcaacacaacattaattctgtttgttgttggcatttacaattgcaaaatcattttctcatttattattcgtatttattttgtcaagaacccttgtctctaaaatattcatagaaaaagaaaagagccattaattaatggcttgaagaaagattggtgtataagcgtctacgtgacctttaattaatttacttcccccaaaaaagtcaacattcaacatgtgaataaaaatcaatattggtttctaagtaagtaagtaccatattattaaattatttattttggtaaatacgcactcaatttttctctcaacggtgtatataaacaaaaggagtctcctttggaaaaaacttgcctatcattttgccaacgaacgttctttcttcttaatcacagctcagcctgacgcaaccgctcaggctgatctcttccaatttacagccatttcccagctcagatctctgatccggtgagatctctctcaaggtaatgcccctgcaattttgcttacttctctggttgtgatatgcatgttcttcgaattttcatcgtttgtgatttgaattctcattttgtatttgctgttgttggtttttaattcgattttccggaacagattatgggatttgtattcgaatcttcgatttgatgacataatgtcccagccttttatgtttaatcttgaaatgatggacttttatccgatctgggtttaaagctggaattttgattgtgggtactattaggtttcattgatttattgcttggtccaacatttttagcagctggtattgagctcttgttgtctgaattttggaaagaactatttttgttgtatcgttttgatttatttggatctgaattcattcacctttttctctgattattgttttgtgtcggttgcatccactttgattagatctgaatgaatcatttttttatgtgctcaagttattgtatggattgttctgtttctagcatgttttggttagacattgttaagatctgacgtttgcattttcaggaaaaggagttagagcatcatcaagatgaaggcactcattcttgttggaggcttcggcactcgcttgagaccattgactctcagtttcccaaagccccttgttgattttgctaataaacccatgatccttcatcaggtaatctatcttaaatttgccgctttagtctgccagttcttacctatgcctatgtttgaaccgaggcatgttttcttgtagatagaggctcttaaggcagttggagttgatgaagtggttttggccatcaattatcagccagaggtaagatactaatctctcttaacttttttttttgcagctattttctgtttacatatgtttgtatttaccatttgctctgtttcgacaggtgatgctgaacttcttgaaggactttgagaccaagctggaaatcaaaatcacttgctcacaagagaccgagccactaggtaccgctggtcctctggctctagcgagagacaaattgcttgatggatctggagagcccttctttgttcttaacagtgatgtgattagtgagtaccctcttaaagaaatgcttgagtttcacaaatctcacggtggggaagcctccataatggtaacaaaggtgagattatcgaaacataatactctccagttacgagataagtacgttattcatctaatgtggacttgcatgtattggttatataggtggatgaaccgtcgaaatatggagtggttgttatggaagaaagcactggaagagtggagaagtttgtggaaaagccaaaactgtatgtaggtaacaagatcaacgctgggatttatcttctgaacccatctgttcttgataagattgagctaagaccgacttcaatcgaaaaagagactttccctaagattgcagcagcgcaagggctctatgctatggtgctaccagggttttggatggacattgggcaaccccgtgactacataacgggtttgagactctacttagactcccttaggaagaaatctcctgccaaattaaccagtgggccacacatagttgggaatgttcttgttgacgaaaccgctacaattggggaaggatgtttgattggaccagacgttgccattggtccaggctgcattgttgagtcaggagtcagactctcccgatgcacggtcatgcgtggagtccgcatcaagaagcatgcgtgtatctcgagcagtatcatcgggtggcactcaacggttggtcaatgggccaggatcgagaacatgacgatcctcggtgaggatgttcatgtgagcgatgagatctatagcaatggaggagttgttttgccacacaaggagatcaaatcaaacatcttgaagccagagatagtgatgtgaaaatgagatattatatgtgcaacttttttttttttttttgtgtcctttcttcaactttgaaatcgctttcgtaattcttaatggcttttgaataagcatcaatcaaaacgctgtatatcttgttagggtcgtttgctgttttgtctctttttttgttttgtaatttataaaaaaatttattctcattttatgtgagatacttttgaatattcattaattataaagctttttttttgtgaagtaacattcaaaattcaatagtagtcattgtaaaaaaacttgaaaatagcatgtataatgcagataaaattttttaacatgaccattgataatccaaaaaggttttaaaaattagaagcaacaaatatccattggggtttctccaaatccaaggcatagaggaatattcgttagcgtggaaagactaaaatacccttaacttccctccacataatgtatacagtgacccgatctgaattcggagctaaaaacggtttcaatcgaattaaagtcaatg

SEQ ID NO: 26990 - DNA, 3003 bp, Unknown; identical to SEQ ID NO: 26989
  misc_feature (1)..( 3003): 2750-1469P.txt file - cDNA_ID_2717445; gDNA_ID_2214499; Annot_ID_183924

SEQ ID NO: 26991 - DNA, 3003 bp, Unknown
  misc_feature (1)..( 3003): 2750-1469P.txt file - cDNA_ID_2717448; gDNA_ID_2214499; Annot_ID_133628
ttcttctgttgttatgcttccacatgcaggtagcaagatatggccttgtatcacaaacaaagaaaaacagaaagattagcagctgtaccaaacattatcgggatcatctgattcatcacaaagaggaggtttagtcccagcctcacgactcaaatagcagtcgttgttgaaaggcttctgccagattgcaacgtatccttccttctttaccaatttccagcagaggctaatagtaagattcagcatttctggaaaacaaaatgtgagattaaaagagtacacatattggctgaatcaaagtagtaataaagaaaaaaaaaaactctccttaaacccacagagacaaactgtagtaaataataaagccacgtacaatgattactaactccaaaaagtttattaagaccaaagaattttatcaaccctgaattacaggcctactcaaagcagattaaaaggatgttacctgtccattgttcttccaaagcgggttcatgcttataaacaggctgtgcagcccaagcaaaatatcctccagcgcgcagcattctattgatctcaaggagcaaaattccatctttatcacaaagaatgaaacagcagagtgagaattttctgtacaagtaataaaagctagagcatagttcacacagggagttaaaaattacagtaggtgcaatcttaatctttttctgatgtattaggtgaagaatcaagcacaccatagaaccttaccatcacgagtccagttgattctacatcttgaacaatgaataagatcaaaagcttggcttggatataacaaacgccttgtcgcaaatgctgccgccatagcaggcacaccacgctcaagagcaaattgaatttggttctcatggacatcttttggtgcaacagacattgtcatgacatcacgagacaatagataagcaccaaaactcgccacaccacaaccaacatccatagcaaccctaatatgcttgccaaacgtaatatcagaaaccatctgcagacacaaactccagagctcaacatcagatgaaaagatacataaacagttgacgcgaaaaacaagaactactacttggaaaaatgagccaccttagacatctggtccaagtactgatcagccccatgaataaactgtgtaccacctccaggaaacttgaacttgttcttgtctcgtgaaatccagttctgacctcctttgtcttcaacaagccgagtatgaggaacattgctaaaccatacctatccataagtaaattccaaatactacttaaactaaatcccaagacatgttatccaaccaaaatgcaaaactcatgcaaacaaaggagtacctcgtcacggcttttaggccatggaatcggctgacggtaacctttaggaggtggaactaagcaattcaagcctttacctttctcaggacaatgacgctcgaatctctcacctcgctctgtcgatttaagcttctttatcacatcagtattatccaaacaaggtatatactctctcatactctcaggacacatcccaaatttcttaattctaaccctagccttagaatcaccgtcgcttttcgcctcaacgatctcagtctgattcccccaatcttccactgtatcactctcaacctcacccacctcaaaatcgtcagacatcacaccgttcgcatcaactatcccaaagctcttaaccggaccaggcggaggaggaggtgaaggagaaggaggtggaggaggaggaggattagcttccaccttaaccttctccgtgtccgccaccaccgacggaggttgttgtcgtattgtggcggggatttcaatctgggtatggttagtaggaattatcgctgataaattaaagactctgttactattcggtgaaacggagacctccgggatcgagctaccggaagtggaagaggagaagaagacgagctgttggtagccatcgtcggaccaatgcttgcctaagtagaagaaagcgacggtgacgaaaactaaggcggagatcttgatcagagttggggatttgaacagatcgccattagtgagaggcttcattagcttgcgtgtgaaggatcagcgatctctggatctgcgtagtgttgttgtgtgagagaggatgattagtgtaattttacagttgttgcttttggatttttctggcgttcggtaaaattatcactacagaagaatttgcagaatttagttaaaagatcagaaagttgcagagagttttatataaaaagggtcttttcaatagcatgtcttgttaaaatctaattcagcaaaaaaaaaaaaaaaaaaaaaaatagtacatgatagtttgttaaacgttatcggcaaatgatgaaaagattttactaaaaactggttttttttaatcatgtgattgaatataatcatatttataaaatatttatgttaaatgttcttatgataaagtgcgatgagattctaatagtaataaatatttgttttactattaaaattatatcacacagtgcggttcagtcttcatgcaaatgaatataatggttgaagcgaacaaatccgtatacggattaaaacgtttttcatttacctaaaaaatcattgtaaactaacaatggattgtttttacatacaaatataattgatttgtagcggtttgttgtccatcttgtagatgaaacggactaatcgcaaacggatttgtccacctcgactgcgataaccattcaaacaagattgaaaagaaagagagacaaaggtttaaatgaaattaagaatgtacaataatgttggcttatggtcgttggacactactttcgagcccattacatttaatatcctttaaaataaaaaataaagaaggcgaaaacagtttcccccaaattctcataattttcacaaacaacctctcgtcttctaggttaatccaatttcgtcgattcatgaagttcacaattctcccatcggaaaattcttcgtaatcgacgacgaagagatcatg

SEQ ID NO: 26992 - DNA, 3003 bp, Unknown; identical to SEQ ID NO: 26991
  misc_feature (1)..( 3003): 2750-1469P.txt file - cDNA_ID_2717448; gDNA_ID_2214499; Annot_ID_183922

SEQ ID NO: 26993 - DNA, 3000 bp, Unknown; identical to SEQ ID NO: 11499
  misc_feature (1)..( 3000): 2750-1469P.txt file - cDNA_ID_2717452; gDNA_ID_2214499; Annot_ID_133624

SEQ ID NO: 26994 - DNA, 3000 bp, Unknown
  misc_feature (1)..( 3000): 2750-1469P.txt file - cDNA_ID_2717462; gDNA_ID_2214500; Annot_ID_133653
ctttaaataatataatacaatttttcttttgtcaaaataaattagagtgaaagtgtaagaaaaacataggtgagtggtaaatatttcctattgagttatagagctctttatgtattttctgtttaatctgctttttcattcatactataatgaggaatcaaattgatgtgacgataacattgcgttgaggtttcatcatcaccgcgagaagtttcggtttgtatactttttgtaataatactgtgtggttattaattctcggcgaccagtcatatccttagcttcatgcccaagtttctatttactactttgtctttgtttatttttccctttttcaacaaaattcgatatttttctaattttgagcaccttttttaaatacaaaactaggtgacttctctagaatctctcgtttcctaaattccttcacgtgttattccttgtatggttatcaaaataacaaaagtgttggaatgatttcttcattcacgaaatgacaaattatagtgtgacacgtgcgtggaactagccagctaggaacaacattctagagatgtgaaacttgttaggccaattttgaatttttttaaaagcatgaacatgacaaaaaaaagcatgtgccaaactaattcattttcaacttaaggtttattatgggttggcagcccaaacccattctacacagtttgggcccaatttgtcttcgagtgatgtacaatttggcaattggactcacataagaacaaattttgtgtaacccctacaatagatgaaaactgcaactctcttctaaagtaaaggactaaagtcaacctagtcccttaaatgaggtttggaaaattctttgtctgcctcgttcacttttattttgcctcgttttatgtatctgttgaaggaacaccacttggttgattatggtacgaaaaacatgttatttggactttcaccaaatttatgtcgatataaaaagatcagtacaaatttgttattgattttatttttagaggctacatttcctatggtttgtgaccagactatagctagctacaatttttttattgtatttttattgcgaaaaacttagttgcatatattattcactaaaacagagattttttgtatagtaaacagtgaaggtaaaattgttagcaaacaaaaattttgtagagtcaagaaaagaatttttatatatatatatatatatattttttagaaacaacatatttttaataataaaaataggaagcttcaaatacagcattgaaaagagtttaacgaagaatttttgttttcgattgtatttaaatttatataatatatacaaacaaaaaaaaaaaaaaaaaaaaaattgtcacgtgtgcgtttggtagctgtaaatgaatgcatcttacacagtagcccacatgtcgattttggtttttcttcattttttcttcaccacatagctgttgtcttcaaaacaatcaacgagttttttagatttgttgattttgttgttttggattattgttgattttgccattttagatttttcactttatctataaaaaaaaaaaaaactattttctgccacttaaaagctaaaattttgagaaactttttaaataaaaatatgtatttgagaattttgtttcattatgtttccattttttttttataaaatacataataacaaatattataccctaaaaaaatagaaccaagtaaacctaaatgtgtaaattgtaactttagatataattttttcggcaaatctatgaatgccactaaaaatccttatctggtaattgattcatttatttatttatttatcacactatatcacatcatttacgttcacaatattcaacatattaggcggacaatttcttttgtcaacatcacggatctagtatttccttttgacatatctcgatctagaagatgaaagaaatagatatataggatgaaatgaatttaataccatctaaaagaacgttcctattatatatgctaatgtatagcatcaaaataccatttgtacaaagaaaaacaatagataatcgaatttaacagagttagattgataaatggtatttctttagttgtcacgttttgaaagcgtgattctattctcatgtttaaacatttgtcttaaacgttttgttatatatcatagacatgttagagatataactgaaaaaaaatcatttaaattagtttttgagtattttataattattcttttgggaatttcagtcatccaaaatcattcaacaatgttgcgccaaacagaagatggttcaaccactataatcaaaccatttttcaaatgatttcgttttttttgtttattttttggcttttgtggattacaaaccaaaacaataatttaaattatgatgatctctactttagtctatataaatacaatgaccatgaaaaaaatacactatgggtttggctgttttcgttccaaatgttggcatgacctccaccgataatctgttgttgattaggtatttttaagtctgtcaatcgtgaatcgacatctgattgtcatcaaactcttattctataagatgcaaaagtagtaaagcataatcatttattttacataaacacattgtttattacttttgtacatgttgcaaaccgtcgcacggcgccgaaattcgttccctatctccttcacttcaaaagtcactgaagacatcaaaaagcaatattgtcgacatttatccacaactcttttaaaaacgtgtcttattaaatttatcatccaactagcttagcatgcaaggttttattatgtcgagtgtcgacctcaatattcaatagaaaaaaaaggctggaataaaagaatatcatcgtttcattttggttttacaattttccctatttatatccccactcgtccttgtttcttccaccatctacaactttcattcttccactacatttctctccttgagtatcttcttatcctattttccaaattccaaaacaattcacaaaatg

SEQ ID NO: 26995 - DNA, 3000 bp, Unknown; identical to SEQ ID NO: 26994
  misc_feature (1)..( 3000): 2750-1469P.txt file - cDNA_ID_2717462; gDNA_ID_2214500; Annot_ID_183964

SEQ ID NO: 26996 - DNA, 3000 bp, Unknown; identical to SEQ ID NO: 11519
  misc_feature (1)..( 3000): 2750-1469P.txt file - cDNA_ID_2717466; gDNA_ID_2214500; Annot_ID_133646

SEQ ID NO: 26997 - DNA, 3000 bp, Unknown; identical to SEQ ID NO: 11519
  misc_feature (1)..( 3000): 2750-1469P.txt file - cDNA_ID_2717466; gDNA_ID_2214500; Annot_ID_183956

SEQ ID NO: 26998 - DNA, 3003 bp, Unknown
  misc_feature (1)..( 3003): 2750-1469P.txt file - cDNA_ID_2717474; gDNA_ID_2214501; Annot_ID_133666
tgtctttagtctaaagaatgtgcatatgatatgggagccagtcttacggcccaaaacttacaagcaaagcatgtgcgcagttttggagtctgtatttcgcagaatagctagagatattcttcttctagacgacatggctgctgacgaaactttcgaggtagctgtttctccttgctagtcgcttctgcaatgttatattttaactgcgtaatgaaaatgtttgcttatatattctcagctacaaaaactgatttatctcatgttgaagaatctatcttctgtactcgattccgtgagatctgcagatgagacttctcgtcctcttgatgatatcataccatctttgcgcaaaacccgtaaactagcaggcatgtcttttctttcttttttcttttaaatatccctcagtttattgctaacttgacattggcgcagcgaagttttcttaccatggcttttcttattgtttatcattttccagaactattggatatgcctctcatgtctataacttcagcttgggaaagcggggagttatttagatgcaatttcacaagaacagaggtacaatctttttaaatcgtttgacctcgtgtcctactacctgatatatggattaaggctatttcttatggtgattattggatctttgattattggttatggtgattctgaaagcttttggaatgtacttggttacaggtacaagatttcatcaaagctatatttacagattcgccgctgagaaaagaatgcttatggaggatagacgaggttaaccagtagattggaaatgataaaacttaaaaaaaaaactcaagacttgtgagaagaagcaagtgaaagcctattttggcaaaagagccatgaggtattttaatgtcagcagcttgtaacatcgacgacgcactcttgtgtaagaatatatatgtaaagagagttttagctgatgagtttaaaactttaggtttaaaagcgtgttccagattttgttgtacatttgggctttagattcaacaagtaaaacgctctgggtaacaacaattttccggtacaaattctccaaatattgcattttccagttagctaaaaacttgaaaacccttaactaagaaactaatataaaaaaaataaaaataaaaaagaagaaactgataggatattgaaaaccgtaacacatgaaaacactaaatatttctatgaaattattgatacaatgattttcaatgaaattaaacttttgatatacttattcaaatataatgtatgatgtgtttagatgctaatattatattaaaaactatttcataaactaatattaagttatgaacactaggaaaatattttggtctcataaaccaacaaaattacattaagaaatagagttaagagacattggtatttttccttttttttttttgtcgacattggtatttttccttatgttggccacatgtttaaaatgttaacaaaatcacataacggtcataattaagggcccgaaaaggaaaaatttcattagaagatcttattagatttagtgatctatcaagaacttgagatgacgtcatatatttctatttaataacaccacacatctatctatctctaccttctctcttactttcaagtttccattctcacgctcattgtctttcctctagctctctttctttctttcttcttccccatctttaggtttcttgcgtacaacgttacaaattctttttacaatttcccatgtcttccagagaatcgaagagaatggatgaatctgatgatcctagggtttcagagtcgagtgaattctcaaacttcgagatgttgatacaagtcgctgtcatggtttacgatcatgagtacggtactcatgacgaacacaagtcaaagaccattgacgaagatacagagacagaagcaagaatctttggagatacaatacctagaaagaacagaactcaccgatcatcttcttcttctaacaagacgataacaccatggacgcgtgtgatcgaacaacagagatcatctgaactacaaaaccctaacccggaatctgaaccttcttcttcctcttgcgttacccacttcaagaaacgtcgccacatggacaaagaagagagtactcgcaagagactcaaaatcgatagtcctttagaggtggaaccaattcaaacatcaccaccggaatggcttttgaaagtaatgaagagagaagagaacagctacaatccaaaattgatctcaacgagaaaactctataagactgatctcgctagtcttcaagcacgtctctcagtaccttttaaacaagtgaaaagtccagactttttaacagaggaagaaacaagaatcataaaggaacaagctttcttcctctaaactctttggtcaattccttcttctttctattcgattgtgataagatctttctagagatctaatcagaaccttgtgccgcggatttggagaaacatcatcatcatcgtcatagaaatcctgctctttcttcgattctgtaagagttcttcgagcagactctagattcgatttgtttttttccttttcgggtttgtttcaaatcaatctcaatttcagggtaaccaaagtttgagcttattcattttgattctgcccggatctctatacatgtcaattacagtctttttacattttcttgatttggaaaccttttcgggatttaattgattagcttaagattacaagtgatgaaaaaaaagacagagactttagcaaatgttttctctcatctcttaattgctgtcttaattacaatcttcttgtttcagttactgttttgtaagacattgacattataatctacttgtttggagattggaattatgagaagagaatctttctgatgccaaatgtcattgaataatcatttgctaatgtttcttttaccatatgattcatgatctctttttcgttttatgttgcagcgactaagctttgaaatctgcttgttccttgaaaatg

SEQ ID NO: 26999 - DNA, 3003 bp, Unknown
  misc_feature (1)..( 3003): 2750-1469P.txt file - cDNA_ID_2717478; gDNA_ID_2214501; Annot_ID_133665
attcaacataaaaattactttgtattaaatacttttttggtaaccaaaaagttttaaatgtaagaatatccaaactcttttcgggttaacaactacaacaagttaaaatagttcgtttcctatgttaagttcaaattcatgttttgtatttaatcttatctacggttgtaaccgtttatttaatctatctcatttatgtatcattccgggacttttcggcatcgagtacccggtttctttcggttgtaatcgcattcgaagattaatataatattgttgacaaaaaaagggtttcaaattcatgacttcgaagctatattagatgctgaattttggttaaacataataaagcaatttatctttccttgggtaaatgaatagaccgataaatatgtgaccctattagaaggacctagtgcatggggcgttactttgggaatatcatttgtaaattgtacatattgtataatatcattagttgatacagctgatacatctcccactacgttgcatgcatacaaaattataatatcatttgttgcatgtcccagatctgagcacaaaactttacgtaactagtgttgctaatataatgctaccacatgaactggctggccggtctaacaaaatccaagctagagaagataactaaattccacatagaaatagaaatattcgatcatatctagtacgaatcctccggtcccgtcaaacacactagcttttattttgtttctaccaagcacattcgttttgacatgtacgaccaattaagcacctacatgtattcccacgttatctagaatctaacaacagtggggtgacaattataaaggcgagatatgtacgcctagccagagacgagcaacacaatgcaatgtgcctagatatatttcttcttttatcaataacttttttttcttacatccattttttatttaacatctatttaacttaaaacatttctctctctcttttgtttactttatatttagaaattttacttttatgaaacattcttcatggcttttttgttttttttttcttcattatttgttttgtttacaatatctctacaaattttgaaccaagatatggtataatgtacttatttaacagtactatgttaatttttgttttaatttgaagtaaaacttataacgaatttttatttgaatatcaaaaaacgaccatattttaatattttctttagttgttttggcctctaaaatattagaaacggctttgattagagatatctttatttttacaaaaataataataataagtatggttcaccaaacaatgcgcaaacccgacaaaacattcaacggttacaaatgactaaaccaatcagaaaattctttatttagcaacaaatcttcactatataatagcgcaaatgtttattgggaataagaagtaaaaagtaaaaaagtttatcaataaggaaaaatgggtatatccaagaaaacagttgtacaatcatttgctcttataattattatatctatcgtcatgagcacaacggaggcaaacagtataggcgctccagctatgcgagaagatttacccaaaggttgtgctcctggatcttcagctggttgcaagatgcaaccggctaatccgtataaaccaggttgcgaagctagccaaagatgtcgtgggggttgatactatgagatataatttttcttgaaaaaagaagaaaagataaaattacataaataaaacttaatttttcaactaaattagtaaaactataaaatacaaaatttttgtaactaattctatgagaataatgtttttttaagtagcagcaagctgagactggtacgtgtatggtaagctagtattgtctaacttagcaaaagataattgtatattaccagtcatttgttatatttttggatatttatgtagaaaattcatgtgtattgttatataagaaaataattaatatattttgttgttttttttaaataaataatgtacttataatagaggtaaaatgtgtaacgctaggataagtacattcttgtcggatccaagaaagttagtaaaccatatatttaaggcaacaggttcttcttcggatcataatctctctcattaaggggaaaaaagaaaaagcaaatagattaagagaaaaacagaagaatcggaaaaaacttgagaaaagaaaatggaaacgaaaaaaaagtaataaataaatagccctatatataaagaatgcatcatgcatgcatgatcaagcatatatcctcatcttgttgatcactttgtaaacatcatccacatcatcgtcgtcgtcttctttcaccgcctccacacaccgctcattatcgtccccgaggctgccatcgccgccgccgcatcctcctctactgacgtcagcagcagcaccagactcgactctcatgaagaaattgcataggagaagtgttaagaagcaacatataataaattctctagatgcagccatggatcagacactttctctctatctctctttctcttgtctgaaaaacaaatgataatatagattaatccaacttactttaaaagcttttgttctttttatttactatgttcttttgttatgcttttctcttacaattgtgcttatataagaaatggaatttactattaatggagtagagtgatttcttttgagctggtcttaaggctaagtaactgttgcagtattttacttgaatattcatagcaaaaataaagaaaatcatttaaataagtggtacgttagtgacaaggaacaaaaaaatgacatgttttcgatgtcaaaaaacatacattattacaagttcccgatgaagacttgggccttgagcctaacattttatttgataggcccaatagtaaaagtaaaataaaaacgtccgtgttcaataaggtccatcgtcaccgccaaatctatcaccgccaattactctctaatcggaaaagagccccgacgacaacgaccaccgtccctccgtcatg

SEQ ID NO: 27000 - DNA, 3000 bp, Unknown; identical to SEQ ID NO: 11534
  misc_feature (1)..( 3000): 2750-1469P.txt file - cDNA_ID_2717485; gDNA_ID_2214501; Annot_ID_133663

SEQ ID NO: 27001 - DNA, 3000 bp, Unknown; identical to SEQ ID NO: 11533
  misc_feature (1)..( 3000): 2750-1469P.txt file - cDNA_ID_2717489; gDNA_ID_2214501; Annot_ID_133662

SEQ ID NO: 27002 - DNA, 3003 bp, Unknown
  misc_feature (1)..( 3003): 2750-1469P.txt file - cDNA_ID_2717493; gDNA_ID_2214501; Annot_ID_133661
ataggtgcatatccagtcaaacctcaggagctctatatgttggtgttgtgtattttctaatattatcttcttcaattcccatctcttctgctctttcaaaaatcttgtgatttgtcgaaacgcttccaaaatcacacaatttccattgtccatctgagctcaatagaagattctcagccttcaagtctctgtcacgattagcaacaccaatacagtatcaattcacatcgcttgctaatgtaaaaacgaaacgaaatctaataatacaacatgtatacctgtgagcaatgcgtggggattgacaatgcattgcaaagacagcattacacacatctctaaaaatcgtaagagcttgtttctcttcaaagtaaccagcacctctattctcaagcacatccacaagagatttaccacaaaaatccatagccaaaagagcttcttttttattcctccccatatccaagataccatgtgcgtagagcgtgacaacatttggatgtcccttgagggatttcagaaccgagatctctttcattacgagttcaagtgactcctcgtcattgcatatcatgtgcttcaaagcatattgctttgacgcgtgatttacatcttgagctaagtaaacactggagaaacctccttccgcaatgacatttctaacttgaactttcagatttcctatctcgagaaatcgaccttcgagacccgcaggttctttttgagcaaaaggtttaaacttccacatgtttgaatcagtggaagtaataagaatgctgcataaacataaaatctgttacaaaaccaaacaaacttcggagaacaagatatcatgatcaataggagatgccaagatcctaatgagatattcaaatacacagaacaaaaacaaagataatgataagcacctaatctgctacacaattgctcagttaagaaaccaatcaaacagatctattcttatatgaccaataaagggagctaaaagctgaatccttgatcagagaaaccagatcaacacacaataaaaacataagaacctaaggagagactattgaagagtcttataactcgaactagatccgattaagaatctggcgactatggtcagatatggtatcaaagtacaagacgttatcatcaaccaaaaacttccatgtaaagctacagaattcagctcaaactcacttcacactatacctacaatcagattctcctccacaaagtttttacaagagaagaacactagcgagtccaacgattaacagctccgatgaacacaaaatctaaagattcccagatagataatcgagatcttaacccacaaagctcgggagaaacagagaatcggcagatcaatcaaatccaatcgaaagagacaataaaaattatacctttgcaaaaacccagatgctgaggagtgccaatccaatgagtaaaagaatatatttaccctaagaatcgaaatcacagtagctgcattaagatctgcgttcacttttgcgtataaaggaaacaactttaaaaggggtgattttgagagagagatgatgaagaagaagaaagcggcaaatccgggaatagaaaggaaagtgagataagaacattttggttatggttttgtataataagccgtaaaattaagacgtgaacctgaacgtggaccgtgaccctcccaatacctatttttatttgattatttcacatttgttgacgcatttgtacattttatcataaagtttgtattttaaacgttatgagatacatttaggtaatttctgttgcaaatatagagatgattttacaattttacacttgttgatttgctctaattctagaatgcatgttcttatcagaattggctacaatcaaatcgcgacatgtgggttcttgaacttaataaaaagcactgaaaaatgattagagaattcggttctcggaaggagacttgagggacatttaccggtttactcaaagctataacacaaggtttttcttccaaaaaaaaagcttgaacttattgtaactttagattatcgatggcttgagcacattattgatcatcaccaaagggaccggtgtcgaaactttcacagatctacaacaccacttcaccaaaaccaaaacaaaataaaccctagacaagatacaggagacgaacggtgaaaccctagacataagccagccaaccactgctgtagaaaccgacgtacggatgctggacacaagcggacataggggtaatgttattggattggatttcagaatgtcattccttaaagaacctatcttaagagaaatgttgtgcatcaaggatttgcattcagcattaagattgactatgttcaacaattcttctctgaattttatatgaaaacagcttctaaaaaaactaaactggcgctatctattcccatgaaaatgatattaacaagcccatgtcttcttagaactcagtttttattttttgttgggtctttggactattttgggattaatgtgaagttgatgtaaactttgacgaaattgttttaaatgaatgtagtatcgtggatattcaccaggaatgccgctttgtctcttattgttgtgttaataagtagaaaatgaggtgagtaaaggaaatatatgaaaatgatggatatatgctagtaaagacgattggaatattataatatttaaagttttgagcaaggtattagaatacttttttttttattaaagtcattaaaatgcacttcgtgctttgttatggacaatgacgcttgacgaattcagaaatataaaggaagtaaatgttcataatattataaactttttttaactaatcctataactaaactaaagatgccccgcaaaatatgagtgcaacacaaggaaatcacaaattccctttcacataacacacacttgaagcttctttcctataaatagaatggattggaaatggaagaagcataaaaaaaaaaaaaactaataaaattcacaagaaaaaacactcatatg

SEQ ID NO: 27003 - DNA, 3003 bp, Unknown
  misc_feature (1)..( 3003): 2750-1469P.txt file - cDNA_ID_2717530; gDNA_ID_2214505; Annot_ID_133742
tctagcagcaacatagatgaagaaactaaattataaatccttaaattaacataatatttcattcctcattttaaaaacttggtcttgaaccccaaattcaataactactcacacatatcgttagaaagaaagataatgtaacatgtttaaatcaataaatatagagataggggttcatgaaaaaaaacaatgtagagttaaaagattagactcgtcaatttttatatagcaaaaacaaagttttggataggaaaaatatgtgaaagaggtctttaaaattcgagcatattggaaacaatatatatccaaatgggccatgtccggagtcaaatcgaatttgggcctaaaatttatatgtggaagtggtctggcattctggtatatcctttggttcggcattaaagattagactcgtcaatttttatagcaaaaattaaacgaagttttggatacgaaaaaagatgtgaactaggtctttacaaatccaacatatggtcctaaaacaatataaatccaaatgggccatgtatgggccagagtcaaatcaaatttgggtctaaaattaatgtagaagtggtctgacattatggtgtagccattggttcggctagccttggacaaaaaaacaaaactgaaccaaaccgaaccaaaccaaaccaaactaaaaaaagggtccggttgggttatggatacaactaagtatccgaatggatctcagtcacactatcagttaataaccgaactgaaccgatagataattatataattatagattgtttggaagtagaatctaaatacctttgtaaatcttgatgctagcaaatctcgccaaacaaataaccatctcatcactagcttgttcagaggcattgaaaatatgctcggtagtaattgatcccacaaagtaaaaggtaacctttcatcactacagaaaagaagaataatcaaccaaaatgaattgaaaacatcaaacataatttatttatgaatgagaatacaaacatctcatatctgtgttcaaaatcaatctttttgttcgctaattgttgacataaagagtctccatttcacaaacgtttatgatcaacaatttcttgtacaagtaaaagatcataataataagtaacctacgggtaggcaaactgttttttggtttagggttggttcagattttatggttttttggttttacaaaaactgaaaccatatagtaaaaggtatagagactaccacaacacaaagagctgtttaaaagacttattcttattgataataaacttttgttacaagtattatctcagttcttacttgatctaatctacccaaaagatcaaccccgactaagaataactaagctctaattctcttctctgttttttatcactaacccgtgaagacgaagagaactacacactcaccttcaagcttttgcacggctttgaagtttttacttagtatcgaaaaatatcccagagtgctcaaagcggctcaccctctgctctagaatatttatatcaattccccagaaccctaaccttaggatctccgagaatctcttgatatggaatcttccttgtttccaagcctattcctttctttattcttcgatataatatcttctatattttctcgatgaaccttgtctttgacacctctccaagttaacttccatccttggctcttcacatcattcgccttagcttgccacgtttgctctcgcatccatgtctgcacatcaagcgtctgatgaaacctgatgcagcgtcctgaaatccatcaacgatctgatcaccatcagctgattgattcactctgcatcttcatatagaaatcgtatgtaatttagtttggtcaaactttcggtatcatgaatcatatccctagttgtaactaatggcatggttctcaaaaaattcttatacccaacaagaaacatagtgcattatgtcccaattgatgtatttgttcaattggtttcatgaaacaatacaacgattgtctaaaattgggtagggaagagtttaggcctgacctgaatatttgctgaataaggcttgggtcaaaacttttgtaactgggctttgaacaccttattgggcggaagtttgcaaagcccaccagataaatatttgcttgatgagtctctaaaagtcttgtaaagattgatatttaatctatgtttatggttaaggttatttcagaatattgtggagagcaagtaaaaaaaacaaagataggaaattatgatataacaaatgtggatgatttaggtttaggaaatagcattttgttcaaatatgtggagaatacaccataaatgtttattttcttatagttatccaagaggttaaatggtttaggtaatcgtaattaaagatcaatacgctaaacatatgtaattattttttgcgtcagctggattttattatgtcaatttcaattacttaaatcctaatgccataattcagtagcaatttaaataataaaataaattaatttggatatctattcaaatgtactgtctcttcgaagataataatcaaactttaaattcaacaaatatcatcaaagcatgaaaattcaattgtttccagctacgtattaatagctttaatgtggaaaaagaaatattaatagcttttttcatggaaaaaagaaaaaaagaaagaaactttacttttaatagtatatttttgtctgagccaataaaagaaaaataatattttggtttaacatatttgtccctcgtgatagatttgattcgttcgttctccttctccttcattaaagacttcacgatcccacacctccacacacattgactcacacacacacacttctctctccaagttcagaaaaaccaaaaatgggttcttgtcggaaaaccacttctggttttcagcaaacccacttcttgtaataaaacagacaaaactagaaagaagcaaaaaagcttcgttttttttttctctttctccaaaaaaaaaaacccccccaaatatg

SEQ ID NO: 27004 - DNA, 3003 bp, Unknown; identical to SEQ ID NO: 27003
  misc_feature (1)..( 3003): 2750-1469P.txt file - cDNA_ID_2717530; gDNA_ID_2214505; Annot_ID_184096

SEQ ID NO: 27005 - DNA, 3003 bp, Unknown
  misc_feature (1)..( 3003): 2750-1469P.txt file - cDNA_ID_2717537; gDNA_ID_2214505; Annot_ID_133740
tgtatatcatgtatacttatcaacactgtctattttctatataattttcaagggacagattgtccccaacattaattttcttctgtttatattaattctttagtttctaagaaaacattacaacgagggggtatagtgtatgtccccattttcatgacaaaaacgaaagaaaaataacttttagagaaatgtggatttgattgtgaactatacgtggaaaattatttgcatatgactattcgtttttcttacagcatcagtgtttgtttattatctttacattataaatatatagatatacatattacatatcggttgaaaaagaatatatatctgtatacatatatggttacatgcatgtatagaccacattgtgaaagtagtaataaaaatatataattacttcttttgtattggcgggatcagagatctaactaaaataagttagaaacattctattatggagaagccaaaaccccacatgggtagttgaaatttataagtatttaattacgtaatattttatttgtttattttttcaatgtctctttatcctcgactaataaaattaagttttttaatctcatatgtatcctgcaattatgccttaaaatcttggtttacaaaaccgtccatagtagcaaataatatctattctcatctcacttcgtatctctttttatgatcttgatagttttcttactaagtaatttttataacgttacaagacaaagaattatttggtctatacaatcacacttgcatagaagtttcaataagattgcataaagaaatcaaaataattaaaacagaaataaaactttcgtatatatttttacagaaaatatgtttcaataagaatgcataaaaaaattaaaagaagaatagagtttagaaaatatcttccattttatatgattttgaaatctttgatgaaatttagaaaataaagtttcaaaaaatgtataaaagttataaatgttaagtttaaacaatgaccttaaaaatctatatataagttttaaaaaacgtgtattgactaataatgcaatcaaggaaatcttccgtggtaacttctggaaacttcaaaacttcaaactattagacttcttgttgggcagtgaacggtgttgatcgacactaagagagttacggtcgacactcttgccttggttagaatccgaatttgtccttcaaacttgatttcttcgatttagcttcagaatattccataaactttcaatgtatccctaaagtgcaaaaacctgaaaaaaactagaaaaaactctagaaaaaaaaaaaaactctaaaacctatatctaaatcatacctaaaatcgaagaaaatcgaggtatatcagaatagacgaacaactataaattgagagtcggttttaatttcatctactacctcaagtgtggaatatgaaagaggttcctcatttgattttgaagaattaggggcactttagatggtttaaggatgaactattttgttcacctccttttatttcagctaatcataatctaccatctaataaataaataaataacaaaataactcatttaattatcaaatctaagttctaaccactattttatccattcaaaacaatatataatctcgtctaattataaaatctaaattctaattcttttttgtgaatccaaaccgtcatttaatctcgtataattgtaaaatttaaactctaaaatgtattccaaacgaaaatatatttagaagtaaattgatatttggagtgtatatagaagtttcgttttctggtaagaagctggtaattagggaatgaattcgattaaactatttgtgtgatttgttgtattatcatttatcataaatatttgattgtcactattttgtcaaaaatattaaattgtcattattgtgttcaggttcttagtacctcaaatcaaacagatcaagggtttaagtgtttaaccaaaccaatcgaattattcaaaaatctttataattaaatgactgttttaatacgctaaaccacttaattgtttatatcaatacaggatctcattatggcacaattattaaaataacagattttatcatattatttctaaatgagcgttacgttttaaactttcaattttgtatatacactataggttttgtgacaggtcgattattattgataaaagcattgggtttactgtatattttctttttctttttcaatttcttttttgctaaaatgttcattttttcttttcttatttgattctgatatgcatgattatttcagggaaaatatctacatatcatattaacaaaaaaaaatacaaatccattctataccatatacgttacattgtgaaaattataataaactcaagatatatatatacatatacatcatggtagtagtagtagtagtacacatttaatttcagcagttgcaccaacaactgagtaaaggacaaaaaactataaaattttgccatctgctatttaaatcattacgtattactagaaaatgatgtggaattcgacaagaatgaataataaaaattaaactcactagagacaactttcattaaaaaaaaaaaaaaagacttgtatcacaatcatatgaaagatgaaacaaatttgcattattatcatttttataattgaaaaaaaaacctcaattcgttgacccttcactgtcctccaatggcggcccctacgccgttggccttgcctctctctctctctctctatatctctttcttgatctctctctataaaagctcaaatagtccagcaagcaaaataatccaaaaagaaacaagataagaagaaaccaaactcgcaaagaaacaaaaaggaaaaaaaaaaaaaaaacgaattaaaaaaagaagaaataaatcctcctttttaacacctcattccctctttctccggcactcaaaagagaccaaagaagaaaactttagctctcctttttgtgttttctctcttttctttgttggtgttccgacaatg

SEQ ID NO: 27006 - DNA, 3003 bp, Unknown; identical to SEQ ID NO: 27005
  misc_feature (1)..( 3003): 2750-1469P.txt file - cDNA_ID_2717537; gDNA_ID_2214505; Annot_ID_184094

SEQ ID NO: 27007 - DNA, 3003 bp, Unknown
  misc_feature (1)..( 3003): 2750-1469P.txt file - cDNA_ID_2717541; gDNA_ID_2214505; Annot_ID_133739
tcttccaagaaacatatagaattgttgacacaggaaacatcaaatataaaaaagagcagaacaactgagtgaagaaaacacacacacagcgtcctctcgccgcaacccaatttgctttagttacaaacattccttcctcctaaaagcaacctttcttggttacattacgatctaatactttggttttgaaaaaaagtgatttaaaagaattccttttccaattgatttgactatcgacgacacatagtgtagttatcgagttcttacagccaattataaaaatgaaattagatccaaaatagccatatgaaccatttgaccaaataggaagaggaaaataccgtcattaattttttttttttttcaaccactcgtgtttccgttttctttttcctgttctttttgaacttatacaaagtaaaatttctactcatatgacttagaaaaccaaactaccataaaaatgagaattaggtaagtaaaaattactccatctgttcctttttgtttgatcttttagaaaaaaacacaaatattaagaaaatatattaaatattacttttaaatatattgttttttgtgttttacaattttcaataactataaaccaatgatattcactaatttgtattgaagtttacaatttatcaattataactaataactattgtattgaaaatctaaaaaattaatttttttaaaataatttttttttctaaacaattaaacaaaaaggaacagaggcagtattagaaaccctctaacccaacaaaaaatgtaatgtataatgtgttcataaacagcaccaactacccattataattatttcatgaacacaattgtggcagaataataatgatatgtcaaactgattaatgcttaatctttccgatttcagcctgtaaatattgaagtagccgacaacaagaattgaaaatcgcacaaattaggataacgtagaaaaatcatgttcgaaatggtaaaagttatgtaaacttaatttgaaccgagttatgtagaggaagaagaatgaacgtagacatgcctaagtgaatcttggtatgatggcttttgaattattgaagaaaagaagaataaaagtgttagaaagaataaattggcattataataaggaataaattctaagtgaatttagtattatatagtttttttgtaacactttaatactgtccgcgttatggccgccccatatggcccttaagacattaactagaagagaacatacccgggggagtttcatctattttttttggatactaggctatatgtttttttgttttttttttcctttgcgaaaagcctctttatttttactttggtgttaaccaaattccatttgtatatcatctttggttaacaattgtgttttcttgttgctaaataacttttaacatttctataaaaagaaaagaaaattaaagtgttaaagtattgccttacgccaatgtacaatgccgatgtaattatagaaaaatgacaaactgtgtttatatagaaaaataagagaggaaacttattatttacgatattttcactcatgctattttttttttcaaagaaaccaatttttttcttctcaccagataatagctctcgaaaaagagatagtatttagaacactactaatcttttttctatttgttttcactagaaaaatgattgcttagtaacagtctaaaactgtgtatggtaacttttttaatgtcaaatttgttggtccataagaaaaaaattatttccaaaatttaggagaaatgaaggcgctattatacaaaaaatacaagcaacgcatagtagataaggtggtgaagcttatcaaatttggtttaattttgattcttttcacttaattatgttctcattatatggaaagatggtgatgaaatatatgtgtgaaactctaaaatcggtgaatttttcttgttgctcaatttaatctacaagaggttatatgtagactaaattaaaatttcaaaatatatggtttattactttttagataagaaatgtcttaattttatagtttgagttgtactacattgtttttttaacatctataaaagaatgaacatatgttttaatatgattggtaagttgttttgacattttcccatatccacatataactttattaaaagtgatatagtgtacactttgaattcattataagatataatagaaactaaacggataatatgagagatttcgaaatccaacaaggagctaagtgtgaaggaacacgaatgaaggacagaattggaacaaatggttattggggggcaacagaagagaataatacccttcatcatcctcttctcttttatacctacaataatgcaatcgagaatcactttaagccctcaaggacgctctcgttatttccctcctaatgatccttgacgacttttttctccttcacatgaaacagtttcaactttacgttaatcgatatcgaacgtctatttccccgtaatgtttgaacgttgatattaaaactatttttgtaaaaccgtgcatcttaagacaaaacatggtgtccaaaccaaaaatatgtcttacctgatccaaataaattattttcaccctcagaaaattataatgcacaccatccaaattaatgatcatgtcttgaagtcttctagcaccaaggctatttcgtcggaattcatttctttggttttaatttcttttactatatcctcatgttgcaaagaaagttgatggaatcagaatctatctacatatacattctgatcattaatgcctataaaatgacatgtttctcaaacaaccaagttcaccaattcctttcgcttaccagtctcttgtcttctcaggttcgatcatttttttccttcaattttagctccttcttcatcataaggcttttccacaactaaatcattactagatcttgagtaagttggctgagtgctactagttaacttttcaggttgttagagatacatagatagaaatatg

SEQ ID NO: 27008 - DNA, 3003 bp, Unknown
  misc_feature (1)..( 3003): 2750-1469P.txt file - cDNA_ID_2717549; gDNA_ID_2214505; Annot_ID_133735
aacttgtaacctaaccaaatagttattcacctaactcatagaaaataaggttagttaatctagtgcatatacttaatagtatttacccacaataaattacaaaagttgatcaccaaccattaaaaagaatacaatttttttttatattcagtattcatttaataaaatacaaatttgttaactatgatcctaaagtaaagttaatttcttgtttccgatcctcataaatgaaagaatcagaagttatatagttgaaatatatatcaagttaaaatggtaatcgtcttcttagcttgacatggaagagaaacaagaaaaacaaaaaacaaaagagtgaaacctgtatttgtgatcataaggagatacaacgaatctcctaagcttaactcgtcgattacttcttgcaccaagtgaaggtaaaattccagtagaaagactaaaatgactactctctctcgaaagctgttcaatctcatcttggacttgtccgcataacaaagcccctcctctcatcaccgacgtttttttttcttggcttcctctttgatggttccttttttttgttcttttggtttcggcaaaagaggcaaaataagcagcttaactcttggctttattggtttcacatttttttttcactcgttgttgatgagtgagaccttttttttttctttataacaaaaaaaaactcttggctagttggctttattacgggtgtgtgtgtcatttctgactttggatcccttcactttcaaggaattaagttttctctcggcaacacagtggttggccccactttcacgtcttaacccttactgtagcattaatggtggcttctccatttcaagataaaataaaatatcattcttgctcataaataattgtattaacagaagaagaaaaattagaccgaagaggaagagttgaccaaaaatttatacatcagagcatgatctcaagtttttcaatcattatacttactattttattgtttgtttgacttctaactaaaggaaaaaaaaaacacatatagatgtaggacacgacttaaaacttgttttaaaatattttaggtgatcgatcatataacattcttgggctcatttgtggtatggagatttgaagtgagatattgattgcaacttatggtatgattggttgcatacttgcataaagagcaataaatgttaaactgtcatacttttattttaacgagtaaaggaaaagcaaatcgtaaaaaaatagtttttctttgtttgggcataaaagaaaaatattttggttcatcatccctagatcgtaagcccttttgttcaccttttcctcgtctatcttactcacttcttgtccatcatcgtatatatagggaatttaagataagctagacatttagcctttaggatatgataactaccattgtttggggaggaagctacttaggatttaagtagataatgtaaaatgatgagggataataatgaactttggataactatccattttcttgaaagagaagtaatgtgatggataatcatcacatttataacagttacctcattaaagtggtcttattactacaaatatttgttgctattttttccttcaagttctggatttctcaaatttcatatagttaaagttttaatttacaagatgtctactgctatagataaatcataaaggtttgattgctatgtcgctaggggaggaagatgaccttttaaatatatttgatctacttcaatattgctctagtgaaaagagtgttgtgagtttgataggaagaattcgtaaatcggattgccaaatgatggagctaatcctagataagccaaggaactggcaaaagtatgaaatcatcatagagatggctatttcctatagagaatgttagatgcgtaacaaccaattttcttttacttttagaattttctttatttactaatatttcagttagaggttagcacacttcttgttccatcccataactgttcgggtgtttccaaattcctatcttatataggaatgtattctcaatatgggacaagttggtatttccaaatagaaactggaggggttccctaagtcctgattgtgacaaatacaactagtatatatatatatatatatatatatatatatataatattctaaaaacttaattgatttaatttatgtttagttgttctaaaatggattatgtttctttgttttttcaagttttaacttttcactatataacacactttatcattttttcttgtttggaaaatatttatgctagataaattgaaaacatgttaattatagagcaagagtttatattttattttattgtaacaggttctaagacctttttttatagaaaacattaaattaagataattattaattacatgactcgcgctctgaccagttggaccaaatatatatgaaacacaaatttagtttaatagtattttagagtatttctctctttttttttatgagctggtatttctctaatttacaagtgtgttgcatataaaacttcattccttttttccttttgtatcattgtatgggtctttgactcttttttgggtcctttttcgtcgaccattagcgtctccactttacctcctttgtttccactcacaattgtaactacatgggccacactggcccatatacattcatccaatcgggctatcatcatgtactaagcccaactcttttgaccggtgatcaaacagttatgatcaattaactccaattccttcgtatcccaaaactcgtgcctttgtaaattatccaatacgtaaaataaacaaagaataaatattatttctaaaaaagatatgcttcaacaaaaaaaatttaaaattggatattccaaaaacaaaaccacgaatattcttcatttaataaaataaaacactaatattaatattatcaaaccaccatcaatcctgtaaccaattttcacttttgattgttcttccttattctcagctaaccatg

SEQ ID NO: 27009 - DNA, 3003 bp, Unknown; identical to SEQ ID NO: 27008
  misc_feature (1)..( 3003): 2750-1469P.txt file - cDNA_ID_2717549; gDNA_ID_2214505; Annot_ID_184086

SEQ ID NO: 27010 - DNA, 3000 bp, Unknown; identical to SEQ ID NO: 11596
  misc_feature (1)..( 3000): 2750-1469P.txt file - cDNA_ID_2717553; gDNA_ID_2214505; Annot_ID_133734

SEQ ID NO: 27011 - DNA, 3000 bp, Unknown; identical to SEQ ID NO: 11596
  misc_feature (1)..( 3000): 2750-1469P.txt file - cDNA_ID_2717553; gDNA_ID_2214505; Annot_ID_184084

SEQ ID NO: 27012 - DNA, 3000 bp, Unknown
  misc_feature (1)..( 3000): 2750-1469P.txt file - cDNA_ID_2717561; gDNA_ID_1620463; Annot_ID_157823
ttttaaaatactataagagtccaacaatcatgtgatgcaaacctcaaattccgagcttctctagaataagaataagctgctttgtgtgatgatcataattatgcatgttgattgatttttcctaaatctaaaaaataatcaaatattccagttaacagatctcagtacatgtgagaggacaattagacaaaatctaatgtactatttgtttagagaataattggttagttaggttaaggaaaaaacagagagtataaaatatccccaatgatgacctcgttctacagccaaaatgctgtaaagaacattcaaagctaatatacacatgcatgaaacatatgattaagcaactaaaaccatgattattagtcctacgcaattgccaaacatataaaatgattacaacacatacttttaaaatattccgttgcctatgattttgttttgtgttgtggtactcaactttggatttggatctgtgatgtaggcctgcagcttttatttcaaataatatatatatattttatttccgaaggaaactaagtaatcgaaatggtgtattcaattcaatatttcacttatcatgtaaattgagaaactaaggtaagactgtaagagaatgctcatacccttctgcactacctccaaatagacgaggctctactgaaaaaatcggaataatgtgaaataacaagttgctgtttggacgccatatctcaatttgctatatctacaaattaacgataccaaagtgctagtaggggctaaatgcagaaatttaagccattcaccattacggatagaacatgaaattctcatttaagctatgctacttgaatatgttctcgttaagaattgtttcaccctagtgcaagatccgcggtcatgctcaattaagtgctaaaagttagactagtagaccaaatttgaatccgatatatatattaccttggtgccgaactcaaacttagacatgctcgaacctcaacaccaagaacactcgatgtttttgccaatacttacataaaagctattggaggatcactaataaatgattgatcatcaatcatcatgctttgcggactctctttttcgttgaggggtaaatgattacaaataaacatgcgcgcgtggatataacgcacttggtcagtgcgtgtggcacaagtcagagtgaacacgtgggacagccagatcacactgaaacacaactccgacatcttgtcggatcttatgtaaagcgttgggtcccacttttcataatatctctcaccacgaaacccatctttttgctctcaattattgtcgctcattgccgtatctcttcataatttcactatatacatgtctacgttaggcggaaattattaaattgtttttggaattttagtttacatgttatttttttctaaataaacatgaaatatatttacaaaagtatatccaaaccatcatttttttattgtttacatatacactaatgacacttttatttggattgtgaattatgattatgcaacgatcactagtagtttactagaacaattaagtttacatgcttcaggcattgtaaaacaactatttacaaaaactgaagttagtctacaactagtttttgtgaaaagaaaggaatattagacgataaaaaagtaggcagcagttaaaggaatcaaataattaacaagttagcattgattgaggcggatggttacacatgataaggagcaggcgagtgaggaaacaacacaacacgcacgatcacgctgttatgacccacatgctcctatctccatgttactgtacgcaaagtggttatacatttacacacacttgaccaatattgctcacatttaaatttttatttctaaaggaaaaagcacaaacatttaaaggttttactgacggaagaaacgaaaaaaagtagtagctttaaaatgtcattgttgatgaaagtagaaaccatgatgatgatatttatgtgcaaatattcatctcacacgtatatcattggttcataaccgttggttggtccacaactttgaacaagttcagattctttttgattgtgttttgtaccaaccactccaattagtcaatattccattatatccaacctcaaatactattttcccttttctctttaaaaaatatttggacaaataattggctacactattggagatttgactcagctcggtatgccgtaactaatcaagatactattttctatactttcttttattgatatccacataatacatgtactttgagtataatgacgtgtacttgattaagacaaaacgaagtacgagaattattgtatttatcaactttgagacatactacatgatatggatcatgaaaattaacacaagtagtgcaaattgcgttatccatatacaaaaaacatcgcaccttgatgattcacttaattgtagattactttctcagagtggtccggacatttctattggttttaaagacattggctttaaatcttcagacacaaaacacatatacatgtgtacacttgaaaacatattggccatcttatttgttttggacaaactgccatcttattatgcatgggttcttgtaaggaataaactaaaaatgtttgtgaaagaaaaagaaaaacacaaatattgagaaagtacaaaaagaaagacatggcaaaggccaaaggggggacacaagttggagataaagtaatacaagtccaaaaacaaagaaacaataatgatggattgtaattagccacctgacaaaatctctcatcattcaaagtactatattaatcccctctcttcttcattaccatctcacatctctctctatttctcttccacaaagagtcctaacttcgagttgaaacaaacaccatttctcatctctatctcagaaagaacaaaccatttcgtgttctttctttctctattctcataaggaaatataattcctgaaactgttgagttcttgtgaaaggaaataaaaaacatg

SEQ ID NO: 27013 - DNA, 3003 bp, Unknown
  misc_feature (1)..( 3003): 2750-1469P.txt file - cDNA_ID_2724435; gDNA_ID_1620487; Annot_ID_158493
cttgctgaaaagtgccagcatcagtgcatctaaatgcattggcatgaaaccaagaaacaagtccgaggtaaaatatcaagaagcattagatgagatgtattatatagtacaagtttgtctacacttgttcttcagattcttgagttttttgcagtacggggaatcaaacaatgatacggttgatgctctgtctcaaaaggtcgcggctctccacacttgacttgtttcagagattgaggattgaaacttgttgctaacagtagacggctgattctacaagtcttgtacacatctctcagagaagacgaagaagaagtctgatcttgatagagatattgagagacatgactcatgagctatgaacaaaacaacttaaccttcattggtcttcaatttgtccatcaagtcgagttgtattaaaaatggatggagaatataattaaagaagaattgtgttaacccctggatttatgcctgacaagtatttgactttatcaggcattataaattatagttaaagtgtgtgttttcttcatgacccatatgtgcctaacctaacttgatttactgctgaatttcttctttttagtcgtcccatttactttttctttgttctcttttggtttacttactaataatctctttagagctggtgaaaatgctgttacaagctctacatatcataaataacttgaaaagatcaactttaaagtagtctataatatacaataatgggatcaattacgaggaaaccatagtaaagtatggtctcttctgaattcaggcatattctcaagtgattataaggatgggtattttctttttctctaaaagactaatttatccttttattgtttcttcattctttcttccttcttcaagctcttgattcagatgcgagtttgatgaagatggcttagttgctcatgattcacaatcagattgttttacagttgagatggatcgatctgtgtctataattaaagcctttgggttccctaaacatcatcccttagggtttagttttcttgcaacaaaacttgtttaattagttccattggattcatcgaaaaaggttggtcatagaaatgttgtgtgaatcatcggaggagaaggaaacgagatttgattgttgattgattcaaaattaaatctgggtatttatcgtttgtggagttatgggtttagtaattataggaagttccgataatgagtttatttttaatttggattttcatatcatgggttatgggtagttatcgtcttctttgtacttctcaatttcaatttggagacagtgaggttgttgtctcacgacggagaagatgaagatcatcatcaacacattcgagggcaaaatggtcatttacagaccaaaaagtacccagacttataagcccaaataaaatatgtttctattctaatttttgggtcaaaatatgcccatatgtacaaaaacccctacaataatgttgtaaattttagtttcttcttttactctatagtctaagtctatatccaaattgactgactaagtttatttttgatatgatatttgaagtttgaacacggtaagtatattataaatttaccatttgtaactctatagtaaaatagtctcttgtccttgtgacgtaagtgaatccatcttgcattacgttatagatagatacttttgtaatggcattcccgaaaaagggttttgtagtgttatagtttaagcagctttcactacaacaaaccattcgcatgcctgacattacctttttaacatggagctccacataattctttctttttcctttttactatcaaccaatagtgttttgtgggtaaaatggatataaaagtaaaattccatgaacatacttgtactattaatctcgagataaatcctagactcctagtgtttatgttcttgtggtcgtcgtcgtccaactagttcttgcttcaacaaaataagaaacaaaacaaaaccaaattaatagagactcctagaaatcaaaggactaaaaaacacttggaacaaaaagacagaagttagacttctttttcttttgagatagaatattttttttatttcatggaaataagagtaaagttgttatacaactctttatttttctttatcaaaaaaatgttttattacaactcaaaagtttcatgaaaattgacaaaacagctaaagtataagtctataaccataataaaactaatctgacgacttttttcttatagctatattagtgattgaaaaaattgcatggtctcttgttttccatgacatttaagttgcgaaaaattaattgcattatattgtaaactaattaacggaaaagtttatctgcattacgagacaaacacatgctagtactataattttgtagtttatctgcattgttgaaatcggactctgctaattttattgattatacagattacatatcaaatctagtaaatatgtagcgtttaaaaataaaataaaaaagtactcaaatatgataagctaaacttaaacgaatccttccaaactcttatgtattgaaattattaacaaataacagtgaacctgtcgatcacttgcctctgtgatctttcaagtttcaatgcaaagaacaatcgtcccgtgattcacaaccctcaatattcaactaaggttaccctaataagtaataatccaatatgatttcattattcataaaatagtcgccagcatggattacgattaaaaagtttattttttctattattgtcctacacactgaaaaatggagtgttaacgaagcataagaaatgttttgtaattttaagaatgtttgatcacaaatttttttccactgatttttttacattattaaaactaataaaaaaactgacttagtagtattaaattggtatatatcgagatcccatttgtgatattttattacacatctcttccagtctctcactctttgtccctctctctttctctattactctgtctcctctgttccggcgatg

SEQ ID NO: 27014 - DNA, 3000 bp, Unknown; identical to SEQ ID NO: 5513
  misc_feature (1)..( 3000): 2750-1469P.txt file - cDNA_ID_2724473; gDNA_ID_1620797; Annot_ID_168519

SEQ ID NO: 27015 - DNA, 3000 bp, Unknown; identical to SEQ ID NO: 2897
  misc_feature (1)..( 3000): 2750-1469P.txt file - cDNA_ID_2724570; gDNA_ID_1620613; Annot_ID_161965

SEQ ID NO: 27016 - DNA, 3003 bp, Unknown
  misc_feature (1)..( 3003): 2750-1469P.txt file - cDNA_ID_2724591; gDNA_ID_1972164; Annot_ID_179691
attctctgaagcactttgacaaccatgtatgcactggtagagtcaagaccagaagttggctcatcgagaaagagaataatcgggtcatggattatatcggttccaattgagacccttctcctttctcctccagacacacctctgtgtccctcatcaccgatcacggtttttgctgcgttcctcaggccgagctgatcaatcagagcttgaacccgtgccttctttttcttcttagaaagcgagcttggaagcctgaactcagcagaaaacatcaacgtctcttccacggtgagcatcgggaagagaagatcatcttgcatcacataagctgatatgactttatgcaggctagattcaagaacttccccatttaaagtaatatcaccgcgtaggctctcttttgaaatccgattggctaatgcatcgataagcgttgatttccctgacccgctcgctccaagaacagccatcatctctccttcccgggcttcaccagaaataccattcaggagcaccttagtattcatctccatatcattaccatcaaaaggtgaattcccacaacaaggaaagggcttaaacttcttcttgatcttcacgctgtaagtcaagtctttgaaggaaagaacaaacggagaagaagaaggcacacgagaagacggaaccgaggaccagaaattggacgcaaccgcaatatccatagcccgactctggtcatccccctcatcttccacactcatgagaagttctgcaagtgtgacagacacccgcgcagtgtctctgtgacatctctgaagctccactgacttgtggatattgtaaaacagagggaggccatcgccattgacccgtttggccggagataatataccgaacaaaccagacatcacgtgaattattgtctggttaatgttttggcctcaggtaatgtgtctaaaggtcttacccacagaacaattttgatcgactttataggatatttggatgggagaatgagggagaaacttgtcaattagtttggtgatctctaagtatctaactttgagttgttctgggttttgtagcttttcatatttacatgtacatagcttttgtttatattttcgtatgtatataaattgtaagttacgagtaggtgaggagttgggcaaatccatccacatttttccgttattgtatgtattttttcttggggcttaaggtactctgtaaaaaaatcctattttaggtggtttttgtttacaaagtggaaaagtttactccatggaattacgtgtttatttcatctgtatataatgtatccggagtttatggaattgcaataagtatagcttatgtaacatgtcaggaatagaatttctccttgcacatgtatgtatgtcacgaatttcttaatctccttttgtttattatagtcacgacccgcgagttttctataatcacttacaagctctaagacttgttttttggtgcgtgagacaataattgactaggggttaattggatttccaactattttgaatcagtgaatatcttcgtacagtaactaaagcacgctacgaatatactgtttgttgtatcaaaatcaaatcatccaacattttgaacatttatttagcggttactaattaacttttgcaattagttaatatcaaacacataagatattctcataattaggatttggcatggtactatactaagattgtacaaaggcatgccattatgcataatgaagctaatggcgtgttatctttcaattgtttgtttaatcatgcacaccattttcgtcatataaaaaagcgtaagtgaagcctatttcatttcaaaaaaaaaaaaaaaaaattataaggatcattgatttgtacttttgtagttggtgaaacaaaaaggaaatgaatgtgaaaattatggcagaaaaacgtgcagatgttcggctttgatgttgtagagctacacacgaaaacacaacaaaaattgtcattaggaatatgtaatggaaactttatataacgtgatgagttagatttaggcatatggaagtttggtgtagctgttatatctgttttcttgattattttacttttgataacccatttttacaagagttgtcaagaaataatagaaaactatatacttagtatcatcagcttgtctctatcaagttgaactaatgatttatccaatgaaatacataacatttcttatggaatgtacactttcacacagagaatgagtttatattattctggttaagtttagtaagactttctttatgtaaagattgttttgaaattttgtgtttggtagaggatattttgctaagtttcccaacataattttgttaacactttgagatttatcaggtaggactagatcaaggaattgaatccctcaggtttgagatttcgttcaatgctaatatttgttaaatcgtacgagaaatttttactctcgtctgttgagtaacagcatgagagagttttcattcaaaaaaaaaaaaaatagcataagagcatatctctaggcataacattttgtgggctattaaggggccaaacttgggcatccaattgttaaaagcccatattttgtaagcctcgaggagttttttttgtttgtttccacatttgcctaaagttttgtatatgttcattgaataatatacaaatcaaacgcaaatcacattaatgatcccctcaagaatatatatataaaaaattgcatatattattaaacaattagtgaaattacttaattagattatctgataatcacatatagattttagaagcgaaacatatatatttgctctataactaaaacaaaataaaaataaaaaagagagcgaaggattgcatcaagtaatcgccgtgtaactaactacttttgcattcaccatcgctcttacgtttgaatctatccagatccaaagctcttcttcttcccggcaattctgagatctcattttcaccggcgacgagctttaatcggagaacgatg

SEQ ID NO: 27017 - DNA, 3003 bp, Unknown
  misc_feature (1)..( 3003): 2750-1469P.txt file - cDNA_ID_2724595; gDNA_ID_1620355; Annot_ID_154467
ggaattatgtgggggaaaaagtaaagaatggcacatgaagagagttttgcgtaattcccaaaagtaaagccagaaagatttttctcccaccccatgtgcttactctccccagtccccactttttcttaattaaattcatatttcttccatttttatttttcggcttttaatttcttagcatacttttaaaaaaaaaatattgtcacactttttaggccgattttgactgagttacacaggtcaataatgctcccaattcggcggactatagttattttagtggacatttgtgttaactaattttgtggcaaaaagaaactcggaacaaattaaaccataactgatttagactaaattatataatgtaatggccattatgtattaactaaagacaaaagtaatactacgatctacgataatacaaaaaaaaaattcagaatatcgcgtcattatcaacttgacaccaacttgtgagtctcccaaactcaatgattatgtggtcattatcggtggtgtttttaaaaaatactatgaaaactcgctctcactaatatcaagtggcttacacacttgattgactaatcaatagtttatcactactactataatgtttcaggctagattttccatcacgtgccaaaaaattccttcaaacaatttagcaagctaaccatcaaatttaattacgaatttttttctttcatatccacgtggcggatattcaaacttaattatgtgtaacatatgaatgacgtaaataatctatgcacatctcgttttactgttgtgtgttgctttaaaggctatcatggataacgtgtgtatatgaccttcgagaaaattttgaagagatccattcaacaaaacatgcatgacattttgaatatatcccaattattaaagactcaataattttcagaagtatattttgggtataaacaggtaaccgtacgtgttgctacacttgctattgtccatctataatgtgaaaaatatcaatttaaacattactgtttttatgtagtttttagttcatgtagtatttgattatctggagaagaagaaaaaaagatgataaataaaaaaattgtcggcaatagaaaactgagtttaggtcaaaatagttatgtactatagttattaccgacgtaaacactgataaattgaaaacgatgcatcactggtttttgacaaaatgtcgaattagaacaaacatgactcagtgtattagaaagtcaaaatatacacatttcctcttgaatagtagtattagcttgataactttgtttatcttaatgaaatcgtattaaagaagtttagtgccgagattaaatctcgagtcctatcactctatcaggcactagaatatataatgtcccactaaattcgataacaaattatctttaaagttaaagtatctttataattgtttttatatatggatcacgggactacaagaaaaaaagtagacgtgacaattatcttttctgtgtttttttctcgttatctctagttttgtttgatgcgtatgtatataatttggacaatactataataaagtatgcttaataagattctccaatcgtttttatattattcttaatataaaatcaaaagagattgatgatttcaaatgatgcctacaaagaataacatccgtgtcgttaatagaattcacaaggaatttatatattctaatgtacattcgacttgaaatcaaaatcatatggacattaaacaaaaaaaaaaaaactagaaaaggattaaaaagagtaaagtaaaattttgatggttcgaaattagaccaaagcgtatgaaacatcatcttttgagtaccatatattttgcaacttcaactaattaagagtgtagtataagctgggagttttggaactcaaacatcataatccattccatcatctctaaacttgggaaaaaatcccacagctaccgtattatatttgggaaatcgtataaaccaaaataagaaagttgttaattttttttaactataattaacccgacacttagaaatgtgtatcaaaaaagtaatgcaagaattatcattgacaagtttcaacaacagaattattgaaagatttactttatttgaacaaatctcactattaactttgtttttgtcaagcctctagagataggttaaaactttaacaaactttacttaacaagaaaagactatgacttttcaaaatgcaataaaaatactttaaagaagaaaagattcctctcgtctcttcctttgttcacatcactttcatctttattttctttattaattaatcatttattactcctctttcaaaaacaaacattttttatttataaaaaattcatacggcgctaatttcaccaccgctcttcctaattgattcttcaaaatccatgattactattgacccccaaacaaaaataatataaatctgatactatttggttagctttaagcatataattctcatctataactccaatcaccaaatcaagaaccgcctttagttaataaattgttcattaattttgctaacaacaatatttgtccacattacacgttccattcataaaaaaattgactccaatattaattgtatttttttacacctcgagttttgcagaaaaataaataaaagctcacatttttattttctccctctctctctctctgtgtctgtgtatgtgtggctttaccttttgtacctaaacctctcacactctctctctctggcttgctgtttactctcatcgtctcctttacttcattcgtcttcttcctctctttcccacaagctcccattgatgtgagtttcttatcacttttctttttccgatttgtcaattccttttttgcactgatttgtgcttcgcttacacattgctagtagattccccgatctgggttttttcttattcgtgttcatcatactaaagtttggtgcttttttgtgtttgtgtagatagagagagagatttaaggaaggaatcatg

SEQ ID NO: 27018 - DNA, 3000 bp, Unknown; identical to SEQ ID NO: 14758
  misc_feature (1)..( 3000): 2750-1469P.txt file - cDNA_ID_2724601; gDNA_ID_2684224; Annot_ID_191883

SEQ ID NO: 27019 - DNA, 3000 bp, Unknown; identical to SEQ ID NO: 14758
  misc_feature (1)..( 3000): 2750-1469P.txt file - cDNA_ID_2724601; gDNA_ID_2684224; Annot_ID_137519

SEQ ID NO: 27020 - DNA, 3000 bp, Unknown; identical to SEQ ID NO: 14724
  misc_feature (1)..( 3000): 2750-1469P.txt file - cDNA_ID_2724724; gDNA_ID_2684220; Annot_ID_137430

SEQ ID NO: 27021 - DNA, 3000 bp, Unknown; identical to SEQ ID NO: 8597
  misc_feature (1)..( 3000): 2750-1469P.txt file - cDNA_ID_2724728; gDNA_ID_1971820; Annot_ID_58312

SEQ ID NO: 27022 - DNA, 3000 bp, Unknown; identical to SEQ ID NO: 8597
  misc_feature (1)..( 3000): 2750-1469P.txt file - cDNA_ID_2724728; gDNA_ID_1971820; Annot_ID_176130

SEQ ID NO: 27023 - DNA, 3000 bp, Unknown; identical to SEQ ID NO: 8597
  misc_feature (1)..( 3000): 2750-1469P.txt file - cDNA_ID_2724728; gDNA_ID_2926158; Annot_ID_139602

SEQ ID NO: 27024 - DNA, 3000 bp, Unknown; identical to SEQ ID NO: 8597
  misc_feature (1)..( 3000): 2750-1469P.txt file - cDNA_ID_2724728; gDNA_ID_2926158; Annot_ID_198558

SEQ ID NO: 27025 - DNA, 3000 bp, Unknown; identical to SEQ ID NO: 11001
  misc_feature (1)..( 3000): 2750-1469P.txt file - cDNA_ID_2724771; gDNA_ID_2214471; Annot_ID_133070

SEQ ID NO: 27026 - DNA, 3000 bp, Unknown; identical to SEQ ID NO: 11001
  misc_feature (1)..( 3000): 2750-1469P.txt file - cDNA_ID_2724771; gDNA_ID_2684240; Annot_ID_192572

SEQ ID NO: 27027 - DNA, 3000 bp, Unknown; identical to SEQ ID NO: 11001
  misc_feature (1)..( 3000): 2750-1469P.txt file - cDNA_ID_2724771; gDNA_ID_2214471; Annot_ID_183010

SEQ ID NO: 27028 - DNA, 3000 bp, Unknown; identical to SEQ ID NO: 11001
  misc_feature (1)..( 3000): 2750-1469P.txt file - cDNA_ID_2724771; gDNA_ID_2684240; Annot_ID_137771

SEQ ID NO: 27029 - DNA, 3000 bp, Unknown; identical to SEQ ID NO: 10721
  misc_feature (1)..( 3000): 2750-1469P.txt file - cDNA_ID_2724793; gDNA_ID_2213670; Annot_ID_132763

SEQ ID NO: 27030 - DNA, 3000 bp, Unknown; identical to SEQ ID NO: 12373
  misc_feature (1)..( 3000): 2750-1469P.txt file - cDNA_ID_2729568; gDNA_ID_2214546; Annot_ID_134575

SEQ ID NO: 27031 - DNA, 3000 bp, Unknown; identical to SEQ ID NO: 12373
  misc_feature (1)..( 3000): 2750-1469P.txt file - cDNA_ID_2729568; gDNA_ID_2214546; Annot_ID_185410

SEQ ID NO: 27032 - DNA, 3000 bp, Unknown
  misc_feature (1)..( 3000): 2750-1469P.txt file - cDNA_ID_2729594; gDNA_ID_2684256; Annot_ID_138119
aagaggaaatagagacagcttcccttttaatacaaagccatgaaacttggaccgggaagaactatatcattataaatcacgcacattgtccaaattcatatcagtagcagatattcacctccatgacgagaacctttgccttgagagcatcagcattagtttcatcaactacaaaatccgacgttgtatctcccgtaaaagcaacttcaggagttattatgctgtctgtaatctacaatccacaatccaaacttattaaacaggcttatatactttggaaagaccattgcaaaactattgactttgtgatagacaaacataagaaaaaattgacaagcaatattaagcaaatcaaagacaaacctcaacacctgaaaccttcaagttcttaatttcatttccagataggccaatatattccttcttgagtttatatttagttgaatacactacataaccctgcaaaatatcaaacgaaagcatgaattcaacgaagacacataacgctaagatatcgaaaatctcatgcgagtttactaaaataaacctggctttggatgacatggaatgtcttaaaggctttgactttgagatctttccttataataaactcctcccctgcatgaagaagtgtccaaggtttaacaaaaaagccaaatcttggctgcaatgaatgctagaggttgagttaccacctatgtccaagccaacaagattgtgctttagctctgaagaatctaactttctgtgaacttcgaataaactctcaacagtttctttaatggatgcgggtactataatcgttggaggcttcattttgtacaagcctctagtagcaacatacattggtaatccaccctaacataacaatacgaatagtttagctcacaatttgagaatgtaacacccaaacagtaacagagcaataggctaatataacataacaatttagctgacaattagagaatgtaacaccaacacagcaacagagcaatatgctaatgataataaacacatggtggctctcaacaagggtttatcaaaacagtaacagagcaataagctaatgataataaacacatggtggcagtctcaacaaaggcttatcaaaattgttcttaaaacaaaaagtcaaaagaaggatctttgcaaaatataatccgaaatttcaagtctttttatagaagattcaagatacttacgatatgatccatgtgagagtgagagatgaagaggaagtcttgagaaattgcgcgatgtgggcaacgaccaatgtcgaaagctatccgaagagatggaaatatgatgcacgtctcgtgcccaccaatcgacaatccctcgatcgggtaaccttcaatttgcattgctttcttcttctccatctcactgttccttagggtttatcgaattttggctgtgctcttcgttttcaaatattgatcaccaagtgttcgatgaaatgtctcacaatcacaagcttttttcttccatgatcattttttttttttttaataattttatggattgggcttaggcccataacggttaacgagactacttcactggagcgggaaccactaggcactggttaataaatttcccacgtgcctctggtgcaaaagttggtctttcgtattcaacgacagtgcaagggtatgattgtaaatttacttcgaatgcttcattagaacgtcgcggtattcttacacttgttttcgaagtaatctcgacgactataacaaaatctgagcaatttcaattaaatatctgttactgttgtattttaaaatctagactactgatgacataaccaaatttttagactaaattaccctttttcttctattttaattatcgcatttaatgattttcagctttttttctttatagattgctctcttaactcttctttaattttccctctttcgagttctgaatttttctgtaaaaattaattttagttaaactaaaaatgtttgacaaaaatactaaatttcagagaagatccaacggctagaaatcaactgcgtaagattggagttatggagatgctcgcttactttttggttaaaattagaaatattattttgcgcaaaatatttattttctctttccgtctggtcactgaaagtctctgaaaccaccaccaaagagaaaaacagttctttagagagcatcaaagctccgaggaagagagagagagacgctatggaagcattgaactaacacaactctaaatttctaatttacggtatattatctccttctttgttattgtttttgtttggtctgaatcggacttggatttagaacggagatccgacggttactccaactttaaaccgactttattttaagacattgttcgagtagtgttgggttttagaaggatctctctgtttgggatttgttgtttgactctgtcggtgttttttgtttgtttgttgttgtttttcattttggaaagtggattttgagtcatttagggttcttctttttcagtctgagttccagatctggtaatttcacttcataaatttatatggtaatcattgttttttttttttgttctttcttgattcttacatttagttatcattaggtttatctttataagcttattattagagttgattagaacaagataatgtgttactctccttttttgccataactaattaatgaattaaaagacttcttcattttgactattgtggtagactagtagttgccatattcacatactaatattggcttgtgttgtttcttgggcaatgcaggtttgttttagttctatacattatggggaagtctacaaaatggttgaagaatgtattgcttgggaaaaaaacttctaaatctagtggttccaaagacaaagaggtaacgcttttgtaagagaattctatattatgtatgtgatgattaaatactgtatgtggagaatttggatcataattgagaaaacagtgatggttttaggctaccaatttgcttatg

SEQ ID NO: 27033 - DNA, 3000 bp, Unknown
  misc_feature (1)..( 3000): 2750-1469P.txt file - cDNA_ID_2729623; gDNA_ID_2684256; Annot_ID_193134
agcttcagggaccagtcctttctggaccatccgatggataataccggcagcctcataaactctatcctccacacaaagacagtttattacacgtccaagcgttgtgagagatggaataaacccattttccatcatctccagtagaaacttgtaccccaaattgacatttcccgttttgcaaaaaccatcaaccataagccggtatgtgtatccatcaggaccaagacaacgatcaaccatctcttggaaaagcttttccgccatagtaacatttagcttctcagtgaaagcatgaatgatgatattatatgttggcgttgaacttgaaaccttataagcctcttccattttccggaacagcgtgtatgctccatccaagtctccgtttttgcagaacccgtcaatcaacgttccaaatgtaaccgcatctggattcacactcttgtttttcatttcctccaataaccccaaggcttcatctagtttgcggtatctacatagactctccagaagtatattaaacgtgaataagttaggggcacaacctttctccaccatagttttatatgtttccatcacatcttcaaactttgaagttttgcagagaccatttaacaaagagttgtaagtgtacacgtcaggatcaacaccgttgtccaacataacatctaatatctcaagtgcgttttccattttcaactgtgtagaataaccatgaatcaaaatgttgaaagtaaatatgtcaggaaagtaccctttggagatcatgactttaacaagaccatcagcatcagaaacacatcccatcttgcatagtccatttacgagtatgttaaaagtctgtacctcaggaatcaaacccttttcagacatttcattcgccaactgagcagcctctagaatcataccctggttagacaatcccttgatcagtgtgttgtaaagaataacgttaggctttatccctttccctaaggcctcattaaataaagctaaagcacggtttgtttcaccttcatgacacaacccgtcaattaaggagcgatatgtgaactgatcaggcacaaatccattgaaaacagcatcacctacaatcctttctgcaagttgtaccatcccacctttgcaatatccagctattagtgtgttataggtataactatcaggctcaagcccttcattcaccattttccccaagtaaacctctgcctcctgaaacttggaattcttacataagccatatataagattgttatacgtgatgacatcaggtttgggtccctgttctatgagacaacctaccatacgaaccgcaccatcaagctcacctctctgacaaagcccttgaatgaataaattataagtaaacagattcggtaaaacacctcttttgataaccttatcaagtagtttttcacactccttaacatctcctttcttgcaaagaacacgtagaagcttgttgaacgtactaagacaaagcgaaacacccgatgcaagcatcttcccaaacaactcatatccctcagccttaaaattctcctcataaaacccaccaaccacagtacaataagcaaccacattcatctcacagccttgagaagacatattattaagaagcctcaaagcagcgtgaggccgactggtcttacaaaacgacttcatcctaatcgtaaacgagtaaacatcaggcgtaatacctctatcccgcatcctcatatacaccttgtgagcttgatcaaagtaaccactatcaaccaatacactcataatagcattataagagaaaaccgtaggctcacaatcataaaaatccatcctttcaaacacattaacagcttcttgaactttccctttcctaccataattcttcattgccccaacataaaccccttcaagcatatggttaccaacattctcccgcatatccactaaaacctcttccatggcttcgaattttccataatatccaagcttttcgatgacactgcggtaagtagataaagtatgcttgaaaccaacctcttttctcatcgaattgaacatttctagagctttcataggatccttctgacattttataactgcagttacatgtttcggaagcagaggaggacccataaaggagaataatcgtaacctaatgaaaatactttgaatccctaaaatccagatacgagagaaatagcaaagaagacagaagaaccctagacaattctcagcggagagaataaaatcgagaaaaaggtagatcctttctcaatgaggagactcagaaaacaactggagaaatcaattacaatggatgaaagtaaagttcactgatgagcttcaacggctacaacgctgggagtagtaaacccatcgcactcggcgaagaagcgcgtaggaataatttgaataaataattatgttttctttctagaacacaaaagttgatatggccgagttggtctaaggcgccagattaaggttctggtccgaaagggcgtgggttcaaatcccactgtcaacatttcctttttttttttgtttttttcttctcaaattgttttattttaaagtggatatattttgtcaagttataatattttagagcaataatgttttagtggtcctgaagtaaaatcatacgacacaaaaagggaaaaattaaatgacttaatccgcttttattaaatcaactattttaataggataacttaaaaaagcaagtgaagagaaaattctaaagtaccctaatattgatttttaaattgactaatatacccttatttgcttcagctggcgcaacctgattggtccacataaacccctcaaaaccctaagttcccttttgcccactctcacacttcacaagcataaactctcatcgggagctagggttttagctgattctcttgtgacggaaccacaagaagagaagagaccaaaaggaggagccaaaatcctctctttctttggaattagggtttcctcaaaggaagtgaactgaaaatg

SEQ ID NO: 27034 - DNA, 3000 bp, Unknown; identical to SEQ ID NO: 27033
  misc_feature (1)..( 3000): 2750-1469P.txt file - cDNA_ID_2729623; gDNA_ID_2684256; Annot_ID_138108

SEQ ID NO: 27035 - DNA, 3000 bp, Unknown; identical to SEQ ID NO: 15040
  misc_feature (1)..( 3000): 2750-1469P.txt file - cDNA_ID_2729657; gDNA_ID_2684256; Annot_ID_193119

SEQ ID NO: 27036 - DNA, 3000 bp, Unknown; identical to SEQ ID NO: 15040
  misc_feature (1)..( 3000): 2750-1469P.txt file - cDNA_ID_2729657; gDNA_ID_2684256; Annot_ID_138096

SEQ ID NO: 27037 - DNA, 3000 bp, Unknown; identical to SEQ ID NO: 15031
  misc_feature (1)..( 3000): 2750-1469P.txt file - cDNA_ID_2729691; gDNA_ID_2684256; Annot_ID_138085

SEQ ID NO: 27038 - DNA, 3000 bp, Unknown
  misc_feature (1)..( 3000): 2750-1469P.txt file - cDNA_ID_2729695; gDNA_ID_2684097; Annot_ID_190170
acgtgattagacacttttttgaaagtttatccgtaattaggcactttgaataattaaaattacttgttcaccctcatatcgtcggttttctataaccaaacaaatcaaatccattttcactaaaccaattcagatttacggagcccacgattttgtagttgcctttgtgatttcaattttttttccagaatcgtaaaaatccaaatccaataaaaaatcctaaattacaatttctcgaaaaggggactccggcgacgggatatccatctcctccgtcactgtccaccaccagtgcttttcacactacactctcgtttgctctttcaaccgtaaaacaccaaacccaattctcttgtcatttcctctaaatctctgcaatttcttaaatcgatttggatttactttgcctgaaaaacccttaactcgtaccgtccaaactcaatttcaatttcaattgaggttacttcgagaaaagttcaagaatttcggaacaactaaggtaaagttttgtcatgttgacttcggagatcttgttcgtaattctgtgataatgtttgataacttctctgcccagtttgtttgaaattcagtacttgaggttctctattggacagaagatgaacatatggactacaacacttggacaatccgtaatggacaaccacacattttgtttgcagcgtatgtgtcgttacaaaattgaaaatcattgtccacgactatacatgactgcacaacttggtgtttgataattcaaggaaaaagccacataaaggttctatttcttaatcttatattttggaagaaatcaaatcattgatttaagaaataatatgtaagcttggatgctagagctttagctgatcgtatggccagatttggatattgatttaactttgttcttactgctactcaacattgattgtctggtatgaagttgtaaaagagtaatttgacttatccatttgtgttgatataattagtcattataatgtgattagtcaatagaaaaccttagagtacataatatcaaacttttaactttgttaatttctttaggcgagtgggtgaatacatcagttagagttgcttttgcacatcatgtgatcatcgttattgatgtcatccaaagaaatctgtccattcatacgcaaacatgaaggtactgttgtttggacactccttactttaaaaccccaccttagtttgcaagtcattacttgactaatttactttaaaaacaaaatttaggttatgaacattgtgtcagatcctattttcgatacaagtgggaacatccaagtcaacaaacctacaatggggtaccaaattttattaatcgtctgctccttgttacgttggacatgattttttggatactttcttacattttttccttattgaaggtcgtgtttcttatggtttttctgaccatcttcatttctacttcaactcaatcagaacattttggagaggcttcctgcatcccaatcattgaaagatccccaaactgaaaaaaaattctaatgaacaaatgaaggtctacatgtacactaaattatctttatgatttacagtccttgtaatattggacagtattttttggatagatatttaaataatcttcttattggaggcatcaatttttgttggtgatctagtatttgataccagttccaaacttgaccaacatactcaatcatctcccacacataatcccaaagttgggttatctccaatggaagtatttcttatcatctacaactgtctatcgatgcactctatctatcatttgtaaatatgtcttagtaaagtatcataatttcacatcatcattatcatatctttcagtataaaatctctctctatcaagatatggatctacacgatgttgtggataatcaggtaggcataaaactaaataactagaacatgtatatttattattactgaaaagcagtcaatttttactacaacattcttagttctattattaattgtttacagaaaacataagattgctatcaaagtcttgttagttatgttgtgaaaccaatctctgaagacctaacataacgcaagttagttatgtttgcagataaatccatcttctcgtccgtttaattgttatatgatcggacggtcattatttctcattaacttctatttaaactgcaaatcttaacacgttcatttgatccgaattaacccattattctacacgtgtttggtacacacaattacaaaccaaaaccaatgaccggttattcttcttttcgtgattcagtttatttggggtataatggtctattttcactccaaaaacaaggaaaagtgtctcaaccttggaaagtgtctgttttgtctaaactttttttcaaagtgccttattacggaacattccctattaattatataaaagatagaaaaattattttcactgctcaatccacttcttaaccaacctaaatttctgtagctactcaaataagaataatatcttatgtgattataaatcaaaattaaaaagttttttcttacgtaataattatgtttattacgctaatattaacatgtaataattacaatcaccagcttcatctttaaatcagattctctaatttttatgtgttgagatatagtatatatatatacacatttatatctataatagtaaaacaatctctttctccttaccaatcacactgacacgtattagtccttaacaaacacaaaaaatcctaagctcatgtgtattctttaacaaacttatgtttttttatttaattttttgtatttttctttaggatttgttctaaaaaaaaacttctaaaactatcaatatacatgttctaattaaaaaatatatatatttaaaagtcaccattggaaatgtccttactgtccttacagatgagtatttgagattactcttgcctgtgccctgagaattttttcctttgggactcactgagattactactaccaaatccaacaatg

SEQ ID NO: 27039 - DNA, 3000 bp, Unknown; identical to SEQ ID NO: 27038
  misc_feature (1)..( 3000): 2750-1469P.txt file - cDNA_ID_2729695; gDNA_ID_2684097; Annot_ID_137065

SEQ ID NO: 27040 - DNA, 3000 bp, Unknown
  misc_feature (1)..( 3000): 2750-1469P.txt file - cDNA_ID_2729730; gDNA_ID_2684098; Annot_ID_137076
tacacttctatctcaccttgtttcctaataacacagcgcttcacacccacgcgccgtcgtcgaaggtggcatttgaagtaaacccttgttcgaagaaaggaaaatctaagcagcacagtcacacacacaagttatgaatcatgaatgacataaaattggatctgagttttagaaaagaaaagacagtgttgagtggatcatcacgtgcgtgtgacacgcgtcgccgtcatcagttttggagtgggacactatcgttgaaactaaactgatctacgccattcattgtttgtgtctctctgacgaaaggactgaaatcccgagaaatcagtttttgtttcttcatataacacactttgacttttcgagagcgtttgagttatgattatttgtacaattacagtcacgtcatggtcaacgcttcgacttaaatcggggatatttccataccacagaagatgagaacggtctttaaacaatgtcgtgacggctctaaaacgcaccaccgtaacatccatgtaaaagcacgtcttcttgatcgctagatacaatatttacacaatatacattttgtcacgtgaatcggtgaatgtgatttttttttgtaatcgattagtatgaccatgcacaagattaacaaaaaaaaggaggctgggaggctggttataaaatattcgtaagatagctactatacatgttttgtcatattgagccacgcataagatgaatacagctacatttatttttgtgtatccatatttttatcctgatcgtgttttatcttcgtacgtttaccttttttgaattgatcaaccggtctaaggaacattcggctctaagctatcgacaagtttctttcattcatccgagacacgtatgacttggaaatgttgagttaagtctgacgtgtaaatttgtggttgtcatattcgaaaatttagtttcaccgcaacacgttttataaagtttatctttttccattttagatttaatcaactgtgtttataaaataaaatcataaagttacattttagtaaatcaatgcggcaacattctgatttcaagacatactaaaagtctttacgtaaatttgaattttctattcattataatttaaccaaagaaaagaagcttatgcagctttggacggtttcgaatgatttacagaaatacatggtatcatatagcccaataaatacaaacagacatcgctggtgccagaaaaagtggaatagtcgatttgaaacttctaatagaaagaaagacattatgtatgaaaaattgcctcagaaaaaaacccagcacaatgtactgtatatgttttatatatgtatctatagaaggaaaagataaagttgaaaaatatttcctccaaaacatttgcagtgaaaatatatagatttgccatctaaagtcttttaatatctcttattaaaaaaaaataagttaatgtatattacatcaaaatttatctagtatacaatttcctctaaaataaccaataacatgaaataaaaatgttaattaaattaaaatcaaataattaatttcataatatttattcaaatttaaattaaacagctagtaagaccaattaatttaagcaataaactaaaataaatgtaatttcaaaacctatctgacaaaagaaatcattaattttgattatttaaatttaaatatattttaacaactttaaggccaaaaaatttataattagttgtaacacatacatagtcaataattataaaccaaatcataaaatatatgaggcacatacttttttatttttaattgagattttatatactagattatataatttttaagtggaaattgtttttaaagagagatatttgttgggttacacaaataattattggttttaagtgttttgcattttgcaattactagaaaacaatatattttagagtatctaaagttatattttgcacataattaaattttatataattgggattttatatactaaagagtgtcagagtttttaagtgaaaacatattttagacagggacatattttgaattacactaataataaatgcttttgatactttttcattttataattattagaaatcaaatatatagatactttttaattataccatgatttcaaaattaattatgtggtaattactaattacattgttaactaaaaaaaggaaaaggacataaacacatacaaacacaaaataaagtttttgcacatttttcatgatgattaatagtcagtcttacaaatatatctttcctcttttcaaaataaaataaaaatcaggtggattctcaatttgacaattagagtggaaaacactaattgaaatttctgtaaagagaaagaaagtatattcgaaaaaaaaaaaaaatcagaagaagaagaaaaaaaaggctggcaaaaaaagaagaattttaaagtggctaagcagaaaaaagaaacaaaactaaaacactttttatttattcctttcagcagtcgccagctggcattatacgttttgccacgtgttattttctcaatgaccagtaatctaatgacgtggcacccacttgcttcacgttccacttcttctccataaatacagctctcacaatctcttcttcagctttctccattttcacctctctctctctgtgttttttttaactccgtttaaattttccgtctgaattttacaaaggaacactaatgtcagcttttgacggcgttgaaaatcaaatgaacggtccagattcatctcctcgtctctctcaagatcctcgtgagcctcgctcattattatcatcttcttgtttcccaatcaccctcaaggtttcacttaacaaaactcagattttcaatatttaattcgtattttctaaaatttaaaccacactaatctattgttgactagttttgactctgttcttgactctgtttttttattggtttcttgatattagttcgttgatgtgtgttaccgagtcaagatccatggcatg

SEQ ID NO: 27041 - DNA, 3003 bp, Unknown
  misc_feature (1)..( 3003): 2750-1469P.txt file - cDNA_ID_2729738; gDNA_ID_2684098; Annot_ID_190196
gccttaagcttaaagatccaagcttttggatataatatctagttacatgtatatatatatatatgtgtttgtatatttataggtatatagtatattatcgtgtgcgtccgtgtgtaacatcactatcattacccaacatacagcttttggaatttcattggacccaagagccattcgatccctttcttataattaaatataacgaagcttgtaataggctttggttttggtcccaaatacaaaactttaaggttgtgccttgtttgtctaaggttttcgcaatagcttccaaaaagacacgcttatgtttatatacatttcattttccttcatatcattctcttctctgccacttctccatcttgtttcttactcatttctctaacaattttccaaattaaatacgtttataggatcatcgtggatggataatataatgcaatcgtcaatgccaccgggattccgatttcatccgacagaggaagagcttgtgggttattacctagataggaagatcaattcaatgaagagtgctttagatgtcattgtagagattgatctctacaaaatggagccatgggatatacaaggtaattatattaatcaacgtggattttgtataatgattatcattgattaatcctttgcatggaatgacagtaaattgtctagttatgacataagttttgaaaaccaataatatgtgatgaatttggcatgcgaagtgattgagagagcctactttctttgacttgtatgttcataaacggagtgtgaaaagaatttcacaaagaaattaagagatgtatagtacaatcataaatcataatacttcttttgaaattaaaccggttgaaaagtataatcatatcacatttagaaattactttactacataattttcaatattctcttttttttttaaagaaacataaaatttctaatattttgaccttttgtaatgtaagaaatttatgacattaatatttagttttacatttgcagcgaggtgtaaactagggtatgaagagcaaaacgagtggtacttctttagtcataaggacaggaagtaccctaccgggactaggaccaaccgagccactgcggctgggttctggaaagccacgggtagagacaaggcggtactatcaaaaaacagtgtcatcggaatgcggaagacacttgtctactacaagggtcgagctcctaatggaagaaagtccgattggatcatgcacgaataccgtctccaaaactccgagcttgccccggttcaggtatacacattgaaagactctgactgatacgcgattcactatcaaagcaatcatccaaaaactactaataaatagtacaatacatactccgtctatcaaacctaagcaataatgttacatgtttgacgacatttgattcaataatgtttaaaattaaaaaaaaagaaaaaaaaaaaaaacaggactaaatcaataacttgttatctaaataactttatatgtttgtgaactataggaggaaggctgggtggtgtgtcgagcatttaggaagccaattccaaaccagaggccattagggtacgagccatggcagaaccagctctaccacgtcgaaagtagtaacaactactcatcttcagtgacaatgaacacgagtcatcatatcggtgcatcttcatcaagtcataaccttaatcaaatgctcatgagcaataaccactacaatcctaataatacatcctcatcgatgcatcaatatggcaacattgagctcccgcagttggacagcccgagcttgtcgcctagtttagggacgaataaagatcagaacgagagtttcgagcaagaagaagagaagagctttaactgtgtggattggagaacactagataccttgcttgagacacaagtcatacatccgcataaccctaatattcttatgttcgaaacgcagtcgtataatccggcgccaagcttcccttccatgcatcaaagctataatgaggtcgaagctaatattcatcattctcttggatgcttccctgactcgtaattaaaaaaaaacacacttctatatattgatttgtattctatgatttaattgttccatctggaaaataacatttataactgtctatttgtaaaagaagtttgtgtttattacgtagaaatttgttgttgaatttcacaaaggtggatttgttttttttaaaaattagtccctttgtttttctattcatttattctgttgtccaaatttgtaactcatccatacattctacccccattaattttttatttgagtggtggcctattagttaagagaacttgtaatttctgatcagactcctaactttcaaaatttcaaatcaaacctcaaatttgtaactcaaacccaaaatgcacgatttgaatcgaaatcatatgttcaccatgtatataattaattaatgtacgtattaatatgtactacaaatgtttacatgtgaagaaggtgatgaaaaaaaacaaaaaaaaaacataaacacaaaaaactttttattcatattttttaaaaaattgaccatgatcaatattgagcatataataataaataaaaaaaatgagttaaaaaataaatttaattgagaaaccctctcatcgagtaagaggtttcaattaagaagtccaagtcaaaaccttctgatccacgtagaaggtcttaaaagccaccgtcaaaaatctacaaggccaacacgtttgccgttaaaaattaatttctaatttcttcttcttcttcttcgtacgttaattaaaatctgaagaaacaaaatcgtgaaatcgatctctttaagcatcatctagggttcatcactgaaatcaaaaatgcaattaaatctctacaaaatctctcagatctaatcccagatcgttgttggtttcttctccgtaaaccaatcccacatatgaattaaagattcgatctcgaaatcgttggcttttgttgttgttgcattcttcggtgatg

SEQ ID NO: 27042 - DNA, 3003 bp, Unknown; identical to SEQ ID NO: 27041
  misc_feature (1)..( 3003): 2750-1469P.txt file - cDNA_ID_2729738; gDNA_ID_2684098; Annot_ID_137074

SEQ ID NO: 27043 - DNA, 3003 bp, Unknown
  misc_feature (1)..( 3003): 2750-1469P.txt file - cDNA_ID_2729742; gDNA_ID_2684098; Annot_ID_190195
tatgattagagaaaggaaaattagggatcgagggacatttatataacgaaaaaagtgaatggtgtgaaagggttaatggatagatggtcttgggatttgaacaaaaggctctctctccctcgcgcagtagacaaataggcatgcatgtgaatctgactccaaatcaagtgctacctcttttgccttttctatttttggtacccaatatttgttataattttcattttttctgttttatatatccattctcctcgaattctgtgtctaccttgtcatatgttaagtattttggatttttctttggactagggtcaaagagttactgagatgacgtcaccttaagccgaaaggtgatgaggtaaaagaaacgacagccaacggctttgggtggacccgtgcaagcggataaatcagatgaggaacaaatgattagttatgtgatagaaacaggtctgaatcttacgtgtcttacattcgtaatgacacgtgttaaggacggcgccaccaaaccagacaatgggagctggattgctggagaaagacttaagaacatatgaaacatattcctgtgttttactcttctccttattttttctttcataatataatgttcatatatacacgattcctgatgttttaatggccaatgttcgttcctttaggtttactataaatctgagtttagtttaatcatttaagaaaaagttgagattgtggtttcgagtggatctagctagactcacattataaaattagctgcggtggtatattgagtgagatttacgtagtaatccataaatgtacatgcgtgtaaatcctttcgacgttgagatgtttatatacttaataagttaatagtaatatctctttgacaaaaaagttaatagtaatatctcaacaactttgaggtattacgtgtcttatctatgggttaataagacatactaaaactaagacacatttcatcagtacctgatccagcaaacatataggaatatatttctgtagttcttcttcgggtttacaaatccagtcctttttaatccttgaattgtgaatttccaacaagccactcacaatttataactaggttttattactgaaaatatcttacatggtataagaatttatggtgtgtagctgaacatagtgttttaagaaaatagattaattatattcaaaacgtaatttttttgtcatctgattttattgataatacatggaatcgtgttatgaaatattatccaatcaaactgaagtttttggatatattcggaacatccatttgacctaattacgccacataaaaaccgttaatctaaaggatttgtcttgtgtgatgtaataataactaatgagcaatagacaaataaaaaaaaggtttggcttgtgcagtaactgccggtaaagtggagaagattggaaaaactttaaacaaaaaattgcggtaagagagagagagagacgccgaccaaaaacaaaccgtagatgtctatcccacgcgcaatcaaacctttccttcatctccttcttcttcttcttctccttcttcttatatcatcattttgcacccacatgtcacacacttaccatatacatataattaagcatactcgcataaacctatatatacactctaagatttctagctggtccatatgcatgtgatctaatcaaaagccaaactctccttgtctttgctatattaacaatcatttgatccacaccaccagagatttcaatcttcctctccttcttccttttgctactctcttttagatcgttcttgtgaaaatcgcttgcaaataacaagcccttcgtccaatctttattagctcgtaagtttcaccccattgctccttttagggtttttttgttttgttgctgtactcacttcatgcacgaaccagatgatgatacatcggcgtttgtgttttacgtttttattattcaaaaatacatacatattacatatagtatcgttttgtatcgtttcatatcttgaatagtatacatgtgtgtggtcctgttgagattgacccacaaatattagagtaaactggggaattgaaatcaatcatggtggggatttcggaatctatgtgtgtttctaagatattattgtttcttggaaattaattgttgttgcaccataatataatttatattatatagatagtctaggaaaataactcaagacaaagagtgtgtaacacactccaacctcagtgacttccacccgtcaagcttttcggctacatagcctttatatacgattattttacatatagttacagatatatacagtactgcttgtatatttttggtcttataatactaccttatgtcattatatatagtacatattatacaaagtttcaatcttttcatttataagcatcgttcggtatgtagaaggcgaaacaaacccttaaacctaatatttttttctggtccaaaaactttctctatcaagcttttgcattttttcttttaaaatagtaacagctcctccattgttgggtggtcccataaaaatacatcataaccatcatcagcaacatataatagcgatagccttaagcttaaagatccaagcttttggatataatatctagttacatgtatatatatatatatgtgtttgtatatttataggtatatagtatattatcgtgtgcgtccgtgtgtaacatcactatcattacccaacatacagcttttggaatttcattggacccaagagccattcgatccctttcttataattaaatataacgaagcttgtaataggctttggttttggtcccaaatacaaaactttaaggttgtgccttgtttgtctaaggttttcgcaatagcttccaaaaagacacgcttatgtttatatacatttcattttccttcatatcattctcttctctgccacttctccatcttgtttcttactcatttctctaacaattttccaaattaaatacgtttataggatcatcgtggatg

SEQ ID NO: 27044 - DNA, 3003 bp, Unknown; identical to SEQ ID NO: 27043
  misc_feature (1)..( 3003): 2750-1469P.txt file - cDNA_ID_2729742; gDNA_ID_2684098; Annot_ID_137073

SEQ ID NO: 27045 - DNA, 3003 bp, Unknown
  misc_feature (1)..( 3003): 2750-1469P.txt file - cDNA_ID_2729746; gDNA_ID_2684098; Annot_ID_137072
caaatggttcaagaagatcgaagaaggaaagaggagcagcgaggatgagatcatcttctccaatatcggtaaatatgctgtgagttcaagcacacgccattagcacacacccacgcctaaacccttggtgtgacagttaaaattttataaacaagagatgggttttgcctaaattggtcttacaagcatctataactaaaggtttcaattcaagatttgcattattttttattgaatcttctatttttcttccttagttggtttgaagctttaaaccctttgaaaaacaagaaatggagactttgaaagttgacgaaacacacatgttttattattagtcaatagtaatttgatgaggtggagttataacattgatgataatagatagtgacaacgttctatgttcatcttttcctcaatcaatcactccaccggtagatgagatgtcaaattgaaactgcgttatgtcactctcattactctttttgtatacgtttctcatcttatagctaatccgaaaccaatttatttaaaactttataatagcataaaacctcttaacttcaaacaagtttcaactttcacatatcttatagggatcatggtaaaaatggttaaaagttaaacctgatttgcattacaaacagaggattacgtgtataagggctataaactatatattacctaaaaaagaaaactagagttgacttattgagtaataaaatcgcctataaatatcgtaacgaaagaaaaaagatcccaaaagagacaaaatattaatttgttaccatagttacagatttctttcgaataatcaatcaataaacaaaactctttctctacaagtcctaaaatccttagagaaagaaagaaataaaatagaataagagaacttgttgtagcagttgaagcagaaaataaacagagtaacgaatccaacatcacaaaacaaaacacaaactgtgtgttgtctctcttctttggtcttctcttcttcttcttcttctttttctttttaagtatttttattttttggtttcttgatctcagaaaaaatggctctgaatagtgtctcctctgaagaatttaccttcccatcgctagcttctcatgattcttctcaccattccggtcttgattcacctcctttgtggaaacactcaccggttacttcctttcgccggaaagattacgactttggtttggcaagattagtcattggaaaagacggtgatcatgatcagaggaagagcttctcgtacgtggagatgagaagtcgttggatcgacgacaaagaagaggagaaaatggatatgttatgggaagatctcaacgaagaattgcctccaagaagtcagagtttgagaattgtacatggcggcgacggtggagagaagaaaacggctttgtttcccgatgagagctctgccgtggccgtggggtgtgggatgaagttatcgaagaagacaaagaagaagacgaatctgaacgttttggtgttgatgagggttttgaagaagcttattgtgttgcgaagttcgtctcagaggtcgccggtgaaaactcatccacggtgattgatctccaccgtgataattgtgaattggggggttattttgtggaattcagaacttacggggcttttgtggagaaaattggaattgtctgaaaatgatttatttgtagtttagtttgggtggttcacaaaaattaattttagggtcctaaatttttaataacacatctgaagtcttttttggttcttcgtcttgattcatttgcctgttccgtggggtttggtttgaatatgtatgaatttataagatgaaaaatgaaagaggtcagaatattagggtgcaataataaaggaaggtaaaaaagatttgtatttgaaacattccacttgtatatgatatcactttttaaatgtgtgataaaaaagatttgtaacatctaaaacttttgggggtctttattttaaaatgagtctttatgaaatacaactttagtctgaatcaaaaaggttttctaaaaatgtcaaaatgtttgtagtcttgtacacttactcactagtcacttggttcatgccacgaaccgacctccctaaaatatttctccaatttgttttctctttaagttcacaatagtagagttttgttttctccctaaaagttatttcgaagaaaacatgttttttctttttcctttttaataaatcgaagattctaaactttagtctataatccctcgaaccgaaaattagaatgaattttaatcctcatgggaaaaaaaattgtacagtagtttgttcttctctttatactaacgtgaccaactacttcttggtttaaaacaaacatgtttaaattatcaatttactaaaactatgattctatagtaacatgtgaaatgagaaacatttcaatgtcaaaagtctggtccaattatcgaactacataaaaacattgtaataccttttatatatatgaagaccaccattaatgtcgacagaaaagatagccatgaatcatattcaagcatcaaaactgatttaggtatctccggaatcattgggagaaaaattaggtgaccttcatatgaaaaagatagagtagacttttttatttaacactacttggaagactttcttacctactctcactatagacccgattcgtcagaaccgggttttggattcaatttcggataacccctaaattggtacgccaattctcagtcactcggaaaaaaaaaaaacctcacctttgtccacgaatcgcaagtgggtcatagaaaaatcgaagcttttgactgatctcagtcactttagtctctctgcccacgacccttctcgtctactaagggttatctccatttgcccctcttcctgacaactttcaggtattacttgtcaataagatgtgaaattgagtatgtgcatcagatgtttcctctagattgaactgattccacctttgatatgcgcagacacgaaaactgatg

SEQ ID NO: 27046 - DNA, 3003 bp, Unknown
  misc_feature (1)..( 3003): 2750-1469P.txt file - cDNA_ID_2729754; gDNA_ID_2684098; Annot_ID_137070
gttaccacagtgaccgatgcgagtccagattcggtcgccgtcgtcctttcattgccgccggagtcgcactcgtagccgtctcggttttccttatcggattcgcggcggatatgggacatagttttggagataaactcgagaacaaggtaaggactcgagccattataatcttcctaaccgggttttggttcctcgacgtggctaacaacaccttacaaggaccatgccgtgctttcttagccgatttagccgccggagacgctaaaaaaacgcgagtcgcaaacgcgtgtttctccttctttatggcggttggaaacgttttgggttacgctgctggatcttacactaaccttcacaaaatgtttcctttcacaatgacaaaagcttgcgacatctattgtgcgaatctcaagacttgtttcttcttatccatcactctcctccttatcgtcacattctcgtctctatggtacgttaaagacaaacaatggtctccacctcaaggagacaaggaggagaaaacatcaagtctttttttctttggagaaatctttggagctgttagacacatgaaacgtcccatggtgatgcttctaattgtcacggtcattaattggatcgcttggtttccatttattttgtatgataccgattggatgggtcgtgaagtgtacggtggaaactcagatggagatgaacgatcgaagaaactttacgaccaaggagttcaggctggtgcattgggattgatgtttaattctatacttcttggtttcgtgtcacttggtgttgaatcgattggtcggaaaatgggaggagctaaacgactttggggatgtgtgaatttcatactcgccataggtttggccatgacggttcttgttactaaatcggctgagcatcaccgggaaatcgccggtcctttagccggaccgagcagtggtattaaagccggagtatttagtctctttaccgttcttggtatcccattggccgtaagtacacttttgttttgtccttttgttttcttcacaattttaggtttgtaaccgattcttttttcttgtgtaattattatgacagattacttacagtattccatttgcactagcgtccattttctcaaccaattccggtgccggccaaggtaattttcatttatttaaaatgttaagttacaaatctaatggtcagattctgataatgtaggacatattagcatttattgagttcaaacgtttgatttgaataattaattgaaaagattatgtttccaattttgtgtattattgtatctatctattcaaaagtaattctttcctttattgcataggagaaaaaagggagtaaatatttcctttgtaacttttttcaaagtcttttcttgttaatgtggattatctaccaagtttatctatagcatttaatagggtgagatttattaacttaattatattaattaagatttctatgtaatctgctcttatattttcattatccataggtttcatcattcatgcacctaatgtttgaaacgtagacagtttcttttgcaacataagtaaatatttaaatttaacgaaaacgtgtttctttttacaggactttcattaggcgttttaaatatagcgatttgtataccacaaatgatagtatcattctcaagtggaccattggacgctcaattcggcggtggaaacctaccttcatttgtggtcggagcaattgccgcggcggttagtggagtcttagcgttaaccgttttaccttcaccgcctccggacgcaccagccatgtcaggggctatgggattccattagttaactagtttttacatatatatgaatttccatctaatacagtattgttgtgcaaaagtgaaacccccaaaaaatggataaagtgagaaaaataaaccttggtcgtctgtcttttactgttctttagttttttttttttttttacttttgttattgatgttagtcaatttgttttcgttttgtttggacgttaataaattctgtgtttgactacaatttttttactgttttttttgcttcggtgaaagaaagatccaactagagaaaataatcccaaaacaaaaaatcaacattcaaaatctgagctcttttctaaaattaaattcaaaacatgaacttattctatgtaattttttttttttgttttaaagacatggccaatgggcctttcactcttgtcaaacccatttgagtcgggctttagtcataactcattttaaagattaaggaatatgaggccagttcttttgtcacaatcctagtttaagcttgtctcacttaccaattacgtctctcaaaagacaaattttaaaaaatctataatctctactctctaacatgtatatatatatgataaactcgttggctattacaacttttaaatcacaaatggcctgattggaaaaaaatgtatacataaatgataagtttgtcactgattaatgcgagaaaattctaattatttgcattaataaaattagcgtagttaggttttaaaaaggtttatacaatacattatacatatttataaatttaaatgtttttaaatttatattaaatttattttattatttagataaatcttaaataaaaagaaaccaaatattatttgttattttttcgtgaaatttatctttttaatatattttttattttagtaaaaagaaggaatggtggcgccggaaactgaccgtagggtcagtctaattactctctcagcgtttctctttttggtcctcaaatcttcaccttcaagatcttcttcgtccctcgatctccgatttcaaatctcgtttctccgttcaagcaacctctctgaattcctagtctcacagcaggaattagtactcggcgaagcgatttctgcttcgatctctacatctgaagttccgatctgacgaaatttagggttcgtctgggtcgaagttaaataggaaaaagatttcgaattggcttgagaatg

SEQ ID NO: 27047 - DNA, 3003 bp, Unknown
  misc_feature (1)..( 3003): 2750-1469P.txt file - cDNA_ID_2729758; gDNA_ID_2684098; Annot_ID_137069
gccgaggatcaccggaaaaccgccggtgatttagccggaccgagcgctagtgttaaagctggagctttaagtctctttgctgttcttggtatcccattagctgtaagtacacttttgtgttgtcttgttaaaaaactttttgctttgcttaaactaacattaatcgattcgttttttattatttacagattactttcagtactccttttgctctagcatccatattctcaagctgctccggtgcaggccaaggtaaatatatacatctttaatattaaagttactaaagttacaaatatgtgggaccgtaactattatattttggtttcatccaccttatgcaattataacataggtatttaaattgtttttgtgatgttttgatttacaggactttcattaggagttttaaatttggcgattgtgataccacaaatgatagtctcactaggaggtggacctttcgacgccttgttcggcggtggaaacttaccggcgtttatcgttgcagcaattgcagcggcgattagtggagtattagcgttaaccgttttaccttcaccaccaccggacgcacccaaggcaacgaccatgggaggattccactagtttactattttttttttttaatgaaactcatcaaatacagtattactgtgcgaaactgcaaaaacccaaataaaagaaaagaatggataaaatgataaaatctaataaaccttgggtcgtctgtatttcacccttttttagttttttttcttctttttttataacttttgtcacttattttaatttgaaatagaatgttttttttttttgcccttaaataagatttgtgtgttgagtacaattgtttactgtttgcttcggtagaacaaatatccaactagaaagtaattccctctaccctcagaaaagaaaattttgataataatgtatggcaattcttttatatatagggaacaagttgaacaatttatgtagtttagaacggtttaggcgataaataaccattaataataccagttaaattaattaatatgattaataattttaaaaatacttattaataaatattaaaacaattctcatgtaagtacataaaatataaacctagaagatattaaaatattaaatattaaataagaaaccttaaatattcttgcaaacaactagtccaatcaatatgacatttttgtattctataaacacactgtattataatataaactatacagtatgtttcttagcacagtatgacacttaacaacttgatgatttatactaggcaacaaccaatgtttttgaagatcatacaatatcatttataagtatatcattttttatattacaaaatgaaagattgttttggtcaacaatatgcgggcttgaaccctcagtggcgatacaacattttacatatctatatataagttttttccaccaatttttagaatatttgcctaaaatataagaatgtttatactgcttaattagtgagtaagaacaggtagtccatatccattttatacaattcggactcagttgtcacgacttcgttaattggcaactttggcaagtatgttgatttcagaacacatcgaatcaacaaaggacagtctattgtgttaagttgcaaacgatcaaaacaaggctggcgtaacataaatgaaggcctttgggctaaataaatataatagatacatcaaaatacaactttcaatttggacagacttgaagccttctataatttggcctggatcaatactccttttaagactaaggtgtatcagcccagtcttttgatttttgattattttttttgtaaaccgaggcaagatttttgataggcaataatcctactttataatacattcggagtgtgtattcaattaaacattttaaatgatttgtgttaaaataacaaattcagcctcacaatttaatgttaaggatacaatcatatcatcctttcattacctcttatgcaatttaccacaaatgattgaaacctcttattcaactagaggttttgaaatattgatatatatatttggattttgtaaataattaaggtttttaaattatgtcatttaattatttgaaaaatgagggtaaataagattttgtacatgactttttttaaggagttttaagtttggcaattgtgatactacaaatgatagtagtgtgacagtgtcaccttggattccattaattttctatgttcccttttcatgaaattcatcaaatagacaaatacagtattattgtgcaaaacccaaataaatgaaaaggtaaaatctaataaaccttggaccgtctatttcacccttcttttagtcttcttactgactttaatttgaaatagaattggtttttgtttttggccttcagtaaacattgtgtgtaactaaagtcttcttttgttaacaagaaagacccagaagatcacactagagaaaataagtcctttttatggcacttctttttgaattagatgggggaaaagttgaattactttactttatttttatttaggtaaataaattacttaatatgacttcaaaaaatagacattaaataaaatttgttaaacttaattaatttgatatttgattaattcaaattacttagaaacattttaattctcatgtaaagatactgaccaaaaaatattaaaaagtatatactactaaaataaggacgtccgttaaattataaaccttaaatattcttgtaaacaactaagtttagtcaactaaaaaaaacaaaacaaagaggagttaatgacctactgccacgtgtcctcacattgtcatgcactcacacaaatgagatttctaactgcgtctcttatctggaaaataatctcattccttcttcttcctcgcctataaatacaactccaatgtctcatctcctacatcacaaaactaaatccccactttcacaacaaaaaaactcttttctttttgtctgctcgtttttcttttcataatg

SEQ ID NO: 27048 - DNA, 3003 bp, Unknown
  misc_feature (1)..( 3003): 2750-1469P.txt file - cDNA_ID_2729762; gDNA_ID_2684098; Annot_ID_190189
ccctgaaactataaggaaatgaattgcattgatctagtgtccactttgttttgcgggatacattgattttatttcataaagtggatgtaatttttcttttacttaatgagtcatgagtaaataaataaaaacgctacaaaaagtgatgcaaatgttttgaaccttgttaatgatgtttaatgctgtatatttggctaaggtcatataacataacatttggtgatttataatgatttatattttggtaactaatttctcatgcatatatcacatatagaaagatatgtctatatatatagaaagatatatatatatatatatatatatatatatatatatttgtactccatttgagggtattttctgataaaatatttcatagtcattcacctaactaagttccagaatttggttatctacctaattgaatcttgaattaagattgattatttatatataaacgaaaaagagtacgtatcctatggatatttctataattccaaaagataatttaggtggccttaataattactcttgcttcttcttcttctttaatattttgtatatatttttctgtcattaatattttgaaattatgtaatgtaccatataaacttttgacattatgttttcagatatattcttctgtggttacactaatattgatttgttttccgaaaggcattcaaaaaaaacaaacgaaaatagagagaaagtcgccctcgaaatatacgttgcttttcttttcttatgtgaagaatagcttcttcttctttgtgtctactataaacactaataatctttttttaatatgattatttttatttatttttgggcaaaatgtttttttaatatgatagtattactatatatttaggttgatcggaagttatatcctctctcattggcctatttttgactgttattttctctatccaaatatatctatcaacattgaatcctgccttattttatcgattcccaaaacacagcttaaccaatttggttttatttcagttaagttttcggttcacaaccaatatgttggagtgttactaatcagatagacgggtaaaataaattgtttgcacaacctattcatatagttaaaataagcgaatagagagataattgaaactacagtgaaaattaacaacaaatggaacatacgtccaagtagttgagacttgaggagtagaaagacaacgtaaggagttgacaaacatgtgagccatttgagactaattcacagacaactaaaatccaagagttatactagtaaatgctttggttattttaatatattttcaagtcgtctgcccgttgaaaactggagaaaatgtatatagagtactattcagctcgaagacaaaaatgtagtgactaaaattaaaatgcttaattggtcggataaacaatccaaaataaatgggaaatgagttttgagttgcgatcgtatcttgcattacaagaagcaaattttagggttaaagtttctgtcacataactccgttacacaattcgcttaattttggatatttgacagaaactaattaatatgtaaactttaatatatatattggattttaggcaatttaacaactaattagtggcggacaaatactgattattttccctttatatatatatatatatataattgaatgcttctatatttgttattttgttgtcacaatgtttttttttttaaaaaattaaatttgatatccttcagtccatcactagttaacaacattgccaaaatatactatcttttcgtcgaaaaaaaaactcaccatacaaactaagtgatttttcagtagtttgtgatcaatgcaaaaatgataaaattaatttaatgtttacaaagctgatgttgggtcgaaagacttggacgtcaaggataacatttggttctaaaatatatggacgtgaaagatagcataccatctttgggactgttcggataagaatgtgtgtgcattagttttggaaagtgtttggccactcggatctttttgtgataatctccagactatgaatattgcggaaatataatccatgatcagagaatatttggcgatgcttgatccatgaccgtaattggagccggatatgttatgatttgatctacaactattattacgctagataagccaattaattatggtaggtgatcgtgaatataacttcactgtccgaaaaagaatagtgtatatgttgccctgaaccatctatctcattaggtgctatgaactagtgagttttaagtatagagggtgcatataagtcgtttttccatcttaaatcaaagacatttcttagtatcttctagatatttcattcttttagtaccatataaattagggatttggacaattcacaattatttattttaaaccaaacaaaataattgttctccgataatcagatgtgacttatgtgatatagtacatataaatatacacactgtttaaatttgtctacccaatcggaatcatagaaactttattgtttacccaaacaaaacggtactgaatatcggaactttttttattaaaaaaaaactgtgagagagaaattgaatcaacgtccaagtcacttgatgcaagaaaaaagcgaaaccaattaaattcccgtaaaaacagaacacaaaagaacaggagagttaatgttctaactgacacgtgtccctaccttgccatacactcacacaattaaaatttctaactctgtctcttatccgaaaaataatcatctccaagtgtaataagaaaatcaaaataaaactctcatttcttcttcttcctcgcctataaatacaactccattctctcatctcctacatcacaaaacaaaaacctcacttaaaaaaaaaaaacagaagacagaaaaaaacaaaaaaaaaaagaaaaagaaaaataaacaaattttcttttcttttttttcctctaaagtttctattttgtctattcgtgtttttttttttacttcctgataatg

SEQ ID NO: 27049 - DNA, 3003 bp, Unknown; identical to SEQ ID NO: 27048
  misc_feature (1)..( 3003): 2750-1469P.txt file - cDNA_ID_2729762; gDNA_ID_2684098; Annot_ID_137068

SEQ ID NO: 27050 - DNA, 3003 bp, Unknown
  misc_feature (1)..( 3003): 2750-1469P.txt file - cDNA_ID_2729791; gDNA_ID_2684093; Annot_ID_137025
aggatgaatggatggggaatcttctggtgagttaacagaactggtttttgatgatagtgatttgacatgggaaatggtaagccaagtatctgaaaagctaatgagtctaactattgtactaaaggcaaaagaggactagcatcgtcttcaagtagaactgaaaagggaagaatacagcctcatgctccattccaactccaagaacatcttagagcacgtcttcaactccaatggctttgattgatgaggatgatcaaattgaagaggatttcgaaaaagaagataaggataatgaattgtgtgtggaagatgatgaggaagagttttagagtttcagactcaaagttttatctttgtcggattggattctgtttgttttcatttttatgtttcagagtttcaggctcacggtttagcttttgttggatttgattttcttttttcacacttatggtttaagtttttcttgaattttctttttcagacttttggtttaagttattgtttggattttctttgttatctcttttttagactcacaaattgttctaaaatggctttatgtatcaatgaatacaactaagctattgttttttaagttgcacctcatacggcaaaggctctaaggctcatgcgcctagactcgaggctcaaacaagcacctcaacgccttacctcaccttgtgctatttaaaacacagtttaagcctaccttgaaatagtcaaagttgttcatcagggacaatcgagtgagagtgatatattacaatacaatggtgtccatatccttgtttctcaagtaagttcggtttcccatttatacctaacaactacctccctcttgtgaatctggttgaacctaatcaaagctcttttggcgagttctgtcaatggcctatattttcactcggcacccagactttcaagtagatttcttgccaaagtacgaggatcttgagtcagtgtacttgactctcttcttctacctcatcaagacactaagcaagtctccataaagcttgtctgcggctgaactaaccaatgctcaaaaccaattgacagaactgaagaaattaggcttcaagctagactggttgaagtcaaagctcaaggaagtttccttggagaggaagaaagcagttcccgacagttgtcatgtcctcgaagaatgggtcagaaatgtgaaacttactttgtcggatctccaagttaaactggacaaggacaagatcaaatatgttgatgttgctgctagagtttttttgtttgggttcatcagttttcttacctcttctcaatatgaaaacacttaactcactagctatgtgttttttttatggatttattgcgtggacatctttcacattcaacataaacaaggaggaggattctctgattcacttgttgtcacttcataaacatgattcacgcaccagctcactttccatttccttgctctttttttttttctttcttttaattcaaattatctatcttttggtgattcgaaatggagtttggtatttttgacacttgtatcaatccgctaaaaaaaattacttacattcttcttaattaatagattctacaatctctcacgtaaagtttacgctaaccatgaatctctctactagtttcttattgaattacttccctacctatagctgtagacattaggtatctccatgatttcaaccctagaagaatccataacaatattaagtaccttaagtattttgtaaaattttcttgtgattgaaatagatcttaactacttcaaatttttatataagaatatataatatttttgaaattttattcgctatatattatgtttggaaatttgcgaattcgaaattacatattatgtttacacaagatgttgttgtgtctggatggacaaaggaaaatcgcagttgcaggcgcaggcgccgcctaaatcctgacgacattggaactaaaggtgcttaaaaggttgattgaaagtgaaacagacatcaacattaggataattcatgtattttttaaaagttgcatgataaagtggaaaagaatcgtttttcactctaaaaaaacttttcaaagagaaagaaactttttcgatcaaagtccaaatcgccgtccagtttttcactccggctttgtgcccggacaaggtccggttccttttccagcatcgatcggctttcatggcggtggtggctggcttgagagcggttttcctttgcttcgatttaatcattttggtttttaggaataataccctcgactttatttaaattcaagttcaaatataattttttcagccataagtccggttccttttccagcatcgatcatgatcatattttttcgacgttgatttcgttcaccagaatcagagtccaagcaggtagaagacgatgaaaaagattccaacatgtggcattgttatagcctaatagcttgtcacgtttgtgtagagaagagaatctttcttttttttttcgatattgaagactgggctttattgggctttcatgtttgtaaactcaatgtacttatagttgaaacaaaaaaggaatttattataagaaaaaaaaaaagatgttgttgtgtccgttcaactaataaaagcccaagtactttttttttttgttgcgttggttatttatacatttgcaaaaaaggtcccatatttatttcctttttcatttcttatcaaacttttgacaacgatcatccaggtcccactctgcttcttaaccattctttaccaaaaatcaattgttctctccctctcagcttccgaagtcttcatctttctcgacaatatctaaaccttgtctgagaatcatttgaagaagatctttcatcatcaccgatccactttctgatgtaagaaaactacagtcttccttccttctcacttctcttcttatcttgctttcatggttagggcaagtttgatttaagcttatgtggatgatagaactagtgtttatacttgtagttaggtcaatg

SEQ ID NO: 27051 - DNA, 3000 bp, Unknown; identical to SEQ ID NO: 14308
  misc_feature (1)..( 3000): 2750-1469P.txt file - cDNA_ID_2729795; gDNA_ID_2684103; Annot_ID_137103

SEQ ID NO: 27052 - DNA, 3003 bp, Unknown
  misc_feature (1)..( 3003): 2750-1469P.txt file - cDNA_ID_2729823; gDNA_ID_2684103; Annot_ID_190309
aatttctcacaattaagatttgtgtttacctacaaaataataataatacataaattagcgcataaaataagttcaagtgttattcgattttattatgaccaaccagtaaaatagaacaatacatcaaataaagagatacaattttttttacctttttaagttttttcattctttttttatttatctttttaacagttttgtaatcgaatctcaagtcgaattgtatttaccaatacaaaattacatgtgttttatttttaaaacatgagtcaattttaacttatgtcaaaaaaaatcattaggctaatcgagtatttaataaatagatggctaatcgaaaaatattatgctgctaaatatagattattctgtgcaaatttcatcataaatcgaatattttgtgtatatattaggctaatatctaccaaaaggaattttgaacaagtaaaccctagttgatatcgtgctaagctcttaagcgaagatacaggtcaaaatcgcggcaaagcatcggtggctcgagtgacccaatccactccaccaaacttctttgggaatcccaaaggttgctactttactcctcaaatgattcgcaagctctgttcttcattctctcgctccatcatcttccccaacaaacccatcttcatcccccgctcttttcctcaaccactccgtcactcttctgctctctcgtactcctccttgaaaatgaccgatacccatatcccaggaaaccctaattcgtcccctatccaatctcccaccaaacccgagtcgcttcgttccctcgaatttcaattgggttcttctttcaccgccgatccaatcatcccgccgccgaatcagatcgtcatcgttattagcggtccaagcggagttggtaaagacgcagtgatcaacaagcttcgtgaggttcgtgaaggtcttcattttgttgttaccgccactagtcgtccgatgcgacctggtgaagttgatggtaaagactatttctttgtctcgagagatcagttcttgtcaatggtggagaacgaagagcttcttgaatacgcacttgtttatggagaatacaaagggattccaaagaagcagattcaggaatttatggccaaaggggaagacattgttcttagagttgatattcaaggagctcagacgttaaggaggatacttggtaactctgctgtgtttatattccttgtggcggagagtgagcttgctatggtggagaggttgattgatcggaagacggagagtcaagaggagttgcttgttagagttgctacggcgagagaagaggttaggcatctaaagaactttgattacgttgtggtgaatgccaaagggaggcttgatgatgcggttaaccgcgtggaatcgattatcgatgctgagaaatctaaagttcatcaaaggattgtcaggatttgatgtgcagaggtactctacttgcttgcttgctttaaagcactccactttccagtgtctgattgatagaaaaaccttgacttgcttagattcaattgagcaataagctttggaaagttcgatgcactagtactaagtttttatgggttttcataatgatatgctgtcgcaatgacatcatttgttagagaatctagataaccacctggctaaattagttgattaggcatgtttcaatatgtcttgaatccttgaaaacacttccaagtataaggaagaaaggtagctgctttgctgagggagtttcttgcaaaagttcataggcttgtattgtatagtctgtaagtttgggaactatgttttgggaattgcgggtatacggaatgcacatttttctgtaattgttaacgttttcatgatggtttcttgcagatgccattgtctgtaacaacatattggcttgctgtctccagacacggatccatcgaagaccgagacaattttattatcggtatgtgcggcaacccattccaaccaaagatttagatgaatcctggcccctgactacagagaacccttttgattaagcatcgtatctttatacatagctacatggattatgttatcatcatacagtatgtgattcatactcgcattttgaattttgttactttataaatgtttatggagcattgttcataataatttaagtatcatctaacttttcaagatggcggctgagttccaacaatctcggaacatgtttattgtatccaatttctaaaaccagtaagtaaattgatatggtgataatgatgttgacccaaatataagccttactgccttagagcttgacacagaaagagttatgccggaagcaagtcatcaccataaaccataatcaagttcctctcaagaaatattttaatttacgattagttcatacattattctagtgcattacgtcaactcttaatttccagtaattccatgacctatgtgaacaagaaaatgctgacttcaatatccgcttattataatgagtttgacgtatcttatgatgttaatcaataattgctaaccgaattttagattaataattttataaaatagctttttgttttgcttgtttaggacaatcaatttaaggtttggtttgtacgtgacacaaggcaacataaagggtttaggggcggcttttctagaacacaagtcaagcaacaggcctctcataaagtcaatgacagaaaattttcttcttgataattatttacaaggaagatcgtcttcttaatataatgattggatgaagaaaataacaccttttttattattgtttgacagaaaataaaacaggaatttgaagttacactttcttgcactcttccttttcgatttttgcctcattgttgtcttcttctccactctttgcctttcttaagtcttgctgtctcttatacacacaaatagatgcaacatatatatataatcatgatgccttttctcatttgtatccatcatcaacgaaatcctaattaataacgaaaaggagaattctcgtaaggtataatg

SEQ ID NO: 27053 - DNA, 3003 bp, Unknown; identical to SEQ ID NO: 27052
  misc_feature (1)..( 3003): 2750-1469P.txt file - cDNA_ID_2729823; gDNA_ID_2684103; Annot_ID_137095

SEQ ID NO: 27054 - DNA, 3000 bp, Unknown; identical to SEQ ID NO: 14303
  misc_feature (1)..( 3000): 2750-1469P.txt file - cDNA_ID_2729831; gDNA_ID_2684103; Annot_ID_190305

SEQ ID NO: 27055 - DNA, 3000 bp, Unknown; identical to SEQ ID NO: 14296
  misc_feature (1)..( 3000): 2750-1469P.txt file - cDNA_ID_2729831; gDNA_ID_2684103; Annot_ID_137093

SEQ ID NO: 27056 - DNA, 3000 bp, Unknown; identical to SEQ ID NO: 14306
  misc_feature (1)..( 3000): 2750-1469P.txt file - cDNA_ID_2729846; gDNA_ID_2684103; Annot_ID_190299

SEQ ID NO: 27057 - DNA, 3000 bp, Unknown; identical to SEQ ID NO: 14294
  misc_feature (1)..( 3000): 2750-1469P.txt file - cDNA_ID_2729846; gDNA_ID_2684103; Annot_ID_137088

SEQ ID NO: 27058 - DNA, 3000 bp, Unknown; identical to SEQ ID NO: 14293
  misc_feature (1)..( 3000): 2750-1469P.txt file - cDNA_ID_2729850; gDNA_ID_2684103; Annot_ID_137087

SEQ ID NO: 27059 - DNA, 3003 bp, Unknown
  misc_feature (1)..( 3003): 2750-1469P.txt file - cDNA_ID_2729858; gDNA_ID_2684103; Annot_ID_137085
catatcatgatttaatgaaatttactttaattcttaaattagaagttctgaaatagcattaaatacaaagtagcaacctaaaccttactattcgtagactgtttactcactcagtcaataaacatttgaaccgtttaactaattatgcattagctctcatagaacaaaagaccaaaaatctataaacatgcatatatacacgaatacgaatcaatgttgagaatctatagtttaagtagtagtcgacactaagaacatgaagatgaagaagcttcttaaagttgtgtttctcttggtcgcttacttaacttgttccattgccatggctagttaccatggttgtaacagggttgcagagaaggcaacgagaatgaatgtagtcggagaagattcaagaaatgagtttggaaactacgaggagaagaagaagaaggcgaatttgtggtcaggtcgaaagttagcttctggtccaagtcgtagaggttgtggccactaaatttttagttggggtaataatttaagatatttaatttcatttctctaatttatgtttgttggtatcgtttagtaatatgagtattttagtgggttcttataacctaatgaaaggatttgaatattcatacgaatttcgcttcactataaaatatatgtgactaaagatttttaattgcgttcatttcattgtgtaaaaagaacaaaatgccccctgttttcatttgctttaccctctatatcttcaatccgataagtagctctctgttttcgcatcacggcatctaatgacgtaatgacaaaaacttaaaaaccttaaccaagaaaaaaaatcaaaagtgtttatttgtataatagatattaggttttgaagtgattaacgtaaaagtgaagaaacggaaggggaaactggagaagggcaaggcctggtttttaggctaattgatctgtatgtcaaaactccgattatggctccgatcaccggagctgtcatgtaaatccataagtcttcaaaatcccatgccaccaccgccggtccaagtgatcgagctgggttcatcgatcctcctgaaatcggtctaaccataccatattccacaaaacgttagcattatacgatcacatgaaataactattttccaatactttacggtgataatggagttttaagttaagtacccggtaataagcactccaagggaaatgactgttccaatcacgaaccccgtcaaattacccaactgcacaaaataacatataaaattaaatgcatataagttttctaatcagagagtttgattttttttattttctctttggaaagaaataaaatttcataattaagaaatagcatgtaaatgtcacattttaggtgttattcttattagaagatatttttttataacaagcggactagaggagtaacgaagatcgatttggtcacttacattttgatgaggaccacaatgcaacgcggaggcgagaaacacgacgatgctcgtagctatgagttcaacgaaaaatgcagaaacgcagcttaaagcaggttttgttgccataatgtcagcgtttactccgtacactgacaccccaactaatgttgccgccgttgcccccaatgtttgcgccgttatatacaacggaacctggcatgtgacacaacattccaaaaaagaattttcagttttcataaaaaataatttgtaaacgtccaaacaaaagattaagttttctcgtctcatcttcgttgataaatgaaaaaaacacattatttgatcttggtctaaacgctaagataaacaaaaacaaacgatcaagaccaagataattcaactacaattcttagttggtcaaacgccgtgttgagatggatgcattatacctgagaccacgggaatccgccaaagacagcgaaagcaatggtgatggaagggttaagatgggcgccagagatgtgtccgatggagtaaactacgaccaccacagataatccagcggtgacggcgtactctagcaatcccacgtggccgccggataattgggtactgcttatgaccccacacacactgaacattagaatgaatgtccccaccaattccgccattacctaaacattagtccggagatactattaattagcattttatttctatacaaacattttaatattttcaaaaaaattatttgtaattatggacatagccaattctttagtttaacacaaaagtattgtgagatattaatcttgttgattctatgattttgtgtatatatgaagcttacaatgcgtaggggattgagatctatatcataagggagacatccgaaaagcctttgtctcgagggatgatcttcatctctcaaagtagatggagttgagccagcttcttggtcgactactcttgaccgtgcctcaccattcatcttcttaattccttcaagatatagtgatcaagaactgaggaaagtcacaatcaaggtggcttgatccgctttatgaatgatctaatggaacaaaaaaagagagatagagagaaaaacgcaaagaagatggaaattaaagagtaattattttatttcaacaaaaagaagaattagtagagtgctgctatattcctttggttaagcagtctgaaaggagaagagggtgctcaacacttttcttgtgttcaattttcacttcctacctaccaatatttcttaatgttaatttggtgatttctaagtcatctatttattttaatcatcttcatttcatgtgtaaaaaggttgactctcttaaatcttttcacttaaaaaaacaaacaaattgttgcaccagccgggaatcgaacccgggtctgtaccgtggcagggtactattctaccactagaccactggtgcttattgattcatctatccgaactaaactattaaatattaattacgaatctagggttatttatctttctgattaagagttttcgtctgtacaagtggaattttgaaaaaagaagcagagagcgatg

SEQ ID NO: 27060 - DNA, 3000 bp, Unknown; identical to SEQ ID NO: 14292
  misc_feature (1)..( 3000): 2750-1469P.txt file - cDNA_ID_2729868; gDNA_ID_2684103; Annot_ID_190292

SEQ ID NO: 27061 - DNA, 3000 bp, Unknown; identical to SEQ ID NO: 14292
  misc_feature (1)..( 3000): 2750-1469P.txt file - cDNA_ID_2729868; gDNA_ID_2684103; Annot_ID_137082

SEQ ID NO: 27062 - DNA, 3003 bp, Unknown
  misc_feature (1)..( 3003): 2750-1469P.txt file - cDNA_ID_2729878; gDNA_ID_2936559; Annot_ID_194375
cacatagtgaaagcgtgcaatgcttataaaaatggagctcttgttggatcaatggttaaaggcagagactgagtccaagaacgtgaacaaactagccagagcggctccaagaagtttaggaccgatgtagctagctttatgaagacattggttgatgaattcgttaatttagagcgaaaccaaaacgaaaaccaaaaccatctgagagcaatgctaacaaagagacccagagcaataaaacaaaccttaggagaagcagattatcgaggtgagccaaagctgccaaaccagccaaactgtcaaatattatttaaatataaattttgaatatttttttaggatgatctatggatatatgatatcaaatttatggtacaccgcaagacgatattttataactaaatatttaaaattttaagttgtatttgttttgctaatattgtttaaattgtttaatgtttaaaattgtgtaattgtattttaattgttaattttaggatttcacccgtagtataccatcccgtattaatattcactcaaacccgtcaattctaatatttcatctgttgtataaagtttaaatatttataatatttaaacttcttataaaagaatcgagatgcatctgttgtatatgttttgttaatattgtttgcgagatgcatctgttgtataagttttgttaatattgtatgttttgtttagtatttaagattgtataattatatttttgattcttaattttagaattttacccgtaatatattattctgtattattattgatccaaagatcgtcaatatatgattttatcagtagtataaagtttaaatatttataatgtttgaatttcttataaaagaatcgagtgaacttcagatcatataagaggagcttctctcataatattagatgagaggagcttcaaacaacatgtactgaaatttaaatttaatccaaaagtaacctgatatgggttaaaacggaagtcatatgagttgagataagtttgaaatcaaagagtttgaggcatcgtgggagatgatggattcagggaaagtttgtggccgaacgttttcatatgcgaagagacgatttctttctctatgttttaggtgacctggctaggtgtaggtgtggcatcctcttacataattttcattttgcttgagagacctaaaacaactacttttattagtaagagatatagattattcatgttaataaataattaattaattactattcataattttgaatttaatttttgcaattaatatttatattaaaaccaatttaattaattttatagaaaaatcgtgagaaataatttatagggaattggtagaagatagcttttctacaaaacaattgataggaaatcgatcaaaacatttctttctggttccttgcactctttcctacttctgaaattttgtaatgacatctgttttacttaggtttggtttcgaatgaattgctggttttctcgaaaacttttctccaaaccgggttagcggggaaagatatggcaaaaatcatagatttaatgacattactattcctctgcaatttatgagaaaataggacattagtgttctgtttctgacgaaacctcccatatgcaaaccaaattataaggtgaatcaatgataggtttcattggcaaattggtttcaattaaatagatatctcttgaagaagagacaaaatatctatgtacagcttacgcaacaaagctagggacttgtcatgattctggtagatctttacgacaagtaggacatgtgagatgattcttaagccaagcgtcgatacaaagcgcatgatagatatgtctgcaaacaggaaatactctgcattcttcattaacgacataaccactgagacaaatcgcgcattctcttgattctagtgacttttcttcatcctcctcatggttgccttgtccaacaagcaacttcggtagtagggtttcgatcacgctttgtttcagcccgcgcttttttccttctctctcgaaatctggtaaccgtagaccggtcgagatgattgtgtggtaggtaacgattctagcacgttgttggcctctttgtactccgatttcgagatctaggtcgagacatgttcctaagaatggtcgcagaatgcaatcgatgatgacgtagattacaagaatgagagctgaggttgcaatgagaacaacgagcaagatgcagagaccgatgaaaacagcgagaccaagaacgctgatgagactaatcgcatcatcttcttctgagctcatgttgattcttacaagaaacaagttccaagggttttgtccaaaatggtgattttcaggtgacaacctaaagatttaaacagctatatatttttagtcatgatagcttgttgtttaggataaggcagtgaggaaggatttgtgtgtattctaagtttagggtttggtttcaaattcatatctaaagttttctgatttttttctctcaaaattatcctaaatcgttagaaagagttccattccatttgatctgttatttgcacacaaaagtcctacatgttttttaaaaaaatataaattatgttgtggatttggtcaaaatttctttggtgatttgaaaatttttcattttatatttaaaaggtaatattttcttaatggtgatacatatgaccaaaataataaaaggatacatatatgttgttgttttttaacactgatacatatatgttgttattcttttcctttgtgtctgaaaatattttcactttatttttgacaaaatattatttacgcaaaaagtgttattaatccaattagattccataattaagttattcagcaaattgacctttgtaaggaattaaattggtcataaagtctaattaaaccggtccaaaccggttctgttctcgctggctcggccaccgcttttcaacagaacaatctgtctttttctctgtctcactctctcactcactcaccggagcaaagtgatg

SEQ ID NO: 27063 - DNA, 3000 bp, Unknown; identical to SEQ ID NO: 14315
  misc_feature (1)..( 3000): 2750-1469P.txt file - cDNA_ID_2729878; gDNA_ID_2684104; Annot_ID_190375

SEQ ID NO: 27064 - DNA, 3000 bp, Unknown; identical to SEQ ID NO: 14315
  misc_feature (1)..( 3000): 2750-1469P.txt file - cDNA_ID_2729878; gDNA_ID_2684104; Annot_ID_137130

SEQ ID NO: 27065 - DNA, 3000 bp, Unknown
  misc_feature (1)..( 3000): 2750-1469P.txt file - cDNA_ID_2729889; gDNA_ID_2936559; Annot_ID_194377
acttttatggaggagaaagacccaaagttctttcaaggaagagcgattctttgtcctactaatgaggatgtgaattccataaacgagcatatgatgagtatgttagatggtatgttaaactttaaccaaaaactattgtattttcgctgaaattacttaatctcaaatagcgtttaactaaaatttggtattcattatgtttgtaggtgaagaaagaatctacctaagttctgatagtatagaccctgctgacacaagttctgcgaataatgatgcttattcagctgattttttaaacagtgtcagagtttctggattgccgaaccattgcttgcgcttgaaagttggttgtccggtcatgttgttgagaaacatggatcctaataaaggtttatgcaatgggacaagattacaggtcactcaaatggcagatactgtaatacaagctagatttattacaggtaatagagttggtaagattgttctgattcctaggatgttaatcacaccatcagatacaagattacctttcaaaatgaggcgtaggcaatttcctctatctgtagcttttgccatgaccataaataagagtcaagggcagacactagagtctgttggactttatttgcctaggcctgtgttttcacatgggcaactatacgtggcaatctctagagtgacgtcaaaaactggtacgaagtttttttaagccaccattttaattactataatatgtatacgattattaatcttccatttatatcaggtttgaagattcttataacagacaagaaaggaaaaccacagaaaaaaacaatgaatgttgtttttaaagaagtgtttcaaaacctacactaagacagtcatggaaagaaagttatgggattcctattcaaccaggttaataagttaagaaatcaaaaacgtttttcagtttttttatagaattacattcaacgtaatatttggcactaatgaaattatttaacaaattctatctttcagatttagttgcatcaaatcaaggaataaagatgctcaagcactgtcaggacgtgttaaatggaataagagttagtaaaaaaaaattgttggattttcttaactatgttatagttcgaaagaaacttatggttttttaatttctttattactctgattatgtctaatattcgaatatgagattgaatatttctttactatataaatacatgacgcagtcaacatcatccattcaaaataagattttaggaatcaggtgctaacctttatacacatattaggatctgaagttgatgtcgcctgctacttcatgtttagtttgtccttcttatatagatttacactaatccaaaagcttcagctggtgcaaacctgcatttaaatttgtaacagattagagttcttcttaagagaacttacttgataatataacaagttaaaccttaagctgtcttaaacatataagtagctttttcaatctttaaatagagtaattggattctcgaacagcaatatataatatactacttacctttcatgtataatctttaaatagagctattggattttgatggtcgtaagaagccgcagtcataggaagtcatgtaatttccaaacaatttttttttgtcagcattccattcagttttaggtatagttttttatttattaaatttgtaaataattaaattagacataatagaatctagagcctatatatcttcattagaccatattaggcccacgactaaaaccaacacacaatacataaacaaattcaaagttgggccaaaaactatatgttctcaaacaaacaaatcatttttctttccaaataaaatacgtaatatagcttggatacaaaattttcacatttaatataaactaaatattatatatttaatataaatacgatattttaaaacaaagacaatctaatgcaacattaatcattatattcaaatagtaataaaagtaaaacatattatagcatcacttttacacttagataattaaaacaaagtattcaattttattcatgaaaaatattaatgcccgtgctgtatagcacgggttatgatctagtgtatgtataattggataaatataactttttatgatcattaacttaaaaatcaagtttcaaaagcgagaggagcaccaatcttagcagcagtggtctcaacacatttattccacatccgtttgctcctaggaagaatcgcagaagcaacatcttttagctcataagtggcgaacacaaaagtcatcaatccttcgtgacattctcttccaatcttcaaaaagttcacacaacaatcctccgaaacgggcttgtcgtcgatcaatccttccgtcatctcaacattgcatttcgagctcattttatccgaacaatcttggagaaatttgatgcgccgggtcgtcatgtggcttaggagttcgtggtcgtactcgtaagctgcagcgggttcgtatgccaatgattcaggagatattggactgatctcttcttcttgaccaatagtttgataaaccatcgatgtggtggctatgagaaacgttatgagaattgctttctccattttctttttcttgtaatgaagaagaaaagctttaacgaagtagccttttaatggtttattaatttgtaacgagtaacgactagctttttatgtttctggtcattaaaggattgtttgatttttttgacatgtttacatatgttacttacttgattaataattaagtcacatttcagtttatacacattttttcatgttcacgccaaatgcatagacttagaaggggcttttgtgttataatgggcctatgggcctatgggcctattgggccaaaaccattgaagcccattttaagaggagactcacagcaaaccctagcaaaaacactcgaagccactctgtttcttcttcctcctctgtttctttcttctcttccatcgttcgccgttaaggaaaacaaaaatcagagatg

SEQ ID NO: 27066 - DNA, 3003 bp, Unknown
  misc_feature (1)..( 3003): 2750-1469P.txt file - cDNA_ID_2729889; gDNA_ID_2684104; Annot_ID_190373
gtttacggaaatacttttatggaggagaaagacccaaagttctttcaaggaagagcgattctttgtcctactaatgaggatgtgaattccataaacgagcatatgatgagtatgttagatggtatgttaaactttaaccaaaaactattgtattttcgctgaaattacttaatctcaaatagcgtttaactaaaatttggtattcattatgtttgtaggtgaagaaagaatctacctaagttctgatagtatagaccctgctgacacaagttctgcgaataatgatgcttattcagctgattttttaaacagtgtcagagtttctggattgccgaaccattgcttgcgcttgaaagttggttgtccggtcatgttgttgagaaacatggatcctaataaaggtttatgcaatgggacaagattacaggtcactcaaatggcagatactgtaatacaagctagatttattacaggtaatagagttggtaagattgttctgattcctaggatgttaatcacaccatcagatacaagattacctttcaaaatgaggcgtaggcaatttcctctatctgtagcttttgccatgaccataaataagagtcaagggcagacactagagtctgttggactttatttgcctaggcctgtgttttcacatgggcaactatacgtggcaatctctagagtgacgtcaaaaactggtacgaagtttttttaagccaccattttaattactataatatgtatacgattattaatcttccatttatatcaggtttgaagattcttataacagacaagaaaggaaaaccacagaaaaaaacaatgaatgttgtttttaaagaagtgtttcaaaacctacactaagacagtcatggaaagaaagttatgggattcctattcaaccaggttaataagttaagaaatcaaaaacgtttttcagtttttttatagaattacattcaacgtaatatttggcactaatgaaattatttaacaaattctatctttcagatttagttgcatcaaatcaaggaataaagatgctcaagcactgtcaggacgtgttaaatggaataagagttagtaaaaaaaaattgttggattttcttaactatgttatagttcgaaagaaacttatggttttttaatttctttattactctgattatgtctaatattcgaatatgagattgaatatttctttactatataaatacatgacgcagtcaacatcatccattcaaaataagattttaggaatcaggtgctaacctttatacacatattaggatctgaagttgatgtcgcctgctacttcatgtttagtttgtccttcttatatagatttacactaatccaaaagcttcagctggtgcaaacctgcatttaaatttgtaacagattagagttcttcttaagagaacttacttgataatataacaagttaaaccttaagctgtcttaaacatataagtagctttttcaatctttaaatagagtaattggattctcgaacagcaatatataatatactacttacctttcatgtataatctttaaatagagctattggattttgatggtcgtaagaagccgcagtcataggaagtcatgtaatttccaaacaatttttttttgtcagcattccattcagttttaggtatagttttttatttattaaatttgtaaataattaaattagacataatagaatctagagcctatatatcttcattagaccatattaggcccacgactaaaaccaacacacaatacataaacaaattcaaagttgggccaaaaactatatgttctcaaacaaacaaatcatttttctttccaaataaaatacgtaatatagcttggatacaaaattttcacatttaatataaactaaatattatatatttaatataaatacgatattttaaaacaaagacaatctaatgcaacattaatcattatattcaaatagtaataaaagtaaaacatattatagcatcacttttacacttagataattaaaacaaagtattcaattttattcatgaaaaatattaatgcccgtgctgtatagcacgggttatgatctagtgtatgtataattggataaatataactttttatgatcattaacttaaaaatcaagtttcaaaagcgagaggagcaccaatcttagcagcagtggtctcaacacatttattccacatccgtttgctcctaggaagaatcgcagaagcaacatcttttagctcataagtggcgaacacaaaagtcatcaatccttcgtgacattctcttccaatcttcaaaaagttcacacaacaatcctccgaaacgggcttgtcgtcgatcaatccttccgtcatctcaacattgcatttcgagctcattttatccgaacaatcttggagaaatttgatgcgccgggtcgtcatgtggcttaggagttcgtggtcgtactcgtaagctgcagcgggttcgtatgccaatgattcaggagatattggactgatctcttcttcttgaccaatagtttgataaaccatcgatgtggtggctatgagaaacgttatgagaattgctttctccattttctttttcttgtaatgaagaagaaaagctttaacgaagtagccttttaatggtttattaatttgtaacgagtaacgactagctttttatgtttctggtcattaaaggattgtttgatttttttgacatgtttacatatgttacttacttgattaataattaagtcacatttcagtttatacacattttttcatgttcacgccaaatgcatagacttagaaggggcttttgtgttataatgggcctatgggcctatgggccaaaaccattgaagcccattttaagaggagactcacagcaaaccctagcaaaaacactcgaagccactctgtttcttcttcctcctctgtttctttcttctcttccatcgttcgccgttaaggaaaacaaaaatcagagatg

SEQ ID NO: 27067 - DNA, 3003 bp, Unknown; identical to SEQ ID NO: 27066
  misc_feature (1)..( 3003): 2750-1469P.txt file - cDNA_ID_2729889; gDNA_ID_2684104; Annot_ID_137127

SEQ ID NO: 27068 - DNA, 3003 bp, Unknown
  misc_feature (1)..( 3003): 2750-1469P.txt file - cDNA_ID_2729909; gDNA_ID_2684104; Annot_ID_190366
tcttgttctcttgaagtcaaattttggtgatgagattgtaatctttatttggaacatatgtaggatatagtgttttgactttcaaatcagttttggtacaaaaatatgtgtcggtgcgatttcttgtagtggactctttctcagatctgattcaagaatcttgtttcttgatcgatatggagcttcacattgtgatttgaagatctttgtagactttaagacctttgtagataagcgtagcttactacattgttagatctcagattagtggttttttgatgcagaagaaaatggctgaagatctatcattttgcttaagtttcttgggctcttttgtttgttgttttgcagggtaaggttgttccggatggtgagaaggaatttgagcattgtgagtatggctcagacatagctacaagttatggagctggtgcatttgtgcttctcttcattagtcaagtcattattatggtggctagtcggtgtttctgctgcggcaaagctcttaaacccggtggttcaagagcttgtggcattatgctcttccttatttgctggtaaaactctatacttaacacaatctctataatttatgactttgacttgacacatcattctacacttggttttgaacagggtgtttttcttgattgctgaggtatgtttgctcgcgggatcaatcagaaacgcgtaccacactacgtacagaaggatgtggaacatcgaaaaccctcctagctgtgaagtgatccgtaaaggagtgtttgctgctggtgcttcctttgctctcttcactgctattgtctctcagttctattacatctcctattctcgtgcccgagacggttaccaaaccccacattactagtgagtagtgagatccagaacaagaaaagctaaaccctgaatgagtttgtccatttatccactcactgatcaataggatattaaaatttgatgatgttagtcattttgcttcttgcttgtatcacaattgtttttttttgttttcttgtgatgtataaaatcttattaatatagacagctattctacatttcagtatctaagcttattgttacagtgtaagttttatacattttagagttcataacctggaaacagagcttgtgttggatcattcatgtcgagtaacatgtaggccattcctccgataccttcaaagagagagaagggtctatctcctccatgcatttgaccttctgagattaacttctctgatttatcgagtaggaaagacgcgaaagctttagcgcggtacaaatactttgggtttcttgttaaccggtatagagaaagaaacacgtatgtgtttccgctgataccgtgacagattcctactcgtttaagcaatccacggctccacacaacttctcctgcctccattgctgcctctacaaattccttagtgttataaacctgacgatatccagaaaatgagttttgcattgtggttttacttactgataagagtacttcaatcaacaaatgattacctgagctgcctttacaagtgtgagagcaacaccaggagcaccgtgacaccagtgaacaaggcgatctgatttgcttccttcactagataggtaattcccgctaggaaaacggttttgtatcatatagcttagtgtacctttgacatctttgatttcatctggttcaagttccgtatgcatcaaaacattcatgatcccagctaaaccgtgtgcagccccccagtacctcttcccgtgccactcatacatcaatggacaagttcctttattcccgagttgtcttcctgccctgaagatttcctcaaccactgatctctgaagatatagagatatcataaaatcttgaactttcttgagtaagtcaattaaccaaagaaattttataactttattataccattcgttcagatgatatactctcctgaccaatatgcttattcaagaacaaacacgcccacaagtatcctgctctaccatatagcaactcatatggcaagtcactaggaagcctaatctgttaaacagatcaaagttgcaacactcaagcaaagtatagaacaagttatctattttcactagagcaaaagaaactgtaattagtaattacccctcggaaacgggctaagtaacgatcatataactggtcatcacctaaacacttcgctgcaacagcaccaagagcacatacaccagcatagccacatataaatgtcactcgcctgatagaaaccacaatcattaccccgaaatgaattcatgaaaattggatcattgaagaaaattcacttactcagaatctcttgaagctacatcacaagcttcaacattctctaagcatagcttaagatcatcttcatttctagtaacctgataagatttgaacaagagataagctgtcccaagaactccagtatacaagttataatctcgaacacgttttccagatcgttcccatgtctcccagactacctaaaacagaatcaccacacaaacaagagaaaacacaacttcactagactaaagaaaagtcataaattcattataactacataacttcattataactcaaaatcatatataatcaaattgaaaagtgagttactttatctttgatgcttagagcatatctgtgaagcttctctgagaatgatttgtacggaagtgatagcagtttcgtcaacgaatctttacattcggtaacagtttcttcttctccggataaatcttccggtacaaactccggcatctcatttcggaaaaaccgttctcccatatctctctttctctcagcggttgctgcagaggaccgcgaagaacagagactaacgacgaagtgacgaagtgacacatcgttaccattattaatgggccttaagttaagcccaataatgaccggcccatgattttttctctctgtttcgtctctgaccttaaaacacttgctaaaaccctagagaaaacgtctctacgcggaaaaacaaaaaaatg

SEQ ID NO: 27069 - DNA, 3003 bp, Unknown; identical to SEQ ID NO: 27068
  misc_feature (1)..( 3003): 2750-1469P.txt file - cDNA_ID_2729909; gDNA_ID_2684104; Annot_ID_137122

SEQ ID NO: 27070 - DNA, 3003 bp, Unknown
  misc_feature (1)..( 3003): 2750-1469P.txt file - cDNA_ID_2729916; gDNA_ID_2684104; Annot_ID_190364
atcgctgacttcgtttaatatttctcttctacctatgaaatactgacacgtgtacgaatcttagattatattttggcttttatataaaagtcatctcttagcaatattaaatattaaataatagttttaatatttttaaaaaatagaataagagattattgttttggatgctctaaaaactcttagctaaaagacagtataacaaatcaaaaacacatataactcaattattggtctatttatattaaataattagaatataaatataaaattaaaatattattatttttatatttttagaaatttccattgtgtacgcacgtttatgacttgtgagcaaacctcatgagtttttatattgtttattcatggcaactaagaaagcagaatttccaaattatcaatattttattatagttggcacttctgggatctttgaagatcagtaaattttggtttacttgttttgaactactaattggtaattacccaagaacactaaagtcctgactctcttgaaatacaacgaaaaaatacagaaaactaaaaatcttcaaaacaaatgataatacgaaagaaaaccaattaaaatgaaaacaactaaagaagcaactttgacggaaaaagctataagaaaactaatagtgttaccatgaatataccgcaaggcaattggccttcctcaatactttggatatatatgtgtattgtggatatatatgtggatccaacttttacagtttttcgtaggcctgggattacggcaggaaccgagcaaaccgacccgattaaaccgataatttcggttatcggcgaaaaccgaagatactgtaactaaccgttcggcgaatttaattttggtgttcggatttcgggtcgggtcggttcggcaatcggaccgatcggtttattaaaatatgcaatcatatataagcttaaccctagtcaataaccctaatttgttttattttgcttcttcactgcctcttacaaaccaagtgagtccttctccgatctaaaaaacattcttctccaatctattcatcatcacatctcttctccttcatcaattcattatcatctattcatctttatcctctaaaaactcaatcattcatgtctaaatctgtcctcgacgaacttaaacgtaagatttgttcagatttgattattggtgttacttgtttttttttgtagtctcgtgtctttgttctctagatcttaggcttgtgtttatttcaataatttagttgttttctttcttgtttcagtgagaaagcgagaaaccgactcatcaaccttgtttaatgcaatctcgcttaaagctggaataagaaagtttgagatcgccgtggacgaggccgtcatcgcccgagcctcatagtcggagtcgcagccgtcacactacacacagctttttcaaaaccctaaaatttttacaagtctgggcttattaattgtgggttgggcttattgattgtatgttgggttttgttaagtgtattgggcttttattttgttgtatttgtaatagaccaatttcttttttaatgtgtaaaccggataaaccgaagaaaaaaaagaatttggttcatattcggaacatattttttaggctataaccgacccgaacaaaccgacgtccgaaccgacccgaaccgaatttcaattcgggtctattcggtgagatttttagaaaaccgaatttccaccaaaccgaataacccgatccgaataacccggtttaaccgaactcccaggcctaatttttcggagcaaactcgcaatatattgatccaaaatatctaaagagaattgatctctgatgtaaactcatgtaaaaacttcacacttcaaataaaaaccattagtccacccaacttgattaatatgaaaaaccattaatatattttttagtagttcacttttagttatagtttagccgactaaggttacaaactttccaccaataccctgagaatctagacatgaagaagacaagaaaacaattttttatattttggtttttttttttttttgtagtcactacgcatgaagaattgaattcgtgcagtagttatcatttaataagatacgtaattatcatagacttcttctcaagaaatgaaactaagaatagagtcttgacgaaaaaaaagagaggtgagaatagagtctcctccgttgacaaagacaaaactcgacaacgaaaaaaacacaagggaacacaacaaagtaatgtgccaaattcgaaaagcccatgtatgtaatattgattgcgtgcggatgcaagatccgggtttgttgaatcaaaaatactggaaaaatactagcatcggagtgcatcgattaatcaaaaatactagtccaaagatcatcgacaacgtggaccctatatgaggatgcaactcggagtgcctaacctggaaaaccggattccggttaaaccattgcacatttatttacatgaccgctaacggtagatccgccgttttagactggtgactgttatgattatctaatatcgcattcaattccattaattctcattataactcttcttttaatctttcgttaacattcctaattttacgtttcttttcccacaaaaccagtttttaaaaacttaacgatttatatttgtttagggaaaattagtataagagctttaattattaaacaagttatatatgatccctttaattaacccgtagataaagcaaatgaaaccccccacctgcaccacgttattagtctattgacgttagttcatatacttaagtgaaacttatttttttaattaaatcgtgttgtaaaaggcaacgaatttgcgttgtctttttttttttattagtaaagaaatagtcatttcattttctttaattcggtcacaagtctcttgacattttcgtctatatatatattagtattatcaagaaaacgatccatcttcgagggaaagagaaagatcacaagaaaagctctctcagaataatcgcaatg

SEQ ID NO: 27071 - DNA, 3003 bp, Unknown; identical to SEQ ID NO: 27070
  misc_feature (1)..( 3003): 2750-1469P.txt file - cDNA_ID_2729916; gDNA_ID_2684104; Annot_ID_137120

SEQ ID NO: 27072 - DNA, 3000 bp, Unknown; identical to SEQ ID NO: 14312
  misc_feature (1)..( 3000): 2750-1469P.txt file - cDNA_ID_2729923; gDNA_ID_2684104; Annot_ID_190360

SEQ ID NO: 27073 - DNA, 3000 bp, Unknown; identical to SEQ ID NO: 14312
  misc_feature (1)..( 3000): 2750-1469P.txt file - cDNA_ID_2729923; gDNA_ID_2684104; Annot_ID_137118

SEQ ID NO: 27074 - DNA, 3003 bp, Unknown
  misc_feature (1)..( 3003): 2750-1469P.txt file - cDNA_ID_2729978; gDNA_ID_2684110; Annot_ID_137151
atttaacaagtttataatacaaagatttaagtaaactgaatactcgatcgctcatttgattacaggtttggtaatgatctaacgtgactagattgacattaaagctaaatttttaaaaaaacatttgttaatgactacacatataaaagaagaataaaaagaagacaactacaaaaagcttgtgaaccacatattgaagtccacgagaatcgcatttgaaaatgaaacatcaatcagtttgatgtgacttgacaggttacaattatttaaacatggtatatgtcatacacttaagttgttgacatgttccctttaatctgattaaatgatacgactacgaataataatgtttattcaacgacatttgggtagaaagcgattacatctagtttataactatttttaatctaaagtaattaatttttaattacattctcattattataattctttcaaacacacattggtataataataataattgtgtttttttttttatatagaaaaactctgcaaaataataataaaggaagttacaaacacacattggtttaataataattgtgtttttttcttgggttgtcatttgacaactatggttgttgttaactttttttttgataaacgatgaccaaagaataagaaaaccattttctaaccttcgaccgcgtttaatgcgtgtgtctttgtttatagtatttgtaaattgtaaaaatgtcatataaaaagtgggaacccatattaaaaaaatagaagaaccaagcgaagaatctgagcatgtttaattcacgacgcgttaaatgagtcgtttactcgtttaccaataatttttagtttctcatacggtgactaataagattaagactagattaaagaatatttgtgacctgtcatttttttagacatctatgtgacctgcaactttatatagtcaatatcaatggatttagcgtaggtgatcaactatatttgagcatgtatattaattacgaattatatgcattcactaaatctataaagtattacttacatgtcatgacatctgtatatatatatttactccattatcaatacgttttgaatggaccacgcgattgtctagcatttccttgacgtcaatggtcttgtattggttagtcgtcttccatctacgaagggacactaatcagtattacttgaactcttgaagtttgtttctgttgttttgcacaaaaaaaagaagtttgtttctgttgttagatagacattgaaagaaatgtatttttttttgtaatgataaattactatatatggatttgatttataaaatgttagtggtaattttgtttccacaaactcaagtcatggatagctatgtttttgtcacgttcgaatacttgtttcatttgtatgcatgtgaatatggtaaaatcaccaaatgtatggtggatgaatgcccttgtcgcatccaaaaagaatatcccatcgtttacatttatcttattttttcttttcataaactattttgtgatctttaaaatcacataaaatttatcgacaatggataaaagaggtgcacaagagaaaacatacgttggttaaataaaacagtaatatgatcatgagtgacaatacttaaaactgtattcgaatatacttatttcgtttcaaggtgtttaaaaaacatttaaatgcaaaatctttctcaattttatatggtcagaatcgtcagctgactagactaatataaaaaaaatgttcaaagttcgattagagataacaaggattcagaattctcaaattacatgatgttttatttctatcataaaagtaaaaatatcaagtgttttcttgaaactattgttacttgaactgtatagaaaaataaatatctttgaaaaattagaaatgagcagacaaaatctttaataactactaaaaaaaaaaatcaaaagaaaaagacatgcctttcacgtttatgtgcgatgcaagacccacaactcatttatctgaccaatcgaaaatttgtttcctctcttattattccttcttcagaggaggctaatttattattattaattaatgttttttaaaaagtttactttatttatattattttagttacaacgtaaaagttaactttattaccaagacaagtaaacaaatttcttatctcttatggttggcttatattgaagcttttaaacgtgttgaataaattgaatctaagaagatcaaactaacaaaaacattataagttgaaagatgaaatcacaatatagatatataaagtaattatgatcctaaaagatggtaaaagttttttccgacatcttgagattagtaaatattttggttagaatccccaatcacaataaaaaaaaaagtttatattagaacaccaaacaaaattatataaacctcaattttattttgatttctatctccgtaaaccaaaaaagccacacaaacccctctaaccttctagataactttctcgttatgctatttttttaaataacctatccaaaaaattgttgttcgtgtttattttattaattctgttttgtttttcaactatttaatccgatcttatgtgcataaatatccgtcggagttaatttagagttaaagaaatagattagcgtgtgagctcatctctcttaaatctctccgctctaaataagtttgttggaattatcctccgcgtttttgttaaatcgattcgttccgcgaccttatccattttcttcatctctttctctctaacttcgattttcctttttctcgcgcgagaaaatttctggattttgtctgcgaatcacgaatattccagcgtttcttcgtcccgcattggcgtaggatttttgtcgtgtttccgggattcgaagaacagtttaaagagtgaagaagagtcgagaggtgtttcggagtcttggaagaacaagcgagatcgtgttttttttgcatagaatctgcgaggtttcgaagtttctctgtggagtttttgttggatgagagatg

SEQ ID NO: 27075 - DNA, 3000 bp, Unknown; identical to SEQ ID NO: 14341
  misc_feature (1)..( 3000): 2750-1469P.txt file - cDNA_ID_2729982; gDNA_ID_2684110; Annot_ID_190601

SEQ ID NO: 27076 - DNA, 3000 bp, Unknown; identical to SEQ ID NO: 14341
  misc_feature (1)..( 3000): 2750-1469P.txt file - cDNA_ID_2729982; gDNA_ID_2684110; Annot_ID_137150

SEQ ID NO: 27077 - DNA, 3000 bp, Unknown; identical to SEQ ID NO: 14340
  misc_feature (1)..( 3000): 2750-1469P.txt file - cDNA_ID_2729986; gDNA_ID_2684110; Annot_ID_190600

SEQ ID NO: 27078 - DNA, 3000 bp, Unknown; identical to SEQ ID NO: 14340
  misc_feature (1)..( 3000): 2750-1469P.txt file - cDNA_ID_2729986; gDNA_ID_2684110; Annot_ID_137149

SEQ ID NO: 27079 - DNA, 3000 bp, Unknown; identical to SEQ ID NO: 14339
  misc_feature (1)..( 3000): 2750-1469P.txt file - cDNA_ID_2729996; gDNA_ID_2684110; Annot_ID_137146

SEQ ID NO: 27080 - DNA, 3000 bp, Unknown
  misc_feature (1)..( 3000): 2750-1469P.txt file - cDNA_ID_2730014; gDNA_ID_2684110; Annot_ID_190591
atatcttcggtccttttgtttacaagaaaagtggtggaccattcgcaattttcattttttctttacgtcgtaaagatatatacttcatctgctcaaagaaaacgtttgtcttaaacccttctccgtcttggggttttctttggattccatacattacatatacacaaaataatcagttattatttctaacttatgtagcaaaaatgggtaactgcgtattcaaaggcaatggtggttcaagaaaattatacgataaagatgattcgttgataaaagtggtgactccaaacggtggcgtgatggagcttcatcctcccatcttcgccgaattcatcaccaacgaatttcccggccatgtcatccacgactctttaagcctccgccactcatctccaccgcttctccacggcgaagaactctttcccggtaacatctactacctccttcctctttcttcttccgcagccgcgaccgctcaactggattcctccgaccaactatcaacgccgtacagaatgtctttcgggaagacgccgataatggcggctttgagtggcggtggttgtggagtgtggaaggtgaggcttgtgataagtccggagcagttggcggaaattcttgcggaggatgtggaaacggaagcgttggtggaaagtgtgaggacggtggcgaagtgtggcggttacggctgcggcggaggagttcattcgagagcgaattcagaccagctaagcgttacgagtagctttaaagggaaattgtggtaaaatttcgaattatgaataaactacgtttatgttttaatctgtttcacgatttaagcatttaaattagtatgttgatttccgtattcattgaagacttggaacgattatataagtttatcaacgtagatatatttgaaatatcattgttatctctcatgaaacaattaatttatgaagtcgtagactcgtagttagagattatttaatcttccctattcaatgccaaaagtctagaagagcaaaacaaaagggagaaactcttttatttcaggcccaatgacacaaagctggccagaaacagtttaagattaggctaaagttataagtccgacaagcacgagtgctaatatatatagttatatgacgtctcaccattaagggtttaataaattttgaaacacctcaaattaagattgcttcccatgcaaacttccttcatcttctagaaaaattacgatttgtaatacttcaattatatcattttagttttttgtcactaattatcatcaatttatcatagctccgtgccgcaacaacgttcgttttaatcagattatatattactctgctataaactcagaaccatgttagaaaaatgaaaaagacatttcagaatattcattaactcaaaattttaatctcatgatttaattttttattaacaatgttatcctatagcacatggcaaatttgaacggcccttgcgtattaatctattataatctcaaaaccatgtgtaagaaaaaggaaattcagaaaataaccttttgtaaataggcccccacaaaatctacaacatacgtagatacctcctcgcttacagttgtaaacaactgttcatctagattcatgccgtcattcaagtttaaattaatacaataatttaaaattttaatttggatgaatcgaatccaccgtcgtttcctgaataccagataggttaactttatgattagttcgagtgaaccacatgcacaatattcgaatcttagacattcgttgcaatgttaacttcacatatatttgataaacgcttcttgaatcagatcttaatctctttctttctctccatcttctaaggaggttgtggattatcatgtagtatatcattatcttcgcatcaccttcaacaagaacaagctacgagctttaaagtcgtatttaacacaataatgtataaagtctttcttcatcacatcacatacattttttgttgccatcacccttcattcactttttttgttaacactattcgtttctatataaaataaaaataaaatgaggaatgtcttgtccatagagatttttaaggtcgagggtcatcggagcgatgtgggcttgcttcctacattatagttgatatgtggatcccgcgtggaccatatttttacccaatagctacgtgcatggtcccaccgctctctctcacgcactattccgaaattgccataaacaatttcaccggacaaaaagagcaaataatttcgatgtttaataaagagaccattagtatatttgacccaaaaaaaaataaaaaaaaaagagagacattactataacttttattagatgaaatattgcaacattgtatttataacggatctaatttactgaatcatattttttttctttgttaaagagatactgaatcatgcagaaaaatagatagatttttaaatactaggtgaactcatgacgaatcaaccattacgagagatttctggataaaagcaaaaacaaaacaaaactaacatgctaatctaggcaattagtagagcgaaaagtcggcaaaaccaaaggccgaagaagcttgatcgatatacttttttttttttgttttggctggatatacttggtatgaactaagaattaagtaaaaactcatagggagtaatttttcgagaagtgcattcactatgagtataaaacagacattttcaaattattaaaacaagctcttagaggctcatatgtttaattgtaagtggcggctcatgcgaacttataatgaaaacatcaaatattcggaaaaataatactccactgttaaaaagaaaacttaacaaaggaattaaaaatatgagagcaaaagaacacatgcattttctcatgcatgtactattatttatttttttgcagagttgatgtaaaaaatatacacatatatatagacatactttggttagttataaactcgttctattttcttctcctttttctatctttagcaatg

SEQ ID NO: 27081 - DNA, 3000 bp, Unknown; identical to SEQ ID NO: 27080
  misc_feature (1)..( 3000): 2750-1469P.txt file - cDNA_ID_2730014; gDNA_ID_2684110; Annot_ID_137141

SEQ ID NO: 27082 - DNA, 3003 bp, Unknown
  misc_feature (1)..( 3003): 2750-1469P.txt file - cDNA_ID_2730032; gDNA_ID_2684118; Annot_ID_137180
gcattatataaatctctaaataatctcaaagtaaaagcaatcaatcaacctatagatccgatcggccatgttctataaggattgtcagaacttgttgagctattaaaatactccgtacaacttatttgattaatatgggccaaatccgaaaataaatggaccttatcgaatattttgttcgaagtccaggcccactaatcgagtgcgaaaaaacaaaaacaaatgcggtgagcgtggatcgaacacgcgaccttcagatcttcagtctgacgctctcccaactgagctatccccgctacttgttatcgaagctaaaataataaaataaatacaaatatttgtaaaagcgagaatttgtgattttttttggcaataagtagagaatagttgtgttccacgattcctcctctcacgttcgaagaccatttcttgttctttggacgaccatcggcgacagtgttaagtctagagtcttcttcttcttcggcgtagttttttccccggtaagtctccgttcatcgccgaatctgtatccctctttctctttttgtttacttgatcgtctctttcgattatgtatatcgcgatcggagtccgtcatctccagatctgtgtgtatgcgcttaatttcgttatggatgtgacatgatttcttgtgattcgtttccttagggttgatagatctgtatcctgcatgatcgttatagatagtgatctagatttgtcttttttcagatcgaaatttagatctcttattgttaatcatgttgattttattgaaacttgctcatacgaatgagatccgagagcatttggaaacataggattgctttgcgttgtaattgttttctcaagtgatggatattgaatctatgtgattgatgcaaaatgagttccagagaatttataatcctaggattgcatgataacttctttgctttgtgattgttttctaaagtatttattccatatgaatgctgcaattgagtatgcgtttagactgaaggtgttatttgaaaactctgaaacaggcttgaaaaatgggtctatccttcggaaagttgttcagcaagctctttgcaaagaaagagatgcgtatcctcatggtgggtctcgatgcagctggtaagactacgatcttgtacaagctcaagcttggagagatcgtgactacgattccaaccattggtgagtttctaactttgcatactctttctttcatctaattattattcatctctaaacttagtatgtgaaattgacacattgttatgcaatcatctcaagggcttaggttgaatttttcgtatcatggttggattcctagattagattggaacttgaatatatagttgcaagttttttcatttggtttgcatgcggtgtacttctacttgctcaagggcattcatctttgattcatggtttgtgtatgattcatagaatgagtgcttgaattttttagatctgtcgtattgacaatacctgttcttgctaggtttcaatgtggagactgtggaatacaagaacattagctttaccgtgtgggatgtcgggggtcaagacaaggtattgtgattacagtcctttaccagcattcgacaattactatagctaaatccttgattctccatgagctgtcctattttactgaatggcactttcactattccaatataaccttttttgtttgcttgctcatccagattcgtccattgtggaggcactacttccagaacactcagggacttatctttgtggtggacagcaatgatcgtgaccgtgttgtggaagccagagatgagcttcacagaatgttgaacgaagtaaaactcaaacaaaaatctccttctctaatgttacattatgaagcagttggcatcattttgtttcctttttgactgttgcaggatgagttgagagatgctgtgcttctcgtttttgctaacaagcaagatcttccaaatgcgatgaacgccgctgagataaccgataagcttggacttcactctctccgtcaacgacactggtgagccaaagaaaaccaaaccaaatctctttatttaccagatacctatatcgtaacatgaaaagctgatgtaaatcgttggtggggtttgttgaacaggtacatacagagcacatgtgctacctccggagaagggctttatgagggacttgactggctctctaacaacatcgcaaacaaggtatacaactttacaatttttgaaatcgtattagtaagaaattgattgttaaagacttactcaaatgtgtgattaacttgcaggcttaggagaacaacgtgtggtttggtttttaatcgaggagagtcttgtcttcttccttctatcttttgttctttcgtctcaaactcttatcatttcatactctttgttcttcgctctaataatttacaagtttttttttttgttgcttttatcctataattcagactcttataaaatggggcccaatttcggcggatattccaattttttttttttttttgccggcatccaatttctttaggcttctgcatttaccgaatatatttctttgagatggcccaaattcgtgagatgaacttgaaaaatgttggaacagaatccaaacagtattcaaacggtataactaagagaaatcaaaatcaacgtattttgattcctatatgtcatcaagtatactaataaaaaaaaaaactgaatttagaactaatccgcaaatctgattggatgggggcagcaccagtacaaagagctacagttcccgatttaatcataattaaatacgttgtaagaaaaatgaagaagaagttaattaatagtagatctccactacacttttaacaattacatacactcaaaatcttagcggcattttttctaaaggtttcccaaagaaggagagctcactttatctttcgtctctcttcttaggtctagggttctggtggagaagattgtggttgtttcttagggttttctgagagaaagcatg

SEQ ID NO: 27083 - DNA, 3000 bp, Unknown; identical to SEQ ID NO: 14436
  misc_feature (1)..( 3000): 2750-1469P.txt file - cDNA_ID_2730040; gDNA_ID_2684118; Annot_ID_137177

SEQ ID NO: 27084 - DNA, 3000 bp, Unknown; identical to SEQ ID NO: 14434
  misc_feature (1)..( 3000): 2750-1469P.txt file - cDNA_ID_2730044; gDNA_ID_2684118; Annot_ID_137174

SEQ ID NO: 27085 - DNA, 3000 bp, Unknown; identical to SEQ ID NO: 14432
  misc_feature (1)..( 3000): 2750-1469P.txt file - cDNA_ID_2730060; gDNA_ID_2684118; Annot_ID_137170

SEQ ID NO: 27086 - DNA, 3000 bp, Unknown; identical to SEQ ID NO: 14430
  misc_feature (1)..( 3000): 2750-1469P.txt file - cDNA_ID_2730073; gDNA_ID_2684118; Annot_ID_190866

SEQ ID NO: 27087 - DNA, 3000 bp, Unknown; identical to SEQ ID NO: 14430
  misc_feature (1)..( 3000): 2750-1469P.txt file - cDNA_ID_2730073; gDNA_ID_2684118; Annot_ID_137165

SEQ ID NO: 27088 - DNA, 3003 bp, Unknown
  misc_feature (1)..( 3003): 2750-1469P.txt file - cDNA_ID_2730077; gDNA_ID_2684118; Annot_ID_137164
agagagcaaaatagcgttacaagttgcgaacgtttgactcgcttgacgagctttgttactgaacttccaattatatacggccacgtgttagggttggatctggtttttgcctaaatgcttagtttacatgggccaagcccaataagtcaacgatcgatgcattaattatttatactatagttgtggagaaaagatggatttatattctaatccagtttcgcagtcgatccatttgcaacttgaataatggttaggtcatggaataaaaaagctgtattttattactcatgagtaaaatcaatcctcacatgtcattataactcgacctagtaacagcccaccttaatggcccactaaagcccaaatttgaaataacggtcaaatcttaacatttaagttaacaaatgataaattagtagtatatgattaaactcaaatctaacaaggatgcaaatgatcatcgatcatcacatgtcaattaaaatttatttaacgttgtgtaacgcatataaaatgatataattattaatttcactaaaattttgaatttttttttatgaattgtcgggaagcggaaaagtgttaccgcaccacaaaaatcaacgatgacgtaccaacagtgaatgatttgacccccaaaaacccacacagtctctctctctctctctcaatttgggattcgagacgaaaccctagctctgatttttttcaattccgatggaggcgggagagcggcgcaatggcgattcgatgagtcacaatcaccgcgcaccgaagaagccacgtctcgctgggttattaaccgagtcagatatcgactctgagttcgctcaccaccagaccggtgttgccagaatcaacaacggtagcttcgggtgctgtcctggctccgttctcgaggcgcaacgcgagtggcagcttcgttatctccgtcagcctgatgagttctacttcaacggtctccgtcgtggacttctcgcttctcgaactgtgatcagtgacctaatcaacgccgatgatgttgatgaggtctctctcgttgataacgccaccactgctgctgctattgttcttcagaaagttggaaggtgtttctcggaagggaagtataagaaggaagatactgtagtgatgtttcactgtgcgtttcagagtgtgaagaagtcgattcaggcttatgtctctcgtgtgggaggttctactgttgaggttaggttacctttccctgtaaattcgaacgaagagattatctccaagtttagagaaggactagagaaaggtagagcgaatggtagaacggttaggttagctatcattgatcatataacgtcgatgccgtgtgttttgatgccggtacgagaattggttaagatctgcagagaggaaggtgtggagcaggtttttgttgatgcagctcatgccattggtagtgttaaagttgatgtgaaagaaatcggagctgattactatgtgagtaatctgcataaatggttcttttgtccaccgtctatcgcgtttttctattgtaagaaacgtggttctgagtctgatgttcatcaccctgtggtgtctcatgagtttggaaatggtttgcctatagaaagtgcctggattgggactagggattacagttcacagcttgtggttccatctgtgatggagtttgtaaacaggttcgagggagggatggaagggataatgatgaagaaccatgatgaagctgttagaatgggtttaatgctggctgatgcttggggaacgaatctagggtcacctccagaaatgtgtgttgggatggttatgatcggtttaccttcaaaactctgtgttggaagtgatgaagatgctattaagttgcggtcatatctgcgggttcattactcagttgaggttccagttttttatctcggattgagggatggagaggaaggagtgaaagacaaagacagtggactaattactgcgtatgttcggatctctcatcaggtctataacaaaactgaggattatgagagattgagagacgcaataacagagttagtcaaggatcagatgacttgtcaaaaccttcctgcattgtagtaaccaggtatgcttcagattcacaatcttgcttaccatctagagttgattgccatgcttaacatctgttggcttctctgccttcaaaatggtggactgtaaaaaagcagacaactttagatcttttttccatgctctaggtgatgattgcttgatcgtatatgaaccaaaccaattaaggtattgttcttctaaacatatgttttggttttggtggcagatatactttgataatccacaagagcctcattgagactctttcatagatcaactgccggtgtaacaataaggcgatggaagagccacgggcaaagattccggaggtaacatgtattgatgagcttgtggaggagcggcttgcaatggaagaagaagctaaccttgagaggccctctctttttattagtcttttataacgtttaacggctttgtatgattattgcaaataaaatcatgtgcgtctaatcttatcttcctcaaacattctgcttgcgaatctcctgtcgcagttccaataatttttccttattgaaaactttttccctcacattgaaagcatattcatagatatgtaatgacacctaatttatcattgttttgtatgattctggttcgttttcacatctatgtctattatgtctatttaccaacttcaaagttcaattaaaaaagggtcaaaagtactaaattgattccgatgaaacctgtcaggtcaaatcctactaaataataaccaatgggtattcctggagaatttgaaactcttgagatttgagttaacttgataccacgtgtcatccatcaggcggtttatcggagaagaagagtcttaaatccggcgagtaagaaactccgactgttttttgattcagagctaagcaaaaaaagcgtgattgtgttgtggagtagaggaagaagatg

SEQ ID NO: 27089 - DNA, 3000 bp, Unknown; identical to SEQ ID NO: 14427
  misc_feature (1)..( 3000): 2750-1469P.txt file - cDNA_ID_2730084; gDNA_ID_2684118; Annot_ID_137161

SEQ ID NO: 27090 - DNA, 3000 bp, Unknown; identical to SEQ ID NO: 14426
  misc_feature (1)..( 3000): 2750-1469P.txt file - cDNA_ID_2730091; gDNA_ID_2684118; Annot_ID_137159

SEQ ID NO: 27091 - DNA, 3000 bp, Unknown; identical to SEQ ID NO: 14424
  misc_feature (1)..( 3000): 2750-1469P.txt file - cDNA_ID_2730095; gDNA_ID_2684118; Annot_ID_190858

SEQ ID NO: 27092 - DNA, 3000 bp, Unknown; identical to SEQ ID NO: 14424
  misc_feature (1)..( 3000): 2750-1469P.txt file - cDNA_ID_2730095; gDNA_ID_2684118; Annot_ID_137157

SEQ ID NO: 27093 - DNA, 3000 bp, Unknown; identical to SEQ ID NO: 14522
  misc_feature (1)..( 3000): 2750-1469P.txt file - cDNA_ID_2730110; gDNA_ID_2684126; Annot_ID_137204

SEQ ID NO: 27094 - DNA, 3003 bp, Unknown
  misc_feature (1)..( 3003): 2750-1469P.txt file - cDNA_ID_2730122; gDNA_ID_2684126; Annot_ID_191108
tccattgaccacaaaaaaaaaatcctgaagttgtggaaaatttccatgaaactcatgtacccaaaaaccctttatttttttctacactcaagtttcaattaactcttctacgattcctttgaaaattatggtaatgtaggatttcatggaatttaaacttcaaagttcttcgatccccttcgagtctccaatacctactagttccataaaattattttgatagttaagattgacattagatctcactcatatattattacttcattacttaaacatggtatcattccaaaatattatttgcttccataagaacttttgtaattaaaagtcaagacaaaatatgcaactagtaccagaaatactaattcattagaaatggagttcaacaatttgtatgattatcagaaattctaatttattcactagaaatggattcaaacatttaatttatgttgaaaacataacatattaccatcgatctatatacatgtatagtgattgtcacatacacaactatacataacttatgagaaatatcttattctacgaggaagagacgacagaagaagaagagagacgagagatttgatccatgaggaagagcatgcgatcgtgatagtcacgtgcctgttctaaagactcgacctccagctccgccagctgcgagcagagttgctcttccgcctcctccgccacaaccgttcgctgccacaacttaatcatttctgtcttcatctccgccacttctctcgagagctctatgttcctcctccttagctcatccatctcttccgccgccaccgtcacgcatcctcctcggttcgccattaagattctttgtgtaaaaggatttgattgtggttctaactttgtttcttgatttgttgagtgttagggtttgattatgtttctttaataggcgctttgtgtagcttttgcatgtccaggttcaatgtatctgcttcttgatttttatttctcctcacttttgatttcggtcaatattttctccttacttgaaacttaaacatactcatggcttatgtatgcatagaccaccccaaaagagaaaatttactatttttttcgaatgttcaatttttttttttcgtttttttatcacagtttcgctaggttcgatttaaatattttttatatgaaacttaaaccaaattaatttcgaaatttccggtttatccatgttattaactagttttaactttaaaattaataaacaaattgccgtctatacaactataaattgataaatggataaatatatgttaacgtgtaaatagaatagtaattaataattctaatgccgtggtttacacaaattcaatttaattatttataaatctctggtccgtcaaatttgtaataaaaatgtgttggtctgatctctgatgtatgtatgtggtatatattgattacattattgagttagtagggcttgaaataggtgacgtctgaagccaatcactatagtgtttctcactttcttgtgatattgtgagtttgtgacaaggatttattctttagattattaactaacaagttaataatttgggaaaacgctgccgcttaatattgcgttacttatattatgattgaagaactattatgggatatttcacgacatcatacatctacaaccactataaaatagaaaattagtgtactatcaccaaaaatatatttctcctgttccatgaaatttgatgttttagatttttttttgttccataaaaattgatttcttaggttaatattattattatttttattaatgactaatagagagaggaaagaagtagaaattatattattaaattaacaaaaaaataatataaataacataaaagttaattttcttaatttgggtgaaaaacccaaaacatcattcttttaggaacatagagaatatataatagacatttacaacttatacatttgttgataacatgcagtatgttagtttgaatacatatttttcacaacagtaataataacagttgttagaagactaaactacattgtaagaatcgctttctcttgtaatgatacaatataacatataacatttaaaataaaataaaaatctgtaggttttaaaatgttagctacgtagtccataacttcaaaaaaccaatggttttgaactcattccatagtgatgattgcaaatacatattatctggtttacaaaaaaaaaaaaaaagtgttccaattatctagaaatgttgggcctaatgcttaaacagtaagcccatatacttaaacatccgacttggcgcatttgcttcaccttctctaccaaaaaagcgcgtgagattcaggttcactgtatacattaagagcctattgtcttgtctcctgtaaaaccagaagaaaacaaaaattcaacaaaggataacaaggacgtggctattcttcattggctgcattcacaagagtcgaatattaattagtaatttcacagtatagtacattaagattaacgagacctattgtctcctgtaattgaggcaacaagataagggtaaaacgagaaaaacaaaagagaacaaagacgtggctatttatcattggttgaattcaatattaatttaattagtaatttcacagtgttctcaaatcgtgatcgtgtgtgtttcttctacctctgaaactctttttgtttatgttgatcatcatcatcgtcatctgcgtgtaaaacacactcacgccatcgttgacgtctcagatcttcacataaaagcttctattatcaaactctcttcctcacggtaaccctaactatctgtaatttatctctctacactttcttcatctcttaatcaccttaatcatcttaagctttgtatttctagatccttctcccaaaacaacgattcgtgatctccgttctcatagatcagtttcggatttggatatttcttagggatttgtgtgagatatttttagaattgtttcgatttagggatttgtgtgaagaagatg

SEQ ID NO: 27095 - DNA, 3003 bp, Unknown; identical to SEQ ID NO: 27094
  misc_feature (1)..( 3003): 2750-1469P.txt file - cDNA_ID_2730122; gDNA_ID_2684126; Annot_ID_137199

SEQ ID NO: 27096 - DNA, 3000 bp, Unknown; identical to SEQ ID NO: 14513
  misc_feature (1)..( 3000): 2750-1469P.txt file - cDNA_ID_2730133; gDNA_ID_2684126; Annot_ID_191101

SEQ ID NO: 27097 - DNA, 3000 bp, Unknown; identical to SEQ ID NO: 14507
  misc_feature (1)..( 3000): 2750-1469P.txt file - cDNA_ID_2730133; gDNA_ID_2684126; Annot_ID_137193

SEQ ID NO: 27098 - DNA, 3000 bp, Unknown; identical to SEQ ID NO: 14506
  misc_feature (1)..( 3000): 2750-1469P.txt file - cDNA_ID_2730144; gDNA_ID_2684226; Annot_ID_192002

SEQ ID NO: 27099 - DNA, 3000 bp, Unknown; identical to SEQ ID NO: 14506
  misc_feature (1)..( 3000): 2750-1469P.txt file - cDNA_ID_2730144; gDNA_ID_2684126; Annot_ID_191097

SEQ ID NO: 27100 - DNA, 3000 bp, Unknown; identical to SEQ ID NO: 14506
  misc_feature (1)..( 3000): 2750-1469P.txt file - cDNA_ID_2730144; gDNA_ID_2684126; Annot_ID_137190

SEQ ID NO: 27101 - DNA, 3000 bp, Unknown; identical to SEQ ID NO: 14506
  misc_feature (1)..( 3000): 2750-1469P.txt file - cDNA_ID_2730144; gDNA_ID_2684226; Annot_ID_137589

SEQ ID NO: 27102 - DNA, 3000 bp, Unknown; identical to SEQ ID NO: 14505
  misc_feature (1)..( 3000): 2750-1469P.txt file - cDNA_ID_2730148; gDNA_ID_2684226; Annot_ID_192001

SEQ ID NO: 27103 - DNA, 3000 bp, Unknown; identical to SEQ ID NO: 14505
  misc_feature (1)..( 3000): 2750-1469P.txt file - cDNA_ID_2730148; gDNA_ID_2684126; Annot_ID_191096

SEQ ID NO: 27104 - DNA, 3000 bp, Unknown; identical to SEQ ID NO: 14505
  misc_feature (1)..( 3000): 2750-1469P.txt file - cDNA_ID_2730148; gDNA_ID_2684126; Annot_ID_137189

SEQ ID NO: 27105 - DNA, 3003 bp, Unknown
  misc_feature (1)..( 3003): 2750-1469P.txt file - cDNA_ID_2730158; gDNA_ID_2684126; Annot_ID_137183
ttaccaaaactgatacgagaatattgaatctctatgggctatgtatgtatatcagagtcatggctaagccatgggcacattttgtaaacactaatgttgtagtttcaactttcaatggtctaattgctgaacttcgacatgtttttaccatggcagcaaaaggtagaagtagctgattacaggaacaatgatgtcctttgaaatgaatgaccggaaaagtaagttcacattgtgagttctataaatattttctgctattggaagacatacctgttacttagttatacttaattcttcttttgcttatcacgttcttgagttagtagatcattcaatgtcatgttgttgttcggaaccccatttagtttcagtatatcttattaccaggttacgaagttactcatgctgtacttggatatacttaaacgtttcttatgtgatttgaaacagaaatcgggttaggcctgacaggatttggcgtattcttctcgtttttgggaatagtcttcgtctttgataagggattacttgccatgggaaatgtaagtatctcatgtatctttgtttctatactttgaccactattattgcatacacgtacagaactagtatgagagcttgtttcttttcatattttctcagattcttttcatctcgggggttagtctaaccattggcttcaagtctaccatgcagttcttcatgaagcgtcaaaattataaggtttgtttctgtctttgtctacattatcaatagcttgggccagtctctgctggatttttacagatttctacttaatgtcatctatgtgtgttcatttggctttatatgttatccactcagggaaccatctcttttggcgtcggtttcttctttgttatcatcgggtggcctatcttgggaatgatgttggagacctatggctttttcgtactcttcaggtacttttgcctattttcttcttctttactggtattgcttgaggaaatgtaaactgatactaaaaacgttttgcttttgcagtggcttctggcctaccttggcagtctttgctcagaagatacccgttctgggttggattattcagcaaccatatattagatcggtatgtgtccaattgcaaacaactatagcaaactttgcatgaaattcttagatctcgaatacaacacatacaaaactcataatgactcccagttttgcctttccaaattacagttgataattctctctttgtttctgatgatcttgagttgctaggccttttctcagtttggcttaactttaatagtaattctgttgcatagtctgccaattgttggctaatgcgattactttacactttttttttatgtgatgtgtagttctttgacaagtaccggggcaagcgagtgccggtctagtcttccatcccgagcagagagacgattcactgagctagatgcagctgaacaggcgattaaagtttttggaagaagaagtttcgtgatcctgtagaaaactaaaaccataggagaaagaaaataggaaggaaaagaacgtacaatttgaagctgtgtgtctatgtttcaggtgaagtagatgaatcttcgtccaggttgcaaattgcaacagaatgttaaaaatgtaatgttttatttttgggttagttataggttacacctcaattttggaaactaattaaagagaaacaattgtttctattcacaaaaactttttgtaaccattacgcattacataattttaatcatattgttattaacttaatggttctatttgaccaaaaacaaaaacttagaggttatttgacaaacagattacttaaagagggaccgaaaaataaaaacacaaaagaactgagtgaatcaactaaagggtaattccggtatttcaggaaagttttaaggacgacccctactaatggataaagtagaaaccctagtttgaattttcacggccgacctctctctctcatctactaagctctcctccgagtattgttggcttcagaccaaatcttctccggcgctgtagcgtttcccccggtacggattcattcacctctctctctctatcgctctccctctctctatctctatctatctgttgttttctctgaatttggtttccgtgttcttatgaattcgatggtttggtgtttcaatttcgttaatttcactgataattgttggtcttttggctctcttgaggtgaatatacttcgctatggtcgtgggggtagtttccttgacttcaattagcttttttatgtcgaatgttcttgagttgtttaaggtgatttttgattaaattcagaaggtcttatgtttgttagaatctgtcttttattcattgtccttactgaggaaatttttttacttgcattgaaaagaaacataatttaccaagaggttctatgtaacgatgatttgtgggtcgatctgtattttaaatagtcgttaaaagtagaatttttgttgtatgtttgaaaggaataatggtttgagtaaggaagaagaacaaggtagatgcatgagtctatgttacatgatgtcatgacacatgctttctttatgatagatggcaagagcttggaacatgagcattgcaatggttcatagggatatagagagggattggggagatcaatgtggatattgtttttattattaatggagattcatgggaacgatctggagaaatatatatatttcaatattttaaatagcttttggagcatattggagcaaataagcatttggagcttgtggagcactgctctgacccaggattgctctcacttggtttgcttcatatatattttggtcttaccatgttttctttttcttttcttatcatcgtctcattttgatgctggggctatgtcgaaagctgtttgagtggaggttctttgtctatagcagtaaattttgatcctttatttatttcgtttcctttttattctcatgtgcagtttcccctttttaacctttgcaaacaatg

SEQ ID NO: 27106 - DNA, 669 bp, Unknown; identical to SEQ ID NO: 14503
  misc_feature (1)..( 669): 2750-1469P.txt file - cDNA_ID_2730160; gDNA_ID_2684126; Annot_ID_137181

SEQ ID NO: 27107 - DNA, 2427 bp, Unknown
  misc_feature (1)..( 2427): 2750-1469P.txt file - cDNA_ID_2730164; gDNA_ID_2684202; Annot_ID_137238
ttcacaagaagcccaattatgattcaattagaagcccgcaaaaccatgtaattagaaatttctagcaagtttagattcacagaaatatgttgttataacttataagcatcaatgtagctaattttggaagttgccagccactatccacaactctccttcttcatcatttcaagacatcaatctaagatttactgattaagcttagcgttctttatttccccttgcactaaataaagctcttactgagttattttattttgtatctttgctatccatcttatattcagctcctttgagcaaaaatcgatcgtgatttggattctcccacaaatcctaggggagttaattagccacgtaacaactttgaaagtcaccagtctctccccattcctcatctaaatatcaaaagtcaaacgttcaaatccccttgagtccttgacgttaattttttgttatagaaaaacgaacggaaaaagaaaagtgagattagaagatcatttatagaagagaacaaaacaacgatggttgttatacgctcacaatcaagatccccttgatcaacatgttgctaaacgcagacaaggactcgcggagacaacaatggttgttacgtattcaaaattaagaaacaagctaagaaaaaccttcatattcttaagcatacattaaaggctacataatcaatagtactgacaacgatcataacttcaaaataatgcattaatcacttgagatttaccaatagttggattttgaatctcgagttctaactccaaagctgcattttcattgtttttttaatactcatccatcgtacggcgtttattatgcgatctaccacccatgtgcatgtatttatctcacttaatggttttattattcaattcttgtaattcctttttgtttttcaaaatgagatgatctaccacccttgtgtatgtaattatctaacttaagtatttcatttacgttactcatgataacactcgatgatctaaagtttagttacattttatagaatgctatacttcacttagatatcagatgtgggttcaaaaccataaaaaaatatataaaatcatgacttatattcaacgcattcgcggagacgttgatattgtttcacaaaaataggaaattaacacacgcgtagaaatattcatgtatctatttgtgttcatacaaattaaagatgtttaaaataagatattgttaaaaaaaaagatattgttaaaaaaagaaaagaaaaaagatattgttataataagaaaaatataaatattgtcaatagtagcatgtaatatgagaaattgaatcaaacgtaaaatcgtgatcataaaaaataaaattcaaaagtaaagaaaaacatgcattgtccattttttttaatacttgaatttgtttaataattaatcctcgagttacgtacgttcactagttatttccaatcgacaaacaaattcaacggtttcgaaaattctgaacagaaataaaagatgtagtttcatacaaaataaatgttagttttttattttgtttgtgtgatgatattcagccttccaaaacatatttgttggtgaaagacaagtttttggctgtcggtagtacgaccatttaaattaaggaaaatcaactccaagattcacggatgtataaaatccaccatttgaatactgccacgtggcagtagaccaccagaagacgtgtacaagtgtgtctcctcctctccatgtataaagatgaccgttgccacttgccagtgccacatatgatcgtcggctccggtgattttcgctctctctgcggccacacttgtttgcttggtctctttgtaatactttaacatcacttagtatattgcatgtttcattctttctttctctgattttgttttcgtgagatattaaagagttcataacatataatttcgatgtcagaccgtattaaaaaagttttttttgtggattagattcacgatgcattttaatcagtggagtttaatgaaagaattagattcttaataattttgggtacatatgcaatttcagattttctttgtcataaaaggaaaatttcatttctttttgcttgttttgtgcattgcgatgtttgtctaattcagataagcacatagcgttttcctattttcagctactaaagtacccaaaaaacataaagactttgagattcttctctacatagtgggtgaaaaaaagactacatcataaaaaaaactacacgatatgaagtcatttatatgtgttatataacttcctttgtgtgtggttaggtcatataaagacctgttgcaaaggctaacatctgatcagagcgacgtggtttagaatctccgagtgatttgaggggatatggaggaagaaagagtggaaggctcgaaaaggccatttcaaggtatcataagagatg

SEQ ID NO: 27108 - DNA, 3003 bp, Unknown; identical to SEQ ID NO: 21416
  misc_feature (1)..( 3003): 2750-1469P.txt file - cDNA_ID_2730172; gDNA_ID_2684202; Annot_ID_191248

SEQ ID NO: 27109 - DNA, 3003 bp, Unknown; identical to SEQ ID NO: 21416
  misc_feature (1)..( 3003): 2750-1469P.txt file - cDNA_ID_2730172; gDNA_ID_1971889; Annot_ID_176807

SEQ ID NO: 27110 - DNA, 3003 bp, Unknown; identical to SEQ ID NO: 21416
  misc_feature (1)..( 3003): 2750-1469P.txt file - cDNA_ID_2730172; gDNA_ID_2684202; Annot_ID_137223

SEQ ID NO: 27111 - DNA, 3000 bp, Unknown; identical to SEQ ID NO: 14555
  misc_feature (1)..( 3000): 2750-1469P.txt file - cDNA_ID_2730192; gDNA_ID_2684202; Annot_ID_191240

SEQ ID NO: 27112 - DNA, 3000 bp, Unknown; identical to SEQ ID NO: 14555
  misc_feature (1)..( 3000): 2750-1469P.txt file - cDNA_ID_2730192; gDNA_ID_2684202; Annot_ID_137215

SEQ ID NO: 27113 - DNA, 3003 bp, Unknown
  misc_feature (1)..( 3003): 2750-1469P.txt file - cDNA_ID_2730206; gDNA_ID_2684202; Annot_ID_137210
atagccgaatctagaaatacttggcgggagatggaattgattggggcgaacaagcacattatatttttaagggtttccttcgacttctcttttatattttagggctaaacgaaagctctgattccttaaggccgtcagccaccgccgaagaggagcttcgttggtctcttaagaaagaaaagaaggggagaatatggcttatcaagaagcaatgaagcccaatcccacgaaggctggtttggaagaagtgatggcatctctgacatcagttcgatacttgtaaaaagtgtgaagctatccaaatccattacaaaactgtttcattacggcgatttttggagatagcttttctcgttttttgcatgttgatctgactgatctcagatatctcatcggaaccgtagtaaatacatcatcatctacttgcaagaagtgcatttatcctgtttgtatgaatccatgtctttcccctacttgtgatggtgtctagctcaacttaattactctttagccttaataatgaacagtcttatcgatcctgcttaattaaatattgaatggaagtttggtttgtggtaggttcggcaaattttgcctaactagtacataaatgattgatcaagtccactctttatagactgtagtatataaattattataattttgttaaccttgtaacatgattttaaaaattagaacccacttatttatttctctatcaggatggtatgttaatagaatgaactatagaacagatcaacagacagtaaatgaaacttaaagaaaaaaatacaaatggctcatataaaatgaacttgcagaaatacagtttgatcacagaataagagagggtttatcaatttggcttctgcgtcatttcggcaatggcgggtcgcagagacaggatccaacagctccgtggatctcgaattgcgattgccatctttgtcggaattcttatcggctgtgtctgttccgtcttgttcccgaacggcttctttaactcgggatcatccttgattgctaacgaagaacgcatttcgaaatcaacctctacggtactgagagagatcttatgctttaaacatctacaaattcctttttttagaaatttttctgtaatctcgagctctcgatttgtgattagaattagtgtttgttggaatttgagaatttgagtctcttgcgtttgttatgaagattcaaaatcttcatggatttttgagtagaactacaaattgcatgtcttgaacatttgagtttaactggtgaagtttcattttttttctctgttttttgaattgttcaggatggattggcttcatgtgaatcatctgaacgagtcaaaatgctcaaatcagacttttcaattatctcggtaaagaacgcagagttaaggaagcaggtaagagaactaacggagaaggtacggttggcggaacaggaaacagagaatgcaaggaaacaagtcttagttttgggatcagagataaaggcagggccttttggtactgtcaagagtctgagaactaatccaactgttgttcctgatgagtctgttaacccgagattagctaagcttttagagaaagtagctgtcaataaagagatcattgtggttcttgcaaattcaaatgtgaaaccaatgttggagttgcagattgctagtgtaaagagagttggtattcaaaactacctcattgtcgcgttggatgattccatggaaagtttctgcgaatcgaaggaggttgtgttttacaagcgagatccagataaagcagtggacatggttggaaaaagcggaggtaatcacgctgtttccggactgaagttccgcgtcttaagagagttcttgcagcttggttacagtgttcttctatcggatgtggacattgtcttcttgcagaatccttttagtcatttacacagagactctgatgttgagtcaatgagtgatggtcacgacaataacacggcttatggcttcaacgatgtgtttgatgaaccatcaatgggatgggctaggtatgcacacacaatgaggatatgggttttcaattcagggtttttctatctaagaccaactattccttcaatagacctactcgatcgtgtggcagatacactctctaagtcagaggcatgggaccaagcggttttcaacgagcaactcttttacccttcgcatccagggtacactggcttacacgcttccaagagagtcatggatatgtacgagttcatgaacagtaaggtactcttcaaaacagtgagaaagaatcaagaactgaagaagttgaagccagtgattgtgcatctcaattaccatccagataaactcgaacgaatgcacgctgtggtagagttctacgttaatggcaaacaagatgcgttggatagctttcccgatggttcagattgataaaagagatggatgcttgttaagcaagatatcgaaaaacccaatcatcttcttcttcctcgagttaagaaaaaaggtaggctaagtttcatcttcccacatctgttgttataatcagttatccttttaggttcctagttcttcttctctactaagaatcttgtgtagcctatagctgaaaaactcaagagtcttattaacaatactgtattgttgaccacagtttcttatttagtcagaaaagtctctctttttttaactatgcattatttcctgaccacaaaaaaaaattatgagagagacaacaaacgagagattaggcaagaaagagagatatggaagaacaaggaagacaaagagagtgtaagagttttggatgtatgtgggttttatccacaaacaagactctttaagattcttctctctgtaatgaccggaaaatcccatttttttgtggtttcaaatcaaatggaaccccactcttacctctgtctttgtctttttcttaaagccttttgtttcagcctctgtatgtatctccctctccggagcaattgcaaattctgtgtctttgtgctatg

SEQ ID NO: 27114 - DNA, 1458 bp, Unknown; identical to SEQ ID NO: 14551
  misc_feature (1)..( 1458): 2750-1469P.txt file - cDNA_ID_2730213; gDNA_ID_2684202; Annot_ID_191230

SEQ ID NO: 27115 - DNA, 1458 bp, Unknown; identical to SEQ ID NO: 14551
  misc_feature (1)..( 1458): 2750-1469P.txt file - cDNA_ID_2730213; gDNA_ID_2684202; Annot_ID_137207

SEQ ID NO: 27116 - DNA, 3003 bp, Unknown
  misc_feature (1)..( 3003): 2750-1469P.txt file - cDNA_ID_2730229; gDNA_ID_2684203; Annot_ID_137263
tgcaacctgtctttcaatgcttttgtactttttgcaacttcagttgttgactgtaattctctgccctaattgaaactgctctgtatttactctttactgaccattggtaaccttctccgtaatgtagacactggatgttcttctaagggtgctaattgaatttccaaaggtcgagcctttgcggagtaaggtatgagtttagttgtattttattaagtagacatattgtaatcagtagtgttgcatattcttttccattaagttattgattcacaggtcagtgattagcttgttccccttttctgtaggtcacatcattcatacaccgtatggttgatacccttggatccgctgtgttcccttatcttcccaaggctttggaacagctacttgctgacagtgaggtaaaacgaaaatttcaaacctccccttattattcaatgctccactgctttcatttcctttaattaatattaagttgatctcctacgattcacttacttacctgggagtaatatctactaatcaagatacgtcatttcgggcaatgatgctgcacactaatttgattacttcttcaacaaaaagtcttactgtgtatgtgtattgttgcagccaaaggaaatggttggtttcatggtattactcaatcagcttatctgcaaattcaacagcgctctccatgatatactggaagaagtatatcccgtggttgctgttaggattttcaatgtaattccaagagatgggctcccttcacgccctggggctgttactgaggtatttcgtttgattttctttcttaactcaattttatgatctgcaattgtaacttgagaacctgctgatatcgtagcatcctttacatccagtcatatatccttttttttttggtgtaggaaatgagggaactgatagagcttcaaaggatgctgtatacatttcttcatgttatagccacacacgatctttcttctgtatttcttacgccgaaaagtagggcgtatctagatcctatgatgcagctggttttgaatacttcttgtaatcacaaggatattaccgtacgtaaggtttgtaacactttccctttggttgcatattcatttaattttgatgatctttttcgcttacttattatccacttgttttactctttgccataaaaataggcgtgcgtgcagatatttataaagcttattaaagattggtgtgccgagccatatagcgaggagaaggtaggcttgttaaataatttttattaaccttcttttcttcatgaaagaaggacaaatgtcataatcaagaactatttttgctttcaggttccaggttttcagaatttcgtgatcgaagcgtttgcaacaaactgttgtttgtacagtgtgctagataaatccttcaatttcagtgatgcaaatacggtaagcttaagaaacttcaattctcttttcattttggagttttatctgtccgttgcagttgtataaacttctgaattgtttccacaactgactgggtttcttccttcgctatgcatcgcagcacgcattgttcggggaaatcatcacggctcagaaagtaatgtatgaaaaatttggtaatacgtttctcatgcatcttatgtcgaaaagtttcccatcagcacatattccacaagatttggcggagcagtattgccaaaagttgcaggtttgttaagttttactccctcaaaacgaccataagtagataaaaaattatctcgtcttgtgcttaaacatagtctctcctttccgtgtttggtattccagggcaatgatatccgaagcctcaagtcatactaccagtcccttatagaaaatctccggcttcaacaaaacgggagtcacgttttcagatagcattcgaaatacagctagtttcatagaaagaaaggtctctcaggtcaattccgctacgagctctaatggttttaccaagaaagctctcttcctcaatttttgtacatgacaggtttgaagtcatgtgcttaatataatgttcatctctttacaggcttctccagatgtaaatagtatttgtcaatgtctacttgagaggtggcaacaaggttcgctttcaccatccagatcaaattagatcaaaagcttgagagagattcatactgttgttgatgttggttcttctcaaatctgcagttgtatcttcttacacataatcatgttctccgactcgaaccaagggccttacaagttgttccagtgcacacacacactctgaggcagatcagctgttatttcttattgcgctttgttgtgagattgtgtctataaagcccttccttttttggtcctatctccaagttttgatggtcttataactctctgcagtcgatgttttctgtttttctttgtccatgaaaatactttagaaaaaaactatgagagatcataaaagacagacacacaaaacaattttggctgaattttgttttcctattttattcatttaattaatatgaaattgtattatttttcgatattgaggtctcctcttattttctaacttattttgagacaccaaacacagattgttcttttgacaattgaagtggcaaagaaaataaaaagaggttaaaaaaaactaagataaaagagatcgaaacaatgaatttgttatatttcgggatggcattgatagataatttaatattttgtgtaaactacgtatttttacccaaaaaatctgaaatctatatgtttttaagtgttaaaaagtgtcatatccgtaaaattttaataaaaatagcaatttccaaaattttatatgaaaaatagcaaaatcaacaataacccttaaaaaataaaagagggttatatttatatattgtaacggtgaaaaatcgtcatctacttcttcttgaaaccctagttccaaaatctgcacacacactcagaagaagaagacgtcatctctctatctctgtctttctgctaatttcacgaagaatctgagaatatg

SEQ ID NO: 27117 - DNA, 3003 bp, Unknown
  misc_feature (1)..( 3003): 2750-1469P.txt file - cDNA_ID_2730233; gDNA_ID_2684203; Annot_ID_137262
agcatattgaatcggaaaattattttgtatttgttttttctgaccttgtcttcctctccttgtctgtccctccttcttacagctattatcccataagtgagcttcatatctccctgtccatctatgcctgtatacacgcacaacataaatatgtgtcgacacaattatacataatctacaaaataaaatgacaaatatacataagtaacataattgtggcattcacatttttcttacgtgtaagtttgagacatcatttaaaccaaaacaaatgtttgagacgtcattatttaataacgtacgtaccttgtaactccacgatactgagaagttctttgtccataactatcaaccgacttccgaggaacggattcctttacctgaggtttaacaaccaatctcttccgcttctcatctaccttaaccggttcttcgacccgtgcggatacattcgattcgttgatcaaatcagaacaagccccatggctcaaagccaatgatagcattgagccattggtgttataaccagtctcttcgttactaaaatgactaatattattgctcgtaccagcctcttcagtaacgtaatgactcgagagtgggaatgctggagtgccttgctctaaccaagatttgaaaaccgagaccgaaccgaccctctcaaaacctccataatcattgctaaggttcggatctaggttcgggtaatgtggtgtaactacggtttggtcgtggagaaggtaaccgggtgggtttaacctgttaaccacagtggtgcagttgacattggtttggttatggtttataggatactcggtttgatgagagtttgagaggagatcttccacctttggaacgtcttcatcatgatgatgatgatcaaagttaatatcatatctccaaactacacataaaatagaaatcaaattaagaatattaatagtggccacaccaacaacatatatataccagggggatgatgtgtgaagaagagagtaccatcggaaccgtcatgcctaagttcttcttcttcactattgcagattctcaaaggaggtgtcaatgaaaatcccaaccatttcttcatctctctctctctctctagctgtctttctcgctcttagtttatatgtatagggtttcgttttatatgatttgtagtctcatacgtgcgaatatacattaatatttttcataagtctaaaacatttaataaattatataattaaaaaggtggaaaaaagatttgagacaaaacaggtggcggtgaagttttgtcgtaagcatgaaagaaaggaagaggaagtttctctctccctcactctttcacattctctttcacacacacttgcatctgacttctagagttttgtgcccactctccctcggatcttttcgatgtatacgtatatatatatgggagatacacatgacacactacaatgaaaattttcgttctttggtatttgattaacttttccgtaaaaaaagcacacagtagcgcttaaaaaagtcagtattttgtttctttcgaaatatgttaattagacaataatacatttcttttattaatgtctttctttcgatataatttgggatattttttaataaacttaaagaacattacataatttaaaagtaaacaaaatttgtactaaaattagtagtattgcaaggaaatttctccttagacgataaaaatgtgtttttgattgctcattcaatcgatccgtttgaaaatgattctaactgtgatggagaagcctgaaatgatcttgctgttttcgcagattagacaaagatcaatctaaaagataaaagatatatatagctggagtgtttggcaatatgctatctaactcataaaatttgcctcaagtgtgagaagcggataatgtgacggtataacctttgaaaacagacacacaaaatatgatagaacaaaagaataagtgatctctcttatttggttgattatattgcatatgttgcttatagatagaaaatgaaattgtgttccaagctgttaaccaagacttagtgggtagtttgtccatactcgccacccacataacgaaatgtcgttctacacaaaaagccacaattgttttctttaacaactgaaaaatgaatttgtgattttatatcttgctacgggcatcggaaatattccaacctcttctacgaggtaatcgacaatgccattacagaacaaaccttttcttacaattacctagtttgtagtatacaaaataaaaatcgagaggtcttagctacagaagttgtctccatgaataatttcacagtaagtagtttagttatatgtattaatgtgacaatttgttttataaaacattagattaagaaagtgaaaaaacaccattatatttgctaactcacaaaacatttatacatgtctatcttaatctatcagtatgcaacacctaaggcctaaggtgagagagattcaagcccatgggctgatttactgaattcagatgacggttaattttcaattcgctggcaataatatttatagttctctgggaaaatattctgcaagctaataaaaatctgtgtataaaaaaaaaaaaaccctacagctccgtcttctctccagtctcacaattttcctcatatttataaatccgtaagggaaattttctagaaactcaccaaaaaaaagtattctttgaattcaaagagaaacccaaactagggtttccataatcccttttctactatatctcccactctcataaatccgatcgctaaaatcgccacgatccttactttctggtaagctctcaagcgaaacccactaaaagtttcgtctttttcttcttcgcatcaaaatctgataagggaagagaacagtgaaggagagaagctagctgacgatactaattcaaggcattgtttgacttgtatgcaacaaaccaggactggattttgaaatctcggtttttagggtttttgtagtggggttaagttaacacaatg

SEQ ID NO: 27118 - DNA, 3000 bp, Unknown; identical to SEQ ID NO: 14582
  misc_feature (1)..( 3000): 2750-1469P.txt file - cDNA_ID_2730254; gDNA_ID_2684203; Annot_ID_191301

SEQ ID NO: 27119 - DNA, 3000 bp, Unknown; identical to SEQ ID NO: 14582
  misc_feature (1)..( 3000): 2750-1469P.txt file - cDNA_ID_2730254; gDNA_ID_2684203; Annot_ID_137252

SEQ ID NO: 27120 - DNA, 3003 bp, Unknown
  misc_feature (1)..( 3003): 2750-1469P.txt file - cDNA_ID_2730258; gDNA_ID_2684203; Annot_ID_191300
acataatcaattggagtgctctcatcaatgtcgtcacttgttccatgagtctctttgtcatggtgacgactcttggacttttcatgatgacccattgcctctatttcttctttaactcgttcaaacacatttggcgatttcacagtcttctcctctgtggaaatacccaattaaaacaaagggtttagattcgtgtttcataagagacaaaacagagcaacgaatcaaaaatagacttatcatggcgtgtttctattgtttctttagagaaatttccgatcaaaaccatccattaatagacgtgtaattttgattgtgaaatttgaggaaacgaacataacttgatcaaaaagtcttcctttttaacaatatgcataaacctatgatgagatctgatcgttcattgtgtttacctgatcggttttgatccgccatcgatggtttttgtcttcttgatcttgcagctttctatttttggttcctgattcggtggcgttttgcgtcagatgcaaaagagtctttacagtataaatcaaaatcgatttcaacttaaatgggccttgttgggttataatgggcctttttgtttgtaagtgagtccaaggaaaaaaaacaccagaccagattgaaattgaatcacttgcaaaagcaaaattgattactctgttttggttttggatcagatcaaccaaaggaagcgaagaagaagaagactttatacactctcgacgctattgatttcgtctgtgcagttttgtttctctatcagttagttttaaagatgagttcttcagagagtgtggaaaacgagtgcatgtgttgggctgcaagagatccatctggtcttctttctcctcatactatcactcgcaggtgagattcatatgatttagtgatcattttcaagcaacaatctttgacacacaatcatcatcatccaggtctgttacaactgacgatgtttcactcacaatcactcattgtggagtgtgttacgctgatgttatctggagtagaaaccaacatggagactccaagtaccctttggttcctgggtatgttttcaaaaaccaaactttagattatgaaattgcaccttactagtggaattgatattcatttgtttttccttattgtaaggcatgagattgctggaatagtgactaaggttgggcctaatgttcaacgattcaaagttggagaccatgttggtgttggaacgtatgttaactcctgcagggagtgtgaatattgtaatgaaggacaagaagttaattgtgcgaaaggagtttttactttcaatggcattgatcatgatggctctgttactaaaggaggctactctagtcacattgttgttcatgaaaggttgttataatctgctttcctctcttgccatttcatacttttgaaagttgttagtgcctatatgagtttagtttgagtaggaagcaaatgatttctcagtactagtttcttttgtgtttcaaatattgaatacaataggtactgctacaagatacctgtggactatcccttggaatcagctgcaccattactctgtgctggaatcacggtttatgctcctatgatgcgtcacaatatgaatcaacctggtaaatctcttggggtgatcgggctaggtggtcttggacacatggcggttaagtttggcaaggcttttggacttagtgttacggtttttagcaccagcatttccaagaaagaagaagctttgaatctgctaggagctgagaatttcgttatctcatctgaccatgaccagatgaaggtagtgaaatgacttaattagtttcttgtgattatttaggattggaaccagataatacttaacttgtgaatctatctatgcaggcactagagaaatctctagactttctagttgacacagcatctggtgatcacgcgtttgatccttacatgtctctcttgaagattgctggaacttatgtattggttggtttcccaagtgaaattaaaatcagtcctgccaatctcaatcttggtatgtttctcaaaaggtcttataatctccaattttacatacatactctttaagatactgtcatactgaaaccaaagatgtctggacaggtatgagaatgctcgctggaagtgtaaccggggggaccaaaataacacagcaaatgttagatttctgtgcagctcataagatttatccaaacatagaggtgattcccattcaaaagataaacgaagctctcgaaagagtggtgaagaaggacatcaagtaccgtttcgtgattgacatcaagaactccctcaaatagatgttgctcaaaggaaggaataatggagtctgtaataagagaataatactcactgctacaatctttattacgtattttctcgtttttcattagtaaagcaaataaattaagactactgagaagaaattgctcgtaagcttgggtaataagaggaaaagagatttacaaaaactacaaaaattcccaaaattagactttaaagagttatgggtaaaaaataaagaaacaagaactaaggtggccatctcgtaataaactctatatatatgtacctaactcaaattaaaggagattaatatcacgcgaggcatgagagataaattatttctttttccaatgtatgagttatttaatttatgtggacgaaagcgaaatgtcaatgaatgttgttaccgttaaattaaaaaaaaaatgatttttctccttccttccccaaaatttcaaatttcaaactcttctcttcttttaacaattgtaaacctttttgtcgacatcattcttcaggccaccaaagttcccagaaactttctctttcttcttcttctccttcttcttctctctcgagtttttttacaaatatattctcgaacccacctttctccgccggatctgattccaaaacctgtgaaagtctccagctttactacagatttttgaagaacaacaaaagggtttcaaatttgagcaaatg

SEQ ID NO: 27121 - DNA, 3003 bp, Unknown; identical to SEQ ID NO: 27120
  misc_feature (1)..( 3003): 2750-1469P.txt file - cDNA_ID_2730258; gDNA_ID_2684203; Annot_ID_137251

SEQ ID NO: 27122 - DNA, 3003 bp, Unknown
  misc_feature (1)..( 3003): 2750-1469P.txt file - cDNA_ID_2730262; gDNA_ID_2684203; Annot_ID_191299
tgcatttgttactgctaggtccccatcctataaatgttttccttttcaactttttttttttctgagtaacttcagagaatccttcaacaaaaaacgagaattactacatacatatcaaaattaggccgaaaccaaaacttacttgtggaaaaaatggcatatgattaggacattggacaagccgttgtaatgtcgtggtcaaagtccatactattgattacttcaaccaacagctcatcgtatccgttggtttgtatgactttatcaaccgaaataatactctgatcaaatcccaaatcggacgaccaaaaatcgaaacgtggagggagggatgaggacccacaaagaggagtcccacaacggaatttaaatcgttggttcatttaaaacactaatcaacgtggtggtcctctttacgtgcaacccaacacggcttggtgaaaccaatcaatccgccaaattaaattctaaattgtaagtatgtaatttattactagtatacattttgttgtattattgtagtattacgtttgtaaatatatttaagtatcatatgggcttgtctggttttaatgcgacaaatattttatagaaagaatgatagagtaaagaacttttgaagactttagaagattagaaaatgttttatttgattgatagtgtttatatttttatatctaaactctcaatccccaatatatttcctaataagaaacgttttaaatttaatatccaccggatgataaacaggtgtcgtatgctattacgtacaattcttttttcctaataggacataagaatctagtaatcatataatttctttggtcccgccgtatttatacgacaaatcaagctaactataagtctataatcaatagtggacacgttatatatcgtgtataacatggagtgtgtaaaatcattagaagactcaagtaaccatttgggctttagttcaattttcatcagttttacagtttgatagtctccaataatatctttcgttccactaactaaaactcgatttaaattatctagtatttgttttgaggatatatgcatccgaataaagaggattcaaaagtatcaaaaagtgtcaaaagaagaatgaaaaaatcataaatggcatagtggtgacgattgtaactttcttattggagtggttcgatttccaaaatcatggggaaaattaaaagttaggcacatcacattcataagagtacaagacaactctcataaaaccaaaagagtcgtttcgtttggtgtgctattttaccaatcgttaagtctatttcttttttatttcctcccattacaacaaacaaataaagttgaaaagaaaaacaaaaaaccaaatgatattttgtctattgactccaacaagataaagtcaagaaacaatcttagtgttcttagatacttttattaaagtctctgcaaaatgctatatggtcttcttctatagagaaatatcttctggttagaaatcattggttttacatggttctatagaaactctctcgaacatatgaatcgattaattctttctgatcaaaccaagtagattgacgagttcacaactttgtcatgaaaatgtcttcatctccacaagatctacattattaaatctctatgatcttcgagatagattataaacttggttcaccaccacctcactaacccgtgagggacatcaattcaaataaagttacaaatcagagtacgttacaaatacaatgactaagaaactcggtttactccaaaccggcaaaactcctctttccttataattcataaaccaaacatcaccatcttgaccatctcttaaaccaaagacttaacaatctcaattcgagttcacacaaattagcattcgattgtgacatttgcaaatgtaatggagataggacatagtattcatcactttaaaacactcttattgataaatccaagagtcacttaactttttctggtaatcgctgttaaagactccaactcaaaaacaatcacattattccaagtcttaacattctgatacgattcattacaagaaactgagtttatctaagattttcttctcacttgtgcattaacatatatacacacaacataacacagatatgatacaatttcacttctttgaagaacgcttgggagtaacagcattaaagatagcttcaatctcttctttcagtcgttgaaagaaaccaggtcctttcacataatcaattggagtgctctcatcaatgtcgtcacttgttccatgagtctctttgtcatggtgacgactcttggacttttcatgatgacccattgcctctatttcttctttaactcgttcaaacacatttggcgatttcacagtcttctcctctgtggaaatacccaattaaaacaaagggtttagattcgtgtttcataagagacaaaacagagcaacgaatcaaaaatagacttatcatggcgtgtttctattgtttctttagagaaatttccgatcaaaaccatccattaatagacgtgtaattttgattgtgaaatttgaggaaacgaacataacttgatcaaaaagtcttcctttttaacaatatgcataaacctatgatgagatctgatcgttcattgtgtttacctgatcggttttgatccgccatcgatggtttttgtcttcttgatcttgcagctttctatttttggttcctgattcggtggcgttttgcgtcagatgcaaaagagtctttacagtataaatcaaaatcgatttcaacttaaatgggccttgttgggttataatgggcctttttgtttgtaagtgagtccaaggaaaaaaaacaccagaccagattgaaattgaatcacttgcaaaagcaaaattgattactctgttttggttttggatcagatcaaccaaaggaagcgaagaagaagaagactttatacactctcgacgctattgatttcgtctgtgcagttttgtttctctatcagttagttttaaagatg

SEQ ID NO: 27123 - DNA, 3003 bp, Unknown; identical to SEQ ID NO: 27122
  misc_feature (1)..( 3003): 2750-1469P.txt file - cDNA_ID_2730262; gDNA_ID_2684203; Annot_ID_137250

SEQ ID NO: 27124 - DNA, 3000 bp, Unknown; identical to SEQ ID NO: 14580
  misc_feature (1)..( 3000): 2750-1469P.txt file - cDNA_ID_2730269; gDNA_ID_2684203; Annot_ID_137248

SEQ ID NO: 27125 - DNA, 3000 bp, Unknown; identical to SEQ ID NO: 14579
  misc_feature (1)..( 3000): 2750-1469P.txt file - cDNA_ID_2730273; gDNA_ID_2684203; Annot_ID_191295

SEQ ID NO: 27126 - DNA, 3000 bp, Unknown; identical to SEQ ID NO: 14579
  misc_feature (1)..( 3000): 2750-1469P.txt file - cDNA_ID_2730273; gDNA_ID_2684203; Annot_ID_137247

SEQ ID NO: 27127 - DNA, 3003 bp, Unknown
  misc_feature (1)..( 3003): 2750-1469P.txt file - cDNA_ID_2730281; gDNA_ID_2684203; Annot_ID_191293
tccgggatccagaattcgctgatcagctcatccatcgctccaacattgacctaaaggtttctcttttcttcactcacctctttaaaatcactctcgttgaaccatatattaaacctagacatcgaatttgagaccaacccggagtgcattatgtactctgtcgtatctgcttagtttaagatccataaaaaatcaaaacttttggcaataggttttattagtgttgcctcttatcattggttataggattagagattccttggatagattataagtttttttttttattgattcaagtgtgcaatacctaaagctagcttggttgagttggagatttgaggtggaaagagtagtactgtccttcattttgctatggatttcttttacttggtggtagtcttatgaagaagagtttgaaaattttgtgtgtttcaatacttaataggataagtggcgtaacttgagtgttccccctggtactcaaagtttaactaataaggcacggccagcaaaagtcaaagaggaaggcgacactccggctgcagatgcaaatgatgctgtcactattccacggcctattcctactattccacctcctcccggtcggcgtactttaccttctgagttgatccctgatgaaaatacaaagaatgctcctaggtttgtctttctttgttctctatttctcatacttgaggccagaaagtatgatgagagactagttccataaatgctagtctatcaactctgagtaataatcttcatcatgtattgctaaacttctgatatgtccctattttcaggtatgacggggtgatatttgaagctctctctgctttagccgatggtaatggatctgatgtcagttccatttatcatttcattgaggtttgacaaatttctctctgctatttattatgcacagatcagaaaattatatgtgctcgctttgtaaactacttaacagattattagagacatcatctatatatgtgggagggatagttatgttattggcacgtgtaaactctatcttacattgacttgtgcaaatggcttattactactatcagcaatcttagatgattcgtccttctcaaatgagaacaccgagttctaaatgtaaagtcttatactactaattatttgtactttgacgttttatagtatgataatacttgtcgtgaagctgtccactatgcatatctgaaaaaatgttagaactcttgattttacttaaatttggtcactttctgttattcttttatcacatttggctatataatagcttttgtattggaccttacgactgagtgctaacaatggtttactgtggaaagagcagcccaggcatgaagtaccgccaaattttagaagaatccttagtacaagactgaggaggcttgcagctcagagcaaacttgaaaaggttagcaccttcaaatctgtaagtcttgaatctcacttttcttgtgttttttaatgagttcccattttcttttaaaattcccaaaaaaaaccatcttcatcaattggtgtttaaaactatctggtccatatctgtctgagccaatgaagcatggtttagaatccactgaattaataactgaagcagtgacaatgttctttaaagccttctcatgctatgtctttggtttttctttctgtgttgttcaatccaacatataacagatacagaacttctataagatacccgatccatcaggaacaaaaataggtgtcccaaaaccaaaggagacacatacgaagctgcgccaagcaaacaatcagacctctgctgattcacaacagatgatcgaggaagctgcaataaccgcagcctgtaaagtcgtagaggcggagaataaaatagacgttgccaaactagcagcagaagagtttgagaagatgacaaagattgcagaagaaaatagaaaactcctggtcatagctactgagatgcatgaactatgtaagaaaaagccagactcttttctcattattggctaagcaaaacaaaacaaaacgtctctaactttggtattatatggtctgttttgcaggttcctgtggggagactatgctcttggcttgaattgaatctatgggacattccttgtagctctcttcagttatctccgtaatggtgttgataataatatataaaaagaaaactaaattaatttactaggcgtggcttttttggttttaaattcctgaacctacatacatatttttacattagcgaagttactttcgtataattttatataaatttctttacatcgaattttaatgttaatttttttttgggtccaaaaccattaattggagtaataaatatattaaaagtttagagggcaaatcgggaaagaagatatttaagttgttttccttttcctacttggaataagcaaagtaaaacctaaaaaaaaaaaaagaccgtaagtagttacaagggtggaagtataaaggagcagtcttttcttcttctttcaaccccacggcgcagatcctacgagtttggtctttgtctctatcttttcaatctttctctctcaatcgctcttcaatttgataacagcaaaggtttgtttgaatctctcttctttttgtatgatttgtattttggatccccattgtgcttgcttttatagaagttataggttttgatattgtttgattcatgtttgcttcatcctaatacaatgctgattcgtaaaggatcggtttttgtacaaggatgatttagatgttctattactgcgacttggttatgttttggttacattaattgaatccttaggattatgcagttgactttacgaagatgaatgcttgatttgcttctgctctttctatctctcttggtgcttctatgtttttatcaccttttacgtgtttgttatgtgatctcagagacaacgagttcgattataaattgtaatctgttttttttttctaatgtcgatttcatatttttgttatgcttgtccagtcatg

SEQ ID NO: 27128 - DNA, 3003 bp, Unknown; identical to SEQ ID NO: 27127
  misc_feature (1)..( 3003): 2750-1469P.txt file - cDNA_ID_2730281; gDNA_ID_2684203; Annot_ID_137245

SEQ ID NO: 27129 - DNA, 3000 bp, Unknown; identical to SEQ ID NO: 14576
  misc_feature (1)..( 3000): 2750-1469P.txt file - cDNA_ID_2730291; gDNA_ID_2684203; Annot_ID_191288

SEQ ID NO: 27130 - DNA, 3000 bp, Unknown; identical to SEQ ID NO: 14576
  misc_feature (1)..( 3000): 2750-1469P.txt file - cDNA_ID_2730291; gDNA_ID_2684203; Annot_ID_137241

SEQ ID NO: 27131 - DNA, 627 bp, Unknown; identical to SEQ ID NO: 14620
  misc_feature (1)..( 627): 2750-1469P.txt file - cDNA_ID_2730299; gDNA_ID_2684204; Annot_ID_137303

SEQ ID NO: 27132 - DNA, 3003 bp, Unknown
  misc_feature (1)..( 3003): 2750-1469P.txt file - cDNA_ID_2730307; gDNA_ID_2684204; Annot_ID_137300
ttctcatattcaaacacaacttcagatctttacacaaccggtgatcagagaacaggttctgctttttgaatatatttgtctgaagtttattacctcaatcaggctatcttgagctttatttaatgtcttgtcttgatgaatctgtagctgaggattcgtacatatttcttgtcaactggtttgagaggtttccacaatacaagcatagggagttttacattgttggagaaagctatgcaggtttcagtttctaccttcaagctctcatcaatgacattaaaatggctgatgtcttagtcttgagtttctctattggacaggtcattttgttcctcaactgtctaaacttgtccatgaaaggaacaagggcttcaagaacccggctataaacctcaaaggttttatggtaaagattgaaacaatttcagactttttacaagtttgtgaactctgggatttttaaaagtctgcttattcaggtgggaaatgctgttacagatgactatcatgattatataggaacatttgaatactggtggaatcacggtctcatatccgattccacgtatcaccaactaaagaccgcgtgctactcagtatcatctcagcatccttcaatgcagtgtatggtggctctgagaaatgccgaattagagcaaggaaatatcgatccatatagcattttcaccaaaccttgcaacagtactgtggcacttaagagattcttaaagggtcgctacgtaagtttcacacatccgaaagaattttcaggttgtttgtttctatgtgctaatatgctgcaactttgtattggtaactcagccatggatgtcaagagcttatgatccttgtacagagagatattcgaatgtgtattttaaccgcttggacgttcagaaggctctccacgcaaatgtcactcgcttatcttacccctggaaagcatgcaggtcagctgaaaacaaagttttatttctggtttagaagtataaaaacttgatcgaaattttgatattttctttgtctcttgcagtgacattgtaggaagctattgggacgattctcctctgtctatgcttcctatatacaaagaattgattactgcaggtctcaaaatatgggtcttcaggtaccaattttgtattgaactttgtgatgttcacttgtagtaaatgaatgtttacagatgcgactagtgtagaagatgtatgtaaagtcttgattacaagtgaagattgcttgatcagtctgcctacattatatgcagtggggatacagatgctgttgttcctataaccgctacccgatactctgtagatgcactgaagctagcaaccatcacgaactggtacccgtggtacgaccatggcaaggtaaagaaacaagagctctctcatgttaatttccatgcataatattcagatattgatttgaggggtattgtacactttgtaggtaggtgggtggagtcaagtttacaaaggacttacattagtgacagtagcaggagctggtcatgaagtgcctctacaccgtccccggcaagcctttattcttttcagatcctttttagagagcaaaccaatgcctatgacttgagataaaaccttgaatggacctcttctccaacttcctgttctttcttcttcatcatcaataaaccaaagtgttttttcattcactgtcttcctcaatcctcagtgcatccaaattcaacagaagactgattagctgtctagtacaaatcataagcaactcttctttcttttttttgtgtaaaatctttctcaaacagtttctctatcttttctccattattgtatgctgcaaagcaaagtctttcaactacgaatcataatactataagatagtttatatagagttcgattccacaactaaacaaaagaccaaaccatgaacgtgtaatacaatgcagactcttgtcatttggttaagagtcactgaaagatctctacaaggtgctgccgtcacttgaagactctttctctttctctcttcgatttcccaagacgtggaacaaccacaggaccaccacgcactctttcaagggcaaaacttatcctcaacggtcgacccaataatccctgtaacagagagaatctcttcagaaaccattcataatgatagcaacacaaattcttttctttttttggttttacctttccatccatggcgtcttttgcagatagagcatcaccttcttctgcaaaatcaacaaaaccaaatcctcttgatctcccacttcctttgtcatacgcaatcctaactgagaacacatttatatttgacacattaaagaatctaaatgaaattgcaactcaagcacttcatgtgagagagtaagagctcttcaacccaaatcctataaactcatattaacacatcctacaaacgattagataaccaaaagtcataaccaaagactcgttcaggcttttcatcgaacacctggaagagtttagaaatgacaaataccttctgcaacctctccaaaggaagagaaagcgtctttgagagattgctcatccacagaccaggacaatcctgcatacttacgggtatcaaaaatcattcattatcatctacatatgtaaatgtgggtactttgttacaatactcttaacctccgatgaatagcttggaactgggcgatgcagaagaagaagtgcaaaattgaggaagaaaatggaagctagaagaaatagagtgttgaggtatcgctgaaactcgtctcactaatagctcaataccatttttcatcatgatcacaaaaacttgtttcttcaaatttaagctttgttttgggtttgaagttttttttatttatataagtgaccaccaaaaaataaggagccaaacaaaaaaaaaacttattttattattgaaatatctttgtggatgaggaaggagtaaccgaaaaggataaatcatttcttcttcttcttcctctgctttcttcctaaagcctactccttttcaatg

SEQ ID NO: 27133 - DNA, 3003 bp, Unknown
  misc_feature (1)..( 3003): 2750-1469P.txt file - cDNA_ID_2730313; gDNA_ID_2684204; Annot_ID_191359
agaattgggggaagcaaaagaaaccaaaattcaattgacttaagacaaactcgtaaaatgatgggaaaacctgaacaatgcgatagagggctggcatgggttgcagatcatagtaaggaggtacacaagtcaaaagttcaataatagtgcatccaacactccaaatgtcagaagcagcacaaactcctgacaattcaataacctaaaacaaagtttgggtatccgtcagtacacaaaggagaaaacatacttgtcagaataagaacaaagtccaatttcaaaatttacatatggaattttgacctatacagaatatataatggtaaaagatacatatattttatcaaaggtgtacctcaggagccatccagtaaggagttccgaccactgagtgagtgttaaaatcagcctcgttgagttttgtggcaactccaaaatcagcaagcttaacaaggccctgaagtataatatagtcaagtaatagcctagaagatcttgtgcatcccagaatacaacagattttgaaacggaaaagcgtaccaaagacatgagaataactaataagatccacaaggtacagaaaaacacacctccttggttgtcaaaatatttgcacccttgatatcacgatgtatgacaccctgctcatgaagatatactaaaccttccaagacctgtattcactagttagtacataaatatttttttttaaaacttaactcaactagaaaaagatatatacggacctgtgcaatgtaaacagtcaccaacgactctgggaaaggtccaaatttattaggtttaataatgtttgcaagagagccattctcaacgtacctgcaaacacataattggacttgaaaatccagaccgtagtccagcgtggaccaaaattaaacacaaaagtattacttactccagaataatgtgaaggtgagtctttgtcttcaacgatccgagatacttgacaatgtttttatggttcaagttctgtattgaaatatcatcttagaaggtatagaggaagattgcatcttaaccagcataaacattgtgtaatggtggaagaaagaagctacctttaggagatcgatttcttgctgatgaaattaacaaccaagaagcatcaaaacaaggattcagtcagcatagcagtggtaaggagatgagagatcacatctagtccataaagacagaacaaataacgaagatagatacaaagtaacaaaccattatggtgttaagatcctcttgaccaatgttttccaaagagacttgtttaatggcaacaaagtctccattctccaagtctaatcctatataaactcgaccataagctcctttaccaatttcatctcctagcatctgcgctcaaaagtcataaagaacaaaacttggagtagtgagtccacaaaagatttcaaatttggtagagcaaaagcaaaattagtaagaagaaacccagaattgcggaagaagaaaagctcacgtatttgttgtcgagagtctttgatttgtggaactgggatgacgtcatctgtcgcgccatctctttctcgtcagcaccaaacaaaattgctactcaaggaatttgatccatttttttttacgagggaaaattcacaagaacaaaattaaagaattagggttttaaatcttgagaaaatttgtaaggattcgagatgggtttgaagatcaaatgccagccttaatacagttgtgtaataaattacgacaaaattaatcaaattattttataaaaattaaaagttttttttgggttggggaaattgacgaactgtattagcggaagtcagaatacttttgttcgatttctcaggcgccagtatccttattttattctagggtccttacttttttctttatttacgatttcacccctttatttctaaaactataaaaattcctaaaaagcttttgtggaatacacttaaatttttaaaagtgaaaatgagaagatgaagaaagatatacgataaataacaagagtatatatcatagtatacctacttctttagacatgtcgaaagggaatgctttgttgcttcaaatttagtagatcgaaaatacttgttaatcgcttgagttaccaaagccaaaaaagtgaaagaactatagatttattggtgaattcgatattgtttcgctttattggtgttaattttcatttgttacatagagaatctatgtggatagtatttaatatttactaataccttatcatcaatttagatttggaaaaattattataacgtttttaattggcggatttggtatacattgtttcaaatggcgtaatcagaattatcagataagattttggataattagatgtttataaccaatcaatattgtaactttcataaaaattaatttttttacacaaaaaaaaaaattagataattaatttattaaacaacgattttaatagtttttatatgtaacttattgatcattttctttgtagcataagtttgagtggaaacaaatcatatccagcctccgcgcccaaaaacatatcacacaacagacaacaacactcagctatttacacatttacattgatcatggttaaaaaaaaaaaaaaaaaaaaatcaaattttggatattgatttttttttattttactagaaacacacaaaaaaaaaaaaagacaatttagttctagcctcgataaaaatcaggcatgcccaattgcccatcatgtcagaccaaaataatgtcggataaaaaagcccatcctagaaattgggtaaaatatgaaaagactgtcaagttaaaaaagttatttttcgtttgaccaatccaaaaagaaaaacttgagtctgacgacaagacagtagtagtagtgcgctgttctgttaagtaactgtaaggttagtgtttgacttcgagaaatagtaaatgtgtctgtaaaacctccaaatcgtgaggaaatccagagttccatcagatctaactctcttagatctgattatcatg

SEQ ID NO: 27134 - DNA, 347 bp, Unknown; identical to SEQ ID NO: 545
  misc_feature (1)..( 347): 2750-1469P.txt file - cDNA_ID_2730313; gDNA_ID_1591814; Annot_ID_151541

SEQ ID NO: 27135 - DNA, 3003 bp, Unknown; identical to SEQ ID NO: 27133
  misc_feature (1)..( 3003): 2750-1469P.txt file - cDNA_ID_2730313; gDNA_ID_2684204; Annot_ID_137298

SEQ ID NO: 27136 - DNA, 3000 bp, Unknown; identical to SEQ ID NO: 14615
  misc_feature (1)..( 3000): 2750-1469P.txt file - cDNA_ID_2730316; gDNA_ID_2684204; Annot_ID_137297

SEQ ID NO: 27137 - DNA, 3003 bp, Unknown
  misc_feature (1)..( 3003): 2750-1469P.txt file - cDNA_ID_2730324; gDNA_ID_2684204; Annot_ID_191356
tgtcaacacttgggtttacgattttgctactggatggattttgttgtgctcccacatttgcttcgattctgtgtgatctctgcgctaaactaattgctaattcacggttttgaggaaattatgggttctatatgctgttaaattacttaggatgcgaaatttgatgctcgcttggtaaattacgtgattggtcttcgaattacattgaaactattgtgatgctacttgcacattgtcattctctaatatctactttaggctagaactattattaccatgatagttctgacttgttacaattctgaactcgcttcattataggactattccttttgcctggaatctgataacaagcggctattttgaactctcagtatatggggtatgtttctatgtttttcctctagttcaacttgttcctatccaatccagacttttcatctatagtacttgaattcacgagtgactgtttgcaatgttgcaggttgtcttcagcaccgtttctctcctttttatgggaaagttcctggaacctgtctggggttccacggagttccttaagttcatctttgtggtgaacttccttacgtatctctgtgttttcgttacagccattgccttatactacataacgaggctggaagtttacctgtaagtaacctaccaccttacacataccaagtgtctactgcttgtttattttccttctcttacttaagtatgaagggggatgtccccattatgaaaatttcgttgaaatccttgtgattcttttgcttccctgctcgttaagtttaatatttaccactgaatatgataaatcctctctactttgttatatttcattattatccactctataataacgtgttctttgttttctcctggctagatatatgccctttgctggttttcatggtgtcttggcaggccttcttgtagggataaagcagataatacctgaccaggagatattgctgttaaagataaaagcaaaggtaatgttttgctttctagtaagaaatgatagagctttgacattttctcactttaactttttttaatcgaagttctcacatcctattcttacttctggtttatgtgtgcagtggttgccctcaattatgctaattttgtcaatagcctcaagcttcttcacactagattcagcagcatatcttcccactttgatatttggtacatatatgggctggttatacctcaggtacctacagaggagaccagaaacaaagctcagaggtgatccaagtgatgactttgccttctctactttctttcctgaacttctcaggtgaacgacatttctccctttttactgtactttcgagtttgcccacaaatcaattcttgcctcatatgttgttggtaattttgtttttcaaaataaaatgcaggccagtaattgaccccattgccttaatctttcaccggatgctttgtggaagatcaaatgccaccagtgaagaccatgattattctaccagtggtgcaccattgccaggttctgattctgctgaagcatccaggaggaggtaaaaaattattttcttttcctttttctctctttcctgttccacttcaaatcttcaatggtagtttagatgcaacgatcttactaaattccctgctctttaggggttaatgcagttcatgtcttcaaaaattagtatacaccgttttttattggcttgacactgttgaaacataatttaagatctagttgatgcaagagataatgaatgatcctgttcacttgattctaagaataaatagtaatggctcgtcatcagttttaatcaaaatgtaagagttagtcttacgagtgagaaaactagaaaggcaaaaaacttgttataacacaaaagatgttgttgttgcagagaaagaggggcaagagctctagaggagagactaggaacggaaagattggttcctgcaaggaacaaagatgaattgcagagtgatggtttagataacgtataagtggagattgcaataagcattttgaagaagctgttgttggttcttacttgtgttcatgtggacagtttttttttgttttttttttttgttaatgaaattggcgtttatacagaatcagcttcgtaaattcctttgacagctcagaaaggtagtacatttccttggacaaaccaccaattagaaacaattttcttggacgagaggatataaaagtagttatacatgttttcacttgtctctaaacttgttattgaaacagtcgtaactcgtaatggttcactctaagacacaaaaatgtttcttaattgaatgaaaaccaatgaacaaaaatgatataaaaaagaagtcttcataatatacaagagagagggagatgataggtcagaagatggcccataaaagaagggattccattgactagatgtattttgactatatgtttttttttttttttgtgttaagaatactgtatatgaaaatagaaagagagagaaaagaaaaggaaatgacgtcagcattgacaaggtaaccacgtcgcaatgtagcgagtccctccagatgtctggtttggtagtcgctttaggaatcaaacgcggagctccaataacaatggccattaccaaactcttcaatttctctatcgattcttcacacaacaacattcctctttcttcccccctttttttcctcgttttcgatttcctcgtctcgtctcttctttctgttgtcttcttcttcgttttctcacgccattccccccaaaaaaagaaacatctcttttatctctctctctctctctcttcgtcgtccttggcctatactacattgaaatccgataagttctgaaagaaacccaacacagtaaatgcggcttcgcgatctaagctatggaggaacgaatgagaaaaaacatagaatccaacaataaaatgtgagaaaagagacagagaaagaaaggaaaaaaaagtgaaatttggaagaaagaagaagagagaaatg

SEQ ID NO: 27138 - DNA, 3003 bp, Unknown; identical to SEQ ID NO: 27137
  misc_feature (1)..( 3003): 2750-1469P.txt file - cDNA_ID_2730324; gDNA_ID_2684204; Annot_ID_137295

SEQ ID NO: 27139 - DNA, 3003 bp, Unknown
  misc_feature (1)..( 3003): 2750-1469P.txt file - cDNA_ID_2730328; gDNA_ID_2684204; Annot_ID_191355
taagagatttttataaggctgtttttgtaaaaaaaagaagtaattaaatgttgtgataattgttttaatgacgtgtcaactacaatatttgcacgaaattgaaaatcacaaaatcgaaaatccacttttttgttttgtttctctctttggccgacaaataaaaaaaaaacaaaaaacacaactaatcataggcttctccatcttcttgtctgcaggatgatgcaatttttcagacaattttcttccaaaatcttttcgtaattctgttttatttttcaacgttttaggtttttaccaatccgccgtagttatatccaacattaatttttttccctcttctcagaaaaaaataaaattcaactcatctctagagtttttaggttcttccaagaaattgaatttggaaggaggctttgatgggtttgaattttccataatcgtcccttgtttacggtatttttctcaaggaatccctgaaaaactatttcttggtctttgtgtaattgtctggtgcaaatcaagttattgtttttatcttgtgttgttgattcagactcttgttgtttgaaaatgctatggctcgtgaggggatgttgttttgattttgggaaagtcttgtttgaatggtcacggcttttctgaacattcgcgtgttctttcttgtctcggctctgcttcgaaatgtctctcggccaagaaaatgttgatcctgttgaagtttcaggtaaaatcctacacaatcctttaataattattatccaccaagtttttaaacttgtaaaggtttcaaatttttgcctttttgttttatagggtcgcatgcttgcttatatgaacttttatgttctgagacacccaaatggactcctcttagggttgaagatttgcaaacatcttcttctggtaattattacttaatgatggagataaacattcttaagatatgttttaagtgttagttggagacaatctcatgtcctgtttgttttgttttagatcccagagatcggttggagaagttgctgaagcaacctgggaataaatattgtgctgactgtggctctcctgaaccaaaatgggtgtaagttgattaatacttctgtgttgtttgtacatttcttttgatgaactggattgattcatttcatttcgttttagatcgttgagtcttggtgtatttatctgcattaagtgttctggtgtacacagaagtcttggagttcatatatcaaaggtactttcttttcatagacaatcttgatttttctctgcttctgtgtgtttctagagtcttttatcgataaatttgattgaatgatgatcgcaggttctatcagtaaagctagacgagtggacagatgatcaggttgacatgcttgtaggttacggtggaaacacggcagtgaacgaaagattcgaagcttgcaacatcgaccagtcaaagaaaccaaaaccagattctactaatgaggaacgaaatgatttcattaggtgacattttttacttaacaatttgttataatggtattgtatgtataatcatcttgtccctaaatctttaaatctttcagaaaaaaatatgagcagcaccagtttatggatccaaaggatggtgctttgtgcacttatcagcagcctagcagaacaaacacttcaccaccgtctttatgttctgcaagccaccgttctacaaaaaaccgtattggtcatgcatttaggaatagctggggaagaagagaatctgatcacaaaggaccaaagaagagcaattccatggtaacaatcactatacatacatacatacatgtttgggtagttactgttgccaacgttagttaatttttgtgggtgttttataggcaggtatggttgagtttgtggggttgattaaggttaacgtggtaaaaggaaccaaccttgcggttcgagacgtgatgaccagcgatccttatgttatccttgctcttggccaacaagtgagctctctaccaaatctctctagacttgtatgatttgaagttaacctcggtctttttcaatgtttgtttgttgtagtcggtaaaaacacgggtgataaagaacaacttgaatcctgtgtggaatgagacgctaatgctttcgatacccgagcccatgcctcctctcaaagtggtaagaacagagagcttttccaaactcggataaacactactactgaaccgagcttgatatgtaaattttttgcagctagtgtacgacaaggatacattctcgacagatgatttcatgggagaggcagagatagacatacaaccattggtgagtgcagcaaaagcatacgagacatcgagcataaaggaaccgatgcagctgggaagttgggtggcgagcaaagagaacacattggtgagtgatggcataatcttacttgaagacgggaaagtgaaacaagacatttcacttaggctacaaaatgttgaaagaggtgttcttgagatccagcttgaatgtcttcctctcactcaatgatgatactttcttcttcatccctcttctttttttttttctttaaaagatttatttctaaatttatagtgaagaaaagatgctgctactttcttgttgttccacctcaaacaaaacctctgtaaaaaaacaacaccatgatttgatttgatgattcttcagaaccaatcctagtttcctctaccggaagatcaaatacaaagaaaagcaatcaatatatcatcaactctctgcattgacagatagattggtattaccgaaacacccttcatcacttccaagttccatcagagcccaaaaacccatatgggggtataatcgtctcgtaaataacacataattaattgtttttaatacgtaagtgtttttttggggtcaaaatacataagaatttatgataattaagtggataataactttttcgttaaaaataattaccgtgttattttttgtttgttgttgttgttacttgttacattaaactataatttatatatg

SEQ ID NO: 27140 - DNA, 3003 bp, Unknown; identical to SEQ ID NO: 27139
  misc_feature (1)..( 3003): 2750-1469P.txt file - cDNA_ID_2730328; gDNA_ID_2684204; Annot_ID_137294

SEQ ID NO: 27141 - DNA, 3003 bp, Unknown
  misc_feature (1)..( 3003): 2750-1469P.txt file - cDNA_ID_2730349; gDNA_ID_2684204; Annot_ID_191348
agaccaagaaattcacattaagattcgcatcttccatgccggagtttgacgtggtaggctcttgtaacggtttgctctgtttgtctgattctctctacaacgattcactctacctttacaatccttttactacaaactccttagagcttcccgaatgttccaacaagtaccacgaccaagaacttgtcttcggttttggattccatgagatgacaaaggaatacaaagttttgaagatagtttacttcagaggtagtagtagtaacaataacggtatttacagaggtcgtggtagaatccagtacaagcaatcagaggttcagatcttaaccttgtcatcaaaaacaacagatcaatctttgtcctggagaagcttaggcaaagctccttataagtttgtgaaacgttcatcggaggctttggtcaacgggaggttacattttgtgacaaggcctcgtaggcacgtgccggatcgtaagtttgtatcatttgatcttgaagatgaagagtttaaagagattcctaaaccagactgtggtggtctaaaccggaccaaccatagactagtgaaccttaaagggtgtctttgcgcggtcgtttatggtaactatggaaaattagacatatgggttatgaagacttatggagtcaaagaatcatggggaaaagagtatagcattgggacttacttgccaaaggggctaaagcaaaatctggaccgaccaatgtggatttggaagaacgctgagaatggtaaagtggttcgggttttatgtttgttggagaatggagagatcttgttggagtataagagtagggttcttgtggcatatgatccaaaattgggtaaatttaaagatcttcttttccatgggttgcctaattggtttcacactgttgttcatgctggaacattgtcttggtttgatacaccccttgatttatggtaaaataattaaagttttgaatttttattacatttagagttttgagatttgggtacatcttcttgccccctttacataccaactaagtacattcttttgtacgtaatgggtagattaaggtgtatttcttttcaagttcttgtttcgtttctgttgaatttataggttccttttcatgtcttcggtaaatgtaaatataatttctaagtgttagcggtaaatgtttccggtaatttggttctacactataaactattacttattgtttgggactaacccacgatcgtgccatttgattttattgctttattattgtatgttattatgttttgacatgctcgatcaccaagcaatgcagaaaaaaaaataaaaaaatcttgtagaatattctttagatctatagaattcatataacaagatattagatgacgacgataaagcaaactttaaagatatatcataaaaaaaaaagaggctttcgcaaatcacgcaaatcatatagttttcactaaaaagaaaaatttgtgtattaataactaaacgatcttcgatctaaatattaaacccatgtggaaagattccctatcgcctgaaaataaaatgaaaactctattcatcggaagatctaatcataataatatcttactaaatatataaacatctatataaaacttgaagtatatgcatttttcgtggtctcggaattataacatttttgtacatgatcatgatggcgaacgtaattgggtctataaagttacaatgtgaacgaccagaaataatatcgactgactcgacaactgcaaggccaaatggccgtttattctaggttaccgcgatacctctggagtatactgtatacgttctctctaaattctggcttttttttgggtgaatttaaaatggaatcacttcaccaatatgtacatgggtcaactccaaaactgaagacgacgaagagaagcggaagaccgcaagaatgccaatcaacatcacaaattgtttatcgtcttctctcttctcttccattccacttattttcagaatttatcttcaatattttcaaattacatcaatagagtcatgtagtgaaatagatatgccgtccggcactataatgctaattagcaacaactgttttatttatttttcatgtcatgagtttgactatcttatttcatgaatctataaaacgaattaggttttggtacggtgtcgtgtggacagtaacctaatgcatgttgactaatatgggattaattaatacatgtgtaacgtagaaaatgctttcccaaaaaaactagcatatgactttggaaaggcattgtcaatacttctatagcgtacatgacttcggagtttcgagtctatataggaaataacactagtgagagaatttgttatggaaaaaatcagtgtgtgatgttgagataggagttaaaacaatcaaaagtgacataatctatatagacataatcacgtgattataactttataagcaaaacgggataggttttgcatgtctaggtagcacctattgtttgattggtggcaataaattccatatgttttaaaattgaaacacaaaaaaaggggcagaagcatatgcccttgtttgtctcatgttaggttggatcccaaaatcagaccggataaaaccgggatatatcattaatgcaagtaataatgattgaagacgagattagaggactaattccgtaattacaaacaaatgattttattgacaattcagtgattattaaaaataaaaaacataacaacattagtggtcattgtcgttgtcgtggctcgaggctatcgtctctcctatgcgcgtggaagaaatagcaattatgctttcttttgtatttgattattatccgttagtgaccctcacgatctctttctctctcatataactcggatcaccacatgacttgatcttcttgccgttaccaaaaccaaaatccctaaatttgccctcatttccctctgattagatcccttaccccgacaaagacaccaaaattcttgagggcgagagagctgattgatg

SEQ ID NO: 27142 - DNA, 3003 bp, Unknown; identical to SEQ ID NO: 27141
  misc_feature (1)..( 3003): 2750-1469P.txt file - cDNA_ID_2730349; gDNA_ID_2684204; Annot_ID_137287

SEQ ID NO: 27143 - DNA, 3003 bp, Unknown
  misc_feature (1)..( 3003): 2750-1469P.txt file - cDNA_ID_2730357; gDNA_ID_2684204; Annot_ID_137285
tgtttggattagtttggttagcgatggatcaatatgaatcatgttaattattagcggtatgaatttggctttatttcaaaactttagcgaatacaattaacttcatgtttattattcctaaactgataataattgtataaattattatggatttgtatttcatgaaaaacatatccttatttatgaaataaaactgaatataaaatggaattgtataaaagcaaaagataggagcatctttttgaccctagtgtatgacaattgagttttagtgagaagtgtttaaaacttgtaactagcttaaatgggtttagtgcatttactattgtggagtttctacaaaaagctaaccaaaatgtgaaacgaagaaatcaataaacacgtttccataaagtagtgtaactttttagggtaactagttgtaggcaagaccgtatgtaagaacaaaacagtaagaactttgtagctttcaagaaaccatcaatcaataagatacctgtataataagaaaccttgagcatctttttgaccctagtgtaagacaattgagttttagtgagaagtgtttaaaacttgtaactagcttaaatgggtttagtgcatttggggactaattattgactaattatttctaaatggtgcaaaaaaaaataaaacttcaaaatttcaatgatattattacttttcgaataattattaaaacattctcgcataaatgcgaatccacacaacaattactacccaattcacgagtcactcttcaggttataaactccaatcctgaatggactccgtcttatctataaaatatccatataatttatatgtcaaaaaaatattgcaaaattttttcatcgcaccctaatcaaagcgtcttcaccagattggatggatttatggtggacaagcgactttaatttatggacccggtttagcaacttcagtgcaagccgctggaaccaactttccgctgagaataggcttgatgttagaacatgccgagacagctggtccctctttgccgttgtggaccaagttgatgtcagagagagcaatattggtgcaaggcactcctttgctgcacattagcttcacagccacctttgttgctgatgtacccttaatgcccttgatagtcacgtctgacaacttcacttgcgatggtaccttcatgtaaattaattggagtgagatttaacaacttgattgatacatatactatcaaacaaaccaaaatatgtattttatgtattagattcgattcggttacataccccagctttgcagtggccataaggacagtactcttggtcgatgagaacgggaaggctaacattgtccattgtgatatcttcgaaaagaatgttggaggcgatgccggggggagatcctggccatgtcttgatgcgaacaccattgtcagtgttcttgatgaggcatttcctcacggtgactccttttactggttgctcattagggtatcttccaagacttccaatggaaattccgtgtcctggtccacattctacgttctcaacaatgagattttcggtaccatctccaatggaaacgcagtcatctccggttttgatctttgccccaattaagttgactccattggaccttccgatgtggataccatcggtgttgagactctccggaggtgcatcaataccaatatccgaaagagtaatgttcttgcagttaaggatgttcatgtggaaaagtttgctgtttgttgatgtaatactattaatctttgagtttgttagaccagtgaatcggatgttctgttacaaaaaaatcataatattcatcaagtcattccatgaaaataataacgtttttagtgtaattatgtaaaattgaatgtgcttacgatagggagagagttgcatttgccagttttggcacaatcattggccttccaagcgagggacccttgaccgtcaaaaatagctttgtttccattcaaagtgaaatcagctatattttcgaaatcaatccatccggcatgtggcttagtggtcttgaccgtagccggagccttgaaattgccattcaattccaaagtgactggacctttgcatggacctttgaactctaggctctctaccatatactcaccttttggcactgtaattgtgctccctgctgcacaagcttctttccatgcagccgcaaatgcctatatatacatgcatgaatcaatgtgaaattctttcttaaacaatacaaaaacgaagtataatataaaatatacaacaaacatttggtacgtaccgcactatcatcagttttgctgtctcctttggctcctgatgctttaacatcaactgctgcgcctggtttggcacctgatactttagcaccaactgatgcagctgcaccgccaactgctgtagctgcattttttgctgtatcttcaactgctgtagctgcattttttgctttatcgacaaccggtgtcccgtttgctattgtggtggccataaccactagtagcacaagaagcactccgcttgctttgtgagaacccaccattttttattctctttttattgattttgttttattagttttttttcttcttttgtttattctcttcttcttttgtttttgtgtttattgatgttttgttctgatgattcgagactccgttttatagaggagcaaagggagatcgaaaaccacaaactcatgccttgctaaaaataattccgaggattgtgcttcaggtagaagaatgaccaaatcatggaggccgataccttttgacttggtatgttttctatttatggacttgataatgtaaacatctcacacaatttggtaatttaaaataaatcagagtttgttgcaaaagagagagtacatattacataatcatttatctaattgggcctatacgtgaagaatggttaatgggcttgggtgtgagatggaacaaatgaataaaaacgtaacccattagacgagacaaaccctaaaccctacggaatg

SEQ ID NO: 27144 - DNA, 3000 bp, Unknown; identical to SEQ ID NO: 14608
  misc_feature (1)..( 3000): 2750-1469P.txt file - cDNA_ID_2730365; gDNA_ID_2684204; Annot_ID_191344

SEQ ID NO: 27145 - DNA, 3000 bp, Unknown; identical to SEQ ID NO: 14608
  misc_feature (1)..( 3000): 2750-1469P.txt file - cDNA_ID_2730365; gDNA_ID_2684204; Annot_ID_137283

SEQ ID NO: 27146 - DNA, 3000 bp, Unknown; identical to SEQ ID NO: 14607
  misc_feature (1)..( 3000): 2750-1469P.txt file - cDNA_ID_2730369; gDNA_ID_2684204; Annot_ID_191343

SEQ ID NO: 27147 - DNA, 3000 bp, Unknown; identical to SEQ ID NO: 14607
  misc_feature (1)..( 3000): 2750-1469P.txt file - cDNA_ID_2730369; gDNA_ID_2684204; Annot_ID_137282

SEQ ID NO: 27148 - DNA, 2989 bp, Unknown; identical to SEQ ID NO: 114
  misc_feature (1)..( 2989): 2750-1469P.txt file - cDNA_ID_2730377; gDNA_ID_2790; Annot_ID_145930
  misc_feature (2398)..(2398): n is a, c, g, or t

SEQ ID NO: 27149 - DNA, 3003 bp, Unknown
  misc_feature (1)..( 3003): 2750-1469P.txt file - cDNA_ID_2730381; gDNA_ID_2684204; Annot_ID_137276
cctgtttcgttttcgatttggattacacgaaattcatgtgatatgttgcttctttgggttttgtaaaatgattgctggtgaattgtattgggaattttgtgcagaggaaaggatgaccagagaacatcctcccgagcctcttgatttcttcatctggactgttgaggtatattcaatcaatcattccttctttataagcctttcatgatgatcacttcttcaattcgcatgtttcttggaattgagctcttcattattagacttgttggttgcagaatcatgtttattaaattattcagcctatttttgatctgaattcagcctatttaaccagttacagggttgatttgatatttcttcaggtatgaccctagtttgccttaggcttgttcttgttgtttgatccaattacactgattgatttagtttactatgttacttattttttttgctcttttggtactctgcttgttattacaagaataaatctcaccttaatgattgcaattacatcaggcaagctcgaatttgacgcacctctagctattgaagttccattagtggtcatttagtttactatgttacttgtcgctctagtccaaggaatctgtgtttgttgatgtacatatactccggaagtggttttacctcagggtgtgtagactgcagagtgatgttcgcatatgtcacttgttgatttgctcttcagaaaaggttgaatattggatgaagattagttgatgaaaactcgataacctgtgcctgataccaaaaatagttaagagttagtccactcatatggagaagctggaggttgtgtgttgctgaatggttttgttctatcagatgctattatggattttcttagttatgctcgtgtgtaatggcgagcatcttgtagatgagaagctttgttctttttttcttcaggatgttgggtcttggctcgaggagataaaccttgggggctaccgccagattttcaaagaaaatggtgtcaatggagaatatctagaaagcatgtctgtgtttactaccgagcagatccttcacttcataaggaggcatcacatgaagtggggagacttcatcaccctctgtaaagaactcagaaggattaaaggtactctatcgttctctctataactctcagcttaagttgttgcaggaatttaactatggaaagaaatgtctttttttttacagtggcttgcttgaaaggtgagcagagagttagacggccatggtgggcaccgtcttgtctatccgtagtctttgttaaggcagccaaacgcaaccgacagtctcgtgttgtatctctcaagcttgaatcttgacattacactttggctgtttatgtacgtacttgtctctcttctcttctcttgttttcttttcctttttttttttttttggtttgggtttgtttgtggcacatgcactaggaagaaacaaactcaagtcaaaaaagctgtttggcttggtgaaatcttgcaagcgggaaaaaaattatgcgttttgtactttggtggtgtatacaaagcttgctctcagatgtttaatatatggcttgtgcaatctttatgtgacagataatagtgtgacgaatccaaagtagtaatttgattatatgtaatgtggaaaccgattgaaacccaggcgatattgagaacgtagtaatttgattatatatgttatatgttccaatgattttggacactaataaaattatttaggtcacaaatttaaaaactctatcggtggttaaacattttcagagatagcgtccattcaaacattttcgtggtgcaaattttcggagaaatatggtagagatttggcgtatagctcatctcatgttcctctttggagattagtacgtttagtaccctatcctcttggacgaaatctcttatcgagtatcgagtccactttatcttcacagaagtgagtaagtgacaaacaatgggaagcgaccacaacttctaagagaaaatagatattttatacattctttcttacaatttttttgcagttgaatttatcatctacaaagtgtaaaattatggattgagcaatgcaatttttagaagaaacaattaatggacagagatataaagttttgtaaaaatctttaaaattaataattatctttgaggtttttacaagtttattatatgtccctttccattatttatttttttcgttattgacattgcttacatacagtccattattttaagtttctcttaattttattttatttattagatacacacttatgtgatacatattgatatcatctttaccaaaaatcttgagcttagccaccaacataaagttttgacaataactcgtcatcggatttttcctcagtctatcaaaccttatcaagtctagtcgtctagaaggggaagacatgttcaaacggggaatcagatttatcgtcgttatgtgagtttattttattccatatatggtttctcgctcgatacgtttgatggtacaattcatcatgcgtattctcacttcaactttaatcgaagccttgttcatattgtataatcaaccgttgatacgtgtcaccgcatctggacatatcacattttttgttggatttcttatactcacccctttcgtgatccgatcaaataataaaactgtgtttttggtacatgttcttgttgggatagcgtttgtatgttggtttattttcgtgttagttatcttcttcattgcatacattctaaagcaatatgatttcttatacaagccaataaggttttaatcaggattatccttaattaatgtattcatacttaccgttcacaaaataattatgagaaaaccaaataccggaattacccttcaaatccagaagcttcggctttggcctaaaaaccctactaaaccccaatcgtctctcttcttagctcagagtgctaccgaaatcaaaatccaccattcttttctcttccgagattttagaagtttgcgacgatg

SEQ ID NO: 27150 - DNA, 3003 bp, Unknown
  misc_feature (1)..( 3003): 2750-1469P.txt file - cDNA_ID_2730385; gDNA_ID_2684204; Annot_ID_137275
caccggaaaacttcagagttgtgtcttctattgaattctccgggaaggtaaagaagattagtgggttttgattgtgctgtataaagatgtgtactttgtttgagctgtctcttaaaccctagcaccaatccgtgaaccttgaagtttgtcattccggtagaaattcctcagcagttgatctaattcgttctctgtgtagtattagtgatggggctttctcttggggaacaacatttcattaaaggtgggattgctcaagatcttcgaactgatggtcggaaaagattgacttaccgtcctatctacgtcgaaaccggtgttattccgcaggtagtgtaatctcctagagctcgtccgcttctcattgttgcttcccagttgtttaacagatatgttctttctcttgtttttgttggctctaggctaatggttcagcgagagttagaattggtggaaccgatgtgattgctagtgtaaaggtacttcctttgttctctctgctactgttctattgttgaatgggaagtgctattgtagatgttacccagtaatcttgtgtaattgcaggctgaaattgggaggccaagttcacttcaacccgataaaggaaaggttgcagttttcattgattgcagtccaacagctgaaccgacatttggggtgagcttttcttttatttcgtttggttttggttctatctagcacttgtcacacccgttctatcgttctattggtgtttctcttactagtggaattgttcaacatgagattttggttatcattacttttcttcagaatctcctaaattctactgtgttaagtctttaggcggctaattctttgtgatatgttgttacttaggggagaggaggtgaggaattgtcttctgagcttgctttggctcttcaaagatgtcttctgggtggcaaaagtggagcaggtctgcaatcatgtttatgcaatgcttttttttacctgcacactgttacgctttctgtttgtaacgtttatagcaattcatgttttggtaccaggagctggaataaatttatcttcgcttttaatcaaagaaggaaaagtttgctgggacctttatattgatggtcttgtcattagttcggatgggaatctattggatgccctgggtgctgccattaaggtaattcttgtgatgtgtgtttggttttctctcttaacccttagtctcaggttttagttacgaatgttagtgagtaaatcatacccatcaatcagaatcatgagaaaggaaaggccagagaatataggaaacgaaagggaatgggtctttagttaagtgtatatagattagctcaatgtagttgtcttgttattggttttagtagctttacgatatgtttccaattgatagtttaagcaacccaaaagtcatctttcctcaaggctgatcacatgctttaatgcacttgttgactatactcctgcaggctgctttaaccaacacggccatcccaaaagtcaatgtttcagctgaagtagcagatgatgagcaaccagagattgacatcagcgacgaggaatatcttcaatttgacacttccagtgtcccggtcatagtcacgttaacaaaagtaatcgaatctcacttttcttgattcacatcgacatcttcttatgtacatttcgctaatcttttaccatgctgtccttggtttttgcaggtgggaacgcattacatagttgatgcaacagcagaagaggagtctcagatgagctcagctgtatctatatctgtgaatcggacaggccatatatgtgggttaaccaaacgaagcgggtctggcttagacccaagcgtcatccttgacatgatctctgttgccaagcatgtgacagagactctgatgagcaaacttgattcagagatttcagccgcagaggcctgcgaagacgaatcttgactcttgagtctcagagaatcaaagtttcaagatgaaacatgttagcaagggatcaacaatatttgtatctgtggaaaatcttatacgaagtcagaacagattaagctaatcaaaatcctttttcctatgttctaatgttccatgctttgtgatagtaaaggtgatatttttgccattatagtattagtaacattatatctcatctagggattattaaaagaggcgttccttggatctctgtgtttaaagtgaaagacataacaagttacaaaaggatttgtgatattttgggaggaggaaatgagaatggagatgaggtcagcaaatgaaattaagtggacttggaaaaaagagaagattggtggtccatgattaagctcaaaggtcaaaagagtgtgtgagcagtgttggtcacgtgtatctcagcttcgggtttggtaaaaatggctttgaaacattcaattgttttctgtaaaactcccaaatccgatactattcacatttgtttcctccttcatttcataacaagcaagctggcagagaaaatttggtagtcatctattatgtcatagaattatgatatggtacatactacaaaacaacaaaaggagggagcaaatagaaagcgttaaatggcaaaactcaacgaatttacgtatattccgatgaactaactaacaatgatattgataactgtttttgcgaatcaactaacatcgtttccacatttaaattgtgactagcataaacaattaaaaagtaagatttgaaaatcagtcggttaactaattggaaaagaaaatgaaactaaattgattgactaaagtgattttttcttttcttattggccactaactcttattttgttttcattatggaaaaagagtcaaacctaatcaaatatatttagtctatgatttaccctaataaaatatacacaaaaaaattgataactacagtacttaaaggtttttaactgtaaaagttaattttgacagtaaaaatatttatttctaaaaataaaataaaaaaaaaaagagaaaaagatttaatagcaaaaatg

SEQ ID NO: 27151 - DNA, 3003 bp, Unknown
  misc_feature (1)..( 3003): 2750-1469P.txt file - cDNA_ID_2730390; gDNA_ID_2684204; Annot_ID_137271
gaaatagcaaagtacctgcaacttggaaagctcatccacgaattcgcgcggaaacaagtctgacctagttgaagacaactgtcccagtttgataaacgttggaccaagctgcaatacactctctctcaaccatgaagctgtttctcttcttctgcttttctgattatataacaacaggtgaaattaataagaatcaggaccaacaaaacatcaaccaatgaatcatttaaattagactaaaatgatgaaaggtttacctgtttttcttctgtgaatcctccaacataagcccatttcgaattatcgaacaagatacgaatcctcagggaaataacaaatgaccaaacatcaatactgcgttgaagtgagctataattctcatcagcccagctaaaaccttcatcagaaggaagaaccctaactccttcaaccggtggaggaaggtacgattctgttgttttctttggtgccttaaccaaagttgacgccgcaccattaatgtttctactactaaccaaactcgctccattaacacctttcccagccgatccattcacaccatctttcctcttcaccacctcactcgcaggaaccattttgactgaacgtccattgattccaaccttagagggcaattccgactgtctcatctcaatacgaaatctcttagacttgctgccataacactgagtggcttccccagtgaaatgattctccaaagagctactgaaaccaatagctttggtgactcttgcggtctcaccgccatagcagcagctctgagaagctaataaagccgccatttccacctaatttacaagaaaccaattgaatagacacaatcaaacaacaaaattcaataagctggattcataaaactggaatgcattggagaaaattatgcggcaagcatcatttgtataatctaaagttctaaactataaaagtatgaccaacacaaaatttctagtgatagaactccattaaatcatacttgagcctattcaaaaccatcgagttcaacgacacctctaaattattgatttgataagagaatcacaacgattctcagccatgaaaaagatataaataatcagcgaacattaacacgtactatagcaagaggaacccaattttactacaacccaaacctgttctgaacctgggatacccaaaagtaattaagaaaaacaaaacaaaaaacagagtagaaattaagaaaaatggaacctttatcaaagtcctgaattgggttgactggtgagacaaagatcaacccagacccagaaatttcgtagcaggaatctgtagaatcagctgtattaagtagaggaatttcttggaacagagtcgagagagagagaggtaagaggactaagttgcgtaatggtgtcgtccttatgactaatgagacgtgtgttgttccaccgaattttccaccttcctaccaaaatcaatattgagactttgtgcgtaaataggaaaaaaattggatttgataggacagggaaaataatctttgtaacttttagtgccaaaattaagacaataagagttttggaagatgcgtgtccagcttctacatctcacgtttattgtgtggacagttcgaaagagagtgttgagcatcttttctaacaataaaattaaaaggatataattgctcgttagtaatccacttaaaggggtttaaccaatttaaacggtaaacttttttaagagcaagcaaaacaacaatggttcatttcaaaaaggaaaatgacaaaactacatattaacatatgaacaaaacttgtgacgcttcaccacatagtttggcttctacatgatcggatcataggcagctccaaaaccgaagttccacccacccagactactattggaagtcattactctatcacaaaaccattcgtctagtttcttcttcccaagtatgaaatgttgcatttgcgagttcggctgaaaacgaatatttcttgctcttcagtagcgcctcctgagcaagtaatgacttccattcaccgctcaactctttcctttccttggctctaaggctcctcaacttctgtaacatctgcttctgtgcatagttgcttaaatgctgaaacagtgtcgtctcaagcgcatcctgtaaagcgcacagctcatcagcagcaccatcttcctccttctccttctcattagcctcattctccatatgtttgtcaacattttcagaaggtaatttgtcatcataagagtcgcctttttttgcaaatccatcaccatttccaggttcactgtttgtcactgcttcaactacctccctatccttcccaccagtctcattctccatagttttgtcaacattttcagaaggcaatttgtcattgctcccatcaacacatcaagatttatctttgccccatatcgccatggacaagtcaaaagcttcagaatcttgggggttactaaagctaggcagcaggatgaatcattatgttggaccgttagtcttcttttttttgctttcataaacttgtaaaaaataaataacctcttgtcaacaaatttcatttacatactccaagcccgtgggccaaaaggatcgtacggagccattttttgttggtccaagactccaagcgaagaagactatggacttcttgtattattagccaaaattaaaatttgaagttaggtaacaaatttatggatttaggaaaatacgtttataattgtattttcttatttagacattgcaaatcccatgccgttttcttttgttgttttgtcaatttcatgccgtatgattaaagtttacaatgcattttgtataagacaaatgctttttgataaaagaatattaaggtacaaaaaaagaaaaggaaggtaaaaagattcctttttccctctctttgggccttaaatagagacagagaccgaaagaaagaggagaaacctcacacaaaattggtcctaaacgagtctccttcagtcgtaatttgcagcagagcaacgatg

SEQ ID NO: 27152 - DNA, 3000 bp, Unknown; identical to SEQ ID NO: 9936
  misc_feature (1)..( 3000): 2750-1469P.txt file - cDNA_ID_2730397; gDNA_ID_2684204; Annot_ID_137269

SEQ ID NO: 27153 - DNA, 3000 bp, Unknown; identical to SEQ ID NO: 10158
  misc_feature (1)..( 3000): 2750-1469P.txt file - cDNA_ID_2730409; gDNA_ID_2213627; Annot_ID_195928

SEQ ID NO: 27154 - DNA, 3003 bp, Unknown
  misc_feature (1)..( 3003): 2750-1469P.txt file - cDNA_ID_2730409; gDNA_ID_2684211; Annot_ID_191533
taggtatgtgaacgttgaggttatcagttgatgttttttatttcagctgtttggagtcatgggtgatagttaagtttatcagcctgtaattacaattctttggtttcttgaagggactctggcaaaatacactggaggacaggtgtactattatccaggtttccaatcatctgttcatggagataagttaagacacgagcttgctagagaccttacaagggaaactgcgtgggaggcggttatgcgaataagatgtggaaaaggtttaatagtttatgataatatattcgtttttgctacctgctatgtcaatatttgctaatgcattggtgtgctacttgtgatcttatatatttttgcatgcaggaattcgtttctcgtcctaccatgggaacttcatgctaaggtctactgacctgcttgctcttcctgctgttgactgtgacaaagcgtatgcaatgcagctatctcttgaggagactttgctaacatcccagactgtgtatttccaagtggctttgctgtatccttgaatagttgatattttaaacatacttgagtttaaacatacaacacatcatttagcttttagtaatccttaacagaactaagatataccgcctcttgtggagagagacgtataagggtacacacatctgttgcaccagtggttacagatcttggggagatgtatagacaagcagacactggttccattgtgtctttatatgctagattaggtaagctatattcaaatttttttcatatgctacttttgatactatttaatgacaatttaaattctgcagcaattgagaaatctttgtccgcaaaattggatgatgcacggaatgcaatacagcaaaagattgttaaagccctcaaagaatatcgtaatcttcacgcggtgcagcatcgcttggggtccagattagtatacccagagtctctgaagttcttgccattgtacggattggcaattactaagtccactcctcttctaggtggacctgctgatacttctcttgatgagcgctgtgctgcaggcttcaccatgatggctctgcctgtcaaaaagctattgaagcttttgtatcccaatttattccgtgttgacgaatggctcttaaaggtttgtgtatttttatctcaatgtccattatcaaacatcagtgttcaagaaatagtaaataatttgtgaattcacatgcttgcagccatcagcagcccacgatgactttaaagacgtattaaggagattgccgctggctgcagagagtttggattctagaggcctttacatatatgatgatggttttcgattagttttgtggtttggccggatgctttcacctgacattgctaaaaatcttcttggggttgactttgcagcagacctctcaagggtatgtatttttatccacatatatccttacatatgaatatatgaacaggcggtacattcgatgatgtatatgcatcattagtgtttttcaagaatttgaaacatgataatatgtgtgaaacccttgtctttcttcgtgttgggtctcttaggttacctttcaagagcaagagaatgggatgtcaaagaagctaatgaggttggtaaagaaactgagggagagtgatccttcatatcaccccatgtgttttctagtgagacaaggagaacaaccccgagaaggcttccttctcctcagaaatctcattgaggaccagatgggcggttcgagtggttatgtcgattggattctacaacttcaccgccaagttcaacaaaactaagatagctcacaatggtaaggaaaaaaccatcataatacttccaataacatgcttaaagtaccacatcatgttcgacgcatcttatgaagcggttttactttcagacaactcgggtgctaggatgccacctctttgtaaccattgaagaactcttgagctcaaaaatcttctacttaagcaggatcatggcggccttcttccttgggccataatgtgttgttttggataaagaagtgctactttttgatttttcttcatttgtttttctatatagaccttttttctcaagattaggcttttatttgcctaaccagaatggttatctccgtaagattagtcgttttttaaatcttttgttgccttttttttttgtcctcattcgattttttgttgatgtgcgtctgttctagatttattttgggagttgcagttcatgaatctgtcctaattagggttattaacaagaagatgctactgttaaaattttaaaatatttttatgaataaataatgttgtgaaaaccttagatttggatgaaacgcatcgttggtatacatcggtaaagttcatacataaacaatacggtgattgatcgctgtaagaccaactgttcctgcaatcacaaatagataaattaggatttcaatttttaactgctgtaattctgattcaaagattctggtcggttgaaccgggacggggaaaatagacgtggcaatgtcttattggatggtactttctagaaggttacagaataaaagcggtcgtcggtataggggtcaaagtagcttaaacgacgtcgtagaggaatcttcgaatctcccaatagcttgcctttataacaaacctctctgaaccattgctatccaagaaatctttcagatttgcgcatatcgacaattttccgagcggccagtttacgtattttgtttgtacgtgatcaaatctccctcgctttctcgctatcaattttatcaattatgtgttcccgattgtttctagatttggattttctatttgcggatactagttcttttttgttcggaatcgattatggatttggtcttaagatttgcggaaattcttttgtaggtctgatatagtttgttcggaatcattcttgttgctcaggtcttagatcattgcgattgtaaattttgattttgattttttttttcttcaggtagttaacgtgtttcaaggactttgacaatg

SEQ ID NO: 27155 - DNA, 3003 bp, Unknown; identical to SEQ ID NO: 27154
  misc_feature (1)..( 3003): 2750-1469P.txt file - cDNA_ID_2730409; gDNA_ID_2684211; Annot_ID_137351

SEQ ID NO: 27156 - DNA, 3003 bp, Unknown
  misc_feature (1)..( 3003): 2750-1469P.txt file - cDNA_ID_2730412; gDNA_ID_2684211; Annot_ID_137350
attattgctataatacacgcatgacaggaacttatgttcttaaaagcttttcatgacgatgttcaaatcagcttaggtacagaaagcatcacatcagtaaaagtgaacagtacacaagagaaactaaaggtgaagtgaagcataccttgatggtgtcgtagtggttccacccgacttcagaagaaaggcgacccaacagacagtatttgtgtccagcctgcagcctcaagaccctgatcaagaaggaagaatcaaagtttcagagactgtagctacttgtaagtataaatgaaggaaactgaaaaaaaatgaaaatgaaagggtaaaaggacaaacttgagagcatcaggaacgaccatcctcttgatcttgtcatatggagtaggaactccttcaaagaccttcaagcgggcaagtgcattagctccacgcttagtcttgtgtggaatcatactgccacacaaacaaaaacaacaattcaacatcggatttggcacattttctcaaacaaaaaacaaaaactacacattgtacaactacaaaaacatcaaagtggattctctactttagtatgattccaatcctagagcaattttcaatgaaataagagttcatatgcgctttctacattattcacagtactaaattcataaaatcggtgctcgaatcagtagctaaaaataacaaaaccagagagagatcgaagtaacgaacccgcgaacggtacgccagaagatcttggagggagcacggaagtgaataggtccgtgagaaggtttagtgttcatacgcttacggagaaacctcatgtacttcatcttctgacgaacaagtccgccggagagacaaatctcctcgcaccggacaaccacaatattctggccattgagcagatcctttgctacaaccgaagccaagcgacctagcatgtggtgacgagcatcaaccaccacgcgcttcgcgcaaattcctgatccagacaccatttttcactcagctctgatcagccgcaagcttactactccggggtgattaaaagtgagcagcttattcaaattagggttttgcggtgccttttagcaccattttattgggccgtgataattgtctgttgggttatgtacttagtttaggatagtcaggcccatcttttctcttatgttttatatgtaaattttaaatgccaaagggttgattagggaaataatataaaatattggggtttaattgtgaaagtagaaaagaaattagaagaagaagaagaaaaaggagaaaggtatgatacacttttacttacgtgaatgagtttgtgtgacaacaagacaagcgtggattctggtactcatacgatagaaacggttgatgttagagctaatctcaattttcaacaatcagataaacaaatacaaaaacattctctttccttggaaatttacacaccacaattttggaaaaatatataattaaaaatggtcggaaatggaaaggttttaaacttgtcggagctttctcaacacaggaatcgccatgttaagtgagttttatgttggagacatagatctctctaccaaggccagtgatattgctactactactaccccaaatcagacagagcataatcaagataacaagagctttgaattgaagagttctgagttgttgttgattaagctctttcagtttcttgttcctcttttcatcttaggtttggctcttggtgttcgattctacaccaaactccatcatttccatgaaaatcgatttgtggtttgggggcaatcaagaagatttctatggactatggttattggttaacattatttgcttttatatctctctgtattgtctgtgtataagacatcttatatattaatcatgtaagtgacattaccttagtttcttcaaaactatgcagaattggttctagtcttcacagtcatgcattatactcctactgattttccggatagttatagcatgatcatgtgagcataataaatcgataaaatcttggcataaaacatcaatgaattctttattaatttcttataaaattattgtttataactataactttcttatttataatatctttaaaataaattgatttagaaattccgaaaaacataatcaggaagagttttaaactgttagtattaaatttcattttactattttataaaataatagaaatgaaatctatgaaagtaatatttacagatttattctttatcaaaaaggaaaagaaaaggatattttattaaaaaaacagtgataggacgaaactgttaaatgggctggagagatataaaactgttagccactacctggcccataatatatcacatcgtctctttcgctgcacttggtggttctccaattccgtatcgaaaatcttcttcgggtcagacgatctgaagccgatcgctgtagaatcagtttcgtgctccgcagtttctcgagtttcctctcacttcaggtagtcttcgacaccctaatcatgttagattgatattaatgttgaattttagctgatattcaatggttattgatccagatcttcataagagaattcacttacggagagggactttttcgtagacgattctcactggatatctatcacccggtaagatcgtcttgctcgaaaagaattgaaaagtttttaagtaattgaataaggaactgtgaatcggagaggcttacttttttgaaaagatctaaaccatcgtagaagatcgtcctcaaatatctcacagaagttaccaattttgaaagatcactagagatagctacggattttgagaggcggatctgtccaggtcggcactgtgaaagagaactacactggttttttccagatgatatgaagcttccgtgaacgaatctgattctaaggtactcatcgaagagaatctgggattgtattgatctggtcccttagcttccagtttggctataactctgacaactgttgtaagtgataagttgtgatcaataatg

SEQ ID NO: 27157 - DNA, 3000 bp, Unknown; identical to SEQ ID NO: 14669
  misc_feature (1)..( 3000): 2750-1469P.txt file - cDNA_ID_2730416; gDNA_ID_2684211; Annot_ID_191530

SEQ ID NO: 27158 - DNA, 3000 bp, Unknown; identical to SEQ ID NO: 14669
  misc_feature (1)..( 3000): 2750-1469P.txt file - cDNA_ID_2730416; gDNA_ID_2684211; Annot_ID_137349

SEQ ID NO: 27159 - DNA, 3003 bp, Unknown
  misc_feature (1)..( 3003): 2750-1469P.txt file - cDNA_ID_2730424; gDNA_ID_2684211; Annot_ID_137347
cgtttaggcacttttagataattttatgagaatattacacgtagaggtactattttgaaactttagccacaaataggcactttgaaaggagaaggcactttaccaaatcaaaattcccaaattgccctctgaaccacaacgctttctcctcattttctctctcaactcttttctctatcgtctttatttctctctctttccaaaatcaaaaccaattttttacgggaatctcaatattccaaatcaaaactaaaaacccaatttcatatgatttatcatcatcttccctgtctctcaacaattatttgatttggttccatttatttctctccttgattaaggaatctctgtcatcgattacaatgaaaagtgaggatgttaaccatgatcagttaccttctaagcaatctgggcttgaaacggttcgtgatgttgagaacgcgagtagcagcaaaaaggccattgtcgatgtaacttcatctgaggcatagttgtccattgatgagtgtccaagcattcaagtccaaatggtcatctaataactcacatttgaagcatagttgtccattgataagtgtccaagcactctagtccaagtggtcatctagtaactcacatctgaagcatagttgtccattgatgagtgtccaagtactcaagtttaagtatataaagcgtgtaagaagatcaattgtagcagcaatgttctgttgttgattcttaatatattcttcgtttttaagttatgatagagaattttgagataatctcagaatttctatgatttgtaagaattatagagaaccaccatgattgatgattttgaaaaagaaaataaaaatgatgaaaaaaaaaacatggaagacagagaagataaaaaatgatgctagtttgtctccatgataacttgtccacgtaaacgtaaccatgtggaaataagtgattctcataagcaaaagaatatgcttttaaggttagacgttcaatgaaacatcaatttatcaagaaagaattaaattgtaccaaacaaggcgatcaaatggatatgaaatttaatactggaatttgccaacttgggttttccataaactctcaaatgtttgattttgataaactcttaaatgtttgattttgcaaggaaagaaaaaaaagtaataatgagaagagagagagagaagagagagagaagagagagagagagagagagagagagagagagagagagagaggaagaagaaggaaaaaaaaggaacgtggagagatgaaactttttttttaattataattttttaattttcaggggcaaatttgtcaaaagtttaatgaaaaagttggaaaagtgcctcatccctgacaagtgcctcaaaaggaataaaattctctaaaagtgcctaaacgagtccatttaaatatatccactcggaaacctttttactgatccatatctaatctatataccatgtccataataacaggagattcaattaaccgtggttcgtatagaaaccaaagttccatgtccataaggtcttgaatgtggaggtctctgcaaactgaaagaaaaatcaacaaataattttttggtatccataataacgagtccatttaaatatatccattcagaaacctttctactgatccgtatctattctatatatcatgtcaataataacagaagattcgattaatcgtgttttgtaaagaaaccaaagttccatgtccataaggtcttgaaggtggaggtctctgcaaactgaaagaaaaatcaacaaacaattttttggtatccataataacgaatccatttaaatatatccattcagaaacctttttactgatctatatctattctatatagcatgtccatgataacaggagattcgattaactgaaatctcgatgctacgtagatgaaacgagtttgacacatgagagaaagcaaaaatcaaatcaagccgctgttgttgaagaagaagaagtttcttttcattttttacaaagatgaagagagagagagagggagagagagggagagagagagagggagagagagagagagagaggagagagaaagaaaaaaaacgtggattaagagaatattttagttagaagttattttagtaaaaaaacataaagaaagtgtctagtcttttgaaagtgcctaaacatggaaatagtttttaaaaaatgtctaaaagtgtaatattctctcattaaaatcatctttttgactcttcctattcagtcaaaagaatttaactggatatgaaagaattcaaattcctatacatatctgtttgtatttttaaaaatttattgctattgaattgattgactgttattttatttatgatggttttgataataatatcactttttatgctcccgttagataagaatttatttattactttaatttctaattgtttttttgttcagttcaattattccaaattctattgcttgatatccactgggtaatcatttgaaaaaatcgttaaagatcgacaaatgagtgtatatcatgctctggtatatattaaactcctatccaatagaaaatagtattgtgaagagagaatataatctgctaaagtattcccactatccagaaaaatacaaagtagaaaatgcacaaaacattatggttagatttctatccactatcgaagattggaatactagtttataaaaccaaaaacgtcacggtgtaactcctcgactgcacgtaatgcatcgaataacgaaatagtgatatatacacagaaaactatatagtatcatataaaattctttagtaataattattaggtcttaagaaatacagtagttgcgagtttaattgactagagagagtcatgattagtttaacgataatgactatttaatcgggcacattcttttccaaagatacccctacgacaacattaaaaaatacaaaaagccgaaacccgcccactacaatgaaaagctccgccaccaccaccaccctctggaacgatg

SEQ ID NO: 27160 - DNA, 3000 bp, Unknown; identical to SEQ ID NO: 14673
  misc_feature (1)..( 3000): 2750-1469P.txt file - cDNA_ID_2730428; gDNA_ID_2684211; Annot_ID_137346

SEQ ID NO: 27161 - DNA, 3000 bp, Unknown; identical to SEQ ID NO: 14658
  misc_feature (1)..( 3000): 2750-1469P.txt file - cDNA_ID_2730446; gDNA_ID_2684211; Annot_ID_191512

SEQ ID NO: 27162 - DNA, 3000 bp, Unknown; identical to SEQ ID NO: 14658
  misc_feature (1)..( 3000): 2750-1469P.txt file - cDNA_ID_2730446; gDNA_ID_2684211; Annot_ID_137338

SEQ ID NO: 27163 - DNA, 3003 bp, Unknown
  misc_feature (1)..( 3003): 2750-1469P.txt file - cDNA_ID_2730462; gDNA_ID_2684211; Annot_ID_191504
attcctagagggtgtaaaccaaacgtccacacttacactgttttgattgatgggttgtgtagagacggaaagattgaagaggctaatggggtttgtcgaaagatggttaaagacaggatatttcctagtgtaataacttacaatgcgttgataaatggctactgcaaagatggacgggttgttcccgcttttgagcttcttactgtaatggagaagagggcttgcaaaccaaatgtaagaacttttaacgagcttatggaagggttgtgtagagtcgggaaaccgtacaaggctgtgcaccttttgaagagaatgctggacaatggcctgtcacctgacattgtgagctataatgttttgatcgatgggctttgtagagaaggccatatgaatacggcttacaagctacttagctcgatgaactgctttgacattgagcctgattgtcttacattcaccgctataataaatgctttctgcaaacaagggaaggctgacgttgctagcgcgtttttaggtttgatgcttagaaaaggaataagcctagatgaagtaacaggtacaactcttatcgatggtgtctgtaaagtcggtaaaacccgtgacgcattgtttatcctggagacattggttaaaatgagaattttgacaactcctcactccctgaatgtgattcttgatatgctcagtaaaggttgtaaagtgaaggaggaattagcaatgcttgggaaaatcaataagcttggtttagttccttctgtggtgacatacacaacattggttgatgggttgattcgatcaggtgatattactggttccttcaggatcctagaactgatgaagttaagtgggtgtttgccgaatgtctatccatacacaatcatcataaatggtctttgtcaatttggaagagtcgaggaagcagagaagcttctttctgctatgcaagattcaggagtttcaccaaaccatgtcacttataccgttatggtgaaaggatatgtcaacaatggaaaactagaccgtgctcttgaaacagtaagagcaatggttgaaagaggatatgaactaaatgaccgtatctattcttcattgttacagggatttgtcttatctcaaaagggtattgataattcagaagagagtacagtttccgatattgctcttagagaaaccgatcctgaatgtatcaacgaactcatatctgtggttgaacaacttggtgggtgtatcagcgggttatgtattttcttggtcacacggttatgcaaagagggaagaacggatgagtccaacgatctagtccaaaatgtactcgagagaggtgtttttcttgagaaggccatggacatcattatggaatcttattgcagcaagaagaaacacaccaagtgtatggagctgataacacttgttctcaaatccggatttgtcccgagtttcaaatccttctgcctagtgattcaaggtttgaagaaggaaggagatgcagagcgggcgcgggagcttgtaatggagcttcttacctcaaatggagttgtagagaaaagtggagtgttgacttatgttgagtgtctcatggaaggagatgaaactggtgattgcagtgaagtcatagatttggttgatcaattgcactgcagagaaagacccaccttctaaaattattattacacatgattttgtgtagcttttttgtttgtttgtagtagcaagaagagaatccttttgaagtacagcgtgtggagatcataccttgagtaataccaaggatcctagttgggctgggcctggaagatattaaaataaatctacgaatgggcttttagcccaaatgttaaattgtggcattaaaagccctttctctttcgtctctcaaatataaattccacttttgcgaaattgagaccaaagtttcagtttcattggctggggttttgagagagagagagagagagattcttcttcgtctcgtaaaagagtaatagttgtaataaaaaaaagaaaagaaaaagacacagaagaaacattacagttatatacagaaagagaaggtatatatatatatataaacacgcacccatatgccaacacatggagattgatagagagagagagaagagaagatatttctcagtttcttcgtttgtatatcttcttcttctctctctcttttgagatcttccaatctctctctctctctcttatatatgattttttcaaataaaataaaataacggaagctggtttaaagaacaccgttgaattctattttcccataagctgaaaaaaaaactaaatttttgtgttgcccaccaaaaggtttgaaattttgatccgacgatacttgagctgatttacgttattagtgctatttcgatttcctcaaagatttcgttttttttttcttctaaatttcttagttaacctcttgcgtgtgcaattggtgcacttagcaattcctcttctgggctggtgatttggtttgcgattgttttttttttttagggtttgattggatcgtggccctgatttagaacctaattgcggtcaaaagagtctgtgggaggattgaattggaataaagtgttatctttttttgattggcggaattcacattcaatcggaaagaggccaacttgttggcggcttccgatataaaggtgcttttgagctctgctcatatatcttatttaactccaacgaaattgagagacgaatggttccgattttgattttctctgctcatcatgggtttggcaggttagctacaaatcttgaggtccccaggtgcaaaattactaattttatagtgtatacttaaggataattgaagtgaaatttgggagatcataaagaaatgtttggagcttctaagtgatattattggatatggtggactggatcatagattctgatctggtcaggtgctgggacttaggagcgacaaagtaactagagagtggtttaaagtataccacttttaacggataagtggtcatg

SEQ ID NO: 27164 - DNA, 3003 bp, Unknown; identical to SEQ ID NO: 27163
  misc_feature (1)..( 3003): 2750-1469P.txt file - cDNA_ID_2730462; gDNA_ID_2684211; Annot_ID_137332

SEQ ID NO: 27165 - DNA, 3003 bp, Unknown
  misc_feature (1)..( 3003): 2750-1469P.txt file - cDNA_ID_2730470; gDNA_ID_2684211; Annot_ID_191502
ggtcatcttatatttgtttataaaattgccaataattgagataaggtatcatgattcatcaatctagctagactgtgtgtaccatacataaactataacccatgtgtataaaatatacaaatatctgtgaacatcaaccacctaactataatgaatatgaaaatcatacgactaaactaatttacgtaaactatactactttgaaacaattattcatcaaattctcttatactattaattgtggtttactaaacttccaagttttatgttttactaatcctgtaaaattagactttagccgagtccgtttgaatctaggatttttgaaatttccaggtggctcaaagctaaagaaaatgtgaatgagaaatgatttcaacgaaaataagatttacataatagccaatgacatatatgcacttgtcaagttggagttaaacaataaccacacaccgaattgaggagcccattggaaaaaacagaagcaaatatatttttatgtaaaaatagaaacggaataatatagtaacaaaaagatactctcttcaaccttatccattcttcgccacttctcccactaatccgctaaatcattcttcttcatctctctctcattcacaattcccgaaattctctcaaatcacagatccttttagggtttttccactgtttctaggttttttttattgctcaaatctgatcaatggatagttgtctctctaatcaaacggcgcttcagtttctcccgtcgcgttccaggagacagagcggcgatggaggcggtggttttgttattccggcgaagaggaagatccagtatagttcgatggttgtggttgcggcggcgggacagagtcggtgtgagcctggaagcagtctaaacgcgccgcttgagccacgatcggcgcaggggaggtttctgagaagcgtgttgctaaacaaacggcagctatttcattacgccgccgctgatgagctaaagcaactggctgatgatagggaagctgctttagctcgtatgtctctcagctctggttccgatgaggcttctctccacaggtccgtgaaacctttccttatctaatctctcacaattcaaagatccgtaaacagctgtagaattataaacatacaaagaaatatgtgtaaatcattacttacatactcttatttaatcgaccacaaatcagtattttattagtatttatcacataagcttgtaaagtttgattataagttgtttgatggtgtttatcagtttatgatgatttgagaatcacactaatgatatggttgaattgaaacaagagaattctgtagttatgatcttcaggtgctttctcatactctgccttgtgaagcaagttttgttttagtgtttgataagggctggttttgcttttttacatttcattgttgcttagttcgttaaatagtttccgtatattttagtttcttgcctgtgttaaactctctgacttgctcaggccattttatgctctgtttgtgaacattttctcaactatcttctgctcttttacgaacactaacactctgattccatggttggcagaaggatagctgaactcaaggaacgctactgtaaaactgcagtccaagacataatgtacatgttaatcttttacaaatactccgagataagagtccctcttgttccaaagctatccagatgcatctataatggaagactcgagatctggccttcaaaagactgggagttagagtcaatttacagctgcgatacccttgagatcatcaaagaacacgttagcgcagtcatcggattacgggtcaactcatgtgtgactgacaattgggcaacaacgcagatacagaaactgcatctcaggaaagtatatgctgcctcgatcttgtacggttacttcttgaaatcagcttccctaaggcaccagcttgagtgttccttatcagatattcatggaagcggatatctgaaaagtcccatctttggatgctcattcacaacgggcactgcacagatctccaacaagcagcagctgagacattacatctcagactttgatcccgagacattgcagagatgcgcaaaaccaaggacagaggaggcaaggaatctgatagagaagcaaagtttggctctttttggcacggaagagagtgatgagaccatagtgacatcgttttcgagtctgaagcggttggttctcgaggctgtggcgtttgggacattcctgtgggacacggaattgtatgtagatggtgcatataagctgaaggagaatgggaatgcagaagaacaagaaggaaagaaaagcatatgatgaacaagtctggttagaagaaaagcttcatgatcttctggtagtgtatatatagagaaatgtttctgccgaatctctcaggcagttgttcagttcaatgtatagatcttgcttagaaatattttgatttctgaataagaatgtggtgtggttataaggaataagagatactgtagttgggttcaattttatgttatgtgttaagtttccttgttcaatttgatctttctccttttgtcaaaagactcaaaacctcaaaaacaaaactaaaatttgggtcccaaagaagctatgcaaagggaaggagatactttgataatgcttgtatttttgggcttattttaggcccaaatagcaccttatttcggcccaaaagttagacctaccaaaaaaccttcaattgtcactagagcgaatgaatgtaaaaatctggtctcctattatcaattccgtttctctctcgccggaagatttttgctacttcatctccttatcgccccaccaccgtcacatattcactggtaagcatatccattttgcttcctcatcttccacattaggcttctcccattttcttcttcctcccgccgcgaatcgcgcgtgattagggtttatgaaatctaacgcctcaggtttcgcattttctcaagtttctcgttaatttcggttaaagaagatg

SEQ ID NO: 27166 - DNA, 3000 bp, Unknown; identical to SEQ ID NO: 9142
  misc_feature (1)..( 3000): 2750-1469P.txt file - cDNA_ID_2730470; gDNA_ID_1972013; Annot_ID_177825

SEQ ID NO: 27167 - DNA, 3003 bp, Unknown; identical to SEQ ID NO: 27165
  misc_feature (1)..( 3003): 2750-1469P.txt file - cDNA_ID_2730470; gDNA_ID_2684211; Annot_ID_137330

SEQ ID NO: 27168 - DNA, 859 bp, Unknown
  misc_feature (1)..( 859): 2750-1469P.txt file - cDNA_ID_2730474; gDNA_ID_2684211; Annot_ID_137328
aagcttttttagtttctttattacaagacgaccgttgagatttgttcagaattaagacaccaataaacagtcttgtactacttaacttacataaccttttcatcacataaatctcttcgtgccaactcgtttagagccccgacaatcacacttttaatactttttctaagaatcaacgtttatagtactacaatgaacagtcaacgagagtttcctgagaatctgtcaatattttgttccgttcattaacaacgagagttgaactaaaaaaatccatagagaacaattcttcatttatccacctacttcatttcccacgaagcataagggtccataaataatctcaacgacatgttaattattagaccatgaaaatttctttaattattaacctttgtagacaaaatgtgagaaatgtttttagcaatagtttatatcatttaagatttaaaattatatttaacaccaaaaacagaaagaatatttttcactaaaacataatttattttaaaacaacctttaagaattggctagaaacagagtttttcaattaatataaccattcagactaaccaaaaaaaaaaaaaagagaagacgtcgtagtaatcgtacacttaaaaaattgaatataactagtaaatacaaaagttagtaatacattgtatcttttgttgatttaatactcaaaaacaggcttttgtacaggaacacgtaacactagccattaaatatctccactcttctttcttcttaccaaattactcaatccatctccctctcttcttctccttctccaaacaacaaaccaaagcttctctcttttcttgcttcagagagacctagaagagttatcaacatg

SEQ ID NO: 27169 - DNA, 3003 bp, Unknown
  misc_feature (1)..( 3003): 2750-1469P.txt file - cDNA_ID_2730490; gDNA_ID_2684212; Annot_ID_137371
ttctatcgtagtttttttttcggatgtgtatcttagaaagttttgaccatcccaaggaagtagaattaagaatctgatcaaaatattcgtttacttagggatttgtaaacgccttggagatatgttccgtcggtgaattatgaaatatatttgttgtggtgttattttcgaatattttttgggagatattgtaaccgacacctgatttctcccgtgactcgaagaggatactaagaccatcttcattggtagtcttttaggagattttcattactaaaataataaaaataaaaaaaaaaagaagagagagagcgtagaaagtttttcaagtgagaaactatgagatactctctacaagctatctttacatttttctcctttcaattggtttaattttttattaaaataaaaatttaatcatataataaaaatttaataaaatactaatattttttttgtttgagaaactttttgagtttcttcttaatggagatgccctaactcaacaagtgaccaaataagttaatttatttatgtgtatggttaagcactccaacgtcaacttaacatgaaaatattccttagcctaactcaacatatatttcaatttagagactatttggctctctgtaacaaccataatccagataattaatagaatatcttgacatgagatgtgtatctatgcacatgagatatgtatctatgcatgtcgatggaaacaaaaacagtttgtcctcatgcataggttccaagagatgtgtcggccgacaaactaaatacgctcgttagtaaatacataaattatacgatacgaaattattaggggtataatttccaaccataaatgagagtcgttaattgatgtgaaaacaatcttgtaggagtagtaatttagggaacaaaacagaacctccacgttacgtaattagacactaaaataaaactctcccaagaatagcgtaaaagtttttaaaatatatacagaatcgaaagcaatcaaatcatatttttcttatcgttctaaaacaattaatcacgaagagcttcttttcggcattataaaaccgaacatgtacaatttcctcatatccattagttgtttgattggtggtttttttttttttttctcgccaattggtggctttatgatcgctgtataactattgtcaacagagcccattactaacgtaacgtgcatgttcttcggtcaacacttccaatatctcaaatcaaagccataaccgtgattaaataactattttatgagttttttataggtaaaattgagtgatatactatatagtaagaaatttcagaagctcactacattttagtatcttgtttttggtcgtactaattgagaaaaatcgttttattttcataatattttccaattcatcgtgaatgtaagcaaaaaggttgaaagaaacgaataacaattattttaaaagattagaaaaaagtgaaaagagagttttgtagtacaagaaatgaaggaagtacaaacagagaaacgaatgaatgggtgtcagtattctcccaatcaaattgacatctactttccgtaccatacagctgtttccccctcttctcaaacctttttccccacttctatgtacaagtacatacatactattagttagattcacacactaaatctcgtgtattgtacttccttagaaaaaaaagtgcacacagagtaagaagagagggtttaagttttttttatacacatccggaaaataaagaaaggagaaattgaatagctacataaatcaatccgtacaatgcgagagatttcatatagtagttttgtaaaataaaagggtacttatgtctttttgtatcgacaggttttttgtattttatgatgccgacttcctccaaacgtggacgcgctttatggttagtgtgtttaagtaggctaaaaatctctaaagtgaaactcaattgtcaacgattaaagaattaagaagatgtaaaaaaaaaactaattttccaaattaattaataagctcataatatagcgtgattcgcgttaccgaatgtaatttgacttgtggtatactaattgtgactttgtttttatttctttgacattacgtaaaatttgtttctaccaattttgataagtgcacggtcaaatcaaaagaggaaaatgaaaacttggggttgaattctcaacttgaacatatatgatagtcaacacgacaatacgttgtattccttatattgaaatgaagctaattaaggtctatatggaaacaaatatgttatttatttatcaatgacgtatcacattttgacgaataaagagattaatgttatcctttacaaaataatgaaataagaaagaaacagaagtttatgtttgtccaattatcctcaatgtttgttgatatacgaattttgagaattcaaactgaatacaagaaataaaaatgtagtgagataataatacaaatttgcattatttcttccaagattgttttctttaagtaaatgaaaagtatcttggattattacagaaatgaccctaaatctttttgaatttacagtttgtaccaccaccgaataaaataagaaaaagtttcgttaaatgttacgagtgctcgttgaagacgaagtttcgaagacgaccaacaaagagaaagatcaaaatttgagagggaaacaaaaaaagaggaagagagaagaagaagaagaaaacacccttgattaataaagtctcagactttttgattcgattcgaaaaaagtgagtttatgcttgaagctgggaattccaaaactcggaattcgtgtaaaactagttcgatttatcagagttatgctaaggtaacatagtcgattcatttcaaatttacgaactttatgttcatctgatctctctctctttctcttctatttttggtaacgaatctcgaaatttcttgtgttgaattttgtagttagtgaaggtgaatgaaaaagagttgatttttgagagaggagagaaatg

SEQ ID NO: 27170 - DNA, 3003 bp, Unknown
  misc_feature (1)..( 3003): 2750-1469P.txt file - cDNA_ID_2730494; gDNA_ID_2684212; Annot_ID_191567
tagaaaacaactagctctaaccaacaacaaaaccacagaacaagaaattccagagatctataaatatgcagatgcatgcacacctcttcactggatgttcagtaatgatctgagcatcagcaactttagcagttgccctgaggaaatgagccaaaggctggcctagagtatgtgggaaggcacgggcaatgatatgagcatcaccagcctttgccacagtggttccatcaccaagttcaacacggacagtagtcccctgtaatgtacattgaatcaataacgaattaaactacgaatcatccaaccaaaaaaaaaactacgattcaatcactgttccagaaaatcactccatcatggtagttcacgttgaaaggcaattctacctaccacactaaactgaaatgttaaatcagacgagtaagtataaaaggatcataaaccctagatcccgattataataacagtgtaaacagatctgcatgaacggaaacaacattgcaagttcctcgagtagacaatcaaaataaacagctcgaagggattcaaaatattcgcgacgtgacgaaattgtgagaaaacgaaacagcagaagagatgatatcaatgaaaaacatagagatccaaacattggagacagtgaacgagagaaggaagcaagagatctaaggaagatacgaatatacaaataaaaggaagaaggagaagtacctggagacaaggaggaagctcagggtggtactgagatcggagttgttgaagaggagagagttctctggggattccgaaatctgaatccatgggcgataactttttaggtttttgtgagaaattaggttggtgagagtgtcagagagactcagagaagattcagagaaagttttttcctttggcccgtcaaaagtatttatatagtatgcgggggacttgggcgatacgatcaaccaaacagccaaaatttggtcttcttcttttttttctttcagtccacgctttttctcgatcagcccttgttattctggttatttacgaaaatgccattggatataaatatatacccttacctttttcggtttggtaatgtttggttagtgaccaaattgtctaattcggtttggtgttcatattttatgggttttaaaaggttttagactgcaaatttatcgaactgtatgagtgtacgtttggttttaagtttagtttataaatgcggttaggttttggtttagtttgagttgacaaattccccacctaagtgcgaccaaactttcaaactaagaaaaaataaaagcaaaaaataggatatgatgatatgctaaaagggagagtgaatgagcaccaaaggataggtgaagggtaaatacggaaatagcgagagaaaaaaaaagaagatggaaatattggggaatatagcattcaatagggagatatgcttttacatggtaattacaaaggaataaaggcaaacatatagtaaaagatacgactctctcattccctcttccccaagtattattattgcctgataattgataaactacccatcgaaaataaatatttattatgcacatggatctttaaaaaaatggatttgtttattatttgacctgatttgggcttttaataaggcttcttatttactctgttgaccgtaggaaaggcctgtcattatttaaagatctaccaactgaatttcatcagtcagtatcgatgggattaggtatattaatggtaattgttattttcataatataggcctagtgtgataagacctcaaaaacaataagctttgatattacgatgagagtaggagtatataataaaagcataagattatgatgatacaaaggacatcaaagttggtgaacacctagaacaacaaaaggagtaggtaaaaggggtcagctttgcattgtgcttatctcaactaccttatgagaagaaaataatatttttttctaaagtcaaatgtttgatgagtgtagtttggataatgccgcattaaaaaaaaaaacgtgaaatgacaatcgaacattgatgattggagggcttatttgtaattacgataactatagtcaaacggcccaaaccattaataataaaaggtgaataaagaattttctgaaagacgaagaagagaaacgaaattcgtagaaatgatctcgggctcggcgacggcgagtcatgggagagtgttgcttccgtcacaaagggagcgacggcccgtctcaactggatcaaatattttacgtttcagagaaacagtaccgagacaattcagcctgatgatggtgacgaaggcgacggcaaagtatatggggacgaagatgagggaggagaaactatcggagatgatagaggagaaagtgaaggaagcgacagaggtttgcgaggcggaagagatgtcggaggagtgtagagttgcgtgggacgaagttgaagaagtgagtcaagccagagcagatctgaggatcaagctgaagttactgaatcaggatccgctcgagagtttctgccaggagaatccagagaccgacgagtgtcgaatctacgaagactaaaatttgagttttcgtgtttttaatgattgtagctaatctcaaaacagaggacttagaacagagactgattctgattaataaatctcaatcgtccattgaaaccgttgttcatcgtgttcacttacaccgattgatttggaatgaaactctgcattttggatcttttgctttggaacaaaacggttgttttgattgtttatggatctaacgatgtggcctgttacttaattgggcctataatctggatccgccgagtccgggctttttaaagaactggcgaatatcattacacgtggccagatccataactttgaaaatttggttatttttaatttttgtggaaaattagagaccgcttcttgctcttctaacttcacctctgctttcttcttctcgagtgaaacagacagccaaatcaagatttgacggtgagccaaattccatg

SEQ ID NO: 27171 - DNA, 3003 bp, Unknown; identical to SEQ ID NO: 27170
  misc_feature (1)..( 3003): 2750-1469P.txt file - cDNA_ID_2730494; gDNA_ID_2684212; Annot_ID_137370

SEQ ID NO: 27172 - DNA, 3000 bp, Unknown; identical to SEQ ID NO: 14701
  misc_feature (1)..( 3000): 2750-1469P.txt file - cDNA_ID_2730501; gDNA_ID_2684212; Annot_ID_137368

SEQ ID NO: 27173 - DNA, 3003 bp, Unknown
  misc_feature (1)..( 3003): 2750-1469P.txt file - cDNA_ID_2730505; gDNA_ID_2684212; Annot_ID_137366
cataacttcatcaaaaccagtcgttgagattctgttgataacatcagtcggattttatatggctctcgatggagtcaatcttcttggtcatgatgctcgtaaatatctgaacaacgtcagttaattatcacttaattttactcttttctttaataaatctaaatgattcaactttaatatgtctctgttttgttatcattttcttgatgtgtgtgtatatagattgtcttctatgtgtttagtccttcgcttattggaagccgtttagctgatagtgttacatacgaaagcttggtcaaaatgtaagtcaatctcagattttgcatcttgagtctgtaatctttgctctttggttaatgaaaatgaggatttgcaggtggttcatgccggtgaatgttctgcttacattcatcattggttcattacttggctggattgttattgtcatcactaagcctccttcacaccttcgtggtctcattcttggttgttgtgctgctggtaacaaaccttaacatgaatgtttctgatttcagaatctgtttaacttgtgttttgcttatgactgtggtaatgaatgaaacaaaacagggaatttggggaatatgccactgattataatcccagctgtttgtaaagaaaaaggaggtccctttggagatcctgagagttgccagaaatatggaatgggttatgttgctctctccatggctgtaagttcttcttcttcttcttctttgtcttcttcttcttcaaggttttgtaatcagtatgtctcatgacagtacttggtaacgtatcagatgggatctatttacatatggacttatgtatacaatcttatgcgtgtgctatcgaactctcccgttgaaacccctccctctgttgaatccaactacgacagctacaaagttccccttatttcttccaaggaagaagaaaacaaccaaaaggtttcatcacatatgcacatgatcagtaactattcatttatcaaagttggtagtgactgtgtgtatatgacaggctgggaggtgggaaaaagtcaagcggagattggtttcactgtcacaaaaagtcaaccttaagacaatttttgctccatcaactattgctgcggtttgtgtttcaatggctctgttttatacatttgagacgtcactcacactagtgtaatctttctaattaccctttttgttcttctgtttccagatgattgcacttgtgatcgggctcattactcctttaaggaagctaataatcggcacggaagctcctctccgggtgcttcaagactcagtaactctagtggggtaactgcagctaaaattagaccattatcttagcattagctcaacaatgaatcatctcttggaaaaacgtaactcactcattcgaaagcttcttatgtgtcttgtttcttttggctgaagagatggggcagttcctgcaatgaccatgattataggaggaaacctactcaaaggtttgaggagttcaggaatgaaaatgtccagtattatcggcgtcttggttgcgcgttacgttttactgcctatgagcggtgttttaatcgtaagaggagcatataagttggatttagttacatcagagcccttataccaattcgttcttcttcttcaatatgctgtcccaccagccatgaatctaggttcattgctctgaaaccaactctttaaaaaatacagttacttctttcagataagatcacttcattagtttcacttactcttgcaggtacaattactcagttatttggaactggggagagtgaatgctcagtgattatgctctggacttactctttggcttcgattgcactcactgtttggccaacattcttcatgtggcttgtagcttagaatagacccccatactcatcatgttacatgtattgttttgttccattgattcaagaattgttcttggacttccagatgattggatcaagtataatagagaacatatacttataagtcttttgatacgaactttggacttacagtctgtaacttacagatagaagatcaagtccagcctcatcaagaatctgctattttgatcctcattgtcttgggatccatcaagagattgtgaggcttaaaatctctgttatgatacccaaatcattctctcttgaaacagggtaaaaccagagaacaatctacttgactacttgtgactgtggccatggcagaaagctattcctttgtttagtttggtacacctgagaaaaatttcagattgttacatttggtttaatagactattacatatcagtcaagtgagtacaaatgatgagagaaaagagtggtgacaaaaagctctaattggtggattttgtgataaatttctttacatctgtgtccatgtatctcaaacctaatcgtactctaagatcaattaatgtctcatcacgtcatatttgagattttgatgtataaccttccacatcagggctaaagtgcatgctagactccaagatatactatatgtaatatataaatttgtagctagtgaaactgtggaaaaacaaaaattatagtactgaaacattttagtttatgaaacgattcttcagaaaatagatgacaacaacagaagtttttttaaaatcaacgttattgttctttaccatacggtaaacacaatgcgacatatccacatcttcagcaagaaccacaaagtaacatggcacgtttcctagtcgctgtgactaaaggcatgacgatggttcccttataatttgtattctttttttctcagataaagagttggtggttatgatacgttggttttttcatacggaacaaaaataatacttactctatatctctccttcactcttcctctaaaaaggtaactataccatttcatttgatttctccataagttatcgtcgtttggttcattgtttctttatctcaaatcatgtaatatatggattaagtttgcagattctaacttttggaagtagagatg

SEQ ID NO: 27174 - DNA, 3003 bp, Unknown
  misc_feature (1)..( 3003): 2750-1469P.txt file - cDNA_ID_2730509; gDNA_ID_2684212; Annot_ID_137365
gggacttaggtctttcaatagagtttaggtctttctctagttctgaaggctcctctacaacacctttggtaccagacggcacatcttgctcttgcatttcagtatccgccatcatgaagctaattctctgagacatagcatcacaacaacaacgcagaattcaaaatccagaaatcataaatagaaacgcactattgataattccagagagaatgcaagacgcatgtaatcgagaattggaacgcatcaaaactctgagtcctactctctcactgattcgctataattcaaacagtgatggcgactaaagcattagaaagcagagcttcacgaaatcatggagtacatacatagaaacaaaagatacggttaccggtttcgccggaagaagaagacgccggagacggtggagtcgtcgcgggttagggttcgatagcagccggcgaaatggaaggacgccggcggagaaaaagaagcgagaaacggaaagatatcaattaaacggagagatatgcagatcaaaagatttatacggatgatataatgaacacatgaattcattaagaaagaaattaatgcttgttacttgtattaactcttaacgaagatcttaatagcaaaacttattaatgatatttcagaaagttggacttttacgacccatttacataacaaagcccattattgtaaactatgggctcaatatgtaaggtatattatgaatataatcttaggcccaattaaacacggaagacaacgtaggtttctgcttgtctcgattgttgttgtgtttttatttgttactaaagatagagaaagaaatatcgaagcattgtgcgttcatgttcaatatagagtttttgttgtaccaaaaaaatatagtgtttgaatctttaattatagactagctagcatataattaacgtgattaactttacaattatggtgatgatgattttctcagtatgtaggtatagtacttgtcaaagtgacaaataattgcaatttaatgaattggtgtggatccaaaggataacaaatagtatgagcatattcattcgaagcaaaatggtacagaattaagcaaagctttttgtccaaaattctaatgaattaaggaccattatttttagggaataatagtctttgatgccccacatttccaatagtacaaatcaagattttcaatatatgtcaagtttgttattttcattcacggacattaaaacgagtggagcatttcaatttgacatatctttgtccttttctttttgttacagatatcttttgttcacgttctttgaatcatcatattcatagctatgagatcatagaaatatcaaatactgttaattaacctctttaaaaatacatattcacaagtctcttgtgtgagtagaaatcctatacaaacaagtttattcatgctctaataagatagataaataagaagatagctcatgacatggccttcattaggcttgttgcatatacaataagcttacatataaggaattaaggatggtctaatatctcttgcttcacatgagaagagttataggattcgagtcacataagagatttttattgtagtgtgtataatatatcccacttctacaattatccagtctattgtgtatttttcattaataaatcactaaaatttgcactttgacaatatatacttaaatatttgtatctcgtatatatatatatacatatttttagcactgtatgataattctaattattcgctaattgtttttttttggtaagaattagtcgactattttgatattggggttgttacatttatatcttgcattgaattttatggacggacactggtcgcagcctcacacactaatttgaattttccgttatcattaatattcgatcgtttcgttggtacgcttccatcacacaattaatttaagccaccacactattatcttattctcattcagttttgtttccatttcaaatttcttacgacgcatatgaaaatgtacatttttataacaattccccttaaaaatagatgacaaaaagaaaaatgttttttttaaaaaaatatataaaataaaataaataataaatcttcaacaatcgatgaacactttgcaatatctccacaccttgggcaagaaccagaaaaaaacatggggcacgtttcgtagtcgatgtgacgaaaggcatgacgacggttaccatataaattcgtcttctcagataaagccttattattctcaatagtgttatacgacaatatacgaaacaaacaaagaccccgcttgagttgagttttccaaaaattgtggaactgtttcctctttctttttgtacataaactaggttacaaaaaattggaaaatatacaaaatcaaaggacataaacttacgagatatatcataactcataagttgtgaaagttggaattcaaaaaggagctaactatgaatctatgatacgttattttgttgcttatacggaacaaaacaattccaaaaacaaagaagatgtaaaagtctgacccggatcatgcggacaccaagttgtacatacaaaatatgtaggatgaaaatatgaaattctcttcccatatgcatagaataataatttaccttagttaaaaagattagtttctaagtttgccccaaataaagagattagtttcttgaaaaaagcattttgtggatagacaagaatttaaatagaatgaagaggcgaccatgcaagtgttgtactaggccaaattttggagacgctctttctctttcatagagagagagtgagaaagttctgatacggcggcttctcactgtcatctagctgtaccactgacgataaatctctctcttcctctaaatcggttaaaaaattcattcccttcttggattgctctgttttcttcggcggttcttgcagctccattgattctctgtttcctctgctacagttaacttatacttgcagattctcgcgttgatagtaaaaagatg

SEQ ID NO: 27175 - DNA, 3000 bp, Unknown; identical to SEQ ID NO: 14690
  misc_feature (1)..( 3000): 2750-1469P.txt file - cDNA_ID_2730513; gDNA_ID_2684212; Annot_ID_137364

SEQ ID NO: 27176 - DNA, 3000 bp, Unknown; identical to SEQ ID NO: 14684
  misc_feature (1)..( 3000): 2750-1469P.txt file - cDNA_ID_2730520; gDNA_ID_2684212; Annot_ID_137359

SEQ ID NO: 27177 - DNA, 3003 bp, Unknown
  misc_feature (1)..( 3003): 2750-1469P.txt file - cDNA_ID_2730520; gDNA_ID_2684231; Annot_ID_137606
ttaaaatcagatgagacttgtgtataaatactttgagatctgtgttctctttcgttcactccaaagagcatcctattaagttgctaaagagagagacgccaatggctgtaaagcaaaaggtctgtgttactggtgcaggagggtttattgcttcatggctcgtcaagtttcttctctctcgtggctacactgtccatggaaccgttcgagatccttgtaagggataagatagaaaacaaatcctctcttttttgtgaacttttgaatattctctgtttcttgagtttgaaaaagttgcatgcattgatcccattgttctcaggtgatgaaaagaatgaccatttgaggaaactggataatgcttcaaaaaatctgaaacttttcaaggcagatttgtttgatgatgaaggtcttttctcagccattgatggttgctctggcgttttccatatcgcttctcctgtgccttttgaaggagttcctctcacagaggcaagttcttacatagattcttcttttgtttgtttcttgaatcactaacaaagtctttaaaacattcaggaagaactgattaaaccagctctcactggcaccaagaatgttctagaagcatgcacagaaaccaaagtgcagaaagttgtggttgtatcatcaatcgctgcagttgtttacaatccaaaatggcctcaagatgttgctaaggacgaggattgttggtcagacactcaataccttcactcacttgaggtaatattgtatctttgaagctaccatgttggtcagttgtctctgtgttatacatatacaccaagacagtaatagaattgagtgtttaatgtgatgcaaaaaatctgaggatctcagggttattggcgttattactatcttgccaaaacattaacggaacgtgaagctttagagtggagtaagagaaactttgctgatgttgttacgctctgtccgtctgtcattataggccctaggcttcaatccacgcttaactctagtagtttgggacttctcaagttcataaaaggtgatgtaaacatataatgtgtgttctcttacctcctattgcatattttggttaagtgattgattcattcttgataatttgatgaattggtgtgtctcttcttaggtggtataaagtccttgttgagcgatgaactgtatcttgtggatgtgcgtgatgttgcggatgcgcttttgttggtgtatgaaaatcgagaagcaacaggaagatacatatgtaattctcattcactttacactgattctcttatggagaagctcaagaatatgtatcctaaacgcaacttccctgaaaggtaagaagagtaagaacaaacgcttgatttcaaactttgagatttcggtctgatctgatggaatgtttattggcagtttcacggaggtaaaagagaaggaagtgaggcctctaagtgcagagaagttgaaaaacttggggtggaagtttaggccattagaagaaaccattgatgattctgttgtgagctttgaagcagctggtgatcttccaaaggcataagcttacagagtcgtcacagtgactgtttcttcacttttatcactcctgaaataaagtggtttttgttagaatcatttcattctcaaatccattatctattactatcatattagtgttgttctttgtaacagtcagttatttgtcactttcaccaacatgaataatttgatggaacatgtcagattctcacggtttctttttcacaaaacaaaactggttttgaatccgaccactagactaaagtgtccatagtccgcggcaaaatgaaaaccaatttaaatgtcgttatacaagctttgtagtctagtagagatatacaaatttaattgtcgttgttagttttgtagtctagtagatatgattagtcattagttacggtttcttaataacattgacatttagaccacaatgtggacttgtggggttaaatgagtcacgagctcatgaacccctagccatttatttgggattttccgaggacgaggcttaatctacaccgtccgaattcgttaatgacggcaaattgcttccatgagtagatttttctttgtctcattagtcattatacaatttcaattctaaggataaaataatcaacaaagtttgatttcagttttttacattatttgtgtaacgttactacaacggatagatttgattcagacaaaacaaaaagatcgatgattacgacgttaattacagaattagaggtataaatatatgggtcccacgtcatttacaatggccagaaacaaaagtatctctttctctctctcttcatcttcaacaaatcacgcaccatcataatcatcatcatcttcatcgtcatcaccaacttcttcatcatcaccatcaatggaattccccaaaccaaaccacccttcaccctaaaaatcgtttcatcttttttccttcttctaattttttttaggtttttaattaacttttgcttcaagttttcttctatagatttcttactcagaaaagtttcgaattcgaccctgtagcttagttgttgtttataatttcttgtgatcattcacagtacaaaaaaactaattcacccaccgacttcttcttcttcttctcttctctgtggcccatccttaaacccacactgcttttgcttttcctttttttttccgggaaatttgatctctttacctttcgtcattattagtagggaatgatcttttagttttttttttgtttcccccaaatctcactttttctcacttcctctccatctcaaatttcacacaaccgagtaaaccctagaatctccgcttctcattcaattggtttcatcactggtcttaatcattgctagggtttactcggttacctttatcatcatcaattgatccttgttcataattcatcctcttttctttctgtctttggcataaagtttcaatttttcttcttcttctctttctcactcaatcatg

SEQ ID NO: 27178 - DNA, 3003 bp, Unknown
  misc_feature (1)..( 3003): 2750-1469P.txt file - cDNA_ID_2730524; gDNA_ID_2684212; Annot_ID_137358
cggtcacctaagtaaccaaagatgagctgacctaacgcggtgccaagaagagcgattgcgtaagaagttgagagaagagcggttccgattgagtctttgtggtaatatatttgacttatcattttcatgatcggagctatacagaaaagatcgtatgcgtcggtgaaaagtcccattccggcgactattatcgctttgaaatggtaccactgtatcctcgctgcgtctaacgccgataataaacttaactccggcatcgtttcgtcgattttttaagaattttttcaagatacggagaatgagaacaatagaagtctttgtatttttcatttgaatgtgtttttggagattttttcttattggagacaaatatggaatatgctttggtttgactgtgaggaacacaacacctccctggatcgagtccacttctttagttgactttgacaactttatttataaaatttggattataagttttaaatttccctctttggtacaaagagttttagttgtaagatgtgattgccaaaatcttggttaaaacagttccgtttcacatcaaggtgctttttttcagagtctaagaacatcttaaggaaccggatcattggacatggttctacacaaaagaaactagaacattcttgagtctctaacctctgctaaatccgaccaaagacttacaggtcggccactgcaactaaatgctgattaagcatggaggatatcgtggttgaatgaaaaccggaactatgaagttgggatgcgcactccgagcttgactacgacgacttcaaagatcccatcagatctaaaattaggagaaaacaagcgaggatccacttgtcccggaagattaaacgtgattgagaatggaccaggcggacagagctgttgcacttgcattctgtataagcatcccgtgtcacttggaatcgcaatctcaggtataactccttggatgcaaactctcccctccctctgaatttcacatttgatcttatctattaacagaacagaagatagcattttgggtcaaagttgctttcatacacggatagcgtaaaagaaagcagctttcttttcacgtcattggtcattatctaacccaaaacatgaggaatccattccggtattaacaggttgttattttcattatccaacaacaggacataaggagaaaagaaatgtgaaggcttaccttgatttttctcaatgccaggaagagagactcggaagatgtaagcaacttcgctgacgccaatatcaacaagaccaatgggtggcccaacagagcctagcttagcagtaccagtgcagaatacatgtgagatcactttcgagtgagtagtagtagtctgattattctcagcgttcatctttgtgtttctgtttttttcacaagagatagaatccaaacctacctgttaataatatcacaattaagaaagcaaaagaagaagacaacaatcaaatcacaagcacaagtcaagtttgaagatgtaaaagcaaagagacctataagatttttctatacaaacagagcaaaggttaaaactttatgagtaaaaggatctaatctctctgaaggaagattccaagaacatcaaattgaaagtacaagggaagaaacaaactaagctagatcatgaccaaattcttaattttgatgaacaaaagttctgaaactcgaatcgtttgagctagatttctcaaatgatttgagaaactaaatgtggaagatgagtttcatagtacgaatcagtcgaaatcatttgaaatctaagctcaatcaggtttatgaaattagttcttctttgcattcaaaaccctagaataagtggcgatgaagcgataattttcgtcttcctagggttaaagaaacagattcgtaggaaaatggagttaaaggagacagaggagacccaaaacagaaaaaaaaaaactaatttcgattccacaatgccgaaacccagaaaaattctcaaaacgaagtcactcaagaagataatcaacaaagcgaaaacggagaagggtttgggtttaaggtaccgtaacgaactccggtaagttccgatgatggtgttgacagcgaagcttcgtggaacagcgtgaccgtcgttactcactggatttgccggtgaatttgatgagtcaaaaatataactagcagctggtcaaagtaaccactctgaataagacacgtgtcagaaactttgttgaccattctgactaaagaaaccttgtaaccaaaaacatccacatttttacatgctctgtcatatttcaactgtatactaaagttgaaatatgactatggtaacttatgtttttttagttgaaaactaaggtaaactattctatgccagcaggtaaaagatgtggatgaccaactactgctggcataatttattctatgactaaggtaaaactaaaagttaatatcactcgaaatatttacaaaagtattagataaagtactaaaaattttaagttagaaatgatgaaattaaaagatatatgtggcttatttaggaaaatagatacttttaatatgatggttgggtagttttattattgtttgggattgaaaaaaactatgaaagtgtctccaagtacagtaatatttaacaactaactaggaaggtgtacattgttcagtattcatcattctaattaatacaaataattttaaaaatttggggtcgtcaattgctcaaagatattcattattttataattttctacattttatcaaaaacagaattgtgtaaatgttgtgtcattatgtgtcgacttggatgtatgcattacataattttattttatatatgtttttaattgttagagcatttattcgaaaattataaatattgaattttaatcctcagtcacttaataaaaacattattttaggactaaaaaataataaaagttgaaacagcaaagtagcgatagatttcgtgaaaacagagaagcggacatatcttgaaacacatg

SEQ ID NO: 27179 - DNA, 3000 bp, Unknown; identical to SEQ ID NO: 14861
  misc_feature (1)..( 3000): 2750-1469P.txt file - cDNA_ID_2730524; gDNA_ID_2684231; Annot_ID_137607

SEQ ID NO: 27180 - DNA, 3000 bp, Unknown; identical to SEQ ID NO: 14682
  misc_feature (1)..( 3000): 2750-1469P.txt file - cDNA_ID_2730528; gDNA_ID_2684212; Annot_ID_191553

SEQ ID NO: 27181 - DNA, 3003 bp, Unknown
  misc_feature (1)..( 3003): 2750-1469P.txt file - cDNA_ID_2730528; gDNA_ID_2684231; Annot_ID_192260
atcttagagctttgttcagcagattcttcatctgtaaactgtaatacccaaaagagagtcgttgtgttagacataagatactaataagataggttattgtggcaatagactagagttacctgtcctgtgacagtgtataaacggttgtaccatccgtttgttgccattccaattgcagagtacaaatgcttgcgagcttctccagggttttgtaaggtgtactcgatgtaatagaatcctgatcatagattgtgtcaacgaaacaatgccaagatactgcagagattctcattgagttgagatttttgtatttacccttagaagctctgctatcgattagctttgcagtcactcctactggtttttgccagcttctatccaatccactgacctatacataaatgtcatgttgacatttgtaaggaaatctttttgcagagagtttgtttgtttgtttcaattgcatgtagagagactaaccaatgtttcggcgaaagcttcgacctttccgaatgattccatcctggtgaagtctggacctagtccagtgatcgctatactcactgagacgatccatatacatcacctatcggttagctcatgacttctgtctgatccagagagtaaacaaaaagaaacaaattttgataaattttaccattggaagttgaagtttcttgtgggtaaaaagctgtgattgacttgaatccattaggttctgcttgcccgacttgccaatctttatgtgaatgcagatcaaattcattcatcactcataatgatttcgccactatcataagtatctgaaaacagagtttgattagattaccttgtgggattgatatctcgaatttgttcgtttcatctgtgtacacacggaaagcttctgatgcatctgagattcaaaagaagttgttattagaaattctcaaggaatcaatatcatcaaaaacacatagaatcaacaatacttgtctctgcaaatgcaggtgaaatggccaatggaaggaagaaaacagaggaagctatctgtaacatgacgtctcttctcttcatcccaacatgatctctagacctgtttactttaacagattcagaacaaacccagataaagaaaggtagtgaatttcactgggacattgatagactttacgaaattcgatgttgttcctcgttggagctgtcaagaacagagattgccgcagaaattgatgaacatcttctggaatctggaaagaattagctccaagaatatgaattttgtaaactacgatgaatcagtgaagactgtgagagtgagagagattgagaggacctgtaatggtaacgcggggattcgaaaagctctgaggagaagataaccatggagaaatcgctgccatgtgtttcaagatatgtccgcttctctgttttcacgaaatctatcgctactttgctgtttcaacttttattattttttagtcctaaaataatgtttttattaagtgactgaggattaaaattcaatatttataattttcgaataaatgctctaacaattaaaaacatatataaaataaaattatgtaatgcatacatccaagtcgacacataatgacacaacatttacacaattctgtttttgataaaatgtagaaaattataaaataatgaatatctttgagcaattgacgaccccaaatttttaaaattatttgtattaattagaatgatgaatactgaacaatgtacaccttcctagttagttgttaaatattactgtacttggagacactttcatagtttttttcaatcccaaacaataataaaactacccaaccatcatattaaaagtatctattttcctaaataagccacatatatcttttaatttcatcatttctaacttaaaatttttagtactttatctaatacttttgtaaatatttcgagtgatattaacttttagttttaccttagtcatagaataaattatgccagcagtagttggtcatccacatcttttacctgctggcatagaatagtttaccttagttttcaactaaaaaaacataagttaccatagtcatatttcaactttagtatacagttgaaatatgacagagcatgtaaaaatgtggatgtttttggttacaaggtttctttagtcagaatggtcaacaaagtttctgacacgtgtcttattcagagtggttactttgaccagctgctagttatatttttgactcatcaaattcaccggcaaatccagtgagtaacgacggtcacgctgttccacgaagcttcgctgtcaacaccatcatcggaacttaccggagttcgttacggtaccttaaacccaaacccttctccgttttcgctttgttgattatcttcttgagtgacttcgttttgagaatttttctgggtttcggcattgtggaatcgaaattagtttttttttttctgttttgggtctcctctgtctcctttaactccattttcctacgaatctgtttctttaaccctaggaagacgaaaattatcgcttcatcgccacttattctagggttttgaatgcaaagaagaactaatttcataaacctgattgagcttagatttcaaatgatttcgactgattcgtactatgaaactcatcttccacatttagtttctcaaatcatttgagaaatctagctcaaacgattcgagtttcagaacttttgttcatcaaaattaagaatttggtcatgatctagcttagtttgtttcttcccttgtactttcaatttgatgttcttggaatcttccttcagagagattagatccttttactcataaagttttaacctttgctctgtttgtatagaaaaatcttataggtctctttgcttttacatcttcaaacttgacttgtgcttgtgatttgattgttgtcttcttcttttgctttcttaattgtgatattattaacaggtaggtttggattctatctcttgtgaaaaaaacagaaacacaaagatg

SEQ ID NO: 27182 - DNA, 3000 bp, Unknown; identical to SEQ ID NO: 14682
  misc_feature (1)..( 3000): 2750-1469P.txt file - cDNA_ID_2730528; gDNA_ID_2684212; Annot_ID_137357

SEQ ID NO: 27183 - DNA, 3003 bp, Unknown; identical to SEQ ID NO: 27181
  misc_feature (1)..( 3003): 2750-1469P.txt file - cDNA_ID_2730528; gDNA_ID_2684231; Annot_ID_137608

SEQ ID NO: 27184 - DNA, 3003 bp, Unknown
  misc_feature (1)..( 3003): 2750-1469P.txt file - cDNA_ID_2730540; gDNA_ID_2684215; Annot_ID_191665
attttgtgtacttctattaaatcaggagaatatctgactgacaccatacataatcatataactgcagataaaatatcggtttttttttgttaaagtgtcgttaagttacttttggttctatagtttgatcaagtgagtatttaaacactactaagtaagttactattggtactagataaaattttggaaatatgtatgtgctgccaattaaattatctgtctcagtggagtgttgcaaatctacaaagtactattgggtattaattagtacacaatagtactttgtagatttacacgtattcatttatttttaacaccagtaattttttttggttacatacttagatgcaacacactaattgaaaaagaaacatgcaaaatacacatgtaatagcaccatgacgaaagtagcatatatgcatcaatagctataatacatgtataaattgataaggaaacaaaagaaatgattggcctagcaaatttaacgagtatcaactttggtcatattttgaaaaacgagtatcacgtgaaatcacggttgtgaatattttaggtaacttatactaaaagcattgtattgtaggtggccaaatatgtgtatataattttctctttattcttggtaactttttttgtccaaccctatttttcattataattttgtccacattctcatcatactaaattactaacgcacatacgcaataagaaaaaaatgtctgccagattattaaatattccactttccaactaaaattgtgtcgctatcttttgtaattatgtaaaaataaaataaaaaaaaacaacgatacaaattgtatacctacacatatgacatgtccattacaataccaataaactgaaggcaaattgaatacgattccatgactttcatttattatacatataaaattagggaagttgtaaataatttaggatttttctcaaaaacaaataatatttcgggttatgtgcttaattagatcatgtgtaattagaacacgtataatatcactatcggaataacgttataaattagtagctatcaacttattatacacataaaattaaggaggttgtaaataatttaggatgtttcataagaataaaataatatttcggatcatgtgcgtaattagatcatgtgtaattctataacaacacgtataatatccctatcataataacgctacatgagtagttttctttattaatatgcagccgtcttaaataatttattcctctttgaccccaaaacttacacattaaccaaaaaacaccccatagaagttttatagaatcacgcaaaaacccccttttacaaaaacgtgccaatttgaggacttaaagcatccacgatttgattgatatttcctcaatgattgggtccgagagtaaatgcgattgataaatgatcacattactcgcgataagagtctgcgatctactataagcaaactagtcgtcttttgattctcctcttcttcacctttttaccaatttcctcgcttacaagattcaaagggtttgtgattgagagaagctttaaaaaacccatctttggtgtttgattctctgtttatttaattcataaaggaaggctcttttttttttgtttatttcaggctcattacgttgatggtcatctaaatctcaagaagacaaagttgcgatttttgcaactgggtttctctcttcaggtactgagtttttgttgttgattgtgagaataaaaaggaaagtagacaaaagaagagaatctaggtttttgattgaactccattttagaaaaagttgaaaactttttggcgtttttcatttgtttttcaagttgtggaattttctgaattggcaaaaaaacaattttgtgactactaaagcaacttgtcttggctgcttctttttatcaatcatatatcattgactccactaagatctagtatttatataatattttgtgtaggccttattaccttcatgctaagctcgtgtcttctgatctatttgtaattattttaatctattttttttcagagatttaatctgtataagaagatctcaagatcagcttttgtgtattgaagaagaactaggaagaacgaggatagatacaggtattatttttatatatcaagatctctgcttttggcttatttgtttatcatctttttcacttgaaatgcacgagttttaaagtataaataagctttgtgttcttgttcttgaggctttgtgttgtgtgaagtagaaataagctgaatttggatttgatttgatttggtattaaattgtcctcactggttttgcgtgattatatcatctatgcacatggcttgtagcgctgacttgcttataagtatttttataaaacgtgttgcgttcttgttttggcttctataattgtagttttagaattgtgcttgagcactaatcagattcacagcaattcaaaaatccatttagaggtataattccttttagatgctctttgatcttttcgtgcttgagtcagtttgtacttttgtccttgactctttctaaaacaggttttgtgttaatcccttgaatctgctttatcgcttatgtctcttgaaatctatctatgttgctctctttgtgactgtctgatcattagttgcaaaatgtgaaattgtctgtgtaatgatcaggtcgagttttatgaaatgttgttagcttccattgagtaaggcttattgtggattggtggattgaaatcttcatgtaactataagtattgaggagctttgaatgtggatttaaaactgttctggagtgtcattgactttggatactattattatgtatttgtattaaattcatattatgtatgccacagacccattctctatttccttcaacaagttgacagagagcaaaatctttatatacgtgatatcaaagtgttctaatttccacattcttctcacttctcaggctttaatctaaactttgctctctgctttctgcgattaaaagatg

SEQ ID NO: 27185 - DNA, 3003 bp, Unknown; identical to SEQ ID NO: 27184
  misc_feature (1)..( 3003): 2750-1469P.txt file - cDNA_ID_2730540; gDNA_ID_2684215; Annot_ID_137394

SEQ ID NO: 27186 - DNA, 3000 bp, Unknown
  misc_feature (1)..( 3000): 2750-1469P.txt file - cDNA_ID_2730572; gDNA_ID_2684215; Annot_ID_137384
cctcttgttgttgccaaaggtggaagctttatgttctgtttaagcgaacaaccactggtcttcgtcttgcgctcgatcggtttgttgttgttgttgttgctgttgtcaagagagatgcttcttccaagtggtctgctagaaggagtttccttgcgagagaagctactactgcatggtaagtccaatctctgtgtgttcatgggaaaatgcgctgatactgttgctgatgttgctgctactgcttcactcctcaatcttcgagtaggcgacaacaatgatgaactcgaacaacctgccaacatcctctacaaaatctacctaacccaattcaagagatggtctacaagtgtgtgtgtgtttgctcaaacaattaaaaaaatggaatccgatgaatcttttttttttggttttagtgaaatcaaagtgaatcctatatgaaaaaattgaagaatgaaatgaatttgaatcccctgccccaaaagaaccaacgaatctatataatcaaataaagaatgaaagaattatcgaactaaactaaatcaaatcaatctaccataaaacaatcatcggattccttaaactttataaaaaacaacaaaatctcatttagatgataatgacgaccaacgaattcacatcatcacgaacagagactactgaagaacgacctcgaagttgctggataaacagacttgagagttgctgtaaacccggttcaccattccggtttgccattctggttttgccaaatcaagaaaaatctctcagaacatccagaaacccaaaatcaacaagaacccagatcagacaatcactaggagattactgaaacacaagatcaagatccaaaaactctcaaagattgttactttcttcactctctctctcactctcactctcacttctatctgtttctctcactcacttttggtttctctctctctctctctctctctaactctctacaggggttaagagatactatacagcttctacaaataccatagtggaggcaactttttagagtttgttttcttgttgggtcttcgagaattgaagttggcgacttttctttttacagtaattgttttttagagttgggcagagtgagtggtacacgagggatctgaatctatctgagccgttggatctttaaaatcaaacggtagaaaattggtgaccgtttgtgaattgtcggagaaatatgaccgttgggagagaggaagaaagaagagagtgttgggtgtgtacggacatcaatgacttctgattgggaaagccaacaacgactttttttaatacacccaccaaaaaatgacattgtttttttttagactatgacacattcgcagtaaaaaaacaaatgatcattgtacaaagtccaaataactatttagggtactaaatttatctgtcattaataaatattgccagttttgtgaaatatatttactaattccttctctatattagtaagaatgattgtttatgattttcttacgcatccccttaaatctttttataattgttttattataccaataatttacatgtaccatttttctacgcaaaatacttccccaatactaattcaatttattcaattgtcgtatgtcaatgttttttgaagttttacattttataacgtctaaaaaaaacccaatattcatggaacataccagaaatcgaaactaagcatcaatttttttttattgaaacttgtgtaaaattgcattcacaagaaattagagtttctggccttcctagagtttcttgaattgcgttaacaaaaaattagaggttccggcattgcttccacactaggttaaggttcaacaaaattcgcaaccaaagaatagctatgaaacaaataagcaagatttcacaaacataaagagcttacaaaatttcaaaactaatgggctttactagcaaatataatgggctttttaataaacctttttttaataagcctattaataaagatgggcaaaatgtgtttctttttgtatcaaaatgttgtctaattttactgataaataagaataagaaatagggtaaatatttggaaactatttagaaatacattttaatctaatggtaatgattaattcaagatgtatataatttctagtatcttttccctaataattgatatttttcattcattaacactaggaccttttaggtttaacatcttaaaactctatcttaagatgtttagataagtatttgggttgtaatgattttctaggaaacactaaaatagtatgaacataatctagttaatcactagactaaaaatcaaatctgaatctatgtacaaaatctaaactatacacataaaagtagatattaacatatatattaatgaataatatataattatatatagatacacttagcacaaatatacacatatatttattttggattgttatcatgtgctctgtaagaaatcatgctacaatatacagatgatataacaggataagagctatattaatagagaactttgcataaaagtcgttatccaaaaaaagaaaataaactttgcatgaaagctaaaccaaatgcaaataagaaaataattgtatcttaaaaggattgttcttaaacgatataaaggtacataattccctcccacgttaaccattcattgtgcattgtggaattccatttgtataattagttttgaattagatcattcatttcctttgagtttgatgaataaaaagtaagaaaaaaacactaagcttgggagggtggcttaattaagcgtgtacacataaactatactttgttaaaaaaaaattgggaggttgattatgacttatgagcgaataaagcacttttgcgatagttattgaacttgctaatcaagttgttaaacgtgtgtatatatataggatgtgcatcatcacaattctctctagctagctcttattcgtattatataaaaaactcaataactcttttttgtttttggttcttaagatg

SEQ ID NO: 27187 - DNA, 3003 bp, Unknown
  misc_feature (1)..( 3003): 2750-1469P.txt file - cDNA_ID_2730576; gDNA_ID_2684215; Annot_ID_191650
aaagccaaatcaatatcacctctcttacataatccatttactacaataccataagtaaccagatctggttgacaacctttcacaaccatccggtcaactaaagccactgcttctgaagctctgttgtggcgaaaaagtccatgaattagagtgttgaatgtgaatgaatcgggctgatatcccatttccaccatctgaccaacaagagatacggcatctgaaatcctattcccgtgacagaaaccattgagcagagagttaagcgtgacaatatcgggctcatagccgagtttcatcatcttggcaagaacagctaaagcaagagagagctgagagcgtcggcagaaacagttgatgagaatactgtatgtgtaaagattatgtgaaattcccaaattttgcatctgctcgccgagagagatgacaagatcgaacttgttcatcttagcaatggcactcaacagtttactgaactcaacaatcgaagggaaaggacgagacttgaccatgtcaccgaacagattaaccgcatcatctagcttcaaatcatttagcctatttatcgatatttttctgtaatcatatctaacaccagagaaatctcgtacccagaaactgcaatggctaaaggaaggaggagcagttccacatttaccttttccgagaagactccgatgaacaaatctgtttcccgtcgatgaaatcgcaaacaatctcctcatcttcagctgattggggtttcttccaaaatcactgattcagaatcgtaaactctctgtaaacttgtataaaccctaaatgatgaaccttttgcagacagagagagtaaaggtttgaacttttggttctaccaaaccaaacagagagagagactcacataggctgagagagtgagagtgatattcatccagtttcgcaccaccgttggatcatttgaccggtcaagatttcatcttatcatttttatcaccggtttggtttataatcacataatgtatttttttttggtttagttctaaattgaaaggccagcattagcaaataaatatgaaaaaaacaaagaagattatcaagttttgctattttggttccatatttgtctaactatatttccttcatttttttttttattgctgagatgtccctttctaattaaggtgaaaccgcgtggaccttaccaatttatatcttggattgtaaagatctatatctgtttggttccacttgtatatgatacaatgatacaatacaagtttggtcattatcattttttctaatcatatgtcaacaaaaccaaagtatgcattcattttgcaaaatatacacatctatttgtatcacctcccaaacatttctcccattatacggacttggacaagtattcatacctctgcaaaagtcttattgataaatgaatgtgaaagtacatacaattggtttagaacattaaacacgagtttggtttggacacatggctttcatatactccttagtgataaattatggttaattataaccatctttgaagtttattctaatattttatttattaatttcattgatatggtttcaaacgtcaaggaatattaaaccttttacgaaaaaatttcgggtggatcatataatatcttcccttcaatcctcaaagttctcgaactctaccaatacctacaaggctacaaaaatttatacaccattgaaatatgctgcaacgaagtccatttaaggcctgatgataaattccttggagatcgacaataatatccaagcgattgttagtgagattatagagttagtctttgttggattcaatagtttgttccacaatgtaaaagtcgactattctaaagaagcccttggcaacttattaaatcttataaatagttaaatatcgagaccgtagaaccttttgctatatatagtttttcgtcagaaaaaaaaagtcttcatgctagagaaaaaaaagtttaacttataaataccatgctataattaaaacaaaataacacgtactacaaatagtactagcttatattttctctcttttttaataattaattttctaaaaaaatacatatcttaagaaaatattattaaaattaattatgaatatattattttttgtgttttatatttttttataattaaaaatcaataatatttaattatttatcttgaaatttgatattcatcaataatatctaattaatattgcaaaaaaatctagaaatccatcttttaaaaacacttttttgtataaaaaaaaataaaaaaataaaaccctttttgtaaaaaattcaattaagaaaaaataaaaggagtatatgttttatcttctctttttactttaacaaaataccttgtttttttgttgttttcaagttatatattttgtaatcttgtcgcaggtctgagttgttttttgcactcagaaaagaaacttgtactaaaacctaggagaggaggagctggcaccaccgcctaactcgccattgacacaacaccaaaaactcttctttactttttgttattctacacacatcgataaagattaagaacataattaatagaattccataaataattagatgcactaacttttcaacatcaattcaacggtttaaattcgtgaaaaagcgtttttattttattttaatggttacaactttgtagtttttaccctaaatctctctctgattactgatactctgtctcaatctcttctttcttctaatcctttatttcttgtaagctacttctcctgaatttcgtatttgatccgtttaatccaagtttcgattttatataacaaccacatagacagagagagagagagagagaaacagagtaatggcgaacagagatgtggagagagtagggaagaaaaacagaggagctaataacaattatttctacgaggagtcttctggtgaaactcattggacttcatggctgattccggcgattgtagtggcaaatctcgctgtctttatcgctgttatg

SEQ ID NO: 27188 - DNA, 3003 bp, Unknown
  misc_feature (1)..( 3003): 2750-1469P.txt file - cDNA_ID_2730576; gDNA_ID_2684215; Annot_ID_137383
acatttggtctaattcctttgttatccatttcagtgaacagattgagtgcatcattcacgtttttgtagttgcaaagagcatcaatgatagtgttgtagatcacaacaccaggctctattttcccttgttccatcttctttaacaaactcaaagccaaatcaatatcacctctcttacataatccatttactacaataccataagtaaccagatctggttgacaacctttcacaaccatccggtcaactaaagccactgcttctgaagctctgttgtggcgaaaaagtccatgaattagagtgttgaatgtgaatgaatcgggctgatatcccatttccaccatctgaccaacaagagatacggcatctgaaatcctattcccgtgacagaaaccattgagcagagagttaagcgtgacaatatcgggctcatagccgagtttcatcatcttggcaagaacagctaaagcaagagagagctgagagcgtcggcagaaacagttgatgagaatactgtatgtgtaaagattatgtgaaattcccaaattttgcatctgctcgccgagagagatgacaagatcgaacttgttcatcttagcaatggcactcaacagtttactgaactcaacaatcgaagggaaaggacgagacttgaccatgtcaccgaacagattaaccgcatcatctagcttcaaatcatttagcctatttatcgatatttttctgtaatcatatctaacaccagagaaatctcgtacccagaaactgcaatggctaaaggaaggaggagcagttccacatttaccttttccgagaagactccgatgaacaaatctgtttcccgtcgatgaaatcgcaaacaatctcctcatcttcagctgattggggtttcttccaaaatcactgattcagaatcgtaaactctctgtaaacttgtataaaccctaaatgatgaaccttttgcagacagagagagtaaaggtttgaacttttggttctaccaaaccaaacagagagagagactcacataggctgagagagtgagagtgatattcatccagtttcgcaccaccgttggatcatttgaccggtcaagatttcatcttatcatttttatcaccggtttggtttataatcacataatgtatttttttttggtttagttctaaattgaaaggccagcattagcaaataaatatgaaaaaaacaaagaagattatcaagttttgctattttggttccatatttgtctaactatatttccttcatttttttttttattgctgagatgtccctttctaattaaggtgaaaccgcgtggaccttaccaatttatatcttggattgtaaagatctatatctgtttggttccacttgtatatgatacaatgatacaatacaagtttggtcattatcattttttctaatcatatgtcaacaaaaccaaagtatgcattcattttgcaaaatatacacatctatttgtatcacctcccaaacatttctcccattatacggacttggacaagtattcatacctctgcaaaagtcttattgataaatgaatgtgaaagtacatacaattggtttagaacattaaacacgagtttggtttggacacatggctttcatatactccttagtgataaattatggttaattataaccatctttgaagtttattctaatattttatttattaatttcattgatatggtttcaaacgtcaaggaatattaaaccttttacgaaaaaatttcgggtggatcatataatatcttcccttcaatcctcaaagttctcgaactctaccaatacctacaaggctacaaaaatttatacaccattgaaatatgctgcaacgaagtccatttaaggcctgatgataaattccttggagatcgacaataatatccaagcgattgttagtgagattatagagttagtctttgttggattcaatagtttgttccacaatgtaaaagtcgactattctaaagaagcccttggcaacttattaaatcttataaatagttaaatatcgagaccgtagaaccttttgctatatatagtttttcgtcagaaaaaaaaagtcttcatgctagagaaaaaaaagtttaacttataaataccatgctataattaaaacaaaataacacgtactacaaatagtactagcttatattttctctcttttttaataattaattttctaaaaaaatacatatcttaagaaaatattattaaaattaattatgaatatattattttttgtgttttatatttttttataattaaaaatcaataatatttaattatttatcttgaaatttgatattcatcaataatatctaattaatattgcaaaaaaatctagaaatccatcttttaaaaacacttttttgtataaaaaaaaataaaaaaataaaaccctttttgtaaaaaattcaattaagaaaaaataaaaggagtatatgttttatcttctctttttactttaacaaaataccttgtttttttgttgttttcaagttatatattttgtaatcttgtcgcaggtctgagttgttttttgcactcagaaaagaaacttgtactaaaacctaggagaggaggagctggcaccaccgcctaactcgccattgacacaacaccaaaaactcttctttactttttgttattctacacacatcgataaagattaagaacataattaatagaattccataaataattagatgcactaacttttcaacatcaattcaacggtttaaattcgtgaaaaagcgtttttattttattttaatggttacaactttgtagtttttaccctaaatctctctctgattactgatactctgtctcaatctcttctttcttctaatcctttatttcttgtaagctacttctcctgaatttcgtatttgatccgtttaatccaagtttcgattttatataacaaccacatagacagagagagagagagagagaaacagagtaatg

SEQ ID NO: 27189 - DNA, 3003 bp, Unknown
  misc_feature (1)..( 3003): 2750-1469P.txt file - cDNA_ID_2730600; gDNA_ID_2684215; Annot_ID_191644
atcaatttatgtaaatgtgatgaaagcacaaggcatatacaaaggttagttctcactgattcttgattgtagtcatcaagggccttcctagagagcctctcgagtaaatctcttgtggtttctggctcatcaacgaattcatgtgaatcgagataagcaagatggtaattgaatacacaacggaagtgtgtgaagtcgatatcaaaaccctgttgtttcacaaactctcaatttcacaaatttatttatagagctcattataaaccgaaaaaaaatcacaaggataaatacatcgcttgcaaggatttgtttgtcgagtaaggcaagttctttctctggtgagtacttaggctcatcttcctctttggtccaatccctatacgctggtctctcatagccaggatcctcaggtttccacagcaaaaacactggttcgagccatttgatccagcctgagacatatcattggaattgatcgggagagagtatatataataaaccctaacttttagggaaacgaatttcgaatcttaccttcaaattcactcatcgccttgtgcgtacgttgatgtcttgatgaacagaagatgagccctaacttcgggaactctataatgtcccttttattttactcaagtcccttttatttattgatctgtcttcctttgccctcgtattgtttgttttgtaagactaccccctcaaaaaaaaccggtactaaataagagctagtttttttttatgatgatgagtcaatccaacaattttcttaagtttttctatttgttattaatattattttactattctttttgccacacaattttaattccatatactactctttcttaaaaactaaacttatccaaattaaatatctcaaaattttaaataagaaagcttttataagaatattttagttatattaaatgtattatgtttttctattagaaaaaaaaatgaaacaataaaaatatgtagtatatgtatttcaacactaacaaatgacttcatataatattaagttttacattgaaaccacaaatcaataagcctaaacttagaatgacgtaaatgcaactttattttataatataaattaataagatatttaaaatttaatttaaaagtttatttatagacaaaaaaatggattttgggttttttatttatcttaaaattaattttaaaaacaatattaattagaaatcttcataattttgattggctacaaaacatattttttgtaaacactaaaactgctttaagaactacaaccattcaatgccaaaataaccaactgacgtggaagattctcatagcaactccattgcacaaataagttgagtgtcttcctacacttaaaatcttttatatttaattattaatattttataaatttaatattttaatattgttaaagacatcttctttctattgtgcaatgaagttgctctcaggaccttaagttaacgtctccgattccaccatctcaaaatggatattgtggtaatactctagtagaagcctctatttcgtcctatacggctatatctgtagctataagatagcaacattggacgaattcgggtccttaattaacttcaacattcattttgagacggcgatggtggaatcttctcataagctatatcatttcagacatttctaagcttggtttaattattaccttttcacaatgcttactttcactctttttcttagccaacaaataaactatcttgtcttttcctgtaaaatatgttttcacttttttttacttgccagttttcaataacgatgatatttgtttgtctatattattgaagttaattttttaatttttttttaagagatgtagtactttttgaaaactcgcatttgtttacatatacaagttattgtaatggtatagtgagtattataatgggtctttcgatcttggtcattctgtttatgaagcttttcacaatcttaaaaagggaaattcggattgagctagacgaattgacgtggaggagaagtcgaaagcttctgaaatgataaaaagggtttgaataatggtgattaataaattataagtagagaaagagaagaaaaaaaaactaagcctttttacacgcctgtgacttgggttataagcaatcaacatttcgtttatctcaagccaatgggaatatcattattgctacatccgtccaatttgtggtttggtctttgttgcttgacctcctactcgatcgtctttaaataaatgagcaataaaagcttttatctcctaaaaaagtttgtcattttatttccacatatcaagttatgtttcctgtacatctggacacatttacaaaaacaccaaaaaaactataatattaaaaaaaattaaaaatgtatatataatattttctaaatgatcaaattttaaaaaataccaaaaaaatccattaaatccttgttgactattattgtaactttacaaatgacaactcaacacctcataatatttggttttagactctttaaatccttgttgtcaaaaaaaactatctaaatccttaattatctattaaaaaattaggaaactaaatcgaattacacactaagaaaaaacaataaacaaactttaaatatcccacttttccctctaatccttgtggatttggtcataactcgttatccataaacccaaaaatagcaaatgagtcatctctcttttgttccaacaagatcttttttatttggtcaaaaaggtgtataaagtttgttataacaagttagttatataaaccctcacgaattcaagaaaccaatcaaaagcaaaaaagctttctctttctctacctttttccttaatttcacttttgcggcgtcgttcttatctactcacaagaaagcaaccgatcaaataactcccagaataaagaaagactcaaactttattctctctctctttcttaaatagtgaagaaagcttcgattttgggaagtgggtttgttcgaaaaatg

SEQ ID NO: 27190 - DNA, 3003 bp, Unknown; identical to SEQ ID NO: 27189
  misc_feature (1)..( 3003): 2750-1469P.txt file - cDNA_ID_2730600; gDNA_ID_2684215; Annot_ID_137377

SEQ ID NO: 27191 - DNA, 3003 bp, Unknown
  misc_feature (1)..( 3003): 2750-1469P.txt file - cDNA_ID_2730608; gDNA_ID_2684216; Annot_ID_191691
gatattttcattcattaatttaaattgaaataatttaaaaaactatattaaagttataaaataggatgcagatgaaattaatcttattactattatgcttctatagaaacattaaagtagaagaagatctgcacaagttggtggagaagtccatatatacttggacgatagtatgggccttttaaaagcccaacagttagaacccaaaaaataagagattgatataaccgtaaataaacaatacgacgatatttaagtctccctcttggctaaaatatgttgacttggtggtaaatgatccacatacgcgtaatatattctggttatgaaaatctttagtgaaccggattaaacccggaattaagttgtgtgtttaaaacgtttaattatctataaaatagaaaagggacaccaatactcacccagcaaagtggtagtgactcagcatgatgctggagtcgcaccagggttcgagtaacgaaattggtaccccgagtgagaaggaaaaattgtttcctctcgacttccatcgagtgatgatggttggcttccactgagtgtcaatggaagatgaatgacaaaggagtttattgtgactccgtcatgaccagactgcagtctggtgtccgggtcttccctgaagtgaagattcggggtcgggaatgtttatcacagagaatcatgcctctggtgatagccgaaatgaggtaatccaaattacctctttttttataaaagacagagaatcaacttctgttactacaaacgaggaacagagcatcaccttaattatctgcaaattaaaagacattgacttgttctttgaatagtgtgtttggctgattcattcaaacttcccatcatactactactaaaccgactctgaccagtgcaaaaaataccagctttccaccaaaattcactatttcgtttcatattattctgatttctgaatatatgcaactataatatattatgaggttttttcattcatttatctttatgtagaattatcttcttcttcttttttttgactctatgtagaattatcttaatgtagcttttatctataagtgttgaaattttattctgttcaaaataatcgttgaggcaaatcgtccgtactatatttagattggacccattctcttataatatttgtttagtttattgctcaaatctaataagattttattgtggagataacataacaaaatgttagtagattttctttagtatgtttaatgtaacttgtaacgacataaaaaaaaaaaaaaaattgtaacgacacgtatatataaaatgaaggacaaaatggttttaacttcatatcgcttacgtccaccttttgcatattttcttataaccgtttggatttgttttgaaattaattattcttagagattgtgtgattaacgataagattttgtgccaagtttcatgatttttttgtaagaaaatgaaaaggaatctagaaacaaaaaggaatgtcattttcccagaaaaaagcactaacaatttataaattaaatatattttctatctgatgtttgattcttttgtcctcgtacaagaatggagtatatattttaattggaacctgattttctttatcattttcaataatttaaaaatcgaacactatttaaaaacacagtatgattgtattaatgtttactgcataaccatacaatataatcttcaaaagtaattatattcttgcaataatgttgtcaggtatgagttgttttattttattctaaatgatttgagttgtatgttttggagcatgttacacgacataagggaccattacatggatatagagtgctaccaatgaaatatagccacgtcatcactaacagctgcgattatgatggtgggaccatagatatctgactttgacggctaagattgagtggagaaattagagtccatgtgagattgggtggactacaaagcaggagagagtttgatggacgtcgttacttgcagctaccggacgcaacaaaccggacttgatgcttaccatctcttgtttctcttactctcttcaattgttttgtcttttctttacaactatttcgagaagaaaaaagttctcacatttcattattgctacataatttattattttctacaaattatgaggataagtataaatttcatttatcaaaaacaaaaaagtatgaatttaaaaaatctaacagtataagaatttatcagttatagtttggattttcgtacctaagagttttacacctaaaatccatcagaatttatttcaaatccttcaaacttcagcacattaatatatatcactactttaaattttgttataaaatatcactagaaaaatatataatctgatgtcaatatatataatacaaaaatatggtatatttaactgctttttaatgtatttaattaattttgttgccaccaactaatcatgtttcttcaatgcattgcgattattattcaaaaaacattataatagggaagaaatatataaataagaaactccgtgtattggacgcggatacatagatagaaatacattaaaattttaggaatgaataatatattattataattatggttgaaaattgaaagtgaagaataaaagaaataaatacgtacacacatctttttctctgtctttaagagttaacgaaaacaccattagatttaagtcacatgtggctcttttgcatgttctgtcataaacacgtccatttcattcatcctcttcttcttcttctccttctatcctctgttttttgccctctctctttgtttagtggctgtggtcgtttgtatttggtgaaacataatttaaaaacaagtgcggctatctttaactctggccgacacatcggcggattcgactgtggtcggatcaagaagtgcttcctttttttccggcgtcgtttcttcttttatattcatcgatttggtgctctcgcaacttccaatagattacggctaatttctaaaatg

SEQ ID NO: 27192 - DNA, 3003 bp, Unknown; identical to SEQ ID NO: 27191
  misc_feature (1)..( 3003): 2750-1469P.txt file - cDNA_ID_2730608; gDNA_ID_2684216; Annot_ID_137410

SEQ ID NO: 27193 - DNA, 3003 bp, Unknown
  misc_feature (1)..( 3003): 2750-1469P.txt file - cDNA_ID_2730626; gDNA_ID_2684216; Annot_ID_191685
ttatctaatttatcaaaccatttttttgttatcataatggtatctaattcaattactccatatgaaccggtagagacaataactcccctggagattttccttcatgtatatatatagtgatgatcatcacgttactctttaagtctatctgctcatttcctcacacgatcaaaaagatagttcaaatttttctttaaagcttaagaaaccactcagtggaaaccaagactaattaaggctaatggtttctcgacaagaaggaaccctctactctagaaagagggatttcacagtctgtggagaagagtttcacaattcattcaagaagagcaaacaagaagatcaatcacagagcactctgttcaatgaacgaccaaaatcggagagtatgagatcaattacctttgattttgaacttcatctccacactcctctaccatcagattggcaaactaaggtatctatattcatatatgaattgaagtatcttatatttgtatcaatatgaagataaatatgcgttatgatatgtgcataaacatgcatctaaaacaacgatacttatattttcagggatattcaagaacatctgatgagcatagggcatatcccaaagatccagtgatttttggacaacctaagatgagcctagaccttgagctgaacctttcaccttcaggttcaccttcacgaaccacaacgaagaaatatgaatcctcctcaattcacaatgaaacagtatcatcatcaaagattaaagttttgacgaacacaagtaagaagagcataattgggacaggactaagtcgatcaccatcctggctagcgtttgaaggtggtgatgataacgatgttgatcacaaggggcaagagatggtaacaacagtttgcatgaaatgccacatgctggttatgttgtgtacatcaactcctgtttgtcccaactgcaagttcatgcacccacacgatcacagctctacaaaactgtttaaaccatcaaatttgcttaggcttctatgctaggctctttcaaggttactgaatctataaaatttgtacggcagataataagccaagagactagatatggacaaagttatgtatatactaaaagtaccagaaagtttgtattaattctctgcttctatgaacgatcatgctttagatctctaaacatatcagtattttgcattgaattgtacttggggaataacacgtacacacggaataatatcaactagtattgcactaaaacatatatggatactgactaaatagctttattcaaggtaagatataccagagtttgagttccgagtgtagtcactatcaataatagaaccagaggtaaaatggtttaacttgaatctaccaatggttcagtagcaagcgacgatgcttgtgttatttgtactattgacattaaataaattaactaaccccaaaacactttggagggaaaatctcgaaaatagaagtgggacattttcattttccgggtagagtcaactaatcatatattgacacctgtcacattgaacccttcattgagaatctggcgtagaagttttgaaactcaaaaaatcaaaaacagaaagaagcagagagacgatggcgagcaaagacgaattttcccgagatctcactgcgattcgctgcgccagagctacgatgcttctctattcacttgcatcatctcgcacaatcgattccgccggcgaggttagttcgatcccttcttcttccgattggaatcgattttgctacaatcgactcttaaattacgaaattgccatgcgaaatctcatctctggtgttttgtttagaagcaggagaaaggagaaacgcgaagagagatagaggatctgaggagaaagcttaccatggtgaagataaagatgaatcggattaagctttgcggattgatggaactgcttcttctcgtctttttggtactgttgctttccactttcttccttgtcttcttccttggatctacttgatccttcccttggaatcatcagcttatgcaacattatggttattagagtaaggaaactattttagaagtcgagatttgtgcagtagaagaatcggataactgtagaagtcagtcattagttttaaaacttaacgtttgcatcttctaatgaatgaatcttgttataaacacttaactatttgaactctggagatttagtagttcttcttgcaatcatcttcttatatgcttttaactgaatacattatgctctttcctgaatgtgaaacttgttttagtacatcatcttgcttggctttgacctctagatatataattcttgctccagtcatcttcttgaatgctttcaattgaaaacatgagtgctcgttcctgaatgttgttagcagagacttactggttgagctctgaagatcttgttcttcttgcaatcatcatctcgaatgctttcaactgaacatcatgctcgtttctgagtgttattttttcaaagtcagagcagcctgaatctgagcttttctcagttcctcatcatgcttggctttgacctctggagatctaattcttattgcaacaatcttcttgtaacatcatgctcattcctgactgttgttatcagaggcctcatattcctaggcttcatattctgagcttggcttcagtttctcattgtgattggctttgtgctacaaagaaaacgccaaagaaaagggactttgattcagatatctcatatctgcatcttctgctgctaaacctataattaagaggggttaaaatcttagaaaactccatctaacatatagttcctcagcattatatccttttcagaatcaataatttcatgctttccttacctttacttttggagccacagaatttaaagtataaaaagcccaaaaacggttccaccggtccaaccactcaattttggccgattcccacaaattagcttttctctacaaattcaaatcaattttgctcctttcattatccaaatg

SEQ ID NO: 27194 - DNA, 3003 bp, Unknown; identical to SEQ ID NO: 27193
  misc_feature (1)..( 3003): 2750-1469P.txt file - cDNA_ID_2730626; gDNA_ID_2684216; Annot_ID_137405

SEQ ID NO: 27195 - DNA, 3000 bp, Unknown
  misc_feature (1)..( 3000): 2750-1469P.txt file - cDNA_ID_2730642; gDNA_ID_2684216; Annot_ID_137401
tttagacctaaatcatcttcctttttcatagtggcaaatgcatcaaactcttctctaaatttcccaacaaactccttttttcttctcttctctcaacgatatagcttacgtagtcgcaaaatcaattgaagtttacttctcatctaagtgtgagcgtttgctatagtgtacatcaatacatgcttactgcacattgcaatatcaatactaagacatactcataacttttgtggtacaaactgctgaaacaagtttggttttccggtttcagaagacccggaaaagaaaaacaataacttctgaaacaagcaacatcctctgtcccgtagtaatgcttataatctcccaacagtttaagctcgaacttacattagaaagccctaacggcttaaaaaccaactcaataaaaataacaaccacgaaaccgcaaaatacaaatcacactttgagctgaagtgtatgggaaaccacaagaacacacaccgaacaaccgcggtttataaaagagttaagttgttaccgaaaaagatgattttaaacaagtgcgatgcttgtctctccacctggtggtttacggacaccgcctaaatagtctcttgcttctactttcccatctgcaaatatgttgtttcctcctatctcctttagcttcgcttgactcagatgcttttcaacattagatgacgccgcatctcccttgaatatgtcgtttcctgaaagttctgcgaatttcttgtcataaatcttctttgctgtcttcacagatgagtcttcttcagcagtctgcagaatagcgtttctctgattagactatatataacaatgattgctaagagatatcaagaaacacattggaaaagtcttacttgagattcagctccgaggttgaaattgtccttaagagccaatgcacgattagttccagatcgaggtttgatctcaggcggtggtgcaaagatgttctgtccactgatctctttgtatttagcatcagagagctgcttctgtagcttattagctgattcattctccatagtcccactgagctctcgctgtttcgccacttcaggtacagtagccggctttttaggagatagattttcctcttcaccaaatgatatctggcttataccattaactgcttgctgaaagataatcaagagtttcagtaatatgactaataacataacggaacaagtctcactctctacacaaactggtacctgataaactggtaatggctctgacgcatcatctttttcgttacgagaaaagatcccactgccagttatctccttcattttatgttctgagcaaggcttcctaatgacatcataaacattttcacaagttttgacattagtataaataaccaatctcatgaagctgtcaaatgcatcatcaagaatccttaaatacaagtcacacttgaagattactctctatgatctaacttttgatggcataaacagagtatgaattcaattcacaaaaagttttcaactttcagatatatggacaaaattggaaactaattttcaaagaaatcgaattggaaatgaaatagtgataaggaagtaagtttaacctgcggttcaagctctcaacttcttcatcggtgacttgaccaccaaacaccactttgctaatcccatccgatggctacaaacacattaaaccaaaattgaaacaaatactattaccagattgatcaaaatcaaagtgaaatttcatgaatttcgaaacggtgcaagtacctggtgggaacgaacggcggagcgagaagcggaggaaggagaatccggcggtggaacttccgaccaagtaagtagatctgcggtcgatgtgtgtggctttctcaccggagtacttctctccatactctctcactcactagtcactagcaagcaaacaaatcgaagagaatgagaaaaatacagagaggaagaagaagaagaagattagtctctctcttttcagcttcttcttcccacttggtttaagattaatcgattgtgttaattgactctattaccctttactttgttcgtaaatctcattttgatctggaagcttcttctctacgctgccacgtgtgatttaacaagtggtcatgatcattaaattcaaaatcagattttctaatcagaaaattgttgtgattagtagtataatttgttggcgtttaacgggaatattcgaatacttttcttcttgtaaggaattgggattaatattttagaatgtaaaaaaagttgttattagggaaaaaataataattgaagcgcattagatagaattatggtcaatcatattcttctctttttttttctgacacaagaccatgtgaagccatcaaaactaataaagacttttaccaacgttttatttaagcagtgtgatcacgtgatgccaaccttttattagccatttagcatacaacatgtaatttgattaaaagtgtaattatttcaaaagccgtgattttatcctctcaattaggccttcataactaaacttaattattttccgcaatctttaatcctgattcttcgtaacgaaaactaaattagtaaattcaaattgtcacggagatatgcagttttttacacggatccttaaaagaacatgcgtccaaataaattgtggttagacaggaatatacacagtaatttgattaattagttaatctagattaaaaaacatgtaatctactaagcccaaaacgtttaattcgaagctttatgttgttgttgacaagaaaatgaagaaaccactaggcccaaaacctagacccaaaccaattatattgaacaatgtttgggcctttatttgaggatccatcaaagaccataataaaggcttctctttcacaaattccaaaattgttaagttttaccattttaaaacttgtttccacgcattttgtgtgatttctttctttgcctttaataaagcttcgtgctcaataggctgccacggaggcgagcctgaaaaatg

SEQ ID NO: 27196 - DNA, 3003 bp, Unknown
  misc_feature (1)..( 3003): 2750-1469P.txt file - cDNA_ID_2730660; gDNA_ID_2684216; Annot_ID_191673
taggcattttaccaaattccttttttttttttcgtttggaccacagagaatcagtctagtagtccattatttacaaacaatcgtgggagctagggactcatctgaggtgaaaacgtttcactactaatctaatgaaactattgtcctttttcgaattgttgtcctccgtatgtaatatattttcttttatctttatggaatgttgctataatagttattattaagtgcttaacggaaaacatagagtgaaaaaaaaaatagtaagttaagagatatagatagcagtaaaagaagaatgtgtatgtataaaacagagcaatactgaatacaaaaatagaattagggagttctagaagagaaaggcccaccgtgcatggatggaccatggccatgccaacaaattttattaaaaaacaaaattcttccttaataagaaagttattcaaggtctctttgtggaatggggacccttaatcaaaatgttaaatctcctaaataaataaattaacttacatttcatagtaattatgttttaaaacaaatggcttagcagtcttcttacatgcatcgtttctgaaaggtattattttcttaccaccattttttattaaaaatattttatgaaatataagcttgggatctaaattctgatgcatctaaataatcatctatatgaaaattgcatcgtgccggagaataaaatttggtatatggaactatttataatgaacttttgggttatggtgattagttcatgaacccaacaatgcctaatttaattagcttttctctaaccgccgccaaatataaagatacttctaaataattaagcaaacaataaattaaccacaaccacacattgtcttaattaacagcacgaaaatgattagaaacttccactcatgtgtttatgactgtgtttatatttgtacaaattagtaaaatacaatgaatatgagctaatgcagcttaatttaagaaatttaaaataataaataccaaagtggttgtccccgtcggaacaagaaatctaaagggtttctaatttcgtgccctttgtggactctcaagtaacgaaagtcaagaatgttgacccatctggtctgtgtttagttatgaaatcatattcaaataccaattagacttaatttatttagacaagttaagaaaaaaagcaggacaactaaccgtcgtgaatagtagtattaattaattcgaaattaaactacagatataaataaagagtgaagccgtacgtataatacgcccaagtgcatgcaatgaaaagaaacaacgaaaaagaaaagtgatacacgtaggatttgcgtacgaattttatcattacaaaactaaagagagtttatagctactagtttcgactgaaataccacaaactgttagatagatttaggtgcaatcgtttttgctcctgtgggcgtttcgctctgtttctttgtattttcctattaaagtgcccaaaacaagaattgatacgtcctctaatttggtaaaccaatggatctctgtgctatggctatagctaatgcatgtgatcgttagaccgacaaacgatatttataactcaattcttcataggcccatagtcatatccttagccacagtattcgaactacagaaatttctctaccccatctctattgaaataacacatatatacagataacacgtttataactgcataagtgtatttcaaatgcagatactcttttaagaggacaaatatataaagaatatatattggagtgggcaccgagcggttaaaatctaaaatataagtttctgaatatgcctgctatgtatttcggtgaaattttaccttttcttgattcctaatcttacgaataggaaccgaatatatatcattttccgagatcatgtagagatatgatttttgatcaaattccttaatatattaatacgttgatgtgtatcctaagaatgtcgaataatcctcaaatctcaaggttaagtgattagaaaatattaaaaacattccacgccgtaacacttggtaaattcaataaatatacaaatcatattaagacgaccaatccaacagttttttttttttttttttttttttttttgttgttgttgtaaaactaccattccaacaaattcattttaacataagcctgcctaacctttgagctttgatctactcccttttttttggtgtctaacctttgatacagccgtaacattaattagctgactatttaagctaaatcaatacactgtctatttttagtttaaaacgacacttaaataacactaatttaaaagcaaataaccattcttaacatagcttggatgattaaaaaaacaatctgattcttaaataaaaaggatcttatttcgtgtgattaccaaaaaacaaagtcttctttcttgtgccatcaaaagctacgctcgtatctcatgctacttaattaaaaatatagaccaattatgaaaagattaaacgcattattataaaatcagatagtgcggttcataatctttcaacatggatgaaattaattttactttttccgctaaggttcgagtttaacacatgtctgtctactccaacgaactttttttttttttttttttttctgtatatatggttttaaccgattgactccttataacatttttttttccgatgttctaaatttccattattgtactctatacatttcatttacattgagacatcagacacgtagaaaaaacatgcttaaaaacctaaataactaattttccaaggatccaatggagagtgaaaataaaaagagagaaagagaggcataatgtggccaaaaaggtacagagggagccaccaatgatagatgaagttttttcctatttcttttgtcttctcttccttcttcttataaattcctctactcctccttcaccatttcctcctcctcaccttctctctctcaacatctctctctttctctgtcttctctctgtctcaacgagaatatg

SEQ ID NO: 27197 - DNA, 3003 bp, Unknown; identical to SEQ ID NO: 27196
  misc_feature (1)..( 3003): 2750-1469P.txt file - cDNA_ID_2730660; gDNA_ID_2684216; Annot_ID_137395

SEQ ID NO: 27198 - DNA, 3003 bp, Unknown
  misc_feature (1)..( 3003): 2750-1469P.txt file - cDNA_ID_2730664; gDNA_ID_2684220; Annot_ID_191830
tgctctagaaacttacttatgtcttactgtcttcttttgttaacacaatcacaaaagcaggaaacaatccacgggtccatggctattattcgtgtgtgagaatggctatggaaagcgtgttcctctgagtagcttccggcgttcgcgtctgaacagagttggtttatctggatacaaggtaggatctggattttcaccatttttggttgtgtttgtgttgatttttcccttacatctaaatctcaatttgtcagtttgctgaggatgatcgtttggctgctgttttcgttgttggttactccttggctggtaagtatacactgccacaaatacggatttaaatgttctttgattgctgtttatatataatctcaccattgggttttcttgcagaggatggggagagtgatgagcaagtagttctggtgagccaaagcggaactgtgaaccggatcaaagtcagggatatctcaatccaatctcgcagagcacggtactcccttcatgtgacagtcttttcaaatgtatattttatatggtttctcatttgattgttaatttctcaggggagtgattcttatgcggctagatcatgccggcaaaatccaatctgcatctctgatctctgcagcagatgaagaagaaacagaaggaactctaagtaatgaagccgtagaagccgttagcctgtaaattttacaatcccaattccaccagtttttgagacaattgtcaagttcagtacatagagtctatgtgctaactctcttcattttgtttttttgtgatgttactacgagaagagaaaaccatgatcgaagttagttattaacattaatctgcttcacattttgttgggtttaactatatacatatgttaagaaagttgaaaccaattattctggttataaccaaaacagtagtgctcttctcacttttgttttgttgttaaccacaaatcaggagaaatattttactagtggtacaaagacgtaagcaccaaaccccataatcacaagagcagctacaccaacattcaccaaaggtatgtcatatgtccgactctcttcttcacccattcctcttcctcctactgcaagaggaggatccatgtcgctcttcttctgtccttctttgactagtaatggaccggtttctggttccacgacttcagcattatcctttagatcgcctctatctttggctaaaccagcttcgtctatcttcttctgctccactctgtcttgaatctctccttcactaaccatgtctccaaccatctcattattctcatcctgcttgtttctcacgccatcatcaacatccagtttgattctttcatctccctctttcgtttttagcttaggctctgcttggtttctctgagcaacattcttctctattcttcttgcctcatcaccaacaactggttttgtaaatttatcttctttctttggtcccaagttaatccttcctccctccagcttctgacctatttcaccatcttcctttttctcaacaactttggcatgttccttggattccactctagcatctatggtcggcgttctgctaatctctttttccttcaccttctgtccagtcttaagctgacttatatcatcatctttctttctctcaattactttctcttcttttgcctgtaccttaggttttaagctaccaccaagggttggtgtacttttagcctcttcctccttcaatttatctcctatcttttgctgaactatgtgagcagcctcctttctctcaaccaccttctcttctttcgcacgttctcttccccctaagctagggattgcctctcgcgctttaactttcgcttcagacttctcttgactgcccgttggcactgctcttttaccctcaaccactgatttatacgttttgggtgcttcttcattcaacgttggagtggttttctcttgacttgttcccacttgtttctcctcctccaaagctttctttcgtcccaaggtactcccattaggaccaggccctccacttttctcctgattagacctctgtccaatcttctcctgatcttggactgctttctcctgtttgttagcttccacgattgctggaaactcgatggtcaagagtccatgtgagaaggaggtgctcaatttggtcatgtcacaggtatcagggacacggtaagcttcactgaaacgagccttagtctgagcagagagcggtcgctggccttgaatctggacagtccttgtcctctcatccttttttatttctatttgatccctataaaaccctgccggttccacacaataaacgagaaattcataaagtttgttatcaattaaagtttgatctcaagaaacaaaaagaaagaaagagagaagaaaaaagaccaggaagattaacgtagaggaaaatggaagatccggagttagtccattgagctctcggcttgaaactactcactgtcggagccagcggtggcggatgacggccacctcccggccttggtctcttgaaaatcgccgccatatatgtttatatatagatcacactatatcaggacaaaaagttcaaagcctttacgaaataaatgaatcaaactgtatatgaaaacataaaaaatgtttgaatgatgtatataagatagaaagagaggtaagaagagattttgagattacggtatgggtttaggattgctttagggtatggactttgtctgtttcttcatcccaaggtctcatatgtgtaaatagtttcttgtacttcaaggaaagaagcttttaaggttttgaagaatatgcgtatcaacacaaagtgatgtcgttttatttgttatttccattttttttttgtttccattttaattaagctagtagccgatatatatattacgtggcattcaacatgtgaaattaaaagaatccctggacctaactaaccacatcacttcaccggataaaacctccaccgtcttcttccgccgcaatttctgtctccatg

SEQ ID NO: 27199 - DNA, 3003 bp, Unknown; identical to SEQ ID NO: 27198
  misc_feature (1)..( 3003): 2750-1469P.txt file - cDNA_ID_2730664; gDNA_ID_2684220; Annot_ID_137443

SEQ ID NO: 27200 - DNA, 3003 bp, Unknown
  misc_feature (1)..( 3003): 2750-1469P.txt file - cDNA_ID_2730671; gDNA_ID_2684220; Annot_ID_137440
tacgtccttgagccgtgattgtgttttgttgtcctttcattggtcggcgagggagaatccggcagctttggagaactgaagctgagttaccaaagatgaaatctactgttccgataatggtgcattcacggtagaattggcgttgtgcatgaacgtaaagcgtgtcttggtatgcgttcatcgtgcaacggtaaaatgctgtgagatctgcgcttaccattagagcaacagcttgatgtttggatggaccagctgtgttgatgaagcccatgtctcttgccataaacccttttccaaacacagctgcagaaaacagagcatgtcaaaaaccgatttcttgggttataagtaatgatattatgttcggttttctagttgatattatttcagaataacgttaccaatcataattctaaacattatatctttgatttatgagattatttagtctactttgatattattaggccataattaaattaatgaaacaaccaagtcgtgctatttcgaaatcctctgtttccaaaagtaaacaagaagaaaaacaaaaacagagagaggtttaccgaatgtggcggtcttaaaagtgggagttccatcgatgacattaagtctaccagagacaatactcttgctctcgccatctccaaccacaataacattccacatcttcttctccaccttcacattctcaaaataaactcctttcttcacatatataatcgtcctcttctcactcttctctggcacatcttgtaaagccctctttatcgttctatacttccctgaaccatccttcgccaccacaatatccgccactttcctcaaatccgtgctctgcaacaatctccgacccgcgtggaagtccacctccacgtctgcagttgttaacaaacgcctccggagtttgaaagagtcagcgatcttcccgagccatgtgatgatcgctagtgcgttactcgtcaactccgttgagttcttgagatgactttcgccgaacggcctcatatctggagccaacgtttccacgcacgtccgttgatacgtcccggctgaactcagccatgtacggagatcatcgactagctcaggaaccgtgacatcaccgtttgatgatgaggttaacgtgttgttgaggttatctatcgttaggtcaagaagctcagcgcaagcgttcatggtgatgttgttcttttcatcgcctaaggatgaagagaaagcgttgatagcttttgaaacttcggcgattgtgattttgactgcgtatctgaagagctcttctggattgagactgcttgcgtttggagctgatccgagggtttcgaagcatttttctttatgcaacgtaacgtcgcaaacggctttaacggaaacggagattgagtctccgttgttattagtctccactgtctctggtgacttcttgtgagccatggttccaaacacagctccgatcacgattccggcaagaatgactagtgatacagcgatgattgcgatgttctttctcgtcttacgacgagcttcgagccttacatgttcacgctcgtcgactttgccgtaaggagaggacatatttgtatcctccgtccctcttttctaatttttctttgtattcttttgaagtttctcgttagttatgtttggtttgtagatgttggagttggagggtccatataaagacgaaggaaaaatataatcatttgaatagacctctaacaacttacgtgcgaggcacaaagggggattataaatcttcacattaaaataccaaggatgtatttaactacaagtgctcctcatgttttagtcttttatgttaatataagcttgtcggtgaaacatatttgtttaagattgggcactatgttttctgttggatttcagcttcggcatgtttcttggtttaacgaatttattttttcaaggagttctatctctagtttacaaagtttggaagtatatattcaacttgatgttatgtttatgatttgtggttcaattcattctcggtttcttcttttaatatgattatattttgaaaaaaagaagaagaagatctttctatttatatgtttatttaatagaatctcttgaaatcctaatcagacattacaatattcatagggattataatgtcaactttggatagttagttaagtttgatataataaagctgtcaaagaatatttttactaaaaaaatttgagagcaattcatttgtttttcatctgacattgtcggcggatgtattctcctgcttccgtgagagagttttcaaaccttgttttgaccaattacatatactgatgatatacattgtacaacttcttgacccttttatttgaataatcttgacgctaagtcagaacatataaaattaaatcaagaaaaactcaaactgtaagtagaaggtcatctgatcaagaaagctcgcaaagaggtaatctggcgttggagaagagcttgcgttgtaagatcttatatatctgatgggttatatcttatatgagatcaagtcttgggtaaaaatgtaccaaggatcattgtacgtataaattgacattgatagcgagtatgagtatgagagatacctatatcacttaaagtgaacgaaattcatatggataacaaatgagatgagatcaatgttatctcgtctctttctatttgaaaatagttcaattagtataagcagacatattttttttgatttgaatcaatatatactactgtttttactaaactcaaccagtcatggaatagaaaagatggtgaaaataatcaaggcttttaactgaagggaaattaaaggtttaccaaacactaaccaaaaggatagaattagacgtgttaccaagcagcaccttatttggtcatcttcctcattcgaaggttactcgcacttcctctgcacacttcttcctctccatctaacctcagtactcctacaatcctctaagaatccatagatcaactgctgggaaaagcttcgcgacaatg

SEQ ID NO: 27201 - DNA, 3003 bp, Unknown
  misc_feature (1)..( 3003): 2750-1469P.txt file - cDNA_ID_2730683; gDNA_ID_2684220; Annot_ID_191821
ccacagagggaaacgatggccttttcaaggcatggcatattctggatggagaaattgcctcctaaagagtcaatgatgctaaggtaatttaatcccggggaatctataaccaatgacctaccagaaccatttttttcaagtgattgcgaatcaatgaaccttgtcacattgtcactcttatttcggatcaccaacaaatatctgagaacagggcaactcaataaaagcctaacatgagaatcttggtctttatacaccacattgacaaggagcagcgattgaagggacgggaggcaagccgcggaaggaacatcaacaagaatcttgcccataagattcaatttcacaagcgttttgctggtgtaaagcctcttactggcaggatctgagagaaaactaagacttagggttagctctctaacgtaccggtcaactgcattcgagacccactttccgacatctacatcaacaggacattgtggaccaagcatgatacgcaagctttctactgaaggtgccttgtgtagttgcaatgacttttctagcaagtcccaaatactctttccgccttcgttgctttctgtgtactcgagtttaggcaacatcgtccagagaaaacgccatcgtttcgacaaaatcatggtggtcaccgcatcttttgttgggattagacacagtatatgcaacagaaatcgtcaggcaaggcactgatcctgtcagacagctcgtttaaattttttccgatagatctccgcttctgatgacatcctttaagatcttgttcgtcagaataagaaagccctagtttgattacgtagatagaggcgagttaacattcttccgtagcaagataagttagtattgggctaggccttttaaaacaagttgaaactcgaatatgtttagaaaaaggaattgtgtcattgtacattgggctttttaaacaagttgggcttaagtccatgtttggtcaacactctatttcgggtattgtctctgtcttcctttagcggcggctttactttagattcttctagggtttctagattgtataccctagataagcatcctataaagtaaacacaagtacttgcagagactttagattagagggctagcgactgcagaagaagagtaacacgtcatctctgtgcttctttgtctacaattttggaaaaagtgatgacgccattgctctttcccaaatgtagacaaagcaataccgtgatgatgtcgtggagattttgttgagatgctacgagcgtgtaaatgtttcatgtttgttgtttgattttactgactgctgatttctttttttcttggatctcgctcaaaactagatcctcactacagagcataactgttgatttttcttattccagatcttgctctgaacaagggcatctaaagtcacagatgcgtgtgattattgttctagacttgcagacttccttcttttttttttttttgcaaatccagatttgttttctgaatggtgaattcgtggtccagtaaggttttgatacctttcaaagagataaacttaacagaacaaaattttgttaaatatcgtatcaattcgaaagaacaaaaatatggtattgaagaacgaacataaatagctaatttctcgtggttaacttcgaaggaaattggacgtgattatttctcataggacaacatgttcttgacactgtttaatgtgcaaacacaacaataggttagaagccctggtgtcgaactaactagtgtttctacatctccatggattttattattttaagctgagattatgtagaaaacctttgagatagaagtttagatgtagatgtaccaaacacaatcattatagcatgtttattagtatctctcaaatgagagaatgagacattatggttatcctaacccacttaggcatttaaccacacatgtatataaaaaaattcctaaccaaattaagatccggagattagtgtggattcaatccgagatcttctgcttaaaaaaacaaaccaaacaaaaaacagttcctccgattccgttgaagacatgcaaccaaatgatttggtatggtaggtgtatgaaaaaattattatccttatccaaatttcagcaaagaattaataatagcattatccaaagtggagaaacatctttatccaaaaaagaaaaagagaaaataagcgatagatgaacaggtggaacgaggttcgttcagtagtcgtcgcttctaatcaacttccacttcttccacggaaacaagcaattcgatcaaacgtgaaagcaatatttaagatttttgtctcatactctaagcaagcaatatccaaataaacattcttatacctccactcctcctctgtctgattccttcacccaattcttgtctcgtttccatcaatccattgtctttgattccagaggtttgtttctatttcttgttgattccaattcgggtttcttcattgtgcattctcttgtttatgtcatgattcttattctttgcttatcaaagctctatactttatgaccatgatttgagagattctctgaaaagatcacacctttgcctctgaatttgagaaattttagtttctctgtatctgtctggtttagttcttgaagccatttgtgatttaatgtctgaaggttttgactttatgagttgagattgaagccactcttgatttgcaacaagatttgtcattttctatcatagccttattttatagctttggcatcatatcttaaattgagaaagactctgccttgttgcagttccaatgaggacaagaaaaacagtaatgggtcctatatattctcatgtgtttgtcttccttttggtctagacaaactgataagtttctttttgtagctggtactttcttttgaggcttttttaaaaattatccaacggcttgaactgaattggattcaatgtttctacaaatgtctcttatatgtaggttcttggtttatttggatgtggtgattatggatatg

SEQ ID NO: 27202 - DNA, 3003 bp, Unknown
  misc_feature (1)..( 3003): 2750-1469P.txt file - cDNA_ID_2730683; gDNA_ID_2684220; Annot_ID_137436
taaaaaccacagagggaaacgatggccttttcaaggcatggcatattctggatggagaaattgcctcctaaagagtcaatgatgctaaggtaatttaatcccggggaatctataaccaatgacctaccagaaccatttttttcaagtgattgcgaatcaatgaaccttgtcacattgtcactcttatttcggatcaccaacaaatatctgagaacagggcaactcaataaaagcctaacatgagaatcttggtctttatacaccacattgacaaggagcagcgattgaagggacgggaggcaagccgcggaaggaacatcaacaagaatcttgcccataagattcaatttcacaagcgttttgctggtgtaaagcctcttactggcaggatctgagagaaaactaagacttagggttagctctctaacgtaccggtcaactgcattcgagacccactttccgacatctacatcaacaggacattgtggaccaagcatgatacgcaagctttctactgaaggtgccttgtgtagttgcaatgacttttctagcaagtcccaaatactctttccgccttcgttgctttctgtgtactcgagtttaggcaacatcgtccagagaaaacgccatcgtttcgacaaaatcatggtggtcaccgcatcttttgttgggattagacacagtatatgcaacagaaatcgtcaggcaaggcactgatcctgtcagacagctcgtttaaattttttccgatagatctccgcttctgatgacatcctttaagatcttgttcgtcagaataagaaagccctagtttgattacgtagatagaggcgagttaacattcttccgtagcaagataagttagtattgggctaggccttttaaaacaagttgaaactcgaatatgtttagaaaaaggaattgtgtcattgtacattgggctttttaaacaagttgggcttaagtccatgtttggtcaacactctatttcgggtattgtctctgtcttcctttagcggcggctttactttagattcttctagggtttctagattgtataccctagataagcatcctataaagtaaacacaagtacttgcagagactttagattagagggctagcgactgcagaagaagagtaacacgtcatctctgtgcttctttgtctacaattttggaaaaagtgatgacgccattgctctttcccaaatgtagacaaagcaataccgtgatgatgtcgtggagattttgttgagatgctacgagcgtgtaaatgtttcatgtttgttgtttgattttactgactgctgatttctttttttcttggatctcgctcaaaactagatcctcactacagagcataactgttgatttttcttattccagatcttgctctgaacaagggcatctaaagtcacagatgcgtgtgattattgttctagacttgcagacttccttcttttttttttttttgcaaatccagatttgttttctgaatggtgaattcgtggtccagtaaggttttgatacctttcaaagagataaacttaacagaacaaaattttgttaaatatcgtatcaattcgaaagaacaaaaatatggtattgaagaacgaacataaatagctaatttctcgtggttaacttcgaaggaaattggacgtgattatttctcataggacaacatgttcttgacactgtttaatgtgcaaacacaacaataggttagaagccctggtgtcgaactaactagtgtttctacatctccatggattttattattttaagctgagattatgtagaaaacctttgagatagaagtttagatgtagatgtaccaaacacaatcattatagcatgtttattagtatctctcaaatgagagaatgagacattatggttatcctaacccacttaggcatttaaccacacatgtatataaaaaaattcctaaccaaattaagatccggagattagtgtggattcaatccgagatcttctgcttaaaaaaacaaaccaaacaaaaaacagttcctccgattccgttgaagacatgcaaccaaatgatttggtatggtaggtgtatgaaaaaattattatccttatccaaatttcagcaaagaattaataatagcattatccaaagtggagaaacatctttatccaaaaaagaaaaagagaaaataagcgatagatgaacaggtggaacgaggttcgttcagtagtcgtcgcttctaatcaacttccacttcttccacggaaacaagcaattcgatcaaacgtgaaagcaatatttaagatttttgtctcatactctaagcaagcaatatccaaataaacattcttatacctccactcctcctctgtctgattccttcacccaattcttgtctcgtttccatcaatccattgtctttgattccagaggtttgtttctatttcttgttgattccaattcgggtttcttcattgtgcattctcttgtttatgtcatgattcttattctttgcttatcaaagctctatactttatgaccatgatttgagagattctctgaaaagatcacacctttgcctctgaatttgagaaattttagtttctctgtatctgtctggtttagttcttgaagccatttgtgatttaatgtctgaaggttttgactttatgagttgagattgaagccactcttgatttgcaacaagatttgtcattttctatcatagccttattttatagctttggcatcatatcttaaattgagaaagactctgccttgttgcagttccaatgaggacaagaaaaacagtaatgggtcctatatattctcatgtgtttgtcttccttttggtctagacaaactgataagtttctttttgtagctggtactttcttttgaggcttttttaaaaattatccaacggcttgaactgaattggattcaatgtttctacaaatgtctcttatatgtaggttcttggtttatttggatgtggtgattatg

SEQ ID NO: 27203 - DNA, 3003 bp, Unknown
  misc_feature (1)..( 3003): 2750-1469P.txt file - cDNA_ID_2730695; gDNA_ID_2684220; Annot_ID_191817
aaaagtaaaaaataaaatctcaaaattttagattcaataccttttaaatcgtatacacagaggcgtgggcagttctacaccgctaaactttattagaaatgttaatcttcgatcaagggacttccacgatacaaactttttgtgtgagataatacatcccgaaactcatacaaaacccataactagcatctcaacctctcggcaaccaaactaaacatacgcgttacgtccccgccacggagaattggcgttattggtcatattatcaaaagctaatgagagtacaaataagaaaattacagtagttatgttaacagttttgaatttatgaatcccacttctaagctgtcgttggacattgatgtcccaaaacgacctaataacgtcaatcatgatcatttgccgttgacattcattagcaaaatactttgtaaatggtgtaccaattaagtctcaattgtaaaagatttaacgttgatatatagataaattagactgccatgcatgtatatacttatgctattcttggtccatatgattctatgaagtttcttgtgatcagtagataaaaatactatatgatgcacaaaagcatgtgtttttttattgatttggtaaagttagtcccaaaagagccacaagactgcaatttttttctaaaatatataataatataatgttgtagaatgaagttaaataagcttctttttgaggaagtatcgtttgagatacaaaacttgactaatcgaaacgacaatagctactcctaaagacattaagccgagctgattgaccctcgtgtttgtcttctcgtttatttccctcatatatgcttccctgcaccatttttttataagagaatcttaattaaatccttttttgcgtattccacatatatacgtaagattgatatgaaagttattaataacctgattctcaaatagagtatgttggccctaatagcacttgcgtattctgtagatcttcgaatctcaagctccacaccctggaaccatatattcaattacatgtgtttttttagattattataatcatatattagaattggaaatgaaggacttgcctcgatcttttcttttttagcaacagaatcccagtctttggctctgatacccatcttccaatcaagactgacgataacagagctattgactgagtgatgtgactggtcgtgatgcattgctaaacaagctaagaatgttccactctcgctcgttgtaaacgcagcctgaccgtgtgtcacgtttgctatcttgtacagttccttcccatatggagatgttacctatacattttaaccaaggcatatatcaacacacacaagtttatactatattttcactccaactatagacaacttataaaccaaattaacccttattttctcaatctattaatccgaaatctcttggtagaaaagttcatgtgaattttgtggttaactaattgatttttcctatacaaatctatcagcagtttaatgttgattttcgatctctaatttgagtgatcttaactcgtagtcaaattatttctatctcaaatatataacgtttgaccacacagtaacgaaattttcccggatgcatgaaatttacgaagaaaaaatggagtatatatggttgatgtacaaacccgaacatctaatgttggaccaagttgagtgaaagcatcgtcgatgcaaatgtaatcaaggacaacgaccacgttggcttggatctcttcgtagacgcatctctctcctgattctggaaccgttaaccatattgcctccacccccggaaaaagagagccaccgccggcgaggtaaatcaaaccaatgaatagtaccggtgagatcgccattttcgagagagagaggtaagtttaaggttattgaaaaccaaaaaaagagagaagaggaacaagttcaaaggctattcacgttattatgcaagagaaggttttaagacattggcgcgtggagttaaagccatcgttgtatccaatcagtaagggccatgtaggatgtggtgaagattgtctacggagccgtttttggagtatttttacttttatggaaactacgtttaattttgaccaacaatatcatcttaataaggaagtaaatccaaacaaaatatcttcacattaaatgtccttcaaataaattttattttatttctcttttctgtcaactctagataacaacaactagatttttaggcattccaatggattgattatagacgtgtttcatttggaaatttactaatgtaaaaatattagagagaattgaccacgcaacccacaaaacatagtaaaccacgcttgaaaaagtgaatagccatgaattagtagctttaagtttagaccatatcatgcatttaagatccattaagtagattacgtaacgttcgagattaactgctcctaattcagtgataagattacactgcaacatttcctacgctaattatacttggggagaagatactttgtttttcggtgcattgatatttgtttgacaaaattgttcagaacgatgcaccatggaaaaatgaaatgtgacaccaaccaaacattatacttttatgattccaccaaaatcaactttacaaaacccacttctcgattaaaaaatgtcacactgtattaacataaaatattcaaaaagtccgacaaattaactcaagaaaaaaacacagagaaaaatgaatgaataaaaaaaaacaggaaaggaagcaactttcgtattattctcttccccacttgattgcgatttgagagagataaaggtcgagaaagtcttttcatctccttcaccctcatcgtttcgcgtctcttctcttctctctcagaaaatgctcatcagaaattgtctcctttttgtttccttgatgtgttttctcttctaatctccggtgaaacaaagaacaaaggattcataagacacaaagcagagaaggagagagagatacgaggcttttcttcatctttatg

SEQ ID NO: 27204 - DNA, 3003 bp, Unknown; identical to SEQ ID NO: 27203
  misc_feature (1)..( 3003): 2750-1469P.txt file - cDNA_ID_2730695; gDNA_ID_2684220; Annot_ID_137433

SEQ ID NO: 27205 - DNA, 3003 bp, Unknown
  misc_feature (1)..( 3003): 2750-1469P.txt file - cDNA_ID_2730722; gDNA_ID_2684220; Annot_ID_191808
tcatggtgctggtacaagatcaaatgtctcatggaagtctctggcttcaccgtcacttgcatcgacctcaaatcctccggcatcgattcttcatccgtggattcactcactaccttcgaccaatacaaccaaccactcatcgacttcctctcctctttccccgaacaagaacaggtgaaacctaattcagaactcaaatgaattgattcttgaatctgaagcaaactcactctgtttttctctgttctgtttttttcatcaggtgatacttgtgggtcacagtgcaggagggcttagcctaacgagtgcgatacagagattccctaagaagatctgtctcgctgtttttattggagcttcgatgctcaaaaacgggcttcagacagatgaagatatgaaagatgtaatgatacacatttctttaaagtcaagttaacttgtgtgtgacgttatgtttctttgtcacagggagtgcctgatctatcagaacatggtgatgtctacgagcttggttttggtctaggaccggagaatcctcccaccagtgctattatcaaacctgaataccgacgaaaactactttaccacatgagtcctcaacaggtttctctactgtttcatttcatatataatctcaaaagatttaatgtgtttaagtgtaggaaaattcgaccaactccttataaaaataaatcaccatttaatacaaaatttgcaatgttcataactaacctttatttttatttttatatatgtgtgtttttttcttataactttaactaaacaattatacaggtatatatatatccaaaaatcttccattattaaagttaaatattcgtgaatttgtctgctatgtacgtagaattatggtagtgtggatgttacatatcgaattggagtggaaacatgcatatcaaatcaaatattacaaactatttcatcaaatccaaattccttgttcttatacttttttttgttgttgttgttgtgttggtgtaaaggaatgttccttggctgcattaatgatgagaccagcaccaattttggcgttaacgacagcaaaactggaagaagaggaaaaagaaaaaggacaagaggagcaagtgccgcgcgtgtacatcaagacgttactcgaccgggtcatgaaaccggagcagcaagacgcgatgataagacggtggccacctagccaagtttacgaattggagagcgaccattctcctttcttctctaacccttttgttctctttggtttactcatcaaagctgccgtttccgtcggttctatctaaaactatttaaagaactaaaggattgccttttgttggttttaaaaccggttaagtgatcagtattgtcgagggagtgtttatttatttttgatttttgtgacattttggtattttatattaatcgttttgaaataaattatgttttgcttaattttatcttgcgtcacaaaagtgaaataaatttcggcaaatcgtgtagttttatataaatcactaatttgcagtcttccaaggtctacttaaagtcctagccggtatcgacaccaacttcacagttacctcaaaagccttagacgaagagaatgactccgctgaactgtacttgatgaaatggacaacatttctagtccaaccaacgactctgttcatcacaaaccttgtaggagtggttgcagacttgcagtgtttgattttgcctaatagttgtttgtagttgatgtcttaagggaacataggcagcgtttgattttgcctaatagttgttttgagggatcaatatattactcgattcaatccaattttcataccatatatcaagaaagatgaacaacaagagtcattgtcatgaaacccaaacatttatttagcaaaagagtttcagaaaaactgactcagaagattcccacaagagtttttgtgaaatttataggcttgaaacaaaagaaattacttcaaactgtcaggttcttgtagaaaaggagtgacttcatgcttcagaatctgtgctcaagcttctcctgttccttgaaatactgagcatacctgcattcattgtgtgtatttgaaagaataagcacaaaagatgactagaaactagaccataatatgcagcacccgtaatgtttagatcgatcaggtaactaatagcttcacaagcaagaactcaacagttttaatagaaccacactaatcagctaatgattacgactaagccatttaaatcctcaacatcttgaaatgcaattccacagagtggttcatcaacaatactaatttgatacctggaagactttttctagctgagagtctctatatactacactccacttaatactcatctcaaactaacttaaatcctatcatttctcatttgttcctatgacacaaacgaagaaccctatatccatatgcgccgcacaagaccgatgacacagatcgaagaacaatcaaccagatcggaactcgatccaaaggttcctttaccaatcgattgatgagagagatagaaagagagatagagtaccagtaggttccaacgacaggggtaacgagaagagtggcgctgatccaattctcagagaccttgtggtggatcttctccggcagatccttccagagaccggtcatgatcttctgctgaaacggagaaagtgcgtaaaccaccgccttcaatttcaccggctgcttccccattttctttttctcttcccagataatcccaacaacaacaatccacagtacgagaacgaatctcccccaaaacctaaaataaacaattctcaacgaagcttatgttttttatccgattccggttcagttacaattacaattgaaccggatgaccggctgcaaaatttatcctgatttgtttcggttcgatccggtttgagtaaaccgaaatagataaatcactagtccagacataaatgatgatgatgatacagctagtgttccggaggagaaggacgatcgatctaaggagacgatg

SEQ ID NO: 27206 - DNA, 3003 bp, Unknown; identical to SEQ ID NO: 27205
  misc_feature (1)..( 3003): 2750-1469P.txt file - cDNA_ID_2730722; gDNA_ID_2684220; Annot_ID_137425

SEQ ID NO: 27207 - DNA, 3000 bp, Unknown
  misc_feature (1)..( 3000): 2750-1469P.txt file - cDNA_ID_2730724; gDNA_ID_2684220; Annot_ID_191807
atacaaaggatgtaagtagcacctttagtttactctttcgttcttggagcaagtttttcatgactgatgttttatcctcttcatgtttacaggttgtatttcttccaagactttgaagttgttcgtgttcgacttattgttgaccaatcgggtaagcatatgggctgtggctattttgagtttgcttctgctaatgaagcagagaaggtgagtagtttttatagcaatgatgaaaactagtgtatacttacttatatgatgaaattgttttgatgaaatatttttatactgtaggcgctggaacagaggaatggtaaaagtttgcgctatcacaaaatctttcttgagctggctgagatagctccataccctctccaacacatgtacattgattttccatgttattgctctagttttgatgtcataacagaagattaacgttatcattttttgttaattaggtacaagcttgcagagaagctttggtaagggattttttaactactattttgcctttaagagattttttgttatcaaaggcaaattcggtgaagtttttcgtataaatggggagagatcacaagggtttttgatacaatgcaggtacgaagacaaccttctacgagaatcgaatctgaagcaacagaaggcaaaatccaacggattctgcggtaagaagattaccttctcttacggggacgactgctagaagatgaagaagctctctttttacggggattagtgtagacactgaaattattatccatagtaaactgaaaattcaaaaagggagtacggcttacaggtcggtctgatttcggtttaccaaaccggttcacagtttcacacagaatatcaacattactggttcatacaccttttacaggatcattcaacacaagtacacaaaacataggcaagaagctctccatttatcatcatcccctccactgatccttcttgttccgaacttccctcattgtatcaattggcgacttgcaaccgagtttctcctggaaaataacaaagttaatctcgatatacgacaagaaagtaaagatcgatatcaacagtgatagctgataaaaccgaatcatgaattgttcaagaagatgaaccaaatggagtaataacctgtatctctggcttatcaacacgcataaatggatttgtttcgagctcttcctccagtgttgaagggattgtgggaagatctgcttggcgctgttgacgggcccatgctaacttctgttgtatcttcccgttgtttggttccacagttagagcaaattccaagttcttaacggtgtactgagaaccataagaaatgaatagcggattattcagtttataggcatccatttttatgagttaagaactcaaaagacataatgaagctgttgatttttttacctcatggccgcagtaaacctgtgtcggtttaggtaatgcagccagagtcacacacaacgactgatacatctgctcagctgtcccttcaaaaaacttcccacatccagcaacaaactgtataaaatcaaagtaaacacagcttaatgtttaactcataactatctccatttagacatttacagagataaaagatctacggagaacatatagggtccatggtagggaagaacaagaggattcagcttaatgttaccacttacaagtgtatctccggtgaacacggctgggttttctccttcttttccgttcacataataactaatgtgacccttggtgtgactgtaacaagtagatatatcagaggaatcagcgatgacaagagaaaatgactgagttaaacatcaagtagattagatgcatctaaattcattggaaaaaaaaaaaaaaaaaaaaacaaaccaaggagtgtggagagccaatatgttaatatcctgacccaaagtcagcttgtcaccattatcaaccgcatcagtgcaacccttcaccttatccagagaacctccatatactttgatatcaggaaccaactgcttaatcttctcgtttccaccggcatgatccctttgatcatatcaagccaccaatcaaacaatgagtgttaaaataaaaacgtcgcctcaaatccaaatttcatcgaagacaaaggcaaccatcatatggtacatatataataaatcttgcatcttcaagaggtgaaacattaatgcagaaagtatcagactttaacaaagaatcagactcacgaagatgaatctctaagtcagttgaaactgatagtaggaaaaagctaaacacttgatcagaaaactgagagatttaacaatagacttgtactaatgttaatgtctaggaccggaatctagcatatgtcgatatcactgagtaataagaaccaacagagaatctcggagatgaatcaaataagataagttaccagtgacatagagagaagtgaggtttacttaccagtgatgatgcgtagtgagtacgaacttgatcttagcttggtgcttctcagccgatgcgatcaccttctccggatcaactggatccacaaccgccgcgtctccggtgctctcatcgattatcctgttttttttttacgaagaaagaatcctaaactgatgatgaaccgagtcagattaagaagcaacgaaattgaagtaggatatcaaaatggctcacagataagagtagttgtcttgcagacaaggaacgtggaagatcttcatcgtctccttagatcgatcgtccttctcctccggaacactagctgtatcatcatcatcatttatgtctggactagtgatttatctatttcggtttactcaaaccggatcgaaccgaaacaaatcaggataaattttgcagccggtcatccggttcaattgtaattgtaactgaaccggaatcggataaaaaacataagcttcgttgagaattgtttattttaggttttgggggagattcgttctcgtactgtggattgttgttgttgggattatctgggaagagaaaaagaaaatg

SEQ ID NO: 27208 - DNA, 3000 bp, Unknown; identical to SEQ ID NO: 27207
  misc_feature (1)..( 3000): 2750-1469P.txt file - cDNA_ID_2730724; gDNA_ID_2684220; Annot_ID_137424

SEQ ID NO: 27209 - DNA, 3003 bp, Unknown
  misc_feature (1)..( 3003): 2750-1469P.txt file - cDNA_ID_2730728; gDNA_ID_2684220; Annot_ID_137423
catgttcaataaaaaaaatgaagatttaggaccaaaacatattaataaacaggattttatcaaaaataaaaagaatgagacaggatcaggttacacatatacggtagccttcacattctttttctttgatttgaatgataatagatctcttaaactttatattcttatataaataaaaaaaattagaaagtgcacgtattagcgttttatgctacatatataaaacaactattgaatgctaatagagaatccacaatgattgaacggttataaacgaatatatatatatatatatatataagcttaactcacgaagaacttttcagactgaatgaaatggttttaatttctccactagcccaatatgcatgtcatatttagtgcacacgctattggagttggtgtattcaaaatttaatttatgcctactgattcagtaaaatcatttctgcatgcatggtcgagtgttcaagatgggtttcgactgatcttacgactacgagaccagtttgataaaaataaataatgtatatgttaacatgtaccatatacgttttttatagttatcatgtacgttggggtgtctaaacctaaagaaactgaaagatcaatccaaattaattaacattagtcgtcgtttttaagttttattccttaccaaacttaaatacttgttctactgttgacacaatttgttaaaaaattgatcattcctaacagaacgaagtagtaactttttttttcttttttcgtcaaacgaagtagtaacttggaacagttttggttaataattatgagacgaaagtaaattatatagtggcaaaaacgttacacgtaataaaaaatgaatctgattccatttgtccacaaagacactgacaattggcaaaggctttcctttaggcacatgtctctcgtctgaccatatcatatgtcatctctcacttattgcaatttttttccttttcacaaaatgttaacaaaagctatgtattgtggaatgatgatcttttttacaaactgttttcaattttttttattttttttttgtgattggattttctttaaaactttaatcgtggctagaggtaaaaaaatgaatgtgtagaaaaccctcaaaatatggactaatccaaagtcatgtagcaatgtagcatatgtcattttcattcacacgttggtttgtctagactagagcatagagaagaaaataaatcgagttacaaaaaccgaaaattagggatacgggaaaaaaataatagaaaagacgctttcgttacccactgaaaaggaggaggagatatcttcttcatctttgtttgtgacacttctccttttttgccttttcaatcagtgtttaattatttgcaccttattcatgttttttttcctatcattctttaatttttcttttaacaatgagatagaaacaaaaaaagacagaaaaacagttacacaaaagtcaaatctctttccatttataatttaatggttccgagcaaggtttatgatataattggtgcatattttcaatttcaaatggattattgaacgtgaaaattgcatatgaccaactaattaattgagtcaatagtttttgagttttgacgtgtacggtaaacctataacctttgaattacaaccatttgcatttgttttgaactttttcccttgcgcaaattcatatggttcataactttagctaaaaccaacttgttcattgaaagatttgtagtctttctttctttagagttacgagcatgaaataggtcaatgaaattgattatctctgcgttagaaaactgacgggaaaatactttagctatagtataagtataactttaatcaaattacaaaacaaatcattagcacgggtcttgataacacacgtgacatacctgaatctaagtaacattttataaattgaacccagcgcgctatcaaatggattttctttattagtttagattgaaagtcgtttataatttgtcctccttaccgtcttgtaatcgtatgatcttgaaataactatgaacttttaaactggatcattccgatcaaaaattattttaatggtatgacatagagaatagaaacttaattagtgcggataaaacgtaaatagtaaataataagcatatagtcagacacacaattattacccattgactaccccaactatgaatatgcaataaatcagtgaccatatgcaaaagtcggatccacaaccaaaacgataaattgatttttatatatatatatatatatatatatatatatatatatatatatatatttctctctaaaattccttcacctttatttccttttaaattatcgtaacaacgctagtttaacaaatacaattatcgtaacggctgcatcaaaatcagaatttgcaaaaaggaagtgtttatgtcggaaaaaaaaaatagcattgtgcaaagaaccaatgtctatttcatggtaataaagtttattcttttttggaatatcttttttaacaaattaatttttaactgcttattctattatatattttactaaataaattttgaacttatgggtggttcggattaatattggacaaaaatatttttataccaattaaaaaaaggattgtttttttggtagaattaaaaaaggatttatttagtaaattatataatagaataagcaaatgagaattaaatttatatagtttccttttgctcatttttagcttaacaaatccttttttttggaaataaatcctacacattatacgcaagtagacattctatatattccttgttaaatttctatcctaagtatactggtcatgtcttaatagtagaaattaattactaattattttttaatattataaaaaatcacataactgagaaagaaacaaaagatatttttcactatatatgcgtttgacaaatgtgacaaggcacacagagcattccgtggaaaaaccccaataaaatctcaggcaaatctccggcgtaatcgatg

SEQ ID NO: 27210 - DNA, 3003 bp, Unknown
  misc_feature (1)..( 3003): 2750-1469P.txt file - cDNA_ID_2730762; gDNA_ID_2684223; Annot_ID_137504
ttaaaagattctagaaattttctagaatcatcttccacctccttaaacataaaaatctagatactctaatagaataatctagataatttgaataatgtaatctaaatcttatgtaagaactctctagacttaggattaaaatattttagatattttgtagtttggaggctataaatacctcctccccctctcaaatgttgcaatgttgtgaagttatcttcaagtttaaagcaaagtaataaaagttatatttcctaaaaaactctctcaaaacacttaaacactttctccattacctctaaaagaattttactctaacagggaagattccggcgaacacaaactcatccgacgacgaagaaccgaagataagcggagaagcagagcgaaatcgctaggcagatagaacccaacgtaagtttcatgtccgtctcttctcgtagtctacgcatcaccaccggcgcaaacgtgagtccaagcatcgataaaccgattctgataatcaccaccataaagcacatatcggccatcttgttcagctctgatgcacagtataacgccacgtgtccgttcttcgtcgtctccgttagatatgaaccgtcgaaaccagaagctcgtttgcagattccggtgaaaatggcgagcgaaactgcaagaaagaaacgatcgtttacacgacgagtttcttctcttctctcacgacctccatcttcgtcatccattgcgatctcgtagtcttgcaggagaaaatggagattttgaaacgatgattgatgaaaaaatcagaatccgggaaaaagtgagaaaatttgtctctgagaggttttggagtttgttaaagagggaaagaagaagggtttataacctaaccatggttaaaattttaaccatggaccatagtttattttttaaccttgctttttctctaaccatggtttataatccgtacgtgttgaaaaagtttcaaggagagaggtgatgactgatgatattgagtggacgaaggacttacctcttttggtcactgttaaaaattggtttcttgaattactggttacaaaatttcgttcgttgctgaaccggaaattgacaattttggttacacagaattgggaccaaaaatatctgcatggtttagtatttgatcatataactacctataaaaagactagaaatattttatattgttagataattgtgaaattttgaacaaaaaaaaatgttaagggttaaatatggtcttttttactaagttttattcatcggtttttctaaaatgttactactttgggtaaacaaaagttaaagcagttgcctgattacgacacgttgaacaatggattgatcttatgtaaatttaattgataaaaaaacagttcatgactgcattttgcagctaattccttaaacattttgagctaaaatttgaaactatcatcaagaacatgaagtaattagtcttaatccgatatcataaacggttcacacacacatcgatttctttgtaaaactaattattgtattcagggatgcgatccgaaactttaacgcatttttatctatgcaaatacagtatgaagtgataaatattgcaagttgtaactacaatatcaattaatattcagaaaatcttgtttaaaccttttattcaagaaaccaaaatgttcacaacacaaatccaaagaaataaacgaaaagcagatacagagcatccgcgatggtctcactgaacgatcacaggtccaaatattcaaacctctaatcaaagaaaccataatgttcaaaacaacaaacccatcaaagaaagaaaaaaacgaaaactagattgtagatagaaagagagatgataaatgtaagcatcgtcgatggtctcactaaaagacacaggtccatagtaacggtggaagaaactcaagacacaccactcacccggtgacggagcagcgaaggtacgctaagaaagcaatcgtgaggacgacaaaaatcaaacccacgagcagctgcacgtcacactcttctcgtacttttctcatctgttccagttccaccaccatcggagcaacaatgatcttgagaatcacaagcataaaagcaagatgcgcccacaagttgaactccatcgcccaagaatacgccacgtgtccggtcatcgtcgggtttggatctgagccagcagctgctcttttgcagactcttgtggacagttcaagcaacactgcgacgacaaaacgaccgttcaatctacgaagctcttcacgtccctgtcacgattctcttcacgtggctcaacaactccttccatggcgagagattcttgcaggagaaaagaaaaacaagattttgagacgaagattgtgaaaatgaaaacagattcgggagagaaaatctatataataagggtttttggagtttataagcataaaatgtttcttttatttaaattaaccacggttaaagtttgaccgtggaccatggttaattggttatagtaatcgtacgttttctaacgggacgtgagtcttgatgactgtgttgaaagttaaacttgattttgaatcaagtttaattattggatcaattatccaataattaattatggccaaattcaagttttagaattttctctagaaatatcatcatttccacctccttaaaagattctagaaattttgtagaatcatcttccacctccttaaacataaaaatctagatactctaatagaataatctagataatttgaataatgtaatctagatcttatataagaactctctagacttacgattaaaatattttagatattttgtagtttggaggctataaatacctcctcctcctctcaaatgttgcaatgttgtgaagttgtcttcaagtttaaagcaaagtaattaaagttctatttccaaaaaaactctctcaaaacacttaaacactttctccattacctctaaaataattttactctaacaaagtggtagcagaacttgaagatcctaaagatg

SEQ ID NO: 27211 - DNA, 3000 bp, Unknown; identical to SEQ ID NO: 14741
  misc_feature (1)..( 3000): 2750-1469P.txt file - cDNA_ID_2730780; gDNA_ID_2684223; Annot_ID_137499

SEQ ID NO: 27212 - DNA, 3003 bp, Unknown
  misc_feature (1)..( 3003): 2750-1469P.txt file - cDNA_ID_2730786; gDNA_ID_2684223; Annot_ID_137497
ctctcaacaacgagcgatacatcgtccctcgaggtaatggtggtcctataaaaaggttctgcagagcatttagctggatttgtaccgcttaattgatccacattacaaaaaatttgtctcctttctctatgcataagttatatatttatgattttttgtatcaatgtatcgatcaatatttcaagtatttatgtatccttcttccataattttttatctttaacaatatttacttgtatacggaaaatttgttaaaaatctaattatttatatttatatatgtaacaactgaaaattggtaacttgtataagcataatttatgctgcataaacatatttgcatttaactacacggaaacttactaaagagaaaaagagaattctcgcatataaaacagaaccgttactctgtttctcttggcgctttaattagggtttcttatttagcttttgcattgccacattcctaaaggtttcatcttttggatccttctctgactcacttcttaaaacccatcaatggaggaaggaagtctgtggcgtcaatggactatgttcagatctctgttatcgattcttcaatggtggggttttaacgttactgttatcatcatgaacaaatggatctttcaggtttaaaaagtctcttacttttatcattaaagacttagcctttcgtttgttttatctgatctgcgtttgaaatttggtacctttccttgtttgcagaaactggatttcaagtttccattatcagtttcatgtgttcatttcatatgttcgtcgattggagcatacattgtgattaaagtcttaaagcttaaacctttgattgtggttgatccagaagataggtggaggaggatttttccaatgtcatttgtgttctgtatcaacattgtgttggggaatattagtcttagatacattcctgtctcttttatgcagactatcaaatctttaactcctgcaacaacaggtttagggtttttttaagattgagaatttttcaaaataaagtgatttttttttattgttctgattggtttttgtgtaatggttttttgagtgcagttgtgttacagtggttggtatggaggaaatattttgattggcgtatttgggcgtcattggtgcctattgttggagggattcttcttacttctattacagaacttagctttaatgtgtttggattctgtgctgctttgtttggatgtttagctacctctacaaagaccattcttgcagaatctcttcttcatggatacaaatttgacaggtcaatgttctgtttcctgaggttttgatcttcagtttcacatgataggtgttgaatgtgtgaaacttacatttggtttcaatgacatgccatgctctcatagtccaatacttgatttgctttttcatatttcatggaactgagtgtttgtgtcctcctcattttcatgtctctctatgtagcataaacacggtatactatatggcgcctttcgcgaccatgattctcgggttacctgcatttttactagaaaggaatggaattttggattggtttgaagcacatccatctccatggtcggctctcataattcttttcaactcaggtgttctagctttctgtcttaacttctccatcttctatgtcattcaatccacaacagcagtcacattcaatgtagctggaaaccttaaggtaaatgaacaaatcccaaaccacataacattaatctttatattctagtttcaataactcagatgtttgatggatggtatgtgatttgcaggttgcagtagctgtgtttgtttcatggatgatatttcgaaacccgatatcaccgatgaatgctgttggctgcggaatcacacttgtgggctgcaccttttacggatatgtaagacacatgctttctcagcaacaacccggaactcctaggactcctcgtaccccaaggaacaagatggaactgatccctcttgttaatgataaactcgagagtaaaatttgaatatcatcggtaagtcactagactattgaacgcacacaaagaagttagatttgatcttgaacatccacaagagagttatagtttaactatatgtttatttttactcaaactagagaagttagagaagtgccattttatttgtttccattgtattaaattatctatcctcatcaaaccaactcagagatgaccacaaagatacttaaagcaggcccatttttgtattcaattatggtagtgctttcacttacctcagctttttaatttttccttccaattttgtttgtgccatagtgccatgttctaacatcagagacttaatacatgacaaaatggtgcaagtttgggaatctttgaaagaagatgaaaatagaaagttaatttgacaatatataagaaatgattattcattttcccgccttgatacatgaaagagcttaagacggtgtttaagggaaacgaatattttagctctcaaaacagctcatcaaattcgttgctttagcttctcaaaagtaaaaaatgggctttttcaagtgggcctcaacttatgttgctgaatttaccgccatatccttcccttacaaaaaatcaattttcaaaaaatcttcatgctacagtagtctgaaaccaggtcaaaggagttaaagagaaaagggcaaaacagtcaaacagcataaaaagatgtctgtgtcttggagatcgcaaagctaccgttttctgttcactctgtacaacacacttgtctccttcttcctctcttctcttctctctctccatttcaaaaagggtgaaacttttcttctctttctagaagaagaaaaccagagatacagagagattctctctctaccaaacccctggaaaaatctccagattcatcttccatagaccaaactaaactctgttcactgtactctctgtcattgtcctgtaagagaaattgaaaaccctaggagattttgaatttcgtaaaaccctaaacacaaaaatg

SEQ ID NO: 27213 - DNA, 3000 bp, Unknown; identical to SEQ ID NO: 14768
  misc_feature (1)..( 3000): 2750-1469P.txt file - cDNA_ID_2730827; gDNA_ID_2684224; Annot_ID_137536

SEQ ID NO: 27214 - DNA, 3000 bp, Unknown; identical to SEQ ID NO: 14763
  misc_feature (1)..( 3000): 2750-1469P.txt file - cDNA_ID_2730831; gDNA_ID_2684224; Annot_ID_137525

SEQ ID NO: 27215 - DNA, 3003 bp, Unknown
  misc_feature (1)..( 3003): 2750-1469P.txt file - cDNA_ID_2730835; gDNA_ID_2684224; Annot_ID_191888
gcaagagtaaggatcatcaggatccagttgatctccgggatatagatctgtccatatatatgtttcgaagtatggactactttgatgcgtgggaagcaccctagggcatggcattgtttgattattgagaacgtagtggttatcacagcctgactgccaacaatggctgcaagtgtggcaatgacaaagacaggccagaaaacaggatctgcataaaggaccaagatcatataagattgtcattatcacaaggaaaaaagtgaatattaaaccctggtgtcaaagtaaatgaacctgggactgaatcgtaaaaactgttaggaatagacccgaggttctttgacaggaaagctgcctggcccatgtattgtaccaccagacaggggtacacgacaacggcgaaagcaacctgcacaaaaaaaaaaaaaaaagtagagtgtaagaaacaaagctgcgcaaccagcatggacttatgttgaaggataactaccaaggctgtagagaagtcacagataaaataactgatgtacaccactactagacaggaaacctctgcttactctgattgagaccgaggtgaaatggccaagatttgcaaacatggcttcagtacctgatgagacagcgataatcactttagcaacataagaccattcactaaaggattcaaaacaagcagaaaataaataatattatggttatgccttgatccagaaccagaactacctgttacagaaagaagaacccctccaagagatatccatccatcttgaccagtcactctgaagaatttgatgatatacagtggggaaactgcatgtattatctttggattccaacggatgatgttgtataaaccgatgaagaatattgaaataagccagatgatcacaattggtgcaaacatgaaagccaccctgtgagtaccacaatgttgcaaagcaaacagtccgaccaatatgacacaggcaagcaccagtagttcgcctgcagtggattaagagacaaaacatcaaaacaaaagaaagtcacaagatgtaatcaaacaacaaacaaaacttgatacaggcacatagtggaagcaacacgtattagataccatcagtcacattcttctctgtagcttgcaagcctgacaaggacgacagaactgaaaggaagcaggagttagtcagtcagatattgaccacaaacaaacaaaaaagatgctgatgaatagaaagtaaggatggtcacgaagaaggtgggtggttacaactacaagtaagagacgatgaaattaactccaactctgaatataatatgtaggaggcaggcatgctttacctgataaagctggggtcagaaccccgtctccaatgaccatagcagctccaaaaagtacaacaagcagcaaagcggtcctcagccttttgtgcttttcaagaaatgttctgaagggggatgaagttacagtatccgtggaaggaccaaacttgtaagctgagagctcctcatcagcagcttgctggttaggaagtaagctaagcttagcatgcctacaaagcagggaatagagagcaaatgttccgcctagagaggcaaaaacagaaaaagattcaatcatccggggagatataagttgaagagaggaggatctcgtttgctactgcaccttctccattgtcatcggcactcagtaatacaagaaggtatttgagaaggggaatgagcgtgagggtccagaaaatcaaagagaaagcaccaaatacggcatcctcgttgtgatgcttgtgcaactttccaataaatgtgctagggaagacataaagaggagaagtactgagatcaccgtagactacaccaaagctctggtaggccaaaatcaagttactagagagattcatccacgagagctgaaggaaacggatatcaacaattcagtaagtctgaaaacagagcaatagaagaatcccagcacaagaaagcaagggtctttatttagatagaaatgaaagcaaaagccaaacatgctatgaacagttcaagtgggcataaaggagctaacttgagaaggattccgacggggagagactccagattccgccggcgccatcgcaggttgtcgatacaaaagagatcaattgagcgaatcaagttggagctcttcagacgaaacccatcttatctctcactctcctctcctagcatcaaatatccaccttaattaattagcaaatactctctcaacgcgggaacctttatatctgtctctctcctccactcacttgtttctccgattagcaattttcctcgagaagtgaagtgaaactgacagtcttctaataataatactcaccagtcacgttttcccgtcctcgggttggccccacctatgttggctcgtcgtcaggcccattatgggctctcctaaaagcccatcatagatcttgtcactaatatacagacactatatcttatcttaaaaagtacaaggcccatttaatcaaagggcgtgataatatgtagtaggagctgtaaagcttatcaaggtagagaagatgtgtctgtcgaataggaggagtttagtaagattgtatatgctttggaatattcggaaatttaatggaagcatttataatagataaccaatccacaagtaacaaagattagaacgaaggtgtgaatcaatcaacattgatggctaactctattcgatttccatctagagagagctaaggcccaccaggagcccaagagagagggagacaaccaggaaaaagagaggggagggaatatccaaaagggataatttcgattttgactgttattaggaatgatgacgtggcgatccaaagaatattccaagatcccatcatcttctccttctttattcttcttcttcttcttcttttttaagcaaagcccccaaacccatatccctctcctcacaacatcaatctcacaggaaggaaagaaagaaagaaagacgagcccttttttctttctaaaaatagaaatatg

SEQ ID NO: 27216 - DNA, 3003 bp, Unknown; identical to SEQ ID NO: 27215
  misc_feature (1)..( 3003): 2750-1469P.txt file - cDNA_ID_2730835; gDNA_ID_2684224; Annot_ID_137524

SEQ ID NO: 27217 - DNA, 3000 bp, Unknown; identical to SEQ ID NO: 14761
  misc_feature (1)..( 3000): 2750-1469P.txt file - cDNA_ID_2730839; gDNA_ID_2684224; Annot_ID_137523

SEQ ID NO: 27218 - DNA, 3000 bp, Unknown; identical to SEQ ID NO: 14760
  misc_feature (1)..( 3000): 2750-1469P.txt file - cDNA_ID_2730847; gDNA_ID_2684224; Annot_ID_191885

SEQ ID NO: 27219 - DNA, 3000 bp, Unknown; identical to SEQ ID NO: 14760
  misc_feature (1)..( 3000): 2750-1469P.txt file - cDNA_ID_2730847; gDNA_ID_2684224; Annot_ID_137521

SEQ ID NO: 27220 - DNA, 3000 bp, Unknown; identical to SEQ ID NO: 14757
  misc_feature (1)..( 3000): 2750-1469P.txt file - cDNA_ID_2730855; gDNA_ID_2684224; Annot_ID_137516

SEQ ID NO: 27221 - DNA, 3000 bp, Unknown; identical to SEQ ID NO: 9126
  misc_feature (1)..( 3000): 2750-1469P.txt file - cDNA_ID_2730863; gDNA_ID_2684224; Annot_ID_191872

SEQ ID NO: 27222 - DNA, 3000 bp, Unknown; identical to SEQ ID NO: 9126
  misc_feature (1)..( 3000): 2750-1469P.txt file - cDNA_ID_2730863; gDNA_ID_2684224; Annot_ID_137509

SEQ ID NO: 27223 - DNA, 3003 bp, Unknown
  misc_feature (1)..( 3003): 2750-1469P.txt file - cDNA_ID_2730871; gDNA_ID_2684225; Annot_ID_137569
ttatatttttatctctttgggattttttctaagacaagtttttgttattcggcacaaatcgaagatggtgagtgtggtatagtccacgttatggcatatgcttgcacgacgagcaagccagtgaacaaaatatgtcatgtcaatgtattttctattgctgaaactatacaaaaatggacactaaccagaccggccagtgtcacatggctatgttactggggaaagagtatgcggaaaataaattaaagtatataagagaagatgatagaaatatttaacgaagtattgattgattctttattggggaaaaaaaagaaaagagtataggttgttgatctatcaaaccgacttttagtgttaggctgcaaatgattgatacctctcagaaacatgtatacatgcatgttttctttttgtcgacgaaaaatgtgtacatgttaattataaatatatatgtgtacacaacataatttacgatataaaaaaaacgaatccttaataatcacttcaatcgttttatggatgttttatgtataccattattagaatatgaatttctaactcaaaactaattagtaataagtgaaaaagtttatatttatatatgtcatttaaagttttactcaatttctactgtgagatattattaaccctaatattatattaatttaaagtaaaaactagatcatacttagtcaattattatccaatcgcaagaaatccctccaattaaaatgcgtgtagccaatgttggcgaggttatctacaattgaccaaggattgtagacatgcaatatgttgtagttcctttctttcaggttttgaagtctccaagtaaaaccacgatcgccactgataagcatcacattcgccaatgtgcgactggtgcaagtccaaaacacaatcctcctttgaatttctttgtcactggcttgtttttctttattctcaagataatggtactcgaccccattgtcttcctatgttcgttgaatttcaggggaagaacacgtttataatttgccgcaactggaacaatctttataggtcttatgtatccttatccctcaacacagctttaaccgtaggaccaaaagtggtgggatcactatcatgtggaaccccacaaaattctatgtacaacattgtcaaggtccaagctctcgcatagattggagtgtgcatgcagtactcgtcgacaacatcggcactatttatctgtaaaaaaaacaaattttgtgacatttactaagttcagagcaaagattaacaaagtaagttgttcagttctaatttcaatgcctcaaattaaaaatctccgatagaaaagtggtcttagtgttttagtctagtcttaaaggactcattcaagtgattacatgttcaaaaacatatgtctaagactgatatatgaacatcaagcaagaagtcatggggacaaatctagtacacaagatcataaggattgaatcgaagatacaatgagtaaggatctcaactcgaaattgatgaagctaagacttgaaggacataagcaagaatggagaaaacaacgttccagtgatgtcatcaagactagatgaattgcattgcagttctaatgtgaataagattattcacgtattagtaataaacacatcagaagttgactaataagattattcacgtattagtaataaacatatgctatgctaactttaagctttatgttcttaggaaatttgagaaaaatgacccaaaaaaaaacaataatgaactcaatgaccatataacttatacggcaggatcctgcatataattaacccaaataataatcccttaaattggtaaaatgtggatttcaccccatcctcccacctccctcctctttctaatgttaaattgttggggcaaaattgatatgtaagttcgtctatgggagggaattaagtttccgctgagtaataaacaaacaagtgcaaacctaggaattcaacaccaatgtaattttttataattttgtaggactctttaatagtcaagtcagtatttaaaccacaagagtcggtcagaaaccagaaaaactagaaacaagttatgtcagttctaagaagagagatgtgcaatgtattcggcaatcgggtatatcatctaacattttagccagtgaaaaaagagaaagatatgaggatttttccattgttcagtaagctaagagaagacagtttcattaaagagtcgaatagaatggatattctcatgaaactgagaaggttaagtttttttggggaatactttgcatgcctttatataggtgaagagtcatgttgcatagctccgaggcatttcagcttataagtatccatgtctcgactcatatgatgaatggacttgatgaagggactaggcaatcgatcgtcagtgcgggtgaattttgacgtcttgagtccatccgaccattcaaaagaaagtattcttcttaccacgtagcatgtgactttacctagagttcgtggagcacaagtagaacaaataggattatgcctaaacacctttagaactagaccaaaggtcaaaaactatcaaaacaagttttttacgctacatggtttacataaaaaaattaagtgatacactcaatgatgaataacaatattaacccaaacaaatttgatatcaaaacacagtataaccaaaatcaaaaccgtagtggaactaaactagattatataatatgcctccataaatactcggattttccacgtgaattggactaatcattaattaggaagaacggaatcagaataaatatgtctactcaactttcggtatggtggtggtagaaaagagaataagattcaaagcatattacgaattattgccatatgggatcatatctaacacaaatttaaaagaacactctactactacagtacaaaattgtatatatataaacacctgaaagattttaattacttatccctatcaaagaaactaacacaagtataaatttacagaaaaatg

SEQ ID NO: 27224 - DNA, 3000 bp, Unknown; identical to SEQ ID NO: 14797
  misc_feature (1)..( 3000): 2750-1469P.txt file - cDNA_ID_2730879; gDNA_ID_2684225; Annot_ID_137567

SEQ ID NO: 27225 - DNA, 3003 bp, Unknown
  misc_feature (1)..( 3003): 2750-1469P.txt file - cDNA_ID_2730887; gDNA_ID_2684225; Annot_ID_137563
tttttagatctaatcagaaaggagttacatgctacgattttgtggataaaaccactgttctcttgttctgtgatgaagtctgagatctctctttactgtgtcggtgttattaaaaaaaaaacagaactttttttgtttctcgagttttttttttttgaatccagattctgttccacagatgctaatttcaatcatagtatcaatctcaattgaaagtttctggctttggatgaattaattcaaaataaatttgagtattgatgatctctccacaggctgctttcattgattcggatcaaactcagcacaacattcttatggattcccaatcaactgtctccggtgtaagcaaccaacatttctcaaactttcatcttcgctgtgttatgggattatctttgtattgttgttgtaaagctgtctgttcaaaggctttgtattgattcattgttgtgcaggtgaaaactgtcaagattagcaatgtttcactaattgtttctaagaaagatgtcaaagagttcttttctttctctggtgacattcaatacgtcgagatgcgaaggtatgaaaaataacttgttgtaaattatcatcttcttgttaaagatgatctttaccaatatctctaatgtttactctaatgatctcagtgagacacaagagagtcaggtcgcatatgttacttttaaggattcacaaggagctgaaactgcaatgctcttaacggtattttgctttccgcgtatgcatcattccgtatatttcatgaattagtgcttacagcgaaaaacatttccttccagggagctgtcattgcagatcttcgtgttagtataactcctgctgttaactatcagctaccaccagaagcccttgcacttgactcggtaaagaccggaaactctttgatttattcgttactctctcggtgttcatgttgtttcctctgtgtagcaggaacattcgtttaatggtttttctgtcaagaaagctgaagatgtggtgaacatcatggtgggaagaggttatgctcttggaaaagacgccatggagaaagccaaagcatttgatgacagacacaacttgatctcaaacgcttctgcaaccattgcatcgcttgacgataagatgggtctgagcgaaaagctaagcataggaacaactgtggttaatgagaagttgagagatatcgatgagcgatatcaggtgagggagataacgaaatctgctttagcagctgctgaagagacagcaatcagtgcaagaacggctttaatggcaaacccttatgtatcaagtggagcttcgtggttttcaaacgcgtttggcgcagtgacaaaggcggttaaagagaaagttgagaatggaggagaaggaagaaaggagatcatcacacttgatccctcttcacccaaagttcctgctgtagttcctgttaagctcggttgatgcagatctcatcaaaccaatcggatctcgactaaattctttgataggtttgttgttcatatatatgctttcgtatgctaaagagaagataaaaagacataaaccatgaaaggtgttgttacattcaaccagcatttgttcctctcttgaaagagattattaagattcaagcaaaatagcaaataacttgcaggaaccatcaatgagaaaatggtctcaagaactgagttgaagaaacctctgtgccattggatgcgtagcgtgcgaaagctcacttggtttaagaacttcaacaatctctccgtcgacaacaaggcaaacgatatcagcaactttctgaatctgcttgatactgtgagaaacaatcacagtagtaatccctctctgcttcttcagtttcactataacatcctcaatgttctctgtcgatatcggatcaagagcacttgttggttcatcgagcagcaacacctcaggctcgttggctagagtccttgcaagtgctactcgttgagcttgacccacagataactctgcaccagtcttcttagcaaaggaagcatcaaggtctgcaagacttagcagcttataaacctcttcgtcacttagtttctcccctctcaaattcggaccatatctcacattatccgcaacagtccctgtaaccaaccacacattatcaagacctatgaaactagaggctaagcaaatcccaaaatttgattattaccttgaaaaagaacaggaagctgaaaaagcattccaactctacgacgaagagcaataacatcaacgttggttatatcttcaccgtccaagaacacagttgactccggtggttcccaaagacgattcagagatctcaaaaacgttgactttccacttccactaggtccaatcacaccaacgatcataccttttggtatatctatcgtaactcctttcaagatccgagatccatcatcggcgactcgggtcagatcatgtacccgaatctttggttctgaaccagacacaacaacatccacaagatgctctcgtaatgatccatcggattcgttagaccaaagtgatggcatggctttaaagttttcaactttttttgatcaaaacactcacttaacgaaaagatttgtgtccgtatatgaacaataagaatcagtcaattgatattgacaatttattattcttacaccacttagtggccaacttttaggaccaatctctgacatttacataatttatgacatcacgagatttagaggaggaattgttttttttttttttcacatccagatacaaattccctacatgactacatctatcacttgactatgccagaaatgataattccggttcgtagataaccaacaaaattcagacacagaaattaaagtagaccggttcactatcgtataacttcgctttgagttttttttttttttttttggtgtttcagagattaactttgaaaaatgagtatcgctttgatctcctgctaaaatcgccattgcaaaattcaaaacctgtagagattgaaactgtaaaaaaatg

SEQ ID NO: 27226 - DNA, 3003 bp, Unknown
  misc_feature (1)..( 3003): 2750-1469P.txt file - cDNA_ID_2730891; gDNA_ID_2684225; Annot_ID_137560
catgaagaaatcacttaaaaaattccaagatatgtatttaaagtttagtgaatcatcaaagcgcaaaaattcacaactaagtaagaaggttgtcgataaaaagcaaaaacaaaagttacagaatgtcttgaggagaggattcctcaaacctcctaagaaaagatcttttgggtttttgtaatctgtcattgtaagttaagcaaagtttgttgaataagtgttccagagatatgataagttgaccttttggattgtctaatctggaatcttttagtttatggtgaactctcaccccaagctcaatgtgatgtccatgtaactaatcttaggcaacatgatgtggcataggagattgggcatcctcatcatcaagatccctaaatgacgaaatgattttaaaataataattcctaagatttcacatccttaaacccttattaagtcctaacattcgaaaatacacaacattcatttgatttaatttaaatttttatattaacttctctattttcattaaaaattgtaaaatatttttttattgtcgtaaaatgttttacttttctatttccattaaagttgtaaatatgttttattaacgtcgtaaaatgttatttttttaaataaaaatatctgttgggccaaagacttaaaaatatctaaaaccgtgacttcttcttcctctcttccttgaaatttcctttgatgtgaacgacgatcccttgcccaacgcacaagtttcatctccttcccacataaaccccaatcccaaattctcttcatttttccttattcttgcgactaatcgattcaatcccaaatttcagaattcaaaatttcatctaaagtttagagatttctcgattatggtgaaatcgacggacggtggtggtgggtcttcttcttcttcttcagtggcgccgttcttgagaaaatgttacgatatggttgatgattctactactgactctataatctcatggagtccaagtgcagataatagcttcgttatcttggacaccaccgtcttctctgttcaactcttgcctaaatactttaaacacagcaatttctctagcttcattcgtcagctcaatatctacgttagtcctctcttctcctctctcttttcaattttgtacaattggatcttctttgttatgtctcttactcttacatggtgtgattgtatttagcaaagtttcattttttctctgcttttacaacgtgtggataggttttagagaagattgattatgaatttggtttatgaagcatgaagaaagatgttttgttcaacttctattatctggaacagtgtttagaactagtactagtcacaatcttgaagactctatgatagtataagttggttgatctagggtaaatctggctcattggatctttgagtagacttgtgcctgattcgtggatgtgtttgtttacagggttttagaaaagttgatgcagatcgatgggagtttgcgaatgacgggtttgtgagaggtcaaaaggatttgctgaagaatgttatcaggaggaagaatgttcaaagtagtgagcagagcaaacatgagagtacaagtacaacatatgctcaggaaaagagtggattgtggaaggaagttgatattttgaaaggtgataagcaggtattggcgcaggagttgatcaaagttaggcagtatcaggaggtgacggatactaagatgttacatttagaagacagagttcaaggaatggaagagagtcagcaggagatgctttcgtttttggttatggttatgaagaatccaagtcttttagttcagttacttcagccaaaggagaaaaacacttggcgaaaagcgggggaaggagcgaagattgtggaagaagtgactgatgaaggagaatcaaactcatatggtcttcctttagtaacataccagccaccatcggacaacaatggaactgcaaagtcaaactcgaacgacgtaaatgatttcttgagaaacgccgatatgttgaagttctgcttagatgaaaaccatgtgccattgatcatacctgatctatacgatgatggagcatgggaaaagcttttgttgttgagcccttcaaggaagaagacgaagaagcaggagaacattgtgaagaaaggaaaggatgatttgacattggaggaggaggaggaggatggaacaatggaattagacaagagctatatgcttaagctgatatcagaagagatggagaaaccagatgactttgaatttggacagcttactcctgagaggtctaggaaccttgagattttgacagagcagatggaattgctggcttcaaatgaatagttgattttttgaacatatcagcctcaaaacttttgttatgtaactctataacaaacaacgaagtatgcaccggatatattactttcaccggtgcaattctcaatgatgtgttatagcagcttactacaaaaacatggttgaaactttttgacaataaccatgagagcaaaccagtatagtaaacctcttaggattcctatatcggttcgattttgtgggttttaaatcgaatcaaaccataaccgaatgcattataaaacccgtttccgagtcaaaaccaaactaatcacttgatttttctgtcattgtttattggcctatcggattggttttactgcggttcggttatccctaaaccgaaccgaaccgactaattattttctcagtcactctaaactaatcgcttaaatttaagaggctttttaagaacacgtggcagcatataattgggttgctttgtcagacttttttatagcgttacacgacgacgcatgtcacgcatctaaacgccgtttccaaaacagcgttttgcgtctcgacaaacaacaatcaaaatctccttactctgtctccgtctctctggttttcgatttcgtgaatccaatttttgtgtgtatgtattcgcttcgtctctccatttttcttcgtcttacgtttacgtaatccaatg

SEQ ID NO: 27227 - DNA, 3000 bp, Unknown; identical to SEQ ID NO: 14792
  misc_feature (1)..( 3000): 2750-1469P.txt file - cDNA_ID_2730895; gDNA_ID_2684225; Annot_ID_191945

SEQ ID NO: 27228 - DNA, 3000 bp, Unknown; identical to SEQ ID NO: 14792
  misc_feature (1)..( 3000): 2750-1469P.txt file - cDNA_ID_2730895; gDNA_ID_2684225; Annot_ID_137558

SEQ ID NO: 27229 - DNA, 3000 bp, Unknown; identical to SEQ ID NO: 14791
  misc_feature (1)..( 3000): 2750-1469P.txt file - cDNA_ID_2730899; gDNA_ID_2684225; Annot_ID_137557

SEQ ID NO: 27230 - DNA, 3000 bp, Unknown
  misc_feature (1)..( 3000): 2750-1469P.txt file - cDNA_ID_2730903; gDNA_ID_2684225; Annot_ID_191943
attgttggggttacaaaattatttgtttgttttaactaagaaacatagttatcaaaatggatgctctttggatgtagattaccgcgatagacattgataaagaagcttacgaagttggactagagtttattaagaaggctggtgttgatcacaagattaattttatccattccgatggtcttaaggccttagaccaattggtgaacgacgtacgtgaaaatatgtgttcttatattattattaactttaagcttaattaactatatttttttagctaatggtcatacattaaaaaacattgcagaaatgtgagtttgattttgcatttgcggatgctgacaaatcaagctacgtcaacttccatgagaggcttctaaaattggtgaaggttgggggaatcattgcgttcgacaacaccttgtggtttggttttgtggcggaggatgaagatggagttccggagcatatgagagaatatagagcagctcttatagaattcaataagaaattggctttggatccccgagtcgaggtctctcagatttccattggagatggtatcacgctctgtagacgtcttgtttgatcaaaagactacttgaagagtacgtagcagaaccaaagtcggagagtttggaataaaagtgttagatggttcaataacgacttcgtcttttgtcacaactttgcttgtaatggtgtgtttgattgatgctcactctttatcttctttctatgttgtggtttcgtcgatgttgttctgtctggcaacaaaactattagtacactaaattacttttaataataattgttgtaacattataatttttttttttctggtcgacacattattattactgttttttttctttttaagtgtttgtaaactattaaaaagagttgtgtaaagattaaataaacacctttcagctttttggggacatctaatatgtgtgtttcaattttacatgcatatgcacactagtgttttccaattccattttttctgccaaaattacatatccacccaaatgatatgaccaaagttttattttatttctcagttaggtattactatttaaagccaacatagacacacatttgctaacactcaaaagagattctcacgatcgagcaagagagagatggatggtcgattacctgacaaaggcattctcaagagcgaggctctaaaacaggttttaatttactagtcccttaatcatttaagaacgatcaataaatttacaaatatatgtgtttgcttacacgactgcataatgtgttgttacatatgacagtacatcatggaaacaacagcgtatccaagagaacacgaattgcttaaagaacttcgagaagctacaatccagagatatggaaatttgtaagtcttaatccatatttgattttgtaaccagataattataattaagaaatatgatttatgtaaaaatttataaacgcagaagcgagatgggagttccggttgatgaaagtctatttttatcgatgcttgtaaagatcatcaacgcgaaaaacactatcgagatcggtgtgttcaccggttactcacttttcaccgtagctcttgctttgcctgaagatggccgtgtaatgattcttcttcttgctatcataccaaataaatagggataacttttgttagtatagttattatttgtttttgtgtatgcagattactgcgatagacattgatcaagcaggttacaatttgggactagagtttatgaagaaagcaggtgttgatcacaagatcaatttcattcaatctgatgctgttagaggcttagaccaattattgaacggggtacgtaagtagtagtacgactcacacaattaattactaaagcaaatggtccctttttaaggaatagttatattttaggaccaccaaatttgtatatattttttatatataactaatgaaagattgattgaaacgtctttaatacagtttttaaaacaaaatcgttttcagatttttacagtattttttgatgtaaatatgaaaatacaagttttttttatttggtccataattttcattaaactgactactaacctaatcaataaattttggataatggtcaaggagaaacaagagtatgattttgcatttgtggatgctgacaagacgaactacgtttacttccttgagaagctccttaagttagtgaaggttggaggaatcattgccttcgacaacactttatggtttggtactctaattcagaaggaaaacgaagttccaggccatatgagagcttatagagaggcacttttagagttcaataagatattggctcgggatcctcgagtcgaaatcgctcaaatatccatcggagatggtctcacgctatgtagacgtcttatatgataaacctatagtaaataatgttatatgcttcaataataactttggcctttgtttgtaatgttatatgctactataatgactcttcatcttcctaataaaactcctctttcaatttcaatttgcaaagagggttcaaatttggatgcgaatataacagtttattactttgcggcaaaatgtttataatttttaaactttgagggttaattgataaattaaagataaacatcgacatttctaaatcagaaatctcgattttattttgaatgttcaaaagctgccagattgagaatatttcgtccgtcgttgaaacttgagaatagaggcgaatctggttcgagttagggttccaattgaaaagtttgaagctccttttgactctctctctcttctagatctcgacaactctaacctcttcgatttggtaaattttcgctctttctactgaaatcggatgaatttgtgattttccggggatgggttcgtgtctctatgcattttccgatgatgggttatgagaaaaagtttttttttttttttaatctttgctttgtgtaggtggatcttgagaaattgattttagttcaaagcttctgatg

SEQ ID NO: 27231 - DNA, 3000 bp, Unknown; identical to SEQ ID NO: 27230
  misc_feature (1)..( 3000): 2750-1469P.txt file - cDNA_ID_2730903; gDNA_ID_2684225; Annot_ID_137556

SEQ ID NO: 27232 - DNA, 3000 bp, Unknown; identical to SEQ ID NO: 14790
  misc_feature (1)..( 3000): 2750-1469P.txt file - cDNA_ID_2730907; gDNA_ID_2684225; Annot_ID_191942

SEQ ID NO: 27233 - DNA, 3000 bp, Unknown; identical to SEQ ID NO: 14790
  misc_feature (1)..( 3000): 2750-1469P.txt file - cDNA_ID_2730907; gDNA_ID_2684225; Annot_ID_137555

SEQ ID NO: 27234 - DNA, 3000 bp, Unknown; identical to SEQ ID NO: 14789
  misc_feature (1)..( 3000): 2750-1469P.txt file - cDNA_ID_2730911; gDNA_ID_2684225; Annot_ID_137554

SEQ ID NO: 27235 - DNA, 3003 bp, Unknown
  misc_feature (1)..( 3003): 2750-1469P.txt file - cDNA_ID_2730927; gDNA_ID_2684225; Annot_ID_137549
ttctaacaattttacaatgtgctgaaaactcttgtttctatttcgcaaaggtaacgtaacctaacctttcttagacaacaatgtagggtttcgagtttacaaaacgaaaactgaaagcgcaggcattgaggaaatcaatgaaaggattaggaacagatgacacggcgttgataagaatcgtggtgacgagagcagaggtggatatgcagttcatcatcacagaataccgtaagagatacaagaagactttgtacaatgctgttcattctgatacaactagtcattacaggacttttctcctctctcttttaggccccaacgtttgagatctctttctgtatccaatcccaaaattaactttgattctctgtatcttacaaaattacttgcaacaatcttgaaggatattataacatgattatgtgtaagatcaaacaaagagataattgagaagctgttctttgaagccaagagaatcactttcaagttgttaactactcaattcaacagtaactcagaattcatttctaatcagattccactttgtgtatagtttgataagttttccattgaggcaaggatgataatagctccttgagtaacttacagctatactcttcccaagaggtaaccgcgagagctatacccgtcaagtcgagtgaatcctttcgatcctcaccagagcacgaatatccaaaagttgtggctacgaggttctcatctagcaggaaaactgatttcagggcattgatagtttccaactgagagtgggacatagctttcacctcttctaatgtgtcattttcgacattagaagttacgagttcagaagctttccaatggtagaactgaacaacctattatccagcaaaagagaagaaataagcatttgattatatatgatgaaaggaagcccgtttaacaagacatttactatatcaactaatcactaacgacctcgaagaaactcatgtgaatgtcaaagagaaaagtacctgaagagcatgaagaatgttggcaaattttcgggtgagtaactttcctcctttagctaattgtagtggtcccataagttgttcagaggcatccgtagaatgatcttcgccttgtaagctatgtacatcaaaaccaagaagatgcaacctcgcaacgcaaacatcaaaacctatgttttgattagaaccatcttgatgaggacagaaccagtacatgttagtggatgcaggcaaagggaggcacacttcatgtgatgtacattgtgaaagacgagaaagaagcttggaatcttcgtcatgtgatgagtcccggctaaaccagagtgcaagagtcaatctttctccatctgttacctcatcaactgagtgaatattccggtcatcagctgtgtacatgataacatcctgctcaagaacacaaactcattattcaatctaagtaaccactaagccaactgaaaaagaacaatacttacaccagccgatggagcaacggttactggttcaccactctgaaaacgaaaaagaccgcctatgaaatctttctcgtaactattcaagtaacaaactgccttcaaaccaactaaaaaccaaagtcatacacacataaaccacaatatcaacaaggacgtctatagattacaaaaatgagagtgaatacgaaccgcaaaatctctttgttttagatatgatctgttatcatcactatgccaaccaatgctagctcctttgcaccaactgattcaaaacaaagaatcaatatttactcttttttcctgacttgttttgttaaagagacaggggagagagactaacctaatcaaacctgtgaattcaataaaaagctcatactcacacccaaatgtttcctctatcttctctttcaacctctctgttaactcaacacaacaaagatcatccctttgaatctcacaaaagtaagatataaagacaaaagcgaaatctttgagttttaaaagattgacctctaatggagacaaaagggatgatgaggtgaggagaattagtggcaatgaggtgagagagagtagtggagaagacatttggtctgtacccaattgtactgctactcttgtgtataagctcaagttcctgtttttacctcaaaattaaccaaacccacatgattagacacaaaattaagcaaaaaagggacaaccttgcattctgccggcgacaggaaattgtgtagaattagccgagggtgctctttctccgacatgtctctccggtttgtgtaatgaatccaatgaacccagatcgattgtggttgtttagggtttcagttaatcctgttcttacttgtcttgtctatttcggtgtaccaccgcttttggaattaaactgaaattagtttgttaatcttttttttcttttgttcattagaataattaattatatgatgttaaaaaaaaattattatgtaagaaatgttaagtcggtaagttccaattaacttaaaccggaattttagaagacaaatgttacaaaaacttttgaaaataactaatcaaagtatcaaactgaggtaaaatgagattatactaagtgcttaccactacaatcgaatttaagttcttactaaacttctaatgttgttcaacttttgctatcatgaaatcctctaccaaccatcgatttttgttcattatttacatatttctagttcaacattatcaccaccacatttgctcttaaacataaccgagaagacaagtgttaaaaatctcaatttcctaaccaccagtctaattgttgactactaaaacgtctgtaatcctctaatctctaactcttaacacatattgtttaaagagcaaattaagaattaagacaattatgaatcaccgatacacttattaaagtactttctcttgtctctattttgacttttgagtggtactgataggtacaagaaacacaacaaaccctagatttatcttcatctctctcaattctgtatcaagcaaagacggattcaacgatg

SEQ ID NO: 27236 - DNA, 3000 bp, Unknown; identical to SEQ ID NO: 14786
  misc_feature (1)..( 3000): 2750-1469P.txt file - cDNA_ID_2730931; gDNA_ID_2684225; Annot_ID_137548

SEQ ID NO: 27237 - DNA, 1739 bp, Unknown
  misc_feature (1)..( 1739): 2750-1469P.txt file - cDNA_ID_2730950; gDNA_ID_1591533; Annot_ID_151125
tacaaaagaataggataacamaactatatatatatatatatataacgtagtgtcaaataaattaattagtgtgttattttcaaatatacccataaaatccttttattttctaaagaaaacacaaaataaataatcgaatttaagtatgatttttatccattatttttgccaaatagagggttctttactgcatatattccttaaataaaggaaagaggtgactattatcctaatttcttaagtaagaatgcgattgtgaaggttttgatatatccmactttacaaaaaaagaaaaaaaaagcattgcatgtgatgagaatccatctcccccatcctcccacccattctttccaactcaaccatctcctttctcttcctattaataaagtatcatcttctttttgtttctctttttattttttaatgaaaaataaaacttttaaaaaaatttgtatttacttcaattttcttacagttccacttggatagacaaatgccctttaatgagatggtggtggactttaagtatatgttatacgcacaacacacacacacacacttttatagacatgttttttaataaagaaaattctttcgaacatattccagatctctaatttttcttttgtttgagatgttatatagaattggtctcagctgacactcaaaaaccagatctgactctagggttttgtgtttgttttttgtttttcttgtaagaaaaactatatattggaaattttctgattcgtctcacttgtgggcacagtattcttatttgattaaaacctatttcttatataaaaaggcatgagatgatggcaccacattgtatatttgtatatatacggaaacataaattgggtatatgcatgtgtcttatattcaaaacaaatattctcaagtcccttccctttttaatttacaccagccctatagctaaaggctacacatatatacatttgtcaccattaaaaaacatgtactgttaaacatcaaatttccaagattccgtttatatttttcacctatccttttttttatttatctttgaaaaacaaaacttactcactctgatcgaatattttatgatatgaaataataatgacttgtaattgttgtgtagtgaaaggggatgtttttttgtttcttgtcctgatgctaatgtgggctccaagctccttgtcccactctctttatatgtataaacatctctctccatagatatgttttgtgtttgtaaacaaacagtgtacagatagagaagagagaggttcataactactctgaagaagattgaagcaccaaagaccatacaatgcatttctccatctaaggtgagaggtcaatgaaacaattaacaaaaagttgaaagtttcatttatttttttcttttccaagaaaattataaaaagttggatagtaaaagggaatagaaaagctattatccctttatgtgagaaaaaaaataaagatgatttcagaaaaacaaagccctttgtttctctctcttaactcatcttatactttcttcttctattagtaaagatgagtactctctctaccaaataaataaggaaacataaaaaacaatctctccttctttctctacatgaaaaacaaaagattcctcaattttgttcttatttttcatttagtcacagtacctctctcactataaaccacactgtcttgagataaaatacaaaaagagaagagattaaaaacctcatccgatg

SEQ ID NO: 27238 - DNA, 3000 bp, Unknown; identical to SEQ ID NO: 14784
  misc_feature (1)..( 3000): 2750-1469P.txt file - cDNA_ID_2730950; gDNA_ID_2684225; Annot_ID_191929

SEQ ID NO: 27239 - DNA, 3000 bp, Unknown; identical to SEQ ID NO: 14784
  misc_feature (1)..( 3000): 2750-1469P.txt file - cDNA_ID_2730950; gDNA_ID_2684225; Annot_ID_137543

SEQ ID NO: 27240 - DNA, 3000 bp, Unknown; identical to SEQ ID NO: 14505
  misc_feature (1)..( 3000): 2750-1469P.txt file - cDNA_ID_2730961; gDNA_ID_2684226; Annot_ID_137588

SEQ ID NO: 27241 - DNA, 3003 bp, Unknown; identical to SEQ ID NO: 27105
  misc_feature (1)..( 3003): 2750-1469P.txt file - cDNA_ID_2730977; gDNA_ID_2684226; Annot_ID_137583

SEQ ID NO: 27242 - DNA, 3003 bp, Unknown
  misc_feature (1)..( 3003): 2750-1469P.txt file - cDNA_ID_2730986; gDNA_ID_2684226; Annot_ID_137581
gctatgggtctgaactatagcagtaagttccaccatgggagatacattgctgcgttcaatgtgatagcattcaggtgcatgaactttccatatggaaacgctcccggactttgaaccaattgccaaaagagagaatcttaacatattcccacaagaactttctgatgagaatcttagaagagatgaccaggcaacggaatgggaggataataatgcctcacgagacacatacgtttgcggacttatctcttgactgcatttttttagagctttaggcaaggaacgacgatcttggccattgcttgcctgtttatatacttcaatctcaagtacctgggaatataaggaatcgagttagatatgagtacaatgcgacgatttgattcttactagatgacacttgagagtgggagtgtcaaacttctaagaaccatatggtgtgaacgatgcattaaaggattcaggtggaattcaaaagcatgacaagattcgaaatgcatcaaatcaatgacaagacaatataaaaaccacacacatgttctttctataagaacactggagggaggtacaaaatgtcaaaatctactcaagatactaatttacttgatgaaatgacctagtttcttattaattactaatcctaacaaaaagagtttccacaaaaacaacggataagatacaatctgcaggaacagagttagaatctgaaacttgttacagaatacactacaaagtgaggaacagaaataagttggaggaatcatgatagtattttttcaaagcaatgcactacaacagaaagaagttaagagatatgaggacttacattatgctctgctttactgtcttgcttggaacatgatgctcgatctgtataattcttttcatgcaagttgctaaaacaaagaaagtaagttagtcaagtgatcaaaacagaaaaaagaatatggaaaacaatttctcaaaccactggtatgcatctgacgaaattgaagagtgaaagaaatgctctttacatgttatttgcacttgtttttcttcgcttgcgtgccttcagacttgaaatcctttcatcctcctcatggtcatgttctaccacttgatcctgttataaaagagcacaaatcatttcaataatatagtttggataaaaatattatgcagacaaacatcaacaattccatcaaaacgcaataccttccacaacaacatttgtccattaataaaggataactaaagatataaacgatttgtttagatgcgtctttatctaaatgtgaagagtacgaagtataaactatctacatatcccttataggaaacacatacatatagtttgcgggagtagtaagtcatccttcatggttatcaaacttccactgaaaacactttagagatacaagttaccttagataatgaagtagaaggatttttggactctccaaagttcatgcttgatagattctcataaagcattttagatatatcaacaatctgcgaaagagaggagaaagcaactttaaatgcataggttagttataaaaggcgaaagagaatttacgacctacctcaatccactcagcacagaaatcagaatatggaggtcggtatagcttaacccttccttccgctgtgcaaacagccagtaagcacctgagcagagttatttgaatcacgaatttaggaaatagagaaacaaaacaaaactgaacatgttacaagaaatacagtacccgtggtttggagacattcctatctcagaccatgagagagatcgaacacatggacttctttcccgcttcaaactcgaaggcaagagtccaccagttagcaaatctacaatcacatcatcactcacattgttatccgaaacttctgaatgatcgaaaacacagaaaccaacagaaatttggtctacaaacacacaacttcatgaagaactaaacagttgcaaaagattgaatttttatcttcaaatctgaattggcaaacatacaggcaggattttgaaatttgatctgaattttcataaaacaggtacaccaaaattctgtatttatcaataaaaaaaacagaccttgagagcgaacacgaccaatctgataaagctcggcgtcagagattgtgatcaatccacgagggccagtaggcaaagccggattctgacaattacaaaagtcatcaatacaatttaaaaagactcaaactttaacctcaaaaaacgaagcagaagaaaacttacaatgatgatgactagatgaccagcagcgacggcgatgagattttccgatgaccaagcgacggcgttaggatacgacggtgaagtaaccagtgaagcttcctgaaaccgcgacgccatcaaaaagtgaagatcaacttagaattttggagggaaaataaaacttgctctgctttgcttttgacaacgaaacgaactgatgaagttgattcagtacggaaaccctagttcgaatcgcagtgacgcagatcagatcctcaattatttatttcttcccgagtttaacaaaaagtcaacgtgctcgttttttaaaacggtgtcggttagatgatgggctaagcccaaatccttttgagtccaaatacggagaccagagttcgaagcgcaagtgacggctttataatctctttatttaataaaacgatgtcgtttttgcttaagcaataggcccaaataagtaaaaagttcaaattaagggttttgaaaatattcgccgtcgccgatgtcgggaaaccgaagaatttgaggcaaaaaaaattcgtatttccggtgagtctgaagttcctgaattataaatttccgatctttgttaaattcaccattcgttttcctaactctccgtcggcaaaaggcgacacaatgaagcacatataaaactgaaaatctataggaatatatatacacattataattctctaattgcattggcattggatttatctctttgttttacagaagagagtaatctctggaaagaatcaatg

SEQ ID NO: 27243 - DNA, 3000 bp, Unknown; identical to SEQ ID NO: 10548
  misc_feature (1)..( 3000): 2750-1469P.txt file - cDNA_ID_2730994; gDNA_ID_2213660; Annot_ID_132542

SEQ ID NO: 27244 - DNA, 3000 bp, Unknown; identical to SEQ ID NO: 10548
  misc_feature (1)..( 3000): 2750-1469P.txt file - cDNA_ID_2730994; gDNA_ID_2684226; Annot_ID_191991

SEQ ID NO: 27245 - DNA, 3000 bp, Unknown; identical to SEQ ID NO: 10548
  misc_feature (1)..( 3000): 2750-1469P.txt file - cDNA_ID_2730994; gDNA_ID_2213660; Annot_ID_181864

SEQ ID NO: 27246 - DNA, 3000 bp, Unknown; identical to SEQ ID NO: 10548
  misc_feature (1)..( 3000): 2750-1469P.txt file - cDNA_ID_2730994; gDNA_ID_2684226; Annot_ID_137579

SEQ ID NO: 27247 - DNA, 3000 bp, Unknown; identical to SEQ ID NO: 10549
  misc_feature (1)..( 3000): 2750-1469P.txt file - cDNA_ID_2730998; gDNA_ID_2213660; Annot_ID_132539

SEQ ID NO: 27248 - DNA, 3000 bp, Unknown; identical to SEQ ID NO: 10549
  misc_feature (1)..( 3000): 2750-1469P.txt file - cDNA_ID_2730998; gDNA_ID_2684226; Annot_ID_191987

SEQ ID NO: 27249 - DNA, 3000 bp, Unknown; identical to SEQ ID NO: 10549
  misc_feature (1)..( 3000): 2750-1469P.txt file - cDNA_ID_2730998; gDNA_ID_2213660; Annot_ID_181860

SEQ ID NO: 27250 - DNA, 3000 bp, Unknown; identical to SEQ ID NO: 10549
  misc_feature (1)..( 3000): 2750-1469P.txt file - cDNA_ID_2730998; gDNA_ID_2684226; Annot_ID_137576

SEQ ID NO: 27251 - DNA, 3000 bp, Unknown; identical to SEQ ID NO: 10553
  misc_feature (1)..( 3000): 2750-1469P.txt file - cDNA_ID_2731007; gDNA_ID_2684226; Annot_ID_191980

SEQ ID NO: 27252 - DNA, 3000 bp, Unknown; identical to SEQ ID NO: 10553
  misc_feature (1)..( 3000): 2750-1469P.txt file - cDNA_ID_2731007; gDNA_ID_2684226; Annot_ID_137571

SEQ ID NO: 27253 - DNA, 3003 bp, Unknown
  misc_feature (1)..( 3003): 2750-1469P.txt file - cDNA_ID_2731025; gDNA_ID_2684227; Annot_ID_192023
atgttattttgtctaattatagtgtataaataaatggtatgtcatttgaagaaaaacctgattttttcacatcctactaataacttttgtgatcagtgatcactaaatatatttatgtattttcgtccaactcaatggaagttgtttagaaacaaaaaacttggttattcacttaactagagaaaaattcactaaattgatgcgaaattaaaactttcagtctccacaaagataaaaagaaacctcgttcttgtcaatcgcacaagtaaaaaacaatccattaacggtaactaacttctaaacgtggatcatcaccaaacgctaaaaggaacaatcactcaaacaatgcaaatgcacacaatcatgtgaaccaagtcaaaacaaatcttcgttaccgtacacgtgtcttatctaaaagcaagagttgtttgacgatctcgcgtgtggttgaagcaaggcattttcgcgtttaaggcggtccagcactctctgatatttttattatcaaactataaaaccacagaaaaaattataactggaatttaggaacattaaaatgttattacaatattacggaaaaatctcttataccgatgagatttctcacgggagcaaaggggaccgcttgaacgtgggtagatgataacaaaattaaaataactatatgaaataaaataaattattttagtatttgtgagacagagaaaaataaaataataataaggattttttaagatctaaaagataaaaatctattataagatacctcccacactccttcacaatctaataataaaacattttctgaattgttttatgctatactttagtggtgggacattaggattgaatgaaaatgtaaagatagtgggagctattgtttagtgattttaaaacttatttcattcttacacaagatctatttgttttatatattaaagtgtattcacatgccaattatattttatgattgtttgcaaagaatgcggtagtttatgaattattatgactagtagtatgtttttagattgagttatcgaatgacacgtagcttattaccattaacacatctgaaactttttttcagatctaagagatttttatacttataattactgagactgtttattatatattttttattaactctaaacgtagttcaactttttctttataatttttattaactctaaaacatttaatttaaaaaggattattttggcaaaaagaattaattaaaatgtcgttttaaaacttaagaccttaaaaaaaaaacttttaacgtgttttataataaataatcttatagatttttaatgcatatgttttataaaagtttcagttttctttttactgttttaatagttagactaaccaaaaaaatgaaacttttgtgtaaattttcttaaaccaacttttaatactatagataggaaagagtagtatgtaaaacacatacacgatatggattccaaattgttttcctctcttaaagatagacaagtatgtgtagttaatgaattgtctcactaccatccatgcatatctatcctaatttaaaattcatgatgttgattaaaacaaattaatactactagttgttgattaacagttgtttccacgaaaatgagtttttgagatgtaacagttggttactatgctcagttcccaaaaacatgaccaaacataattttgtctttcacgtgactaattactgctcaagccaatgaaatgaatgtcacatcagcataaactctgatcaattagagtcaaacaatggcgtgtaatgtaactatgggaacaaaaattacaagattttttttataatttttttttctttgaatgttggtatgggtattcgaacaaaatatcaaaaagtcactatttttgttacaaatggaatgaccacaaaatctagtacccatgatacaaaaaataatcatataagcacaatataattctttcaaatatacaaatataaggtttttaatgattgtaacaaatgacactaaataaaatactataactacgaaatagatcgttttatttaagacaaatatatatacagtagttgtaactttcttatactaaccgttacaaaattgtgtattagcagaattttttttttctatctttaaaatcagaattagcataacattcttatctataaatataagaactgttacatatgtccattacaactagatatatttaatccgaataaaccgatttgaaccgaaatactcaatccgatttacaactagcccaaactttttaaaaaaaaatcttaaaccaaacctcactaatctagtcagtcacacatactacaatccctacaaataattcataatatatatcctttctatatttaaccaaaaccaaatcaagtttaaaaagagaaataaaaatctcattttccgtttgatatttatttcaatacaattaaaaaataaaaaatttgaattaaaaaaaaaatgcctgtctggatattattattatcataaggttatataacatggccctataaattgaacaagggacctctccaatggccccttctctcgtccttcttcttctgtctaacaatacactaccacacactttcacgctctcttctctcacacctttcttcttcctcacccaaaattcttctctctatgttcttcttcatcttctagctctctcatctcttcttctcgccatagcttcaccttccttctcaagctgtacagttaaagcttaaggtattataacctcaccttctctctctctctctcaatctctcttcacttccgtcgatttcttttatcaattttcttagatcgatgaatctagatctttcagatctgttattgacggatctgtttctggaaattttgattcactgttatcatcatcatcgttgttcttacgatttagatttgatttttttgctcagatctaatttcaaattttcatgtcaacagattaattttcgttaattttaaattcgaagaaaagatg

SEQ ID NO: 27254 - DNA, 3003 bp, Unknown; identical to SEQ ID NO: 27253
  misc_feature (1)..( 3003): 2750-1469P.txt file - cDNA_ID_2731025; gDNA_ID_2684227; Annot_ID_137596

SEQ ID NO: 27255 - DNA, 3000 bp, Unknown; identical to SEQ ID NO: 14826
  misc_feature (1)..( 3000): 2750-1469P.txt file - cDNA_ID_2731031; gDNA_ID_2684227; Annot_ID_137594

SEQ ID NO: 27256 - DNA, 3003 bp, Unknown; identical to SEQ ID NO: 21921
  misc_feature (1)..( 3003): 2750-1469P.txt file - cDNA_ID_2731041; gDNA_ID_2684231; Annot_ID_137624

SEQ ID NO: 27257 - DNA, 3003 bp, Unknown
  misc_feature (1)..( 3003): 2750-1469P.txt file - cDNA_ID_2731064; gDNA_ID_2684231; Annot_ID_192269
gttttctttatttgtttaagcttgtttgatgttaaagtatgttgttttgccttttatcttatctgtgaatgttttgtttacagcttcctgattattatgagattatcaagaatccgatggatttcaccacattgcggaagaaattagaatccggggcatacaccaccttagaacaatttgaggcaagtcttgtaattgaatccctctatacatttctgcgctttgctttagctaaaatggagtgttcacctttcatagttttggttcttcatattgttaagtcttgttcaagagtttctctggtagtaacaacatcgtgtttgcctacaagcgtgtaaggttttcttagttttcctagccacaatgtgttaattctaccatgagaaggtgcagatatactgttaaaagtgaaagccttgtggggtctgaattgtttcgttttgttgcagcaagacgtatttttaatatgtacgaatgcgatggagtacaattcagcagatacagtatactaccgacaggtttgtcttggcttatataaacttgctattttacttccttttgttataatccattctctgatagtatatctatggcatgacaggcaagagctatgcttgagttggcgaaaaaggactttggaaatttgagacaagaaagtgatggagaagaaccagtgtcactgtcacaacagccgaaagtagtcaaaagaggccgtcctccaggctcaggccttaagaaacagcttgagcaatctttgattgatcgcacgacttctgatatttctgctgatgcagcagcattcacttatgctggagatagctctagattatccggttcttacaatctaagaaaaaatcctccttcatatggattccgtcatgcagaaacttcggttagaatcaaccataatagcgagaaccaaagtggcttgttgatagattgggagaaggagtttccacgtaaagatctacttttctaatactaccttcttcagaccattataccaaatacgtttttgttgacataaaccattttgtgtagcttctgttgtgaaggctgtcaataaatacgggatgaaaaatgtcgacgagaacaggcgagatacctacaaccagaactctgcttccttgcaagattcttcgatttttacactgcttgatgataatttaaaacaattaactccagtacgtgcttagcaacttaaaagttaaaatatttctccttttgttctaagcaacaaagaatctgaccattgtttcgttattttaccaggttggactgaaagctgaatatgggtatgctaggagtctagcacggtatgcagcaaatattggtcctgttgcttggacatttgccaatgtaaggattgaaaaactgttaccaactggaaccgaatttggtcccgggtgggttggagagaaccctgagaatcctcctcaacagcaaaacttaatgtcgggaaagcaaaagtgttcgaatgactatgcatctgatgatcatcatcagtcaagtagaatcatgtctccatcaacctctgtctcaagctccatcataggaaacatacattcttcccatgaaagcaaagagtctgttcaggtattgaatcaagaaaccgagataaatggtctagtccgtggttccagcggatttaaccataaaccaaaccagatgctggaaacagctggctcgcagcaaggcaacataaaacaggaatttcagcggttgccaccagatctcaatgctaggctttcctcaccaaactcaccaggctctaaccaccaggcaggttcatcgcagcatccggatttggcgttacaactctaagtaattcctactaatattgaaagccttaccgatatatgagggagaagaagaggcaaaggcatgtgattcttgctacaaggttgaatatatagggaaagtcttatgtacagattgttgcaattttctgatttttttagggtaaaaagaaaaagaaaactgatcgataagagtactctcacaagatgtatgactgtaaaaaaatttgtacaatttcctagtccatcaaactagagtgtaatgaatgtactcgggattgtatatcatgtacgtttttgtttggtcttgtgaatctgtgcataatatataatactaatatttataaatatcgaaacttaacaggataagtagaaaaaatgattacaaagaaaagtagaaaaatattttgaaaactccgtttgaaaagattatgatagctccctgtgattaatcaaaagtcaaaacacagttattaggatatgtttgggggattatgagaaaccgtgtctcttaaatagtcagtcttacattttgataatgttatatacgttacagtatataataagtagacagcttaaattagttccaacggaaaaaaaaagaaacaaacgttgaagaaacagaaggaaggaaggaagaaagaaagaaaacgacgcgcagttccaaaattaggatcatattggctcctttaatttctcttccgttgccatttcaaatattttcacagttgcttcctttcaccactctttttaatatttctctcaacatttttccattagcatataagagagtaaaaaagcctgtttcttcttcctcttttagtatatatataaacaaaccattcttcaccattcaaaatgccatttgtataattttagtttttctccacttttcagattcttccttaaggaatcattttcccatttttctggaattttaagagagaaagagaaaagctctctttcccatttataatcccaaagacacaaatcctaggttttttcttctttcttttattacaagaaaccttggttttttgtttttgtttgttctgtttcgtgtgtagggttccgggagctgcgtttgatgataatgttggacatcatctcaaaccagctccgtctctgaatccattttcttcaaccattgttgttgtctttacgttaaataatatcatctttcacgagtttattaaggaaaatg

SEQ ID NO: 27258 - DNA, 3003 bp, Unknown; identical to SEQ ID NO: 27257
  misc_feature (1)..( 3003): 2750-1469P.txt file - cDNA_ID_2731064; gDNA_ID_2684231; Annot_ID_137615

SEQ ID NO: 27259 - DNA, 3003 bp, Unknown
  misc_feature (1)..( 3003): 2750-1469P.txt file - cDNA_ID_2731068; gDNA_ID_2684231; Annot_ID_137614
tatgaagaagcttgatagaagctaaccgcaaatcatcgttctcatgtatctcaacaaactgaaccaagcttatgatggcagctgagtttctgatggcagaaacaacattaataaccgagtttggacagctagtgagtccaacaagaaccgccaacagctttccttggatttctggaccagtgttgcttgttagttggagaaggttctccactatttcctctgaaacaagagtttggtgatgaggtccaacaggaactttgtcgaagtcgtacccaatgttcactatattggcaagaatagttgcagagacttctttaagtcggattggaagctggtttggcccaacatagaacaagtctttgataagcggtgggagaattccggtgttgattaagagtttagcactcccttcaaaggatgagatgttgttaagagctcccaaagcagcttcccgttggctcatgtcgcgagttctcataagatcgataagagaagaacccacagtctgagccacaataactttcacatcgttatttaaagcaagaaccccaagatagaaagccatggaaacttttgtttccggtgaacctgtagatgcagatcatgttacatagttatagtttcattcaaaccaatcagtgaaaatcagtttattggtaatgaaaggttagtggtttggtgaaataatcaccttcaagaagtttagcaagaagaggctgcagtctaccattgatagccatctgtcgaacattttcctctgacctctccaaatttgtcaaagttttatcagctttctcaacagttgaaacattctctgatttgctgcttgtcagaccaaccaataagatgattgctccatggattgatccaatcttctcgcataatgcttcagatttagagagctcaaacaacacggaaacagctgcttccctcccctttgatggctcttgagacaagaacttaactatagtacgcacagtgtctccttcagctactattgcctgaaacacactaaaaatcacttacaaaggaatcaaagacaaacagagagacaaacaaaaacacaaacagagagataaccttgctctcttcatctccttcaacgactacttgaagagtttgtagagccttacaccgcacttcatgactactactctttagcatatcggtaatcaaccgaacaagctgaggattgcacacacgttgcctaattttacgtatattcctacaaatctctctgacattcttcaaagccagcaaaatattagtctcagcatttcccaaataaagtgactgacgagcaatatcaagcttcaaagcatcattccttgctctccactcttcaatagtgttacgtaaagctatacttggacttagatcagtgatactcaactccttagaagttataggacaagatagaggttgaccgttttcacgacattcttgaaaccatttctcaatagcttcacgctcaaatgtctgaccattctctaaagtgacaggattatgcataacttgctttgtcaatggacagataaaagcttcgtatatgttatcaatccctggctcgaattgtgagctgttatccgattggcttccatcccaacttccacttccagccatctgatgaattgattcttctacaccataataagactataatgtaatcaaagatcttatataccaaattaagctaagttcttctaccttttatgaggaacaacattcagtagctaaaatcaaaactataccctaataataaaggcaactaatttgcttctaacaatcatcattcgtttaaccctaatataggaaatattaccaaatatagaattttgtttattctcaggatagtaattactaattagtactagtatataacaaacacacgaaaaaggaagattaacacacgtaccagttcaaaacaaaagaagccctgaagaagctgtcttaaccaagaacaaaggtctttagcttcttcttctgctagcttgagaaattgagaacgatctctggttaaattcaaaacctttgaaaagaaaacgggtgaaatcgagtcaaatccatgtaacacaacatcggtgtagtcaagtatgaatccgccagagatatttttgtgcctgaatcgagaccggaggaagaaagatggaaactagaagagagtttcagtcatctaagcaaaagatgggaaagaaaaaacacacaccgacaaaaaatagaaaatagacatataccaaaaagctttgacaattattgagaagtcgtcatgggaaaacacatgtgaacaccgagactacccaaaataaaacgttttttgtgtcattttaaatgatgttaatagtcaaaaaaaaaaatcttctttatcgtattttcaatgtactaaacattcgctgttggtttcattgtttctatattaaaagcttaattcttcgatctttcttggttaaaaagtcaattatctaattattggtctcatgactctcatcaataaagttaaatagttaatgtagatgttttgcaattttataaacaccactggccaaaaaaaaagaaagtagactagttactgtagttgtatgcaacaagatgttataaaaaaaggaatgatatagtgattagtgagtaacaacatcaaaacaaaccattaaactacatggtcttattacatctaatctataatcttcaaaatcatgatctaatcaccctagagattttatgtagtggcccaaaaaataaacatttgcagacaatccagacatctatatggaattaaggcccaattggcccaactcaaaaacgttatcccaaaatgatccatagaatgtaaaccacgtgtattgcagtcacgcacgagtaacccgtgtccaattttggtctgcacgtacgaactcactcacacatgtgtaagcaaaaaatgaataaacacgaaacgactgtttattagaaagaagagaaaggcggagaacaatagagagagagagagacaagagaagagagagaatg

SEQ ID NO: 27260 - DNA, 3003 bp, Unknown
  misc_feature (1)..( 3003): 2750-1469P.txt file - cDNA_ID_2731072; gDNA_ID_2684231; Annot_ID_192266
tagacttttacgtataattaattgaaattaagtttagatgctaaaacgagttctattacctgacatcatttacatacaaagatgatgtctttctttctttctttttgtgaaaacacaaagatgatgtctaaaagactaaaaagtagaatgagatgcatgaatgaatagaagataattgcaattactttcaaaaatatctttacaagttggggaattaaatttaaaagtatgtaacaaagatttgggataaaacttgtcacatctagtgcagtttaattaacaaaatttcttttgggataataaaaccaaaagcgacctcatcacttaagagctttcacatatcgccgcctctaataaaaacattattgtagatattataattaatcatacatagagatcacgtggaattttgtaaaagtcactaacaaatctaacgataaaattggtgacttgtctcagtctctttttcagtttttcttttaccatttgaaaacgatctttgatcttttcattttccctctttttgagtgatgatgatcagtaagcaaatcttgagcataccccatcttcggattctgaagatcaacactctttttaactcagattttggtactgatgttgatgttccgagcagcaccatctcaatttcaactaaaccaaaccgctctgagttagtttgtttttcgatggtccgggtttggaattggttagtgaaatcatgacgaatttcggcttgatggtttagcatgtttttaccggttaagttatgtacggttcatgatcaatggatctctgagggatctaggagtgtttaagtctacttataaagtcaaactacatattgctacgaaccctattatccgacataggaacaacgacatttcctttaagagatgatgatttggaagatctctgaatttgattaattggtagaattaaaatgtgttcatcagcagtggtatcaatacatttctcagatgatgattgaaaaaaatgcagttacaggtcataccgcaagttccattttcccttcatgttcgcgttgagagtccaattgttttctctaatctgcatataagggacctgaaaggaagaggcaaacattgttctgaagaattaaaaaaaaatggaaagcatttttcgagttttacaaatgatataaagcctgaaaacgatgacaatcgatttcaagagtgttggcttaggcaatcatataagagtcctctaagcaaatagatggattatcaatgatactatgaaatgaaaagaactttggtttcaacaaacactctgctttgtgaacttagagattaaaagagcaaattttggaagagtcaacacacttccaggtacgagagagataccttatcaaacatttcgtagccaactttgatccgtacatcctgatcttccttgaaatccattatgttccaggcaaattctgctgctcctttggggttcttctgttagcacaaaatgatgacagttccgttagggataatacacaaggaagaaacataacttcaaagaaagttcccgagaccaagaaaaaaacatcgaacctgatttaagtcctgatcaatatcacaccgccctttaatattaaaggttacacgcttatcagctcttacaggaaactctttttttccgcgtacaagacaccgaagcttttggcgcttatcataatgcaatcctaccccaaggcctgttgaagcctaagggaaatttgtaacactatattagtattagtctacagcagaaaatgtttcacggtgacaaaatagaagaaacagcagaaaatgaaatcaaacctcaggaaaaaagtgtctaatcatcgcacagaagtaactcggagccccagttccagtatctaactctccatgaagctagcaccaaacaaaaaaccatcaaggaaattaagaaatcagaaacatgtttgcaagaaacgaaacataatccggctatactgtagccaaagccaaacaactataccacaacaaccaagctgggaacatacactgacaaataataaatcaagattcccggaagcatatggatgtttctttgctaataaccattataaagaagttcaagacacaatttttttcttatgcctaacacaagaagtctagaacctagataacattctcaaaacccaaaaccctaacagcaaaaatgatgatacagaatcctacgagaattccaagcagagagcaagtgtgtaagacacaaactactcctcaatttggctcctgcaacagctcaatgctagaaatttgaacaaaacctaggtcacaatttctctcagattaggtttcataactccaagagctcctttaaagtaatcttatcttcttaatcaaaagttcaagacaacacagttcacttatgtaaaatgcacacaacattctccgaaacacccaaaataaaaccctacatatcctcaaaagcttaaactttgcaaatcccaagagacttttgggcattaaactccagagtaaagaaacttcccaagaaattgaatagagttaaagtcctccatagcaacaagaatacgaagcagacaacaaaaaacaaaattttcacctgtaaatgggtttttgagttcaccggaaccttctctttggcatgaatcttcatagacttggaattgctggtatacctcatagaagtctccattttcctcaaacgattttctcgagaaaatcgcctagaaaatcctcactgagtcaacaaaaccaaaacctcacctagtttttgcacacttcgactactgtatcatcctctgcaccaaggttcaccataatccaaccaataactcaccgccagctgtcctattagtaaaagagccaatctagtcccttaagcccatgtttagggcccaatatatatgggcttcgactagatccgacccggggaaatagccaatattttgttaaggtctctggttctctgagtgagtaagctagttcgaagactggtccgaaaaatctgacaaggatg

SEQ ID NO: 27261 - DNA, 3003 bp, Unknown; identical to SEQ ID NO: 27260
  misc_feature (1)..( 3003): 2750-1469P.txt file - cDNA_ID_2731072; gDNA_ID_2684231; Annot_ID_137612

SEQ ID NO: 27262 - DNA, 3003 bp, Unknown
  misc_feature (1)..( 3003): 2750-1469P.txt file - cDNA_ID_2731082; gDNA_ID_2684212; Annot_ID_191560
ataaagctttcacatcaaacctaacaacaaaacaagaatcacacaataacttagtctcagcttgtggggagacaaaaaaaatcacaattgaagattgagaaagtttcaagaacactaacatgttatcgtggcagagacaaggcaaaccatttaccaagactacaagacataatagtaagtagcagagtgtcctgtttaatggaaaatacgattcttttctgattccaatcttgtaatcagcaaccctgaaatcgtagattccaacaagtacaatcgattttaggctccacagtaccttacaccaatgagaaccaaagcaaactaagatacagattctttaattacgtcgtacgagaaaacatcctagtggacagacaggaccacattattgcttagaccttggccctaatgaaacctgttattcagtagctgtttcaaaattagatccaacatatcatcaagcttatcgacatagcccggtttagcctaatttggttacttgaaacttttttttttttttttttaacttgaaacttttatcttctaaacatttttcatttttttttaataaataaaatgaaggatttgtgcgtttgtgtgaaggaatctgaaaacataaaaccaaaagaatataattggaggagcaattcaatcaatcaatgggttttttaatagttaatttacttaaggggaggtaggttttatttgtctgcttacttcgagtaaggtcgagatccaccagaacgtgacaatgtgacttccactgcttcaggacaaatcaaatatgaacctacgtcacaaaattactattataacaatttatccttatttattctttcttacgactatcttgtcttttgctatcatttacatttgtaaaaaacatcgtgatattattatttactagtatataatatcaaacttttcacgtttaataaaaattattaatttgaaattattcatttttgaatttgattgatatagttgacgaaaaagagttgttagtgtaggaagtttgtccggatatgcaattttttttttgtaacgtgtatcatctcgttaagaactcatatgtattatatgaacaaaatcaatcatgtatattaaaaatggtttgccctaaagatattctatgtttttttcgtgaataggtgttaaggatattaaacaaaaatacccttatttattcttacgactatcttgtgtctatagcactctagcttctacgttggtatcatttatattttaaaaagattttgtgatattattatttactggtataaattttaaaatttctcacgtttaataaaactaaacatattaataatttaaaattattttacttttgatttttattgatatggttgacgaaaaagagtgattagtaatggaagtttgtctggatatgcatttttttttcttcgtaacgtgtatctcgttataagaactcatatgtattatatgagccaaatcaaatcgtgtgtattaaaattggttgccctaagaaaattcaatgtttctttcgtgaaagaaagtctattttttttatagatttgattctcttcttgggatttccacattaaaattattatcttagaggctcagtttgatacatacactatattttttatatattgttcaacgtatagtgactgaatggtagttgtttaaaaggattgtgtaaacgagttggatagccaaaactatgttaacttgatccttgtaaagtaaacaaagccatgcatcctctaattcaacaatttggtcccattaccccaagaaaatgttataaagaggttatctttatcaattacttgtaaacaggacattatctttataaagaaaatgatatacatgctgcatttttttggtttggtagttttacatgctgcattttgtacttgcaaccacttctatactaattgttttagataagatagtaccttcttgtttgatcacatcgtaaaaggatcggatatgttaaccgtctttttccaaacgttatatactcttcaacactcatcataatgtatggagatgtatcaagtatctcttacgaccattggtctttgcggcctaatttgcaacagaaagtcagaaatatccatactataactatgctatttgaaaattattcattttgactcatatataaagtagagttaattaggtgtatagccaaattatggatgaaaattagacaaatgatcatgacattcttttttcttaatttcccaaaagaattgtaatatcagaagggaaaaatacattccacacatagttagaacttagaagaggtccaatcaataggcggtaaaaattaatttgtaacggtaaacaaaaacgataaaggataatagtacaaactaattggcaattaatactgtttttggtcaaatatatatgtcacgacagtagatgaaaataccgtttttggttgaatcgttttattttttactttgtcttgaatcttgtctactcttcaataccgtttttcgttgaatcattcaaaaaaaaacagatctcctagtgatatgaatcaaagtttatcaataaaaatcttagtatacatttgcaaaccataacttcataattttgaataaacgataatgtaagacaggttggctcattagaaagcatatcaaattaattgtaaggacacaaatatctataattaatgcaggcttttatgaatcaatcatcatcattcacatcctcgtataattgtctaatttcgtacctcaaaaaaaaaacaacaacgtgaaaacctaaaattagatgagttacgaaaattaggcaaaaataaataaactaaatcatagtattacaaaacaaaatgaaaacgaaaaaatgaagaaaaagcaagctggtccccaacagacatgcgagttcgtctcctataaaactttgttaatctctccttcacacttatcacgccacctcaccacctctctcctctctcctctctctcccccctggagagattattcattccctccaatg

SEQ ID NO: 27263 - DNA, 3000 bp, Unknown; identical to SEQ ID NO: 14859
  misc_feature (1)..( 3000): 2750-1469P.txt file - cDNA_ID_2731082; gDNA_ID_2684231; Annot_ID_192253

SEQ ID NO: 27264 - DNA, 3003 bp, Unknown; identical to SEQ ID NO: 27262
  misc_feature (1)..( 3003): 2750-1469P.txt file - cDNA_ID_2731082; gDNA_ID_2684212; Annot_ID_137362

SEQ ID NO: 27265 - DNA, 3000 bp, Unknown; identical to SEQ ID NO: 14859
  misc_feature (1)..( 3000): 2750-1469P.txt file - cDNA_ID_2731082; gDNA_ID_2684231; Annot_ID_137603

SEQ ID NO: 27266 - DNA, 3000 bp, Unknown; identical to SEQ ID NO: 14895
  misc_feature (1)..( 3000): 2750-1469P.txt file - cDNA_ID_2731086; gDNA_ID_2684232; Annot_ID_137646

SEQ ID NO: 27267 - DNA, 3003 bp, Unknown
  misc_feature (1)..( 3003): 2750-1469P.txt file - cDNA_ID_2731112; gDNA_ID_2684232; Annot_ID_192299
aatttattcttcccttcttttaatgagaaggcacaaaattaaataaagagtaaaagtctattcaaaattcttggatcttgttacaattttgtttcttctctttattttcttctatatttctatgctataagtgatctgtttatcaaagaaacaaactataggttcataggatgttaagttcgatcgtgccactaatttagtcaccttgagtatatgatttactcacgtattacacacaaccttggcttaggattgtttttaattgctatcacaaatttagtcgattaatttcaaaactgacgttatattattaggatcactttagtaccgacgttaaagtatttcaaaactgacgtcaaaaatgtttttttttttttttttttttgtagtggatagattttatcaaccacaactttcccaacttttatacaagtttacatatcaaaaatactatatttatctacatttattcctaaataaaatcaaaatattttattcttttgccacacacttacaagatatcatggatgcaaacattatttttctgcatttatcgtatatagatgatagttaataacacagtcacaaactgaaactgaaacctctaacattgaaatattaaatatggatttatagatagtattttgacaaccaatgagttttctcttatcaatggtgttcgaatgcatgatcttgaaaatttactatttttaggtgatcatgtgaagggtttcggtttgatgagctattcaaaaaaacgaaaatatattcaaactgattacaataaaatagggaacataaaaatttcatcaacacataaaaatcttatagagagggatacataatgaatatgtttaccactatacgtgtgcatgcatttgaagtatcaataatacgaatatataagtgggtaaaaaatgatagctagctgcaaattttgaattggcttctcaatgtgtcggacgcaacaagcaacaatttaacaagtttcatattcatcatcatacgaattataaaaatacaacataatcattagtttcattcagtctcacgttgtattgcttttagtttacattaaattaattacactaaacctcaaattaaacatttgaatgaatcttttgcgcctgtaacgtaggctaagattgttttaaattgtcaaaaccgtgcaagtagcagttatttgttgtgtttaatctcacgtgagagaagttaacgtcgtttgaccaataaccattaacgaattgaattactgacgtgtcgtagtggaacttgaaaaaaaaaaaaaaatagtgatataatgacgtttttacccttgaagtgaacatagagaaggcacagctttatttgtcgaggaagcatcgaaagagagtccccaccacaaatccaaatggcaatagcgttaattaaggaaggaacaaacctacttctttactatttacactatttatttctccattatttaatttattagtaagtattaattatttatctagctggaccaccagactcttttatgggtcccacctttacccaccacgaacatcttacgtcgacctccgattattattacatcacattttctctatacttctctcttgaaacctaaaaccaatagtagagaacaaaatagtttgaatttctgtgacatgttccaagttttattgcttctgttctgtgtatatacaagttaatacgaatatcaaagttatagtcttcagagatcgcaattgataaatttgttgttatctattgttaatagtggggtaatcatgtatattattatatggaccataatgttataaggcaatattaataccgtcggacctgagagtgtccataccatttaagtttgcttttttaaacgatatcagcagaataacttgaaacttataatttagggtcccgatcatttattggttttaattagtgtcatcgtttacatttccatataaatttttttgcattggttatagatttgtaattgataagaaaccggtatcaaactatcaactaaataaaatttgaactcgttagaaactgctgaaaataacaacttctattatgttgcgatgttttatgtcctagaacaatgtaaaatacagaattaaaaattgaaaaccctacttcgcttgaataaaaatcacaaaaaaaaattataaagaaaagtaaatagtctaacaaatggaaaaaaaaaacaaaacgctagattccaattaaaatccataatatgaaattatgattggttaacttaatattagtggccttaccaaacaaaaaaaaagatgacctgaaatgaaatctaatgcacattcaagagttggcaggattataaatgcatctgtatatgtataataatacaataccctgtcaatgtctattaaattgttccaattaatttctcctcccaaaaataacttatccaaataaacaactataatcaatgaagttagttagcctttattttcatgatgattgtgataataccaaaattcttatcttcataccaaagtacacaaaataattcacactctatagtctatagtataaatttggcaaaatttcaccgaattctcctattttctagcttcggctttgtctttttatatacacgtattaactatagtcaccaataaaaaattaattaagttaaactgattaggaaaaaacactagttaattgtgtaattagtagttttgttcaatgttgttaattaaaaagcgaacgtatcgtcgtttctctttttaactcattctctttggatccaaatctttcgctttggaattcgccattgacaaagtactcaattccaaaacaaagaataagcaaacaacaacaattttcacttccttcaaaaattataaaaatccagtttttatctttgcaagattcaaaagtttgaatttttacttgttttgatttctgggttttgtttgttttttgatttcggtaatgatacaattgagattttgatttcgtgtgatgttgagagattcttaaatg

SEQ ID NO: 27268 - DNA, 3003 bp, Unknown; identical to SEQ ID NO: 27267
  misc_feature (1)..( 3003): 2750-1469P.txt file - cDNA_ID_2731112; gDNA_ID_2684232; Annot_ID_137637

SEQ ID NO: 27269 - DNA, 3003 bp, Unknown
  misc_feature (1)..( 3003): 2750-1469P.txt file - cDNA_ID_2731116; gDNA_ID_2684232; Annot_ID_137636
tctcctcatcgtgctgcatctgcgtctcttgcatttgagcgctttgtgtggatgcaaaacgttgagcctcgttatacaactgttgacccgttaaacaaccaccgttattaggtgtgtgttccggtatcatcataggattgttatgcatttccagattcgtcatcgaaggtggtggcacaaatgtggggacgatacagtaagaggcaagttcgttcttgacgatcgcgagttgttcttccaagtctttaatctgactaaggaggttgtaaatgatacccagacagccattgaccggatcattggcttgaacttgtgcctcccaagcgagcgtgtccatggcaaattctctttggcatgggtgaagactgttgataagtgtagccacatggcttgctccaaataccttgtgaaccgcttcgtagttgtccagtttagtcgaggggaagtaaggcgcaaacacacaatcttctgtgcattttctcctcaggtgcttgcatgccgcgcatggtgtcgatattttgtccatttgatgaaacatcataatctgtgaaagaaagaaagaaaatgtaattgtacatttttgatcatttctagaatatatacaaaatacatttaaatataggatatatcgaaatacatgatgtaattttttccttttaaactgaatcaaacaaacatatttacagaatctttttcttaaacacgaaaatccgaaacatgaaaaaaacaaaaacaaaagggaaaatcgtatgcctaggtctatacacgaactgaaaaaaaaaaatcacaacctacgaatttttatgtgaattctaaacagtaaagagattaaggtttctaaataatatagtaatcagaatagccaatcaaaatcgtggattgcgttgtactgcactcaaatatgttagagaaggtgtgaagatgaaaacacaaacctcaatgcataataagaagatgaatctaatcaagcgaatatcacctgatttctaaaccctatatattaatagagataaagaatggatataaaatgaaatcaaatcggtatttatatgaaaataaaaaaggaagatgaatagagagattcagtttttaacctaaacacaatgcttcttcaaattctattccctacttgtaaaatgcgttttgagaaagaacctaaaattgatcaacacagatttaggtcaaaatttcctaccacgcaattttacttatatagtaccaaaaaatattcaggttagttaatatttttgaaaaacaaaatctagataaaactgaattcatgattatccaaaaacaaaaaatatatatattagcttccaaaaaagtaaccaatcaaaatcaacatataagatttgatatctaaattttaattaatttaatttaattagaaaaacgaaatacattattattttccaaaaaagtaaccaattaaaataaacaaattagatttgatatctaaattatcatattaatttttttattaattattatagtttacctctcatctttatatgattctaattttgcaaaaaataatatcatcgttataaaaaataattagagtttttttcgcatatgccataatttgaatttttaaaaacaaatataaactgttcaatacataaaaaaatattataacagtcaaaaatagatttaagaaaactttatactgagtaacgggtcatcatttgaatatttatattcaatttcatacatattattttgaaagttataatcttatatacaataataattaataacatattagatttttttatgtgtatgatgtgattcaatttttaatacaagcaggaaaattctagaattgacgggtttagatcgatattaatacaagatggtatactacaggtgaaactctaaaattaacaattaaaatacaagtgtataatcttaaacactaaacaatataaataatatcaacaaaacatatacaactcgcagtttactatacatttaaaatcaaataaaataatattatctatttataattcatctttacaataaaattttttagtttaactaaaatataagcctacctgcggtataccgcaagttaatatatagttagctcaatatcattgtaataattaaatattatttgcttcgttccaaatattttataagaaatttagcagagttttacgtatttgctttggcctctcttcagctacagttagagatccagatatggcggatgcagtagcaagatttttttatgttactattttatttctctatacatgtttccatgaaattaaccaactacagtaaaacctctataaattaataatattgggaccaaaaaaatttattaatttagagaagtattaagttatcgataaattaattaaaattgtacaaattttgtaaattcttacaaaaatttgatataaaatgaagtttttttttcttataatcaataatatttatgaaacaaattacaagtacaaatcaattattaagtttaaaaacaatacaattttttttgatgttgtaaaatattagaattgaacatacaaaaaaattaataaaaattgaagaaaaacaatgtcatattttatatatgatatttataatatatattggtaaatttatattattattaatttatattattgatgggaccatatatttatataagatttttaaaaaaaaattagaatcttattaatttatcgagttatatcaatttttatattgatcttaattcgagactggaataattaattaatttatagaaattattaatttaacgggtattaatttatagaagttgtactgtagtatgtaataaagtttgttattgattttaacgtgagagaggaaaaaaaacgtaaacatatttgcttcgttcgaacaaagggcaaggcccataaacaaaatctaagtaaagcccagttagtgttaatgtcatatcaatggaattggtttctcgtcgttggatgaatctaaagcaattgtcagatttcagcatctcccatg

SEQ ID NO: 27270 - DNA, 3000 bp, Unknown
  misc_feature (1)..( 3000): 2750-1469P.txt file - cDNA_ID_2731123; gDNA_ID_2684232; Annot_ID_192296
atcgatctaaacccgtcaattctagaattttcctgcttgtattaaaaattgaatcacatcatacacataaaaaaatctaatatgttattaattattattgtatataagattataactttcaaaataatatgtatgaaattgaatataaatattcaaatgatgacccgttactcagtataaagttttcttaaatctatttttgactgttataatatttttttatgtattgaacagtttatatttgtttttaaaaattcaaattatggcatatgcgaaaaaaactctaattattttttataacgatgatattattttttgcaaaattagaatcatataaagatgagaggtaaactataataattaataaaaaaattaatatgataatttagatatcaaatctaatttgtttattttaattggttacttttttggaaaataataatgtatttcgtttttctaattaaattaaattaattaaaatttagatatcaaatcttatatgttgattttgattggttacttttttggaagctaatatatatattttttgtttttggataatcatgaattcagttttatctagattttgtttttcaaaaatattaactaacctgaatattttttggtactatataagtaaaattgcgtggtaggaaattttgacctaaatctgtgttgatcaattttaggttctttctcaaaacgcattttacaagtagggaatagaatttgaagaagcattgtgtttaggttaaaaactgaatctctctattcatcttccttttttattttcatataaataccgatttgatttcattttatatccattctttatctctattaatatatagggtttagaaatcaggtgatattcgcttgattagattcatcttcttattatgcattgaggtttgtgttttcatcttcacaccttctctaacatatttgagtgcagtacaacgcaatccacgattttgattggctattctgattactatattatttagaaaccttaatctctttactgtttagaattcacataaaaattcgtaggttgtgatttttttttttcagttcgtgtatagacctaggcatacgattttcccttttgtttttgtttttttcatgtttcggattttcgtgtttaagaaaaagattctgtaaatatgtttgtttgattcagtttaaaaggaaaaaattacatcatgtatttcgatatatcctatatttaaatgtattttgtatatattctagaaatgatcaaaaatgtacaattacattttctttctttctttcacagattatgatgtttcatcaaatggacaaaatatcgacaccatgcgcggcatgcaagcacctgaggagaaaatgcacagaagattgtgtgtttgcgccttacttcccctcgactaaactggacaactacgaagcggttcacaaggtatttggagcaagccatgtggctacacttatcaacagtcttcacccatgccaaagagaatttgccatggacacgctcgcttgggaggcacaagttcaagccaatgatccggtcaatggctgtctgggtatcatttacaacctccttagtcagattaaagacttggaagaacaactcgcgatcgtcaagaacgaacttgcctcttactgtatcgtccccacatttgtgccaccaccttcgatgacgaatctggaaatgcataacaatcctatgatgataccggaacacacacctaataacggtggttgtttaacgggtcaacagttgtataacgaggctcaacgttttgcatccacacaaagcgctcaaatgcaagagacgcagatgcagcacgatgaggagagttaccgtgacaaaagttcttatcaaaaatttggaccatgctttaacctacattaatcattatcatattgaatcttgataacaatggtaagcttttaaaatctttttaagtcttgtctagtcgtttgtataactacattaagatataaatacaattattgtttttagttaacaaaacatccgttatcgtccagcggttaggatatctggctttcacccaggagacccgggttcgattcccggtaacggagctttttttggtttttaagattcgaaaaagtactttttgcctcatcactatctttacgttaataaactcagcggcagttcaagccgtaaaccttaacatttctaatcaggatccttagtcaatttgattatttcttttacaaatactccaacattcaacaaggaccttgtgtagaactacactctgccataacaaaataataaaggtgcacttgtagttatgtacaaacgactagacaagagttataaaattagaaaaaggttaatgtaacattgctgtgtacgtgaaaacgtcttatatgatctataagaagcttttttttgttcgtgacaaaaacaatttctgacttggctcaaaatacgaccacaatcacccacataaagttgggatattttggaagtaaacaagtacaagtgaaggtaaaacaatacatatatacatgagacattcacataattaatttaagaaagacataacaatttactcacctcacaattcgtactcattcaattacaaattttaggagcaaccaaattgtgttgataatatagaacagtaaaattaatattgatacctaaaaaaaccaaaaaaaaaaatatttgaaaaaaaaaaaaaaaaaatcaccaaaacgcggcggcctttgtcgtatcaaatcagataactaaaacaaagaaaacggtgtcgttgcaaacatctctctcctcttatctaacttagagagcgaccaataattgcctttgtctttctcattcgtcgttgatccatctttttcccccaaattcatatccttccttagatatttttctccttcttcttcttctagattccagctactccagaagattcttcgacttaatctgatgtgattaggaagagcaatagaggaagagaagaatcagaaaaaatg

SEQ ID NO: 27271 - DNA, 3000 bp, Unknown; identical to SEQ ID NO: 27270
  misc_feature (1)..( 3000): 2750-1469P.txt file - cDNA_ID_2731123; gDNA_ID_2684232; Annot_ID_137634

SEQ ID NO: 27272 - DNA, 3003 bp, Unknown
  misc_feature (1)..( 3003): 2750-1469P.txt file - cDNA_ID_2731127; gDNA_ID_2684232; Annot_ID_137633
aaattctaacgatgaaataatctagtatatcaagtagtataaaatcttattaaaagactctagaagagcatatacattgttttctatgggaatacaaaattaaaatcatcgatgcggtatgagaaagttaatatgatgagatataaatacattatgattctagagtggaattcaatacgagatggatgaacttgaagtttcatcatttcgaggaggagaagtaatgaatctcacatggataataagtgacatatccagaagattatgttcaatctttgactactaaagatctaaaagttgtataaagcaattcttatacgaatgtgttattagataaaataagttataattagttattactgaaacttcaagacttgaagtctctttgtgaatataactcacattgttaagagaatatctatgatgcagagatggtaaaacagacgcttaaacttttacgtaagtattgttgtcctgtagacacaatatttggaatgaaattttgagaactattataaacttaaatcgagtgtttttcaaaggctaagaaaacatatgaattatcgatgataagtaatactcatattctgaagtgaatataagatcttacatagttagtcaaatttaatatcgtttatactagaatataaaattttaattattatcttgttattgttttattaacatatgattgattattaaaatacatggaagtaattttgattataagatctcattaagggagtaactgataagcaatgaaaagtaaattagaagttttgaaagaactagaagtttcaaaagaattaaaagtttcaagagtatatttggcttaaccggattggttatcctggtttaatgatgatgtgaaagtattgagaattatgtggacattaggtgaaaaaccagaagattctccctaataatttatcaaatgttacttgctcagaaagcaatatgataatgtgatttttaccagggtaagtaatttggactttatctattcgtaagtatatacaaggagataattatgggttgatcacccactatatgacatttagatacctaatggttgtaaaagatgcatcgattcaatggacgcattgactcgattgttgcatcgacaagaaggtcatatttatccttgttataaacccgcaacatagagtttgcgagattactttcttgattaaagtacaagagtatttcagtgtttatttataataaccattattggatatccgttgggataagtgtttaacattttgaaattcatgttcatacacaaaatggtttagtaacatcgatacgcatcaagccaatgaataattaatagttttccccattattattggttttgggtcagaaaccaaatagttttcatctaaaagctttgaatgtgaaaagtgctccaccacagcacgcagaaatgaaccctcaaaggaggataagaatacatgttggatatgaatgataactaagccatcctagaaggatttatataccgctcgttttgaagactatcatattatatagtcagctattccaacataagggggagaatgtatacagctggtgaaaaagataaatagaaatgaattatcaatgatcctcggagtaaagaatgtatattaagagtccaaaagataattcaattacagaatttagcgttgtaattgccagacgcatttgctgacccaaataaagtgatgaagtcacttataccagttgtaaattaaatgctccagaatataatgaatgtcctgtaaagaccaatttcaaactgctattgagtcttaatatcgcatgaagcgtaatagaccttggttccaaatataaatatcctcgtaaaagtgaaagagcacaaaattaaaaatgaccaaattgaggaaataaatattttgatgatctcttgaagagagtgaatgatctctaaaagagacataaacatgacaaataaaacattcacgtacttgacaatgaagagatctagctagctatgtcatgtcaaaatataatggaatcaaaagcaaatcgacgtcgtaatatatttgcatgctatgagcagttgatattacggacaaaaaggaggatcatgaaagaaactctattgaaaagtgtacacaaagtaatgattagccaaaaatggaaaagaagaaatagacatataattataacctctagtagagatatttggactagtagtctatgcacatgatgtgtaaaaccagtggaaaataaattagtctttatgtgaaagaatagtgaaattaatgagattttcacaaagataagaaatgtattatgaagagatatattctcttgtggtggatgtaatatttttttttaagtatctaaagtctggcaataagagacggaacactggatatgacatttatatgaaattcttgaaagatataatctcttaaggattaattatatgagaattatgttctctaaaactctactcgatcgaataaaaaaaaaatatgtaacatggcatataatcatataaatgtatatttatgttgagtttgtcaaaatatattgatcaaactaatatttgttttgaaaatcattaaaactcctacagagttatcataagtaatacgatgacaataatgtatgataaaatatcactagataatgatatttataaatttatatgaaaaccatataattttgatcattaagattatggttattaattccaacgagatattgtatttgattgaaaatcatctcatgaagaagatgtttccaagggggagattgaatgatatgcgtggatgtaccctttttccttatcatagtttttatcccacatgatttttctatgacaaggtttttaacgagacattaaagaacacgcaaataatacacttgatgaatattaaaaaattctatcaatcatccaaatgaatattatacactaatgatatttagagaaataaataagatggtcaagatgaatcatctaaaagattcatgagcagaagaatg

SEQ ID NO: 27273 - DNA, 3003 bp, Unknown
  misc_feature (1)..( 3003): 2750-1469P.txt file - cDNA_ID_2731133; gDNA_ID_2684232; Annot_ID_192292
aaccttcttctttgtcttctttgcctagacagaaaaaacaaatggagatacacaatcacggataatgagtaggtactttcggatttgattattctagcaagaataattatgcatctcaatggactttaacaacaccagagaaaactttgcatgtatttaccaaatatttatttagctagtatatcccataattgttgtgaaattgagaatttgaattttcaaagaatatactatatacaaatataagttagtgtagagcttagatgtttactgaacttgtaagaaacacatccaaactctagaaagatatatcgatgtacaactaaaatatgcaaaaaaaaatgaaaaacggatattgtatttggagctgagcatttgagacacttgagttgccaattgcttcttctcaagccatgcttgttatatagttgcattcttaagccatttttagttatatattaagtcataaattgtactttaatgtggtgatcaaaatattgtaacttatgagatataaagggtcataaatttttggatcaaagtactcctaaatagtgtttaataccttattacggttaagcagctaagaaaatgttaagagtatgcattaatggtaatctataatagtaaatataataattttttattatcaaaaacatataaatagtgataactttgtactctaaaacataatatcatgtcaaaattttaaagatttgattttgtaattagttaagggagttgcaattatggtagaaaaaaattcattttaaaattgtagtttaatatgtagtaatttcatagtttaatgactatttttctaaatataagatatatctattaataaattattttagtcaaattataattaatgataagtacacgtatcatcaaagtagagtgtcaaatatcgcattggtaggcaaagttagaaaaaactttctcttattatagaagatttttatctaaccagacttcttgtaaatccttcttatgggtcacaaacgcacaatcaaatgcggaaacataaaatattcacttgctttaacaactactagctgtaaaccaaacttaacaaagaggtaagcgaaacatttcactataattagtaggatcaatatgaaagaaaaactttttctatatttaatctaaatttagctaaaagagtttccatatgatagtcatcataatatttcacgataatgtcaatatagaatatacaatatttctaccaatataaattagaaaaacgagaatggacagaaacgttaggagatttcagtacacgtcagtgattaatccaacgtatgtacaaattcgatcatttagaatatgattatcttccctttttttctttagtttcatatataacttgaaacaaacaaattaattttcattgagaatgcttcactgctcgctcttctcttctttaatttcatagtcacaacaagttgatcaaaatattaatatttaacagaaaaaattaatccacattgagactatttctctactcctttttctttaattccataatcacaacaagttggaaaaaatcaatccaaataagtgtttttgtcaaaagaccaattcaatattgattcattcatatactaacctcgtgcgatcgagagctaaagctaattgcaataaatctctttgtaatttaagtaatccttaaaaaaaaactatacaaaatgcctcttaccgagattatcgcaggggctgctcttggacttgctctccaaatccttcacgaggccatccaaagagcaaaagatagatccttaaccacaagttgtatcttggaccgtctcgattctacaatcttgaggatcactccactgatggctaaggtcgaaaagctcaacaaagaatccgatgaatctctgaggaaagtcttcgaagatcttaaacatcttctcgagaaagccgtggttcttgtcgaagcttatgcggagctcaaacgcagaaacttacttggaaaatataggtttgtgaatcttttggtctcgtatatatatacatgaaataatgattttttttttaatcttagatacatgaatacttctacatattacttgatctcccaacattatatagacaccaattaaacaaaaacctatcatttttttttgtttcatgtatgtatttaattacatactaaagtgtactgttgttttaggtacaagagaagaatcaaagagttagaaggttcattgaaatggatggtagatgttgacgttaaagtcaatcaatgggcagatatcaaagatcttatggccaagatgtctgaaatgaacactaaacttgaaaaaatcatgggtcaaccaatagattgtattatatctgaagataatactaatatggacatagtcgaaagagttgatccatcattggaagcaaaagctggatgctcaaatagcgattctaagccgaagatcgatatccaccttcgatggagcaagcaaagcaaagatcacggaattcgcttcgttttgaattagttttttttttgatgtggtatgtgtcatagaccagcaaaattgagaaagaaaataatcaaatgtaaaaaaaaaaaaaaaattatacttacgaatattgtgttatcaacttatcatacatataacgcctgcttgtataaacaaaaaagaagattggttccaactaatatgtaaattaagatttttggatttttttaatgcaaatgtacaagtcaacatttaatcctactgttaaagtcaatcattgagattgattctcccttcttcgtaatttaaaaatcacaacaacttgcatatagatccaattatctcctttcacctagaaagaaagagagtcgactaattctaagtctttaagtcaacgtctcttgtcttcatatagttcatcaaaaacaaaacgttttgttaaacaaaagattcttcaatggtttcatgtatatagattgctccatacaatcacgttgagagctaaagagctaatctcttgacccaaagaaaaatg

SEQ ID NO: 27274 - DNA, 3003 bp, Unknown; identical to SEQ ID NO: 27273
  misc_feature (1)..( 3003): 2750-1469P.txt file - cDNA_ID_2731133; gDNA_ID_2684232; Annot_ID_137631

SEQ ID NO: 27275 - DNA, 3003 bp, Unknown
  misc_feature (1)..( 3003): 2750-1469P.txt file - cDNA_ID_2731156; gDNA_ID_2684233; Annot_ID_137667
aaattccggtaacctttggtagctcgtacggcttcttcacaaaattgccggcctatgaagatcatttccttcatttaaccctccaagctccagattatccattgctgtactcacaaagctccaaagtcttgttcttttcttctttgtttctttaattactgctcatgactatctctctgatggaaaaagtcgaagcctttttctgtgtttctctaacgggtattgattgctaagtacttcgatttccgcgtagtatggtacatagttgaagtttgagaatttgggttttgttctctgatattttaactttggtgggtagcttttatatgcttattatagcttctttcttcgaaattgaaagcttgagcctttgattctaaagcttggagtgagttcgtttggattgatgcagatgttgtcaatgagggttagtgtttatgtagttggattggagaggatccaattactcttttgattgttgaggacgaagagagaagaaatggatctatggttaatcgcagctactgctgctacaggatatataaccaagcatttgcgaaatgtatccaaaggtaaatcttcttctgaagatttgactaatgtgaagctagagtcaccgagatgcttggctagtaatgtagtaagagttaaaaaaccaaaagaagaaaactttgaggattgcttaaatggggaaactcttgatctatatgaatgtggcaatgcatatggagtggaagtagcttcgaataatgaggaggatttgggatatgatgatgagattcgttcaggttcttttgggaacagagcgtttcttaggagaaatcagtgtcctatcaagcctttttctttggagaaaagcattatgtctcggttacatagagagaaaatatccatggaggaatatatgcgtagtccgtttccatcaccttgtggttcagtttcgaggcccttgcttgttactgatggtacaaatgtaattagcaagaatactggagattctgttagccagcaagtttcggaatgcgggattcctcagcttaggaagttgaaatcttcacttctttacgctaaaaggggagttggagatgcgaagagcgtgagtagaagatctgataatgggactggtaaaattcttgctctctttttaaaatgttacatttgtttatattgacaaaggagaagacttaacatgttatctttcttttcaggatcaaatgatccagtgttagtgctatgcgttgggatttcaattgggataatgtcatcatttgtagctaaccaaaccgaactaaacaaagtcagagcagagtcaaagcagacagagaatttgggaaaagagttagaagatgacatacacgatggtgaaaaacagtgtgatgaaaagacagcagagaattcagaatctataagtaaaattgaagcagaacttgaagctgaacttgaaaggctggagatcaacatgatttcctccaacattgagacaaaactctcagatgtctttgaggtgagctttatactctagcttttgctttttcctttcctttcactgaatcattgtctcattttggtcgatcatgtctgttcattctggaagttatcccgcagcactaatgatcctgttttctccatatatgaaaattgagcaaaacagatatttgatcataagactagccattgtttaatcatctatagaagttcagcttgtaaattgtttctcaattctgcagctggagccagatttcgaagtagaatttgcgcagggtgagctgagagatgatcaggttgaaagacagcgttttgatgaaaccgtgtccaaccaggaacggagtagcaattccacacctgaatcaggaaactacatagtctcacctcgtgagttaagcttgcgtctgcttggagttatcaattcatgctatgaaaaacggataaaagaacttgagaatgccttacaagagagtcagaggaaagtggagcagctggtcatagaatcagaggaaaagaagaaaccattgtcaaggatttgggaaacccatgaagagatgaaatataagaggggctcaaatcctccagtttctgtagctcatatagagaagaaacataatcctgcagagatccaacctctggttatgactttagaaggggaagcacttgacgcattcaatgaatcttacgaggaactgatggatattaacgactattcagaagaagacgatttacaatgtgtgatgcaggagaatgagcggcaagaagaattgtctttgacgagcaaaagctcaccttggagccataaagattacataaaggattcttcaagaacttcagaggatgtgaatttgtccatgctgcaagatctacttggtctgagcgacgaagaagaagaagaagaagatgagatggagaagcatctgataaagcagattgttgagaaaacaaagcaagggtcttctgctgtgttaaatgcccagaaaatgctattcctcatggaagaaatacaaccaaatctataaaaagcatttactcaaattctcatcattttttgatgaaagtattacacgtctctagttagtgtgtgtgtagatatgcaaagattggtgtaacttatcttgtcatatgcaaagaaactgaagagagaagaagatgtgttgtcaaattcaatgtatatatcttaagaccagtgtcaaagcttaagatgtgataatctttaagaccatctccaaaactccgatggagatgctctaagtttttctggcagaaagaagagtcttttgaaacctgctggttgggtcagagagtttgagagaaggcgccaaataaaccaaaagctagacaagaagaagcggtgaagttttgaaaacgagaataaaattcggcgggaataattaacgaaaaatctaatagctcccgcgcaaatctttcttttacaaaacaaaaccattttgcttcccatttcctgtgaattctaaagagaaagaagagatagagctagagattaagatagagatg

SEQ ID NO: 27276 - DNA, 3000 bp, Unknown; identical to SEQ ID NO: 772
  misc_feature (1)..( 3000): 2750-1469P.txt file - cDNA_ID_2731167; gDNA_ID_1620319; Annot_ID_153277

SEQ ID NO: 27277 - DNA, 3000 bp, Unknown; identical to SEQ ID NO: 14904
  misc_feature (1)..( 3000): 2750-1469P.txt file - cDNA_ID_2731167; gDNA_ID_2684233; Annot_ID_192336

SEQ ID NO: 27278 - DNA, 3000 bp, Unknown; identical to SEQ ID NO: 14904
  misc_feature (1)..( 3000): 2750-1469P.txt file - cDNA_ID_2731167; gDNA_ID_2684233; Annot_ID_137663

SEQ ID NO: 27279 - DNA, 3000 bp, Unknown; identical to SEQ ID NO: 14905
  misc_feature (1)..( 3000): 2750-1469P.txt file - cDNA_ID_2731171; gDNA_ID_2684233; Annot_ID_192335

SEQ ID NO: 27280 - DNA, 3000 bp, Unknown; identical to SEQ ID NO: 14905
  misc_feature (1)..( 3000): 2750-1469P.txt file - cDNA_ID_2731171; gDNA_ID_2684233; Annot_ID_137662

SEQ ID NO: 27281 - DNA, 3000 bp, Unknown; identical to SEQ ID NO: 771
  misc_feature (1)..( 3000): 2750-1469P.txt file - cDNA_ID_2731175; gDNA_ID_2684233; Annot_ID_137660

SEQ ID NO: 27282 - DNA, 3003 bp, Unknown; identical to SEQ ID NO: 22943
  misc_feature (1)..( 3003): 2750-1469P.txt file - cDNA_ID_2731179; gDNA_ID_2684233; Annot_ID_137659

SEQ ID NO: 27283 - DNA, 3000 bp, Unknown; identical to SEQ ID NO: 774
  misc_feature (1)..( 3000): 2750-1469P.txt file - cDNA_ID_2731187; gDNA_ID_2684233; Annot_ID_137654

SEQ ID NO: 27284 - DNA, 3000 bp, Unknown; identical to SEQ ID NO: 14896
  misc_feature (1)..( 3000): 2750-1469P.txt file - cDNA_ID_2731191; gDNA_ID_2684233; Annot_ID_137649

SEQ ID NO: 27285 - DNA, 3003 bp, Unknown
  misc_feature (1)..( 3003): 2750-1469P.txt file - cDNA_ID_2731195; gDNA_ID_2684233; Annot_ID_137648
taatacagagccatatgattttgcaatttattctaagtgaccatattaattagtcaaaacatgtttaagatctagtatttcttttgatacaacataaaaggaaaataattgaattatttcatttcatttattaaaattaaactgaagattgaaaatttatgatggtaacaaacaaaattcaaacttaaaaaactcaatagtagtccatataataatactgtgtatattaatatattaagcttttaggttttgacggatcgggagatatggaaacaaaaagtctttttgtatttttctaaagaatgatgccttccgcgatggaccgactttggattcttttgattatatattgcaaaaagataagatctacatgctgacttccaaaaagaacagagatgctctaaataatttctaataattcgtgccatttctatattattcaagtaaataatactttgtaaaatttaatacttttcgtggttgtaaagcttattatacctaaattatattttttttaaaaaatttgtatcaaatgtgctgcaatttagcaacatagaaaaattgtgatacatcaaaagaaccttgttatcaaatgtggttactggttatgcccatttgaaaccaacactatcgcccatttcaatctgaaataacataatctgaaataacattttctgaaagcccaattccgagaaaggccgagcttataacacctgaggcccaaagtttcaatttctgtttgctgattctagaaaatttacaaaaatgtatacattgtgatcatcctacatataaagtagcttaccaacaattcacaaaagactaagctatattgcgtgtaaagcagaaataagtaaaaagaatattacagttttctgaaaaaaacatataggatataacattgaaagctaactattgcctacaaaatacttgttgtacaaagtatcaaataatatatgtaaatgtactttgaaaccggcaaatgatatatatatatatattttttaaatgatatttacatctcttaattttgattgaaaatatatagatagggatatagtaaagagaaataaagggataatatgacatctgtattattattttctttttgatataaaggacagatctgtttcaattgattgcttctgatttaagcatgacacgaggcaatactgactgaaatgtcatcgagtgacagatgcaccgattcgaaccaccttccttccacagttgttaccattcgcaattgttctttctgacaccacaatcttaatttattagttactacctcttttgctcctattatttgtttctttaattgtgtttattttattaatctggatttgcctttttagcataagcaaatacaaaaaaaagttattcctttaagatctaatcctgtttagtaatgttctctagatattattggttatgcaacttgtgcttggaaaatttttaaagtataatagttgaaagtgactttcttttgtagattttgaacttatttgaatagtcatgagatgagaacaaaacaacatacttccaaactgactatgttttgtagatttttaatatagtatcattgtcatattggttttgaaaattgactaacgttggaaatatttctacaaaataatttgtcttttctggtcttaaaagtgagttgattgtgtttaaccaagtaattcatttacaagtaagtgatcattgtgtaactaatgtaacttgagagaaatatactcaaacaaacttcagtagtaagaaagaaaaaaaagagtaaagctaaaagccaaaagtgaatgaattaattattaatatttgtcacaccaatttcgaccgatcttacttgttttcaaagagatgcttcaactgttttgtttgtttctgttaaaccaaaatcaattaacgagaataaaaaggaattaacgaataaaaagtggtagaaagctcatgtttcaagagaaggttttgattcatcaaccaagttgcaccaactccatatatattaccaaaaccaaaataaatttacatatttggaaagacataaattggacagaacatatcaagcatgtaatatacagaagccgacaaattgcaaaatttacctaaaccccatcttacaccaccgtcagattctgatgtaagtattatcaaagctcaagaacaatcacatcatcagaatctaacttatatatcaaaggtccagaattttctccattgaagctggattctaaggtcagttcttacttctttatctcaatctgatgattccatatcgaaagtcttactttttcacttcaatttcaatctgatgattctaagatctttgattcgaggtcgatctctgatagttactacatgtttctgggtttatttatttttaatccatatagtaattaaaaactcttatgaggtttaattatggttacttgagaatttgcaatcgtcatctttctttgactcctatccattttttggtttttcctttgtttaatttctgtttcataattgtaattgtaaattaaccaaaacaaattgatcagaaacctttttcctatggaatatttatcacacgcaagcctgtgagttgtgactctgtaatcacttccttgttctggtaatttcagtggttaaggctctccttttttctgatgttgtcagcaaaagttagtttttcttcttctttaatgggttaattacacctaaatctctggttattaaacaatccagaaagaaaaaaagtttattccttcctctatgtatatagtttcacatgcaagcatcacttgtttgttctgacaaattgcagagttttgagttctgtttttttttttttctaatgttttgtctttaagaaagttctgtttttttttctgcaggaaagttatcaaaagttttgagagctttggatagtgaagctcaaagaactaaacaatgggcttcagagtttgtgttattgtcgtcttcttgggttgtcttcttctagtccctgagaaaacaatg

SEQ ID NO: 27286 - DNA, 2479 bp, Unknown; identical to SEQ ID NO: 14945
  misc_feature (1)..( 2479): 2750-1469P.txt file - cDNA_ID_2731203; gDNA_ID_2684234; Annot_ID_137694

SEQ ID NO: 27287 - DNA, 3003 bp, Unknown
  misc_feature (1)..( 3003): 2750-1469P.txt file - cDNA_ID_2731223; gDNA_ID_2684234; Annot_ID_137686
tgccacaaaagttgctcaatctcagcaggattaacaaaaaaataccaaagaataacaactgggcagagttttccaaacttaccctttcattttctctctgtaagaatttttctcttctttctacttcacgacgctgctcacgctgtaacctttcctcttcttttattctttcacgcatcaacctctcttcttccttacgcctctcacgctcgttcctttccatctcttttctcatgcgttcttcattctgaggacacaagcatcaactcatcaatatatctgttacagtgatactaacaaaagacaataagacacctttccaaataatcagtaaggaggataataaatgtagagcaaatacctttttcctctgaatttctagcttctcaagatcttttggtccatgattctctcgggtttcactccctcttccaagtctaccatcgttaatctgtgagagtaaacatagaaaaatgacattacaacaaagacacatcttgtcaacaaaaacggatgaaataaaagttggtacaatgaagctacctttccctttctatgcacatcactactcttacgcactccatcaggtaacaaatatggatcttctgtaccaaggactgatgagtccttctccagcaggaatctatcaccatgatgcgctgattcaatggggcttggcatgtcttgttgagatgtcgaacagttacgagacgcatgtccaggggtaacataggaccttggtacaggtccattcgcgtgcataaatgatgaaattctagaacgtgcaacttcatagtccataccacgtgcatgattttcagagtatcgttcatacatattaggtgtaaaagaagacggatcatccagagattgttgctcatggaaagaacgggcagcagcatgagactataatcaacaaaagcaaatatgttaagcaaagtagtaaaaagaaaatattataaaactgtgaatacatgaatggacaagaaagagaatagaaacagcagagcggaattcatctttctaacaatgatcagagactaaaaactgccataagactaatgtcagccttcatgtaatgagaactctaaaaattactcctaccatataattcatagaccatcagtttatggtaacctcttcaactagtcaatttgagatatctaggtgcattataaagaaactaaatagagcatatctgtttagtcagaaaactaactcttcgaggtcggggatcatgtcgctcatacagatcgctctcatagggatgaagtaggtgtttctgcatcgctgaaatgccaatgaaaacaaagttagagagttacttatcacaagaagtgtaatactaacactgacattggttacacaagtcataaaacagggcaaacatagaaagtaatgtatacctataggtgttccaaacgcaccaggaggcaaaggatcaaactccatgccaagaataggtccatcatctctcaatggctcacctaactgagcctcaatacagacaatagctctatgcaccattgtcgacaaccgcgactcataactcggctttcccattgtctcatattcatccaattcagctcgagaactactactaccactagcaaaattcctcctagagttggaataaggactgcaaccagactcagaacccgaatcagatctggaatcttgctcaggtaccgatccagcagcagccggtaactcgttaaccgaagccgattgaaccgcagcaaccgatgatttcaccggtttattagactgaccatccttcttgtcctttaaccgtctatgacaaaaccacatctgtaattgtcgatctgacaaatccaatttctcagataactcagccctcgtcgcctccgacggatacttctcctctgaatcaaaaattcaacatcaatacttaaaaaaacaaagagaacgaagattgaatcaaattaattgagatgaataagaacctgaataaactttctccaaggtttcaagctgaaacggagttttcatctgacgtttaggcttgacacgaccatccttagaggaggaattattatcaatcttcttcttcttattattaagattagcatcaccaacgacgctcctgatcttctgatcttcaccgtcagaacccatctccatggaaagagaagaagaagaagaaacccagaaacggccgcaagaagaatcaaagaacacaaaaacaaaaactagggctttctattgaacaaacaaaccctgatccaaaaacgtaaaaaaataaaaataaaaagaagtagaatatataagagtaagaataagaagaagaggaagaacaaacaataataatagtaaaatcgataaaaaccaaaaaggaagaaaaacaacaacagggcttctagtagtagtagtagtagtaccactcatctcaatttcaacctccttcatattcctttctttttttttgcctttcttcttaattaaaatcttgtttttttttgttgtaaatgaaaagaaaaaaaaaatcgaaacttgaggattctacagcgaatcgcgtgcttatgtgtgtttctgccgttgatgtgtttatcaaagctttttttctttttattatataaatcaagttaatttaaaactaaattaatacaacaactcttgaagggctttaacgtgcttttggtctcgtgttcgtgttgttgtctttcagatccgcaggctggttgcatgattatcatatcccccagattttttttttgaggaaccacttgtgttgagagtaaacatcttgccctttattgttttcaagtgtacagtccttgtcgtttttaaaaccggttcaatacttcaattcagattttttaatcccggtttactcgccgtccctatgaatcacagaggaatcgaaagaacctttacgaggaagctttgactcgaaatctctctgaagaagaagaggagagacgaaactgttggcttagtttccgacgccgggaacgtcggaactccggtgaacagagaatg

SEQ ID NO: 27288 - DNA, 3000 bp, Unknown; identical to SEQ ID NO: 14929
  misc_feature (1)..( 3000): 2750-1469P.txt file - cDNA_ID_2731227; gDNA_ID_2684234; Annot_ID_137685

SEQ ID NO: 27289 - DNA, 3003 bp, Unknown
  misc_feature (1)..( 3003): 2750-1469P.txt file - cDNA_ID_2731231; gDNA_ID_2684234; Annot_ID_192372
acctacaaggtcgttgagcgcaaggtctaaatcaacgagtttactgagttgacccagcgagtcagggatctgtccgactaaatgacactcagtgagccacataacctcgagattcgtcaagttcccgaactccggcgggatccgactcggactaaaggggttatacgaaagattcagcatcttcaacgtgctgatgttgccgagaaacggaggaatcgtaccgtctaagagattgtaaacaagagaaagaacctctaggttttcgaatttgccgaaactcgccggaatgtcaccggaaaagttgttaccggtcaaatctaagtgaaccaaagtcggaatatcggcaagagtttgtggaagctcaccggtgagtagattctgagagagatcgagagtttgaagactcttacaagcagcgatgttgagaggaagagtagagttgatggagttattgtacaaagagagatgagccagattagagagacgacaaatgactgaaggaaaaggtccggcgagattagcgctggagaggtctacggaagtgacggaggagaaatcaccggcgcaggaaacgccggaccaccgacaaggagaagcatcgttggagttccaggaagagagatatgagtctgggtcgtctaacgagagcttgacttgttgaagaatgaaaccgtcttggttaagagagaagacggtggggaaaagtaagaagagaaagagaagatacatgtttcttcgtcttccccggtatctatgacggtggttgaagaaagagagagagataagagagtatgaagaagagagtgtttgtgagagagtgctttgaaggaagagaagaagagagtctataaaaagcgttgaccggagacaggtgaattatcgtgactctgactgtgaatgctataaaaatcatttgtttttctactatcatttattttgtttttgttttctataacgattctctctaattatttgtttgcaattattagtatctatgtcgagtttccaacattgtataattatcctgtgtttatctgattataaaagagaatgttactaataatgatgatctagctaaatagccatatggaaggaaacattctttttttgtactttgttgtttaagagaatgcaactgtttttaaattagttatgtaggagacgataagattgtaaattttcaattaaataattttagctttataatatatatggaatttgcatacaaatttgatttcattatatatgtttttaatgtaaatgaaaagttagttagtagagtaaatgtgcattttaaaaaaattgcaaggtgaaaagaaggtacggtaaacattaattttgaaatgtagatatctgatttttttttttttttttttttggagatggaatgagatatattccgacagttttatttattatcggcgtttgtaaagtagtaaagtacaaatattgttagaacatatcaaaaaaaaaaaaaacagaatgtgttggaagtttacttggaacgtagtctaaagtcgatgtgaattaaattaattatcattcaattttaaaaagtttatgcacgtcttaaagagtattaggaatattgtatcaactattaagagaataaactagcatgcatgtagaaacatgaaaatattttattttgttgaaatgtgaaattcatttttgaagataataatatgtagttatttacaaaaaatgcaaagaaaatatggaagataggataagatatcaaaatattgagatatttatgaaattaaacattctctaatgaaatttgttatactaattagtattgcaaagggaaagagggggacaaacttgtatggttaaacgttaggaaacatattgcctaatggtgtagtcaatatgagaatgcacttctcaagcgagagtcatgagtattgcttatcttagagatgtcatagtcttaaaaaagtattcgagtcgaataagagttctttatggtttttaaattttaggttgatatgcaacaaaattggaagacgtaaaataatgtattgtgaaaaacaaactgtgtgtacactttgttcttattctcacaacttggttttcataagttgttacggctaaacgaaatcgtaaattattttgtaggatgtgaaaaagagttgcactaactgtacttgtgttcaagaattttgtttttgaggacgtgaatacattgttgaatccagttaaaaaaaattgttatctatttttgtttttattttcttacgatttggatttcatgcccgttacattatgagaattgttacgtttactatcataatctcaatcttagtttatcagttggaatttgattttattttagttaatcttaatttaacaaaataataaactcataaaagaacaacacaaattttgcctacatatatgttagttagaaaacgtatgttctaacatatgtatcggttgagaaaagcatcactttaatcaacataccatttgaatgatatttaaagagatagatgagtgaaattttggagatagattgattccaagcagtcttctcttcttcgtgtttctaatagtttctgtgaaacacacaatacaagttgtcaaaaaaaaattagggtacactaaacggagttcgacacttgtatcctataagatagacatttaagaaattacgtacactacaatagctacaaatctctgtcttatgagattgttataagcaaagtctctttcatcctacaaattgttgctagctagttgattgaaagaaaccgtcaaattagttttgtttatatttttaatttcattacttagttaatcaagtttccattacgtgtgattgatgtcctcttatagtttcataacattgtcactttggaattatttaatagaactattaatttgttacgagtattgtgtacaagcaagcaacctttgatctatattttgagagttcaagttcttatataaatggtttgaaggcattacgctcctcaatgcttattagcaacaatg

SEQ ID NO: 27290 - DNA, 3003 bp, Unknown; identical to SEQ ID NO: 27289
  misc_feature (1)..( 3003): 2750-1469P.txt file - cDNA_ID_2731231; gDNA_ID_2684234; Annot_ID_137684

SEQ ID NO: 27291 - DNA, 3000 bp, Unknown
  misc_feature (1)..( 3000): 2750-1469P.txt file - cDNA_ID_2731241; gDNA_ID_2684234; Annot_ID_137680
tttgattttaggtgtccgaccaggtcgcacttatttgagtgatggatatagtttgattagaataaaatctagtaactattttgttaagtcagggtattgggttgcgcaagaactttctcgccctacttgtgactacccttttcagggaccaggaatcactccctttttggcacaagtatggaagttaaaaaccacaagaaagcttaagcattttgtggtaatgtttatcagggtacttggcaacaaaccatacactattctaccgacacatcggtaaggaaaagcattgtcctagatgtggtgctcaggaggagacagttaatcacctcttttttgaatgcccaccagtgcttcaaacttgggctctttcaccaattccatcactgccttcctccttttctgattagtccttattctccaatttggattttctttctcgaaagtgaaaggaatgatgaatggtaaagaaattggacaccttttcccatggatactatggtatgtatagaaggctcaaaatagctttatacagtagaaactctataaattagtaatgttgggatcatgaaattttattaatttataatgatattaatttatcctataaattaatatttattaacttatacgataagttaataaatattaatttatagaaatatttacataaaatacaatattatattctttttaaaatgtttcttaatttaagtttttatatgttttgttgtttgcatatataattatgttagttttagttttttttttacttctttaatttatttttcagcaagatattgtgtctatatatctacgccattaacgtcaatgtaaacgtaaacatgaagcttaatccaatttctctttactcaaatcttagcaatgctttctcaaaaagattttacaaaatcaactatgacggatcaaatacgcaaatagttaattatatgagtataacaaagatcataccagttgtattttaaaaagagttgtaattgtagcttgaataaaaatttcatataaaaattagtcttaaaatatatacttaagatctatgattattaatttataatattattggattttgaaattttgaattttttttcattttttatttatttattttacattaggtttcttccctcttgtaacaatatttgtgctgattgtctagctaaaaaggtaagagcatgagggtctcttttctcccatgtaaacacatctgcttaggattgtctttctttagaagaaaaattccgtccgataacttagtaaaatggtgttcgactaaaaagaaaaaaaaaacatttaaaacaagaaagtcaaataattatttgatataaaattttaatgacatatttataattaaaatataatttaacagaaatatagttatatactagataaaaaaacatatttctttgaaaattaaaacagatgaaatatatgaaattaatcatttctaaaaagctttctaagtaagctgtttcgttcctttacatctgtctttttcatttactttttgggttgagattattagtttcttgttcatgaagcttcgcatctccatcgaggatcatgtgtacggacccgagtgcttacccaaataaaccgaattaccatagcatttacaaaaaaaacatttggagagttggttgtaccattctaattatatatagttcgtcttttaatattgtggttagctaagaaaattcaatattaggtctactttaagacacagattgagaaaaaatatatataagttaataacttttggtgaagaatctgttgtcaacgagccaaaatatgagaatttttgggtataggttacttgcttaacacgagagtttgttctgtgcgtgaagatatggtcttattgcttcaccaagttggtccaacatatatatatgatctaacatttatctatgagatctctttatctattgtatatttcgtaaatgaatcctactatacatacatgaaatattgatagtcgggcataacttaacgttttccattgcataattcatcacacgatctttttcttggattttttttatatatataaaatataatctgttaaaggatcaatcaagatcatgttatggcatatgatatattgaatagaaaataaataaaactggcaaaactttaaatagtttggaaaagaaaatgagtttgaataacgacactccatctctcgtcacctttcttgattttgaagagattagttttctctattttttttcgttttttcttttataaactccatatcctgatttagtttaatgatctcttgaaggggttttcctaagtgtggttggataccattagttaaacattttcacacaactctagctataacacattcaatatttcaactgtgaatactagaaaaaggttaaaatggttcaaattaaaatagtcataatcaaaatgttgaaaaatgcatttaaaagttatttgttgcaaacgtatgtacatacaccattcataaacttgacgtccacgcaacctcccaaaaatattattttattacaccattttaatttaatatactataattaaattttagttccaaaacttaacattcacttgcccctctttctatatcacctcctcatctttagctccctctctctcgttttatcttttgatagttctgattgtaattagattttggtaggtcacttgtatagagagatcagtaaaataagaaggatgagttggtgtgatggttcagatgataactacgatcttaatcttgaaagagtatcgaacactgatcatccatcggttcaactcaaagaccaatctcaatcatgtgtaacgagccgtccagattccaagattagcgctgaaactcccatcacgacttgtccttcttgcggacacaagctccatcatcaccaagacgaccaggttacatatgttaaccattaattcacctaaatgttctttagttatcaatatgattactttagattttgacataaaatg

SEQ ID NO: 27292 - DNA, 3000 bp, Unknown; identical to SEQ ID NO: 14932
  misc_feature (1)..( 3000): 2750-1469P.txt file - cDNA_ID_2731244; gDNA_ID_2684234; Annot_ID_137678

SEQ ID NO: 27293 - DNA, 3003 bp, Unknown
  misc_feature (1)..( 3003): 2750-1469P.txt file - cDNA_ID_2731250; gDNA_ID_2684234; Annot_ID_137674
cactgattaaaaaccgtggaacagggagattgcaagcacacgattgtgattcgagacatgaggatgagtcatccagaggacgttcagaacagagcagcttacccgatcatgttctggccgaaacgtaggattcagaaatgcggtgtttgtaagataaagagagcttcaaaggttgcagtggatgacaagtgggcaagcgagaacagtagctatttctgtgatgtttgttttgagcttctacactcagaggaaggcccacttaactgtgacttcccagtgtttgattatgtgcatgagtaaagatgatcttctttgttgcataatatatagataggaagaatacgaagaaatagttggcattgcaagaagaagacatgatgagtcttgtcttggtaaatttgttgcataattggatatatataaaagattttcttgaaatgatgacatgacaactatttctgaatttagccattgtcaaaagctctcttcgttttgaagcggtagaaaattagaaatgtttatgtttagccaaattcaaaagtagaggagattccttgaatttctgttttctctcgctgtcttctcaatattcaaaactcaaattggtgtcttctccaatttagaaaacgttaaaaacaagagaaaataaaactaaactttttagaaccaaaaaaaataaaaataaaacgcatttgggatttctcattgtcatcccaagttcttggaacagccaaatactttttcattattagtttataatcgtctcataaaggcaaaaaggtttatttcggaaataagatgggagcatatagagcagaagacgattatgattacctcttcaaggtggtcttaaccggagattccggcgtcgggaaatctaatttgttatctcgtttcaccagaaatgatttcagccacgactcacgtgcaaccatcggtgtcgaattcgccacacgaagcatccaatgcgatgataagatcgtcaaggctcaaatatgggataccgccggccaagaaaggtacttacactctaaaattactctcaaaagttatttaacgtttgcatgatgaccaaataaaattttaaaaaattaggtaccgagccatcacgagcgcttattaccgaggagctgttggtgcattgcttgtttatgacgtgacgcgccacgtgacattcgagaatgttgagagatggctaaaggagcttagggaccacacggacgcaaacattgtgatcatgctcgttggcaacaaagctgatcttcgtcaccttcgagccatctcaaccgaagaagctaaagcttttgcagagagggagaatacctttttcatggagacttctgcacttgaagctgtgaatgttgataatgctttcactgaagttctcactcagatttacagagttgttagcaagaaggctcttgaagctggagatgatccaaccactgctttgcctaaaggacagatgattaatgttggaggccgagatgatatctcagccgttaaaaaacctggttgctgctctgcatagacacacttctcacttttttcttgtacttttattactaaacactaacatttttcaatattttcctgcaaatttgtatacattcttggaattatcagacaaacaaagttcacactcaaaagtttttttagtttcggttccactctttacaatcgcttgcttcgtgctctctctgcttctaccgatcgatgtacttctgaatgttcatgaagatgttccattgttgacgcgctcctttttccccatctgcaaatagaggttaaaacagcctaatcagtttatatcatatgagcgtgaaatcttaaaaattgtacttcaaaatgtttctttcaactgtgagttttgtctagtaatgaaaaagctaaagccaacatggaagcagaagaagaagaattgcagattttgagtgcaacacaaacttaggaattatccaaacatacttggtacttgagaaatggaccttccatattctgatatttcatgctaatgtactgaaaccaattgcgaaaacagaggactatggaactcatttataatatcactttgtatggattctatatatgtgagtagcaaaatgaacctaaccatgaaccgtcttcgcttttttttctgcataaagttggataatattcagctcaaagaaaactagattctgatcttaatcatctataagtaaacaaaacagagtccatacagatttcgatatcttaggatcaagcaaagagtagttcaataagaaccaaggatctacataaagttataacaatcctaaaatgtcaatggcatactagagcaaattcaacaattttcttaatatcagttacactagaacaaagacgaacttcgttccaattccctaatcctaaactctcataatcaagaacaaatatcaaaccataacaattgagttactcagtttgaaaaaaacgaatctcaccagagaaaaaacgcagatacggaatcatttttcttcatcgcgaggcttagaactcgattgaagagaaggaagaggattagagcccttgatgatccaaccgagtccgaagaaaaaacctccagctagaatcgcagttccccaagcgtgtgagtaccatttactgtattgccgaatcgcgaatttccattgctcccttaacgtcgcctgatccggattcaccgactcaggcgggttataataccttttacccgaacccgatccgatctccggcgtcggttttttcgccgacgaagaagtattgttgttgttatcagggatttggctcttctccgccattgtcgtcgtctagattcttttcttcagatgttgaaaatcattttcagaaaatgtgtatttaactctaaagccactgacacgtgcaagataatgccacgtggcagtttctcgtactaaaacgattccgtttcattgtttcgtctacctctaaccccaccttagggttttagtactctctgtgatttttatctgttcgtcaatg

SEQ ID NO: 27294 - DNA, 1118 bp, Unknown; identical to SEQ ID NO: 14924
  misc_feature (1)..( 1118): 2750-1469P.txt file - cDNA_ID_2731254; gDNA_ID_2684234; Annot_ID_137672

SEQ ID NO: 27295 - DNA, 3003 bp, Unknown; identical to SEQ ID NO: 21808
  misc_feature (1)..( 3003): 2750-1469P.txt file - cDNA_ID_2731258; gDNA_ID_2684236; Annot_ID_137721

SEQ ID NO: 27296 - DNA, 3000 bp, Unknown; identical to SEQ ID NO: 14955
  misc_feature (1)..( 3000): 2750-1469P.txt file - cDNA_ID_2731276; gDNA_ID_2684236; Annot_ID_137712

SEQ ID NO: 27297 - DNA, 3003 bp, Unknown; identical to SEQ ID NO: 15725
  misc_feature (1)..( 3003): 2750-1469P.txt file - cDNA_ID_2731279; gDNA_ID_2684236; Annot_ID_137711

SEQ ID NO: 27298 - DNA, 3000 bp, Unknown; identical to SEQ ID NO: 14952
  misc_feature (1)..( 3000): 2750-1469P.txt file - cDNA_ID_2731283; gDNA_ID_2684236; Annot_ID_192417

SEQ ID NO: 27299 - DNA, 3000 bp, Unknown; identical to SEQ ID NO: 14952
  misc_feature (1)..( 3000): 2750-1469P.txt file - cDNA_ID_2731283; gDNA_ID_2684236; Annot_ID_137708

SEQ ID NO: 27300 - DNA, 3003 bp, Unknown
  misc_feature (1)..( 3003): 2750-1469P.txt file - cDNA_ID_2731287; gDNA_ID_2684236; Annot_ID_137707
actgcccatggtgtccttaaagatggttggagctccctcagacgctattacctgaataactttgctgatggaactaagcaggtcagtgaattttcattctcagtaactctagttgtatcatctaataatgttcagttgcaactgtgtgcgactacttttggtgtcacttacccctgtaactggaatgtgtcctgacgcaagttaatatggctatgtgcaataggatgcaattgatctcttgcaagggcactacatagttgctgtgagccgagacatggctcctgtacctcaaaagggaggccttgaggctgtagccgtaagcatttatcaattaagattagaactaatttccactatattagcatacaaagaattctagtcttataacaatgtaaatttcatgtctcagaacttcccagtggcattgttcgtggttctgatgagtttctggtttgcaacaatgtctctaaaacaaagtaagtatggtatttcttttgctggatagttaagattttctttcaaacttaatctgaaactgtgtaaaatttgctgagcagctgggagtgattataagcataagcacttgttcttctcattgttgtggacgggaatttgcgtgggcatggctgcactggtgagggccaatggcaggatcttctgtaaccgacctcgtctgcacaagcccagaggctgattcatttcgtgagatcaattaattaaagacatggaactcaagtcggagacaaaagttttctcccttcgattgttttattttattgtatcaaaattggaccttgtgacaccatctagaggcaattgtctcaggtttggatccctcatgatttaatactcccacagccatcaaatgactcgatacagttacacatctttcttcatgttcattctatgattactcggtccgacaaatggctttctaaatccctacttcttgttgagtgattccattgtagaattcatcatgaggcatgatagaccaatggcagacaaaggaagtgcatgttctaggttgtttagccataacctatgcgcatctttgttattcaggctcagtccctagatggtcaatcgttatattagtgttaggatccattattttgtggcagatgcacatctaccctctgttaaatcttttctacggttgtttctgagagattgtgctccattgttgcttgatcattttttggatatttggtaaggattcaaacaaaccaaaaagaggcctcacaagttcaagaagcagttcaatgaggcatttttaaattatgaaaccaaatattaatcatttaaatatggttaagatctacagtacaaaaaatggaatcaatcaaaacttggaaaaaccagagaaaaaagcacacaaccttgaatatctctctgactttcctatcaaaagaggaaacaaaaaaagaataaagtaactcttcttacctttttccaacttgctctcagttccttcacaactcgttcaaaacacctttgaggagatccaatccctctgcagagatgctcctcctcttatgcgacttgggaatctcaatccgaggaggcgcttcgggcgagaaacagacaaccactacagtaagattgtcacagctgtttcgttgaagagcctccttaaccaaagcttgagagcatctctcaggatcattatgctgcatcagctccctcctcaccatcgtcactgcacactggctactcatcacatcccagagtccatcacagcccattataagatactcatcctcttccgtcagcacaatctcttccagctcaggctcgcagctgagcgggcagagtgaacctttagttcccttaatgtgccaatctcctaaggctcgagccacagatagctgcccgttaaggtaaccatcgtagatcacacctccaagcttctcaatacgtagccgctcggaagtacagttaggtttgtggtcctttgataactcaatggctctgcctcgtttcccaagcaccgctctggagtcaccagcgtttgcaatcaacatagtcttgtccaaaatgagagcagtgagtgcagtagtgccagaggatctatcaagagaagaagcatcagccaaagcatgatcagtcttcacaaaagcactccttgttgccttctttgtgctggttgggaaatgtttgtcttccattacaagcttcataatgttcttttttgtgaatgatgcagcatcaacacctccgtgtccatcaaacaccttcataaacaaacaatcattttaaaaaagagaacttttttgaaatattcgatgaagcaaatcttatataccccatagaaagctccagtggatgatccaatatactcagtgagatcatcaacacaaatgaattcatcttccattgattgttttggtcctttatcagaccaacttccagatctaaacacaggctggaatgttgaatttactccttccggagattttgcaccaaatctctcatctccttcctgcaaacaaatcattttcacattgtaagtttcaaactttggattgtttttgagtcacgagatccgatctaagctacattatcttatctgttcgtgaccgtgcaattacaatcacaagcatttgaatttaaaaaaaaaaaaaagcaaagaagagatgaaccaacgtaatcggtcaaccaggcagtgctgttgcaatggcgcattgcagagatgtttcttggaggtttcccagaggaactgagattcgtcattttgtcatctgcgacttccaatgtgttgatcatcggagaaacttcagtcaccggtgccatttccagattccgatcaaaagctttctttttttgtcagagtcatctcttttaaattataaaaatagcttctttcttcttcttcctccttattttactcaccaatcagctctctggatgccacgtgtgcttccaatctccatattttttttttagtttgaatataaaagagaattaaatcttttattagtttcccattagcgaaagatg

SEQ ID NO: 27301 - DNA, 3003 bp, Unknown
  misc_feature (1)..( 3003): 2750-1469P.txt file - cDNA_ID_2731295; gDNA_ID_2684236; Annot_ID_137705
tacatcaatggagggcgcgtggagttatttattcaaggcttaccaggctatccagataacatccggtatgatggagatggacattactggattgcaatgccttcggtaactataaaaattgaaacccttcttagagtttattgagttggtttaggtctcggtcatattcagtatgtgtgtcatcttttatatcatcttttattgatcactattgtatcatcttttattgatcactatagttgaaaacagggagtaacaacgttgtggaagctttcaatgaaatacccattcttgaggaaaatcacagctatggcggctaagtacggctatgaacctatgtttatggagaatgcaggagttttgcaggtggatttggatgggaaccccatcgcatactaccatgatcaggcgctctctcacataaccaccggtgtcaagattgggaactatctctattgtggaagtctctggcattcacacattctccgacttgatctcctaaaataccctgcacaaaacaagaagctttgaaacttcatgtttataaaaaaaaaagacttttacattttaggagtattcactgtcacaaaatgtaaactcattgtcctgagaatgaatcatgatgtttctctatctctaaggatattagtaacctgaaacaatgaataccaaacgaaaaaaatacaatgaagacaaaccaaatcatacttaagatgcacaattcctaaacaaagcagatatttttctttgtttagaactcaaggcaacccattgtccatacaatattggccctactggtaacatagtaaaaccccacgagatttcgactaatagttggttacaacttacaagggactagagtcaaagattattatgagtcaacgatgatttgcgatttcatcattaaatacacgtgtttaatttagttgtttttctcttcaatcacaagttcacaactacaaaattggcatgttcaccatttttccacaaactcaaatttgctccaatgcctgtacttttctcctctcgttctctcatactctccattattgtccccttacttatatctatcgctctctacaaactcgacacattcgaccccgctattgttccttccgatgcattcacatcctctgctacttcactcccgccgcttataaacgacgaatttctcaccggagctgagtttatcggtgtcggtcttctcaatatacccgaagatatcgcctaccataaggaatctaatctcatctacactggttgtgttgatggatgggtgaaacgagtcaaggtcgccgactcggttaatgactcagtcgttgaggattgggtcaatactggtggtagaccgctcggaatcgcgttcggaatccacggcgaagtcattgtcgcagacgtacacaaggttggggttttgaaatcgaattttgaaaaatcacaatcttaggtttgactttgttgttatgtatagggactgttgaatataagcggtgacggaaagaagacggaattgttgacggacgaagcggacggtgtgaagtttaagctgacggatgcagttaccgttgcagataacggcgttttgtatttcacagatgcttcttacaagtacactctcaatcaattgagtttagacatgttagaagggaaaccttttggacgactcttgagctttgatcccaccacacgtgttacaaaagtacttctcaaagacctctacttcgctaatggcatcaccatctctcctgatcaaactcatctcatcttctgtgaaactccaatgtatgtgcattggatcagttaaattttttataaatttccgactcagtttgatttggcaataagttaatttatctatatctgttatatactactttaggaaaaggtgcagcaagtattacatcagtgaggagcgtgtggaggtattcactcaaagcttaccaggttatccagataacattcgttacgatggagatggacattactggattgcattgccttcggtaacgttacaaattgaatttcttttcttttctttgaggtcatgttattaactcattacatgctaataaaggatcatctttgtgttgtggttgtgcaaacagggagtcacgacattgtggaatatctcgttgaaataccctttcttgaggaaactcacagcaatggtggctaagtacggcgtggatcttatgtttatggagaatgcaggcgttttacaggtggatttggatggaaatcccatcgcgtactaccatgatccaaaactctctcacatagccacatgtgacaagattgggaaatatctctattgtggaagtctctcgcaatcacatatcctccgacttgatctcctgaaatatcctgcacagaacaagaaactttgaaatattatgttttcacaaataaggaaagtttccattttaggaaggagcattcactgtcacaaaaaatgtaaactcatttcctgagaatgaatgatgattgtatctcttttttttttttttttttgtctctctcgtagatttgtatcattgattccaaaagcatatactatctagcatgatgtgagtgttattgttcctttaattagactcgatacattcctttaattagacttggtcataattaaaggaataataacactctgtgatatatgaaaagcatataaatggtattaagtaagaatcgaacctgtgacctttaagaagttaagctggcttggaaaggtgtatgaggtggtcgtccactaattagattcagagagtcaggacttgatccaacgattaacgcaaaatcatttgcacgttctacgcaactccataatttcaattcctctcgacgtttcacggcgaagcttcagatctacttttccccagctcaggtgatcttttccatcttccatcatcttcgttcgctgttagagattatcttcttcttcgtcttcgtcttttcctttacgatttctgaatcttcttttgtctcttgtttgattttagtatg

SEQ ID NO: 27302 - DNA, 3003 bp, Unknown
  misc_feature (1)..( 3003): 2750-1469P.txt file - cDNA_ID_2731299; gDNA_ID_2684236; Annot_ID_192413
tcttaaggagtacatagtagcctgaaacaatgaatacaaaaccaatcaaccatacaagccattccaatgtgtcataaaacttaacaaagtttagtgcgcatgttctttatatattaatgattagaagacgtcccctgactacggttacggttattacgtttacggtttattaaccaccggttacggttataaatttttgttaatcttaaccttaaccgttacatgtacggttaaaacggttacggttaaatacggttacggttaaatacggttatggttaaatacgattacggttatttgataattatgatatagttaatatacgaagtaaaatattatattttttaaccttcataataaaaaaataaataaatagtaatatatcaaataatatttattttacgcgattatgtgcttcaaatatctatagtgaatcatctatctattttcttaagtaaatcaacgaataaacaaattaatggtcataattataataatttaattacattttcgaaacaaaaataattctaaagagaagatgttgtgaacattaaaaaacaattttaagagtataaataataataatatgaactacttataatttaatttatggtcaaaagagtagtggagtaacttcgattgtagtagtgacatattaaacgatttaaggtgatgttttagtaaaataattattcatttaaaattatacacaattacaactatattttaaaagttttaactatacggttaaccgacggttttgatacggttacggttaattaacggttacagttagtatatttttttaaccgtaactaatctattttcacggttaacggttacggtcaggttacggtcagttaattaacggtccggttacgatccgaaatacggttacgattagattttggtcatgcgccttgagctcctctagaaaaatattgggcctactgggaatatggttaaagcccataagattccgtaacataacgtactacggaaaagaagaagtcaacgatttgatctgtgattgtttttctctcaatcaacttcaaaatttgttgattcaccatttttttccacagaaccaatccttctacaatgcctgtattcctctcttctcgttttctcttcttctgcatcatcgtccccttactcatctctatcactctctaccaactcgacacgtttgacccagctcatcatcccgctgactcactcatctcctctactgcttcaatcccgcctctaataaacgaaagatttctcaccggagctgagtttatcggagtcggtcttctcaatagccccgaagacatcgcctaccatgaagactctggtttcatctacactggttgcgttgatggatgggtcaaacgagtcaaggtcgccgagtcggttaatgactcactcgttgaagatttggtcaacaccggtggtagaccgctcggaatcgctttcggaatccacggcgaagtcatcgtcgctgacgcttacaaggtttgggttcgtgacttttttgaaatcgaagtttgaaaattttcaattaataggttggtttctgtctgggtagggactgttgaatataagcggtgacgggaagaagacggaattgttaacggaagaagcggacggcgttagatttaagctaccggatgcagttactgttgcagataacggcgttttgtatttcactgatggttcttataagtacaatctccatcagtttagttttgatatcttggaaggcaaaccacacggtcgtctcatgagctttgatcccaccacaaaagtgacacgtgtacttctcagagatctctactttgctaatggtgtctctctgtctcctgatcaaacccatctcgtcttctgcgaaacccccatgtctctctcacatttcatctctgtttcttttattttccatctgtgttcattgaatcctcatgatctcaagttgttattttgttgttctcagaagaagatgtagtaagtattacatcaatggagggcgcgtggagttatttattcaaggcttaccaggctatccagataacatccggtatgatggagatggacattactggattgcaatgccttcggtaactataaaaattgaaacccttcttagagtttattgagttggtttaggtctcggtcatattcagtatgtgtgtcatcttttatatcatcttttattgatcactattgtatcatcttttattgatcactatagttgaaaacagggagtaacaacgttgtggaagctttcaatgaaatacccattcttgaggaaaatcacagctatggcggctaagtacggctatgaacctatgtttatggagaatgcaggagttttgcaggtggatttggatgggaaccccatcgcatactaccatgatcaggcgctctctcacataaccaccggtgtcaagattgggaactatctctattgtggaagtctctggcattcacacattctccgacttgatctcctaaaataccctgcacaaaacaagaagctttgaaacttcatgtttataaaaaaaaaagacttttacattttaggagtattcactgtcacaaaatgtaaactcattgtcctgagaatgaatcatgatgtttctctatctctaaggatattagtaacctgaaacaatgaataccaaacgaaaaaaatacaatgaagacaaaccaaatcatacttaagatgcacaattcctaaacaaagcagatatttttctttgtttagaactcaaggcaacccattgtccatacaatattggccctactggtaacatagtaaaaccccacgagatttcgactaatagttggttacaacttacaagggactagagtcaaagattattatgagtcaacgatgatttgcgatttcatcattaaatacacgtgtttaatttagttgtttttctcttcaatcacaagttcacaactacaaaattggcatgttcaccatttttccacaaactcaaatttgctccaatg

SEQ ID NO: 27303 - DNA, 3003 bp, Unknown; identical to SEQ ID NO: 27302
  misc_feature (1)..( 3003): 2750-1469P.txt file - cDNA_ID_2731299; gDNA_ID_2684236; Annot_ID_137704

SEQ ID NO: 27304 - DNA, 3003 bp, Unknown
  misc_feature (1)..( 3003): 2750-1469P.txt file - cDNA_ID_2731301; gDNA_ID_2684236; Annot_ID_137703
ggtgtttctcctcctaacttggtcttgatcactcagccgcgatcttttgtacttagagttatagtgttgttctttaattttctgtagattgcttctctctccttctattcttctttgtcaaaaataaaaatggtataaaacttcatcttttacccaaaaaaaataaatgtaaagtcgtgtacagtgaatattactctgttttcaactccagaaaacataattgggcctattgggaatataattaaagcccacgagattcgactagcgagagttgttgttggttacgtaatttagcgcactacggaacaaagaagaccaaatttatacgagtcaacactcaacagcgatttgatctgcgatttgatcatcaacaacaatcactccaaattttgtctgctcaccatttttccacaaagccaattctcttgtatccaatgcctatgttctactcctctcgttttctcttcttcttcaccatcgtccccttactcgtctctatcgctctctaccaactcgacacatttgacccagctccggttccttccgaggcatacgcctcctctactacttcaatcccgccgcttatcagcgacaaatatctcaccggagctgagtttattggcgtcggtcttctcgataaacccgaagatatcgcctatcatcaagactctaatctcatatatactggctgcatagatggatgggtgaaacgagtcagtgtccacgactcagctaatgactcagtcgttgaggattgggtcaataccggtggtagaccgctcggaatcgctttcggagtccacggcgaagtcattgtggcagacgcatacaaggtttggattcgtgaactttttagaaatcgaattttgaaaatctcgatcttaggttgattagtgtgtgtgtcggtagggactgttgaacataagtggtgacgggaagaagacggaattattgacggatcaagcggaaggcgttaaatttaagctgactgatgtagtcgccgttgcagataacggcgttttgtatttcactgatgcttcttacaagtacactctgcatcaagtcaagtttgacattttggaaggtaaaccacatggccgtctcatgagctttgatcccaccacacgtgttacacgtgtacttctcaaagacctttacttcgctaatggcgtctccatgtctcctgatcaaacgcatctcatcttctgtgaaactcccatgtaagtccactgactctgttggattttactaatatccgactcataccagttagcaatgtgttaattcatcgatatactatatctaggagacgatgcagcaagtattacattaatgaagagcgtgtagaggtgtttattcaaggcttaccaggttatccagataacattcggtacgacggagatggccattactggattgctatggtttcggtatgtaaaccagttgaaatattttctttaaggtttatgatgatgagcttttgtatagttttgctcatagtgttgtgaaaacagggagcatcaacgttgtggaggctctcgatgaaataccctttcttgaggaaaatcacagccatagcggctaagtatggcgtggaacttatgttcatgaagaatgcaggtgttctgcaggtggatttggatgggaatcccatcgcttactaccatgatcagagactctctcacattaccaccggtatcaagattgggaactatctctattgtggaaatatcttgcattcgtacattatccgactcgatctcctgaagtatcctgcacagaagaagaagctttgaaacatcaaagtttatacaagcactaaaaatttccactttaggagtatgcactttcacaaaaatgtaaacgtatcgtcccttagaataaatgtatgataatgtctcttaaggagtacatagtagcctgaaacaatgaatacaaaaccaatcaaccatacaagccattccaatgtgtcataaaacttaacaaagtttagtgcgcatgttctttatatattaatgattagaagacgtcccctgactacggttacggttattacgtttacggtttattaaccaccggttacggttataaatttttgttaatcttaaccttaaccgttacatgtacggttaaaacggttacggttaaatacggttacggttaaatacggttatggttaaatacgattacggttatttgataattatgatatagttaatatacgaagtaaaatattatattttttaaccttcataataaaaaaataaataaatagtaatatatcaaataatatttattttacgcgattatgtgcttcaaatatctatagtgaatcatctatctattttcttaagtaaatcaacgaataaacaaattaatggtcataattataataatttaattacattttcgaaacaaaaataattctaaagagaagatgttgtgaacattaaaaaacaattttaagagtataaataataataatatgaactacttataatttaatttatggtcaaaagagtagtggagtaacttcgattgtagtagtgacatattaaacgatttaaggtgatgttttagtaaaataattattcatttaaaattatacacaattacaactatattttaaaagttttaactatacggttaaccgacggttttgatacggttacggttaattaacggttacagttagtatatttttttaaccgtaactaatctattttcacggttaacggttacggtcaggttacggtcagttaattaacggtccggttacgatccgaaatacggttacgattagattttggtcatgcgccttgagctcctctagaaaaatattgggcctactgggaatatggttaaagcccataagattccgtaacataacgtactacggaaaagaagaagtcaacgatttgatctgtgattgtttttctctcaatcaacttcaaaatttgttgattcaccatttttttccacagaaccaatccttctacaatg

SEQ ID NO: 27305 - DNA, 3003 bp, Unknown
  misc_feature (1)..( 3003): 2750-1469P.txt file - cDNA_ID_2731303; gDNA_ID_2684236; Annot_ID_137702
tttaatttgattgagtgattcaagactgccattggattcatattgatcattatcaattggacgcattgttgaattagagagacaagattatgaatcaagatcatggcttgtccccgtttaaaaatggtttaaactatatgataagtttatttagaaagaaaaaaagatcatgtacggggaatcttagagaagtggtacgttacagacaaaagatcttcacaaaatttgatacattgaacctcatctcaacgtcaatctacaactacgccttcaatagtaacagaaacaaaacacaaaaagtccataagttaaacactgggcctgacaatttaggcccatatactgaaggaaaacgagtctataaataattgggcctaatgaaatataaaagcccacgatactagattatcgaatggtggtccctattagttacgtaacgtacgaagatttatctacaagtttgaatcactccaaaaatttaaaattcagtgttcaccattttttatttttctccacaaacccaatctttctacaatggttctcttcttctccactcgttttctcttcttctccatcttcttcccttgcctcatctctatcactctctaccaactcgactcattcgagccagcttcacttcccgcggactcactcatcacctctcccacttcaatcccgccacttctcaacgacagatttctcaccggagctgagtttatcggcgtcggtcttctcaataaccccgaggatatcgcctaccataaggactctaatctcatctatactggttgtgttgatggatgggtgaaacgagtcagtgttcacgactcagctaatgactcaatcgtagaggattgggtcaataccggtggtagacctctcggtatcgcttttggacttcacggcgaagtcattgtcgccgacgcaaacaaggtttagacgattctttattttttgaaatcgaattttgaaaatcttatcttaggtttgatattgttggtgtgtgtagggattgttgagtataagcgatggcgggaagaagacggaattgttgacggatgaagcagacggtgttagatttaagctgacggatgcagttaccgttgctgataacggcgttttgtatttcacagatgcttcttcgaaatacgatttctatcaatttatctttgatttcttggaaggcaaaccacacggtcgtgtcatgagctttgatcctaccacacgtgccacacgtgttcttctcaaagacctctacttcgctaatggcatatcaatgtcccctgatcaaacacatttcgtcttctgcgaaaccatcatgtatgtgcattacatttgttatgtttctaactcaaaaccaattggtaattagtttttatttatagattttgtatattactttaggagaagatgcagtaagtattatattagtgaggagcgtgttgaggtatttattcagggcttaccaggttatccagataacattcggtacgacggagatggacattactggattgcattgatttcggtatttatactataattgaaatcttttcattaaagtttatgatgagattattatatcatctttaatcttttatttgatcattgtgttgtgaaaacaggaagtaacaacgtcatggaaactctcgatgaaataccttttcttgaggaaactcatatacatggcggctaagtatggcgtggaactactgtctataaagaatgcagccgttttgcaagtggatttggatgggaatcctatcgcaatgtaccatgatcatccattctctcacataacaagcggagtcaagattgggaaccatctctattttgggagcctcttgcattcctacattactagactcgatcttttaaagtatcccgcacaaaagaagctttaaacatcaagtttaggagtattcactgtcacaaaatgtaaagtcttcgtccctggcacatcatcatgtccttttgtcttcgtccctggcacatcatgtacggttgttgtaaggtcgagttttggtgttaaggtgttgttagtttataatctttgtgaatatggttagcttcttggtgcattgcaaggttaggtgaggtgaatagaggtggcgaataggttttagtggtttcacttttcgttgagctagtgtattagtccatgtttgctcgttcgttttgcgttagttttcggagaagctataagcttctatctggaggttttgtggacggtgttgttctcggaaaactaaagtatagcagaagattgcaaaatacttcgatggtttattgatatgaattgcatgcctttaaatagccatgactacaaagactacgtcgttcacaactaaacaatgagaaacttgcggaagtaagctaaagactaggaccactataacaactactactcgactcttaaagaccatgagtttattcaaacatgagaacaacttaacgacttattcaaaacccaacagacggagagtaatgcttgtgacaactcagatgaggattccagtgcttcggtattgcggcaacagcgtacttttccgagcttcgcggattcggtgtttctcctcctaacttggtcttgatcactcagccgcgatcttttgtacttagagttatagtgttgttctttaattttctgtagattgcttctctctccttctattcttctttgtcaaaaataaaaatggtataaaacttcatcttttacccaaaaaaaataaatgtaaagtcgtgtacagtgaatattactctgttttcaactccagaaaacataattgggcctattgggaatataattaaagcccacgagattcgactagcgagagttgttgttggttacgtaatttagcgcactacggaacaaagaagaccaaatttatacgagtcaacactcaacagcgatttgatctgcgatttgatcatcaacaacaatcactccaaattttgtctgctcaccatttttccacaaagccaattctcttgtatccaatg

SEQ ID NO: 27306 - DNA, 3003 bp, Unknown
  misc_feature (1)..( 3003): 2750-1469P.txt file - cDNA_ID_2731312; gDNA_ID_2684236; Annot_ID_137698
accagtcctaaccagacaaaaaagaaaggtgttggttttaaacaagctctggtgttacaatgtgacattaaaacacgaatcttttctcttgagaatcatcaatagagagagagagtgagtggtcatattagggttcataacttgcttgaggttttgtaaaaagcagagaaagagagagagaggggcctagaaagaaagaaagaaaagcagtaagagactattaaatgttgcaggcaggtccagccagtgtcccctctcttctgcgagattccctcaaaatttattacaaagcatcttcatcgatgttcttttaattcttcctcaaaatcttttctctttttttggttatatatatttgaattttgatttatgaacctcctcaagaaggaaagacagaggaggagacaaagaagtataggttcacattgcatagccagtttagttttgaaggatggatatatgaaaaaaatatgaagagagagaagagagaagaagaggaggattaaagagggtgaggccagcttttgtgctttggtagtagatgaggtttaaatgctccataccttccatttccttctctcttaccctaatttaattcttcctctcctttataactccccacagacattctcacttctcctcctcacacttcacatcaacacttctttcttgttttttcattttacaatgtttcctttgatatccgcactttaagcatgagagagtccctttgatattggcctggttcactcagatcttacctgaccacacacgtagatatacattattctctctagattatctgattgagccgcgccaatatctcagtactctctcgtctctattttggactttgtggtcttgtagatcgatttgtatgtgtgtgttgaaatggagacaagtacttgtaacttctttgttgttatattgtttacctataggctgatgtcataaactcttttgatcttgtttctaacttccagattcttgaaaaatcaagtcgtgtgtgtgtctccatggaagccttttccatttcttcttttccaaggtatccccttaatcagcttccttgccaagtataaatctgttgtagggttttgcttcaaataatctatatggatccttttagaatgcatattgtgttgataccaattttgagacagaatgtgtcagcgaaactgatcttgtttattagtacaaatgcaggatgttagagagttagctaataacatatacaacaaaatcacaaaaccggtgaagcaatgtaaaatgtcacaatcacaagatgtttttttcaaaaacaggggaaaaagcagagttaatgagagagaagctgacgagcacgaaccctaacctgcaagcgagcaagagcatgcatacaatgtaaagcaattcgtgcttgtctcctcacaagcactcctctagccaccgcctgtaacttcaccagactcttcaatgctttaaacgctcttcttgcctgcaaaacactttaatggttttaccaattttgttttttcaggttttcaaaatctacagagatagaaaatgtaaattaccaggtgccctctgaaaaaggcttggattttaacggcggcaatctcttctcgagttgtttctggagctgaagagcgaatgattgtgattctgctttgagatcgtcggagaagtttccttcttacaacaccaaacaaacgtttggagttggccatgtttatgggtggatcttgtcttcttttggttttggttttggttttaaaagaggacgtctaaggaaacgtaaaatgtgaataaaaagtgaagacggtggctttaagggatatatggaacatgatgtgctctcctcatttctaactaacgaacgtgctcgcatgctcctctctttacacttggtttcgttttgtttattagtagttttcaagacacacgagtctttggtcttttttacatttagttattgaattatagttatgttatgcctaactcaataaaaagaagcttattgagattttgaaaaggttattataaagggtgattgttgcatttcaatgctcaaaattaccatgttatgatatatcttataatcacatgtgaaatctacactatttttaaaatttatgatttagacaattttttcgaaaatgtcactctatttttcaacaagaaaataaaattaggtcattggtattgtggtttgtaatatactaatgacccccactacaatcctaccgacaaagcgtccactctttgtaatgaagttctttgatcatttctctattcaatcttgacactatgaatgtaatcgcgcagcggaagaatggttcatcatactcttacactgttacacaggtccagccctgaactaaagtgtttgtgtttttgtatcggatatgattagcaattgtgcatcaagttagttacggtctcttctcaaatccagtaaaccaaaaaatatataaaaaaatcatactctataataaacttacatcaaatgtcctttttttaacgtttatgttgggagtacgtagtgagatttttcagatatgataaatgtttatgtttgaagttctattttgagtatcatcattttacacgtctcctatcttttcttcaatcaataaagcctttgagcccacaacttcgtaataccgttaaacccaattgttattgggcatgaaaacaaggcccaactcaagtctatctcccccacttgttcatcttctattgtcttgttgcgagtttgcgacttaaacagtaattaaattactaattacgcaataatggcggattaatcgaacctactctctctctctctctctctctctctctctctctctctctctctctctctctctctctctctcgtgcatctccataaactatcttcaaagattaaattttgaagatcttctttttggcttattacccgattctgtcactgtctcttcttcttctccaatcccaatgtttgcttgagagaaagagagagagtcaaaccaaaacatg

SEQ ID NO: 27307 - DNA, 188 bp, Unknown; identical to SEQ ID NO: 14981
  misc_feature (1)..( 188): 2750-1469P.txt file - cDNA_ID_2731322; gDNA_ID_2684237; Annot_ID_137742

SEQ ID NO: 27308 - DNA, 3003 bp, Unknown; identical to SEQ ID NO: 23980
  misc_feature (1)..( 3003): 2750-1469P.txt file - cDNA_ID_2731330; gDNA_ID_2684237; Annot_ID_137735

SEQ ID NO: 27309 - DNA, 3000 bp, Unknown
  misc_feature (1)..( 3000): 2750-1469P.txt file - cDNA_ID_2731352; gDNA_ID_2684237; Annot_ID_137726
aagaggcagaggaggaagaagagttagctgcggtggaggtggaggcggtgaaggtggaagagggttcaacgtcgtggataagaggcttggataggcggcggtgggcggcggaggagtcgtcatataggaggttaaagttgttgatgagaagaatggatggacggttgggatcgtcggaggtggcaccggacggagatgaagagggcttggtgagatttgatgggaagcaaagatggaagtttttccacatgactcttggcattgtttttgtttttgtgagaaagagagtgagagaatatgtattgagcatgtggatttagctaggttgtcttaatttgttttgatactattattgtatcatgcttgtatttatatgtacaaatatttatattatatacgtaccaccatgtatttgtataatgtattatatttacacaatgcatcgtgctttgctgtgaatcttaagaccaaaataattttaattcttatttttacttattttgtttgtataatatacagatctacaaaagtatcttattattaacggtcatcttagttttttgtctgttcgtttgaaggttttaagttataccaactttcagtaattcatacacttttttttttatagatttgttttcttgaaaatggttatatatcacttaaaactaaatttttaacatatttgatataaaattcatatttattgttgacaatgaaaatttctattttattattaatatacaatcttgataaaataaattaaaatattaatatcttaaatgtgaattagaaatttcaattaattaaatacaataagagggtaatttacgagtttttgtcgtatatagtataaggtaaaatgactcaaaaagcaaatcttgatggtaatcgaaactttaaacatgaaaaagcgcctacgcgtaaagtatttgttttttttcttagatttgatagaagggaaataaggttatatacggacatgcaaatatttatatgttttctccattatcaacatatacaaattatatgagtaaacttcaacaatataatccaaaattgtactgtttatctttatattttcacgctttttttttcttaatgtcataggcaaaaattctgcggggagagcaaaacctttattgtttagtaaataattttcttcaattcatttacgaactctagacataataaataaattaacgccaaataagaggaattattgtccttgcaaatatatacagcaagaactcacgaggaggcaatgtttggactaacctaaactggccatctcatgactcaaagacgaaagatcgatgtttgtgcaaagtacactgactcacttcacttctcattgatcaatcttaactaatatttgttctcttccctttttcagtttatcttagaccattgtttctcctagcaacaaattcaccgaatgatcatgtcgcgattagttttgggataaaatcataaaattgcttctcatcaagaattgctccgcaaaatcaatgttcaagcagattactagaccaaaatttatgatcgagtagtccgaatataatcttttgcatttaaagcctctaaaatttacaaatatctaaccaatgttacaacatggcatgtacctagtacaagctactaggttacaacttcagagcgaagaattaaaaaatgagaatcctatattaatgaatattctcgcttgagaaatctatgcatgacaactttctatcatcaacaataataattagatttgatcaatctctgtcgacgagaacccgccaaaagtggtgactgagagacatgtcacacaacatcgccctatttatacgtagaaatatcgatctatatatatatatatactagatcgacaataatatggtaagtttttttattttaaatatggtaagtaataaatgcttgtaatacgaaaggcctttatgctctactcattgtttggtgtataaaaaaaaaatggaatcaaggtgtcagatatgatggtacagcaatttttagccccacacgttgtcatttttctttggaaggtacattgagatcaatttctatttttgtattattttgaaatcatcatatagtttcattggatttatcacaagaggaatcttataaaaatgcgaatgggtatatctatctctctttcaatatctatgtcacacaagtgttgttgctatattgtagggacatgtcaaaacttgtcgacaaaagctccatgaatgggaaacattgacatcaagatacaaaatcacatgattcttcaacttgtgaaagttttcgagtgtgaacatcagactcacataaaactccattgtagatatctcttgtcataagacactgtcacattcaatatcgttttcaaactctccaaaatactgcctgattgcaatgttacaattttgtcatggacccaccaatccctgtgaaccaagccggttactgtttattactccgacccgacccgggctttttaaagataggcccaagaaggcccaatgattgaaatgtgaaatgtttgatacattgatgtttttgatcttcgctcaaaccctacaataaaactttggttcctccgaatttcgagttcttgttcttcccaaggcccctacttcggccctagcatcaaccattgtcgttttaaagctccaggttttcatggccaagaaagaagtaactatcgttgagatcttctgaaattaatcagtcttgaagtctctggagattgtacgtttctcttcttcctttcctcgtcggttttaatggattccgtttgcctgatttgcagtttctgcttcaccgtgaaatcgaaactcgttttgctcttaaacaaatattatgcatgcgtttcaatttgggtctttttcttgacaatattggttctgtttggattaagaaattgaaaattagttttgtagctgagccttttctcttgtgtgtataggaactgagctatatcagtagtgtatctagcatatttgattaatg

SEQ ID NO: 27310 - DNA, 3003 bp, Unknown
  misc_feature (1)..( 3003): 2750-1469P.txt file - cDNA_ID_2731364; gDNA_ID_2684237; Annot_ID_192449
gcatgtaccacgtacgattcttcagaaaattaataattagaatataccgtatcactaacaacggtccaagttataagttttaaagtttagtgatgtatatatttgataagatataaaggagttcattaaataggaagtagaaacgacatatcaacagactcagtctaagacagcctaacagtaacaaatcaaatattcgtatcaaatgaaactgtaccttcaagtagtagaatgtattggcgttttgtgtgtgtgtgtttttcttcaatatacatgaacttcggtaattctttcttcacgattatttttttctatatcagtcacgcgaatttacataacgtacaatatctttcattgatttcattttctctaaaaaagcgtgtgattatatgaaaattctgtatatcattgtacatatctcaataaaatgaaaacttgtttttcgctgcaaattcaaaattttaaagcgttactttgtgtgtataatggaggagtaaacataacagtgtgaaatctttattcttctgaatatccagtaaaatttgagataatccaatacaacaaactcgtgtcacgctcaagtagtcaaatgtcgatttggtcacatccgcacccgtttattgaaacttatcaaatatatatcattttgaaaaagcaataagaaaacaaaggcatgcagagataaaaagctggaggaaatgaagaaaaagcccgtgaacaaatagttgaatggaataattagtatgcacagtacatatgaggctgtctttttaattaaaaagaagctcttacttcattctatttttttttttttttttttttttgtcaatccttacttcattctattataagtgattctgataccctatatttgtggaagataaaaaaaaattaaagctaatgagacgactttgagttaagttcaaacttttcattattaatcgcatgaaaagtcactatgattatgtttctttgttcatttataacacactcatcattgtatttaaataaaatttaagattgatgatgtctttaaatgacgattggtaagctagcaacctttaattcaaataaatttgcatgcatatctgacaaaccctttcatcgtcaactctatagatttagataactagatcccggtttcatcagcacacgaacattatatatcagattattccgttttactatatgatcattatttagatgttgccatgttgggttatgtattctattatttagttaaatgacgtgaccttacttctcttaaagattatataatcctcacacaaacaaactattttgaaaattttgttttgaattccaatccatccaataattcaaatgtggattaacgttaatattttgaatgttaatgcaataataatacgatgaacctaacaccacgttgacctctaacacctaacatgttgatctctagtgtgccaaaggaaaaaaaaaaaacacgacaaccaaaagctaaaacaagttatccaaaaaccagtaaacagaattcagaatttaaagttgctaattatatatcggcttagaaataatatttgtcttggtaacgaagtccgacaaatattcctgaattctgattttctgataagaaattgacaatagatagcataaggtataagaaacagtggtgacattattattacagtaataattgacttagcgacttttggaaatactatagttttgttgctctgacgcaccatgtcaacaacaactcactcacgtgacccctcctcaagttctcacttattcttaaaatctttctaagcttttctatcacattttaccaaacctcctgaaaaaatcgatttcatcctttccctttttcttgttctcatatctaatttcaaattttgaaatatggccaatgacgttagtggcgtttgattacgaattttccatcatttcacatttttatatctcgttgattgtaaacaaatttgcttgcttccatcaaagactctagtatacatacatactattgtgattatgtccttgagatttcgagccaaagtcaaaatactaatctctgaaattaacgaagcgccaagactgcttgttattttattgaaacatcagcattggttaactatgattgaaatcacatttgaaaaactccaaatctcccaacaccttgatgagtcattcgactattttaaatttagttggtctcttaaaatattcataataacatttacaatatctaacattactttttttttttgttcttaaagctgttttggagaggtaaacctctaataattttacagacagaattttggtagaatatagcaaaaaagagggtttgatggtacttttgcactgaaatactgaaatcatagttaggtataagccaaggttgacccaaaaaaaagaattaactataagcccatatcttattcatgggctttgatgttggcccatcaaattattaattctctgtgattatttgccacttttaaccattgcccaattaggcgaaaatattaatgagatcgatttctcacaatagagagggggctaattgatcaaatcaaaaactaaaggggtgaaattttaataaggatggattactataaataaatccgggatggaaaaataaaaaaaagttccgttttggtttcctcatctttttgtaccgctccgttgcgcctctctcttcttcccttcctctctctagcggcggagttacattgtcggccgccggggaaaccggcgacagtggattctctaaactcttaaactcgctacgtcgattcttaaaggattcatcgccgataacttttatacctccttcttttccgataggatcgggactcattttgtttccaacaccccggatccggtgatttagggcgctttttgatgcttatcgagtaaaggatttatcgatttaggtatttcgttattgatttgatctcggattttgacgggattaagattaaaggtccttactttgattttgtgtagtgatcgtttatg

SEQ ID NO: 27311 - DNA, 3003 bp, Unknown; identical to SEQ ID NO: 27310
  misc_feature (1)..( 3003): 2750-1469P.txt file - cDNA_ID_2731364; gDNA_ID_2684237; Annot_ID_137723

SEQ ID NO: 27312 - DNA, 3003 bp, Unknown
  misc_feature (1)..( 3003): 2750-1469P.txt file - cDNA_ID_2731368; gDNA_ID_2214471; Annot_ID_133071
gtcctcttcgctctctcacaggcggttctcaacctccttagagctctcgggtttccactaatgtccttcttgttcttcctcttgaactcttgaacaaagtgattcaccattctgttgtcgaaatcctcaccaccaagatgagtgtctcctgcagtcgccttcacttcaaatataccttcctcaatggtcaaaagagagacatcgaatgtaccaccaccaaggtcaaagatcaaaacgttcttctcaccaacacttgtagccttcttgtcaagaccgtaagcaatagcagctgcagtaggctcgttgatgatacgcataacattcaaaccagcaataacaccagcatccttagtagcctgacgctgagagtcattgaagtaagctggaacagtaacaacagcgttcttgatcgttgtaccaaggtaagcttcagcaatctcacgcatcttgatgagaatcatagaagagatttcttcagcagaaaactctttatcttctcccttgtagttaacgacgatcattggtttttcagcaggtccagatttgagcgtgaagggccacaatttgatgtcactttgaacagagctatcagtaaatcttcgaccaatcaacctcttcgcatctgtcacacaacaaaattgaacacaattagaccacagatactatacgaattaaaacgatgctatatgtatattttgcctaaaggctaaaattagtaacattagatcgaaaattgaatctcactagctccagcaatgttaaaacattcttatgaaaccctaaatcatcgctatggatctaccgattacagatctacttataatccaagttcgaaagacaaatttagcaagaggaaacgagtgaaacgtaccgaaaacagtgttaatcgggttcatggcgacctgattctttgcggcgtcaccaatcaaccgttcgctatcagtgaaggcgacgtaagacggtgtggttctgttaccttgatcattagcaatgatctcaacacggtcgtgttgccaaactccaacgcaagagtaagtggtaccgagatcgataccaatcgctggaccttctcctttaccagccattgttaacgctactcaggattaagctaaaaaatcgaaagaaagattgtgaaagaggaattgtgaattgcggctaggtttgttttcttttttccaaaatatcaggtcgaaggagaagtctatatagagtcttgtactcgagtttcgagaaggttcgatggctcgctatgtaaccgcacgatcttttggagttggatctgacggtccaggaatgattcttttctcctacttttccttttcctttaacaaataaggaaagccgtttaaaaaggttcgagaatgttcggttcgatggcttagtccataatcaaaagtcggtcattggctcaacattttcttgcgttctcattggctttgagtcggtccaccgttcaccgtcagtgactcattgatagcttttttccttttcgtttttctgttttttttcccaaaactagctgtaggcccaatgggcttatcttggagaaaatttgaaaaacaagaaaaagttaatgtgtttatttattgtatgctgcataggtttttgccttttacacaaatgataattcagggcagttgttgacatggtccatgagtttgaatagtttgagttgctcgagctatattcacaataagcccaaagaattgtacacacaattgaaagagattgacgagagagtaaagagttttgggtttcctcttttgatagctaaaataagccccaaacaatacgtggaagaagcatgcaaagtggacggtatacgtaacgtaactatgtaataactttaacattctcaaagaaaataatttataaatgcaatgaaataaccaatatagaaactcaaccaaaaaaaaagggaactcattttcagattaaaatttctattgaaaaaaaaacgaatttttgtggcacagaaatttgtagccacaaattggaaataaaataggtgtacaagtaccaagtatatgatagagtaggaccaaattgattatgccatggaaattacctggtgaagaggaaacaatactaaccatgaagcgtgcagcttgtgattaatgctctcgatctctacttgaactcgaactgttgatgagactaatgtctttcatatcacttcttcttcttctcttttgtcttattcctatatttaatcttacccttttttcggtctaccacattttaaatcgagaaatgaaaggtcgattacgtggagaaattataacattttaaactctcgagaaacttgtagaaaatactgttttatcaattagtatttgaaaccattatgttttagttttagagtatgaaaccagctggttttgactcgtttccaacctatacgtgcctcaattttagagatgtcccatttggtttaatctgaccaagctgtatccaaaaagtgattcaagttttatttcggtttatcaccagttacattttcttcgatatatacgaaaagtatcggaaaataagaagacacaatcaaacttgaaattggtaccaaaactagaacagtgtaagtcaaaccgaaaccggatatatgggcatggcctaaaccaaactaaaccgtaatccattcggttaaaattagtttcccttccaactatttgtatatggcatggcctaatttaacccaaactatttgaaatatcagtgtctcttccctcctttgatgtatgaggcactgcctaaaccgaaactaaccagatgcagtacagagactggtttggtttggtaactacacaatatagaaaatgaaagtacttggagttaaaagacagctgctcaaaagtcttaactctttgacgttgccactttaaatcccatcacaccttatatatacgtagtcttcttgctcaccataaccttcatctcatcatctttatctaacaagtattcctacatacaaatccactaaaacaacaatccgttaaaagaatg

SEQ ID NO: 27313 - DNA, 3003 bp, Unknown
  misc_feature (1)..( 3003): 2750-1469P.txt file - cDNA_ID_2731368; gDNA_ID_2684240; Annot_ID_192573
tttccactaatgtccttcttgttcttcctcttgaactcttgaacaaagtgattcaccattctgttgtcgaaatcctcaccaccaagatgagtgtctcctgcagtcgccttcacttcaaatataccttcctcaatggtcaaaagagagacatcgaatgtaccaccaccaaggtcaaagatcaaaacgttcttctcaccaacacttgtagccttcttgtcaagaccgtaagcaatagcagctgcagtaggctcgttgatgatacgcataacattcaaaccagcaataacaccagcatccttagtagcctgacgctgagagtcattgaagtaagctggaacagtaacaacagcgttcttgatcgttgtaccaaggtaagcttcagcaatctcacgcatcttgatgagaatcatagaagagatttcttcagcagaaaactctttatcttctcccttgtagttaacgacgatcattggtttttcagcaggtccagatttgagcgtgaagggccacaatttgatgtcactttgaacagagctatcagtaaatcttcgaccaatcaacctcttcgcatctgtcacacaacaaaattgaacacaattagaccacagatactatacgaattaaaacgatgctatatgtatattttgcctaaaggctaaaattagtaacattagatcgaaaattgaatctcactagctccagcaatgttaaaacattcttatgaaaccctaaatcatcgctatggatctaccgattacagatctacttataatccaagttcgaaagacaaatttagcaagaggaaacgagtgaaacgtaccgaaaacagtgttaatcgggttcatggcgacctgattctttgcggcgtcaccaatcaaccgttcgctatcagtgaaggcgacgtaagacggtgtggttctgttaccttgatcattagcaatgatctcaacacggtcgtgttgccaaactccaacgcaagagtaagtggtaccgagatcgataccaatcgctggaccttctcctttaccagccattgttaacgctactcaggattaagctaaaaaatcgaaagaaagattgtgaaagaggaattgtgaattgcggctaggtttgttttcttttttccaaaatatcaggtcgaaggagaagtctatatagagtcttgtactcgagtttcgagaaggttcgatggctcgctatgtaaccgcacgatcttttggagttggatctgacggtccaggaatgattcttttctcctacttttccttttcctttaacaaataaggaaagccgtttaaaaaggttcgagaatgttcggttcgatggcttagtccataatcaaaagtcggtcattggctcaacattttcttgcgttctcattggctttgagtcggtccaccgttcaccgtcagtgactcattgatagcttttttccttttcgtttttctgttttttttcccaaaactagctgtaggcccaatgggcttatcttggagaaaatttgaaaaacaagaaaaagttaatgtgtttatttattgtatgctgcataggtttttgccttttacacaaatgataattcagggcagttgttgacatggtccatgagtttgaatagtttgagttgctcgagctatattcacaataagcccaaagaattgtacacacaattgaaagagattgacgagagagtaaagagttttgggtttcctcttttgatagctaaaataagccccaaacaatacgtggaagaagcatgcaaagtggacggtatacgtaacgtaactatgtaataactttaacattctcaaagaaaataatttataaatgcaatgaaataaccaatatagaaactcaaccaaaaaaaaagggaactcattttcagattaaaatttctattgaaaaaaaaacgaatttttgtggcacagaaatttgtagccacaaattggaaataaaataggtgtacaagtaccaagtatatgatagagtaggaccaaattgattatgccatggaaattacctggtgaagaggaaacaatactaaccatgaagcgtgcagcttgtgattaatgctctcgatctctacttgaactcgaactgttgatgagactaatgtctttcatatcacttcttcttcttctcttttgtcttattcctatatttaatcttacccttttttcggtctaccacattttaaatcgagaaatgaaaggtcgattacgtggagaaattataacattttaaactctcgagaaacttgtagaaaatactgttttatcaattagtatttgaaaccattatgttttagttttagagtatgaaaccagctggttttgactcgtttccaacctatacgtgcctcaattttagagatgtcccatttggtttaatctgaccaagctgtatccaaaaagtgattcaagttttatttcggtttatcaccagttacattttcttcgatatatacgaaaagtatcggaaaataagaagacacaatcaaacttgaaattggtaccaaaactagaacagtgtaagtcaaaccgaaaccggatatatgggcatggcctaaaccaaactaaaccgtaatccattcggttaaaattagtttcccttccaactatttgtatatggcatggcctaatttaacccaaactatttgaaatatcagtgtctcttccctcctttgatgtatgaggcactgcctaaaccgaaactaaccagatgcagtacagagactggtttggtttggtaactacacaatatagaaaatgaaagtacttggagttaaaagacagctgctcaaaagtcttaactctttgacgttgccactttaaatcccatcacaccttatatatacgtagtcttcttgctcaccataaccttcatctcatcatctttatctaacaagtattcctacatacaaatccactaaaacaacaatccgttaaaagaatgcgcgacacaacatggctcgagcgacttggcctggctctgcgaaccgccatg

SEQ ID NO: 27314 - DNA, 3003 bp, Unknown; identical to SEQ ID NO: 27313
  misc_feature (1)..( 3003): 2750-1469P.txt file - cDNA_ID_2731368; gDNA_ID_2214471; Annot_ID_183011

SEQ ID NO: 27315 - DNA, 3003 bp, Unknown; identical to SEQ ID NO: 27312
  misc_feature (1)..( 3003): 2750-1469P.txt file - cDNA_ID_2731368; gDNA_ID_2684240; Annot_ID_137772

SEQ ID NO: 27316 - DNA, 3000 bp, Unknown; identical to SEQ ID NO: 15001
  misc_feature (1)..( 3000): 2750-1469P.txt file - cDNA_ID_2731376; gDNA_ID_2684240; Annot_ID_192570

SEQ ID NO: 27317 - DNA, 3000 bp, Unknown; identical to SEQ ID NO: 15001
  misc_feature (1)..( 3000): 2750-1469P.txt file - cDNA_ID_2731376; gDNA_ID_2684240; Annot_ID_137769

SEQ ID NO: 27318 - DNA, 3003 bp, Unknown
  misc_feature (1)..( 3003): 2750-1469P.txt file - cDNA_ID_2731389; gDNA_ID_2684240; Annot_ID_192562
cacttctgcttgtatgatattataataaaatctttcttgtgccgaacttttaacagtcagactattgcagtatgagcaaaaggggaaaacaatgttctggtgagtgcaattgttttctatcagattaaagttcttcactatcgtttgagcacttgagaatctatttgggctgtgtcgcagagaaaggtgaaaaagataaagatggggctgaagaacatgctgatacttcggatgaatcagacaacttttctgacatcagtgatgatgaggtcggtaattgtttagtagtaaatgctatgtcaaatttccaacctcgaatatggaacatgaaataaagaagaattctcaacagtttcaaagtcttgttttctcactacagtttcccttgttatatttgatcgtcagtcatagtattttactgttgctcaggtaaatggctatatcaacaacgaggaggaaacgcactataagacgatcacatggacagaaatgaacaaagattatcttgaggtgatttcagaggctatataatatgtatcttctcttggattccttttgatttatcacctaggagatcaaatcacatacaaaattatgttgttttgtaggagcaagctgctaaggaagcagctctgaaggcggctagtgaagctttaaaagctagcaactctaattgcccagaagatgcaagaaaggctttcgaagctgccaaagctgatgcggcaaaatctagaaaggtgactcagtttgaactttgaaattatgttcctgatcaagcatctgacttttggagaataacatgatacccattgatgacatatggtttctcaatcaatttctgattcttttttctctctcttcatataggaaaagcaacaaaaaaaagctgaggaagcaaagaacgcggctcctccagccacagcagtggaggcggtacgccgaacgcttgataaaaaggttagaatgtcagcttctttgataccttgatacttgaaaacgaatatgcaaaaaaagataaaccgagtatgccatgtatcatctgttaaaaacctggcctggaagtacatagtcaacaacatggctgtcgaaattattagcattgaagaaactttagagtctgtgtttcttcctttttcctgattttgagtgttgactcttacagagacttagttcggtgatcaactacgatgttttggagtcgctatttgatacatccgtaagtttttgattacctcttcttgtatcctcaattctcatcactttttgaggtctttacaattttgcttctcttttcttctttcaggcacctgagaaatcacccaagaggtcgaaaacagagacagacattgagaagaagaaggaagagaacaaggaaatgaagagtaatgaacatgagaatggtgaaaatgaagatgaagatgaagaggatgaagaagaaggcaatgtagaatcatacgacatgaagacagattttcaaaacggcgagaaattctatgaagaggacgaggaagaagaagaggatggtaatgattttggattgtattgatgatatgtattgtgaaacacaagagttttaatttcttttgttttgccggattagttgattttatttgcattaatataggagaaccccaactaaatttattctttattatcagtaacaaatatttaagatttaaaagaaaaaaaagttcacacaaatgatctatttatttttacaattcaagtggtactgactaagaaatgaaaaaccactaacttaattaatttaataaaatctatatgtatttaattttgataattttattttccttgtttatgataattctaatttctatcagataacaactaacaatcactgaacttatctcacctatttgatgagctaaatgtattttaaatttatttttctataaagatataactgaaacaaaagtgatgactttttatgaaaattcccaaaatcaaataccagaaaattcaattttaaacaaaatgtgtcggtccggatgatcttacatctagcttggttttacaggatagtatttaagaagaatcataaagttcatctcaaaccaaatccgacggtccagagtcacctgcaaagcttggcatcgtatacgtgttcagtggtcaacggatcagctacgagtgccgtttgaggttcaaacttctgtttctgaggttaactctctaccgttaacgtccgttagtgtaccttctaaccttgacgacttttccactttccaaaagataacgacggcgttaaattggtctattttactgaaccagctttaaccagaattagattgcattacattcaactcgtgcttatggataaatatcagttcggtttggagaaaataggttacttaaggtaaaaagaacggcaagtaacggtgtgacgtcagcagaagaagtattcgttataatagtgagagagagagagataaaacttagggaacccttttttatgttttattttctcgctttgtttcgatcaagtcttctctttctctctctatccctctctctctggttcaacgggcaaagtatttttcgaataaagttttggttttttttttaacgttcctttcgccttctttcttcttcttctgctggtgaattcgtgtatctatctatctcgatgagctccacttttaatccagccgcttcttctccagatgaggttagtttttgtgtatcgaatctgaatttttaagggttttgttcttgtgatcagattctagtgaaattgagttctttgttgtttggctctgattcgaaacgaatttaactttattgaaactataaatttttgtgattacaattgttataaaccctaattttgctgtggttggtgttaatgttgagctgtttactgaattcgtgatttgtgagatctgggttctgtctgctttgtgttttacgatgattgcttttttagggtttctctgtttcttatcaaagtctggatcttttttttctttcattgagatgatg

SEQ ID NO: 27319 - DNA, 3003 bp, Unknown
  misc_feature (1)..( 3003): 2750-1469P.txt file - cDNA_ID_2731389; gDNA_ID_2684240; Annot_ID_137764
gttcacttctgcttgtatgatattataataaaatctttcttgtgccgaacttttaacagtcagactattgcagtatgagcaaaaggggaaaacaatgttctggtgagtgcaattgttttctatcagattaaagttcttcactatcgtttgagcacttgagaatctatttgggctgtgtcgcagagaaaggtgaaaaagataaagatggggctgaagaacatgctgatacttcggatgaatcagacaacttttctgacatcagtgatgatgaggtcggtaattgtttagtagtaaatgctatgtcaaatttccaacctcgaatatggaacatgaaataaagaagaattctcaacagtttcaaagtcttgttttctcactacagtttcccttgttatatttgatcgtcagtcatagtattttactgttgctcaggtaaatggctatatcaacaacgaggaggaaacgcactataagacgatcacatggacagaaatgaacaaagattatcttgaggtgatttcagaggctatataatatgtatcttctcttggattccttttgatttatcacctaggagatcaaatcacatacaaaattatgttgttttgtaggagcaagctgctaaggaagcagctctgaaggcggctagtgaagctttaaaagctagcaactctaattgcccagaagatgcaagaaaggctttcgaagctgccaaagctgatgcggcaaaatctagaaaggtgactcagtttgaactttgaaattatgttcctgatcaagcatctgacttttggagaataacatgatacccattgatgacatatggtttctcaatcaatttctgattcttttttctctctcttcatataggaaaagcaacaaaaaaaagctgaggaagcaaagaacgcggctcctccagccacagcagtggaggcggtacgccgaacgcttgataaaaaggttagaatgtcagcttctttgataccttgatacttgaaaacgaatatgcaaaaaaagataaaccgagtatgccatgtatcatctgttaaaaacctggcctggaagtacatagtcaacaacatggctgtcgaaattattagcattgaagaaactttagagtctgtgtttcttcctttttcctgattttgagtgttgactcttacagagacttagttcggtgatcaactacgatgttttggagtcgctatttgatacatccgtaagtttttgattacctcttcttgtatcctcaattctcatcactttttgaggtctttacaattttgcttctcttttcttctttcaggcacctgagaaatcacccaagaggtcgaaaacagagacagacattgagaagaagaaggaagagaacaaggaaatgaagagtaatgaacatgagaatggtgaaaatgaagatgaagatgaagaggatgaagaagaaggcaatgtagaatcatacgacatgaagacagattttcaaaacggcgagaaattctatgaagaggacgaggaagaagaagaggatggtaatgattttggattgtattgatgatatgtattgtgaaacacaagagttttaatttcttttgttttgccggattagttgattttatttgcattaatataggagaaccccaactaaatttattctttattatcagtaacaaatatttaagatttaaaagaaaaaaaagttcacacaaatgatctatttatttttacaattcaagtggtactgactaagaaatgaaaaaccactaacttaattaatttaataaaatctatatgtatttaattttgataattttattttccttgtttatgataattctaatttctatcagataacaactaacaatcactgaacttatctcacctatttgatgagctaaatgtattttaaatttatttttctataaagatataactgaaacaaaagtgatgactttttatgaaaattcccaaaatcaaataccagaaaattcaattttaaacaaaatgtgtcggtccggatgatcttacatctagcttggttttacaggatagtatttaagaagaatcataaagttcatctcaaaccaaatccgacggtccagagtcacctgcaaagcttggcatcgtatacgtgttcagtggtcaacggatcagctacgagtgccgtttgaggttcaaacttctgtttctgaggttaactctctaccgttaacgtccgttagtgtaccttctaaccttgacgacttttccactttccaaaagataacgacggcgttaaattggtctattttactgaaccagctttaaccagaattagattgcattacattcaactcgtgcttatggataaatatcagttcggtttggagaaaataggttacttaaggtaaaaagaacggcaagtaacggtgtgacgtcagcagaagaagtattcgttataatagtgagagagagagagataaaacttagggaacccttttttatgttttattttctcgctttgtttcgatcaagtcttctctttctctctctatccctctctctctggttcaacgggcaaagtatttttcgaataaagttttggttttttttttaacgttcctttcgccttctttcttcttcttctgctggtgaattcgtgtatctatctatctcgatgagctccacttttaatccagccgcttcttctccagatgaggttagtttttgtgtatcgaatctgaatttttaagggttttgttcttgtgatcagattctagtgaaattgagttctttgttgtttggctctgattcgaaacgaatttaactttattgaaactataaatttttgtgattacaattgttataaaccctaattttgctgtggttggtgttaatgttgagctgtttactgaattcgtgatttgtgagatctgggttctgtctgctttgtgttttacgatgattgcttttttagggtttctctgtttcttatcaaagtctggatcttttttttctttcattgagatg

SEQ ID NO: 27320 - DNA, 3003 bp, Unknown
  misc_feature (1)..( 3003): 2750-1469P.txt file - cDNA_ID_2731393; gDNA_ID_2684240; Annot_ID_137763
ctggtcgttaaatttagagtggaaggtaacgttcacatgtttaaaaggtccaaagtcaaaaggtacatgcgtggcatagatttgccaataaattaaagaaaaaaaggtaaattcaagaaaggcttatcgagctaatttaagcccaataatactgaactatttgggcttgagtcttaaaggcccaatttgtggaggaggcgtcatcgtcttcgcttttccttttcccttgagaggtcgtcgacgaggtttaagatttttaagaatgttgtagtagcttcgcgaataatctcaggtcttctataaaaccaaactagcgattagccgactcttcctctttattattacaaagacgaaaaggcttcgagttttgtaatttcttcttctgttacaagttcttttcactgtgaaagtaattcttcaatggcgaaagacggacctaattgggatggtttgcttaagtggagtctctctcacgccgacggtactcgacccactcgccagttgaggtacggacattcatcttgtagttggttttttaggttctgtcttttgatttgtctgaaactgatgggatgcttggtgggtagtttaggtatctgtgtggctatgattgagctttcacttgaggagatgaatcttatgagtgaattcgaatctgggtttgtttaaagtagttttcttttttgaagatatctgttcagttcatcggtttggttaagattcaattatcgaattctgctgttatgtaggtgaaaggttatctattttctcgtttttacatgaaactctgttaattttttttaagggaattcacgatttgttcatgtcaaatcattctgtatgtgttttattgtggattgttttgttgatttgagttgttttaatgagacagtgaggaggatcgaaaatggtttatggaggctatgcaatcgcagactgtagatgtagtcaaacgcatgaaggagattacactagttatgcaaacacctgaacaagttttggtggaacatggagtaacacctgaagatatccaaggtgcgtaatttgtggctataatacatagcttagatctttatcttttgccattgtgtgtagggtactaattgagtttattattctggtagatttgctggatgagctgcaagagcacgttgaatcgatcgatatggctaacggtacattatctctaacttggactttgctttttttttttttttttttttctttcctgttctggttagctcaatttgaacattgcttgtaacaacttgtttacttactattgtgtagatcttcattcaattggaggcttggttcctcttcttagtttccttaaaaactctcatgctaatattcgggcaaaagctgcggatgtcgttagcacaatagttcagaacaatcctagaagtcaggaacttgttatggaaaccaatgctctggagtcattgctctcgaatttcacttcagacactgatattcacgctcgaacccaggctcttggcgcaatatcatgtaagcctgcttctgatagttcatttttagtaaagattgagatgatcaaaagcttttgtgatttctattttacttggtttgtgatactaaaagagacttatcttttcaatatgggatgtagctttgattcgccataacaaaccaggagtaacggctttcaagcttgccaatggttatgctggcctaagagacgccttggcatctgatagtgtgagatttcaaaggtaacccacacaaatattcttatcatctgcggatataaaatcgtggaagattcttgaattgttgctcattttctttattcaaattctccaggaaagccttaaacttgttgcaatatctactgcaagaggatgattcagaccgcagtattgccactggacttggattcccccgagtgatgatgcatcttgcctctagtgacgatgctgagatcagagaagccgctcttcgtggattacttgagctttcaagagagaaaaacgatggaagtagcagcatagataaaagcgatgagaaactgaggcagctactagaagaacggatcaaaggaatcaccttgatgtcacaagaggatcttgaaacggttaaagaagagagacagctcgtggatttactgtggagcatttgctacaatgaaccttcttctctgagagaaaaaggacttgtcgttcttcccggtgaagacgcattgcctcctgatgtcgctagcaagctctttgagcctcctcttagagcttctgcagcaaaccgtaatgctactgagaagaaagatgaacctatgaaactacttggaccatagacgagaaatcaaagctaaaactttttattacttttccttgttttttatgttttgtaacttttcaaattgtcagaaaagtttcatagatatatgtattatgtcaatgatcaagggctatgttatgttaatttttgttttcatcattcgagatctttagtcttgttattgttgagattaagaatattcagcttcaatgctttttcaattcaacaagtgttctatacgatttcggtttagcaacagctaatacggacccgatctaattgatcggttaaaattggtaactttgaattgcggtgaaccgaagaacaaaaccaaagcgaacgtcacaattactttgcaatccctaaagggacagagttcgaatcaaggcagtctcacatatcggagaaatctctcgtcacgtctctcagcttcgccttcaacaccgtcgtcgccgtcacggccaactccggtattgttatatagatacaattacagtgaactagataatctcatcaaaccctgattctttccacttcctcgcacgattgtgtgaaaacagttactttcgctataaatagtctgatcttctttctattgagcagtaagattggaagctgttgtttcgaatcgattcaagcctcgaatctgagtttcggatcgatattagaagctaaggtaggagctttttgagtgaaggagttatg

SEQ ID NO: 27321 - DNA, 3003 bp, Unknown
  misc_feature (1)..( 3003): 2750-1469P.txt file - cDNA_ID_2731397; gDNA_ID_2684240; Annot_ID_137762
actctaaacaataaccattttactttatgacagaaaaaaagaatatatatatatatatcttacttgagtcttactcaatctacccttcaagatactgagataacaaagacaaggaaagataaaatcctgcacggtaaacaaaatatgaatcctttttaacatacgtgatatgcctatataatcgatgatagctgtaattatgttaaacggtgacttacgacaagcgttgcgaggaatgatcccatcaaagcccccatgatcgctgcaaagttataattagaacaaacgacgataaattaagatgctttttgttgttgttgtatagtttcatgcaaaaagaaggtaagagtattttaccgaagaatgggaatgtaagtgcgacaaccaaagtagagagaactaaaatcgttttaataaagatagatactccatacgatctcatcttctctgatggcggcataagttcttctaaacctagcacaatcggtgtgagagctaacgcgtatttggtcattggtactaccaccttaagtaagagaaaaagaaccaatcacattttagtaattatatatatgtcgagacaaacatgtttaccgagttttaaagttatatctcaccgctgtccaaactgcgattttagatgctgtgtactgttgtggcatgtttagtgtaaactgcgattgaatggcctcaccaaacatactgtagccgcaaatcgccacggcaatgtaaaagaatacgcagaaaccaaaactgcaaaaagaaacagagaaatgaaaattttgacctaatattatctgaagtccattataagtaaccttaatcaaagagatttttcacctaatgagaagcaccaaaggaaacttggatggttctttcatggaagagtaaatgctgggtaaaactgcgtgaccactgaacccaaacccgaatatcccaatagcgacgggtaagttagcgagatcaagagcttttccacccgtgtgaaacccgactccatcaaccgacccaacccagaagagacaaagagcaagcaagatcgaaacaaagactcctccggctaaaagaatggaacacacatattaaagaatatatgaacgaatctcgaagctatattggaaggatcttatgatagaaaatggaacctgagagataggagagtaagctaaggtctttgagccaaactgtaggaagaacaataagagtagctgatatagcaaagatctgaggagaatctagagatactccaacgatgtttaatgtaatgttggggaaaactctcgataaattatcgctcatcatgattatatactccacacaacatacgtataactccatgtacagaagtatctgcaactctcaaaagagatcaagaaccctatatattagtttggagatatgtgaagtatatatgtaaatcatttccatataactcacggagatgatgaggcggcctgtaaatccaaaggcagcttgaccaatgtccgggtaggtacggagatcagaagagctctcaagacatcgtttgaggaggataccggtgtagcaagtgatgatagcaaaggataagagtatacaaagcccgagccatcctccttctttcaccgcgtaaggcattgtgagtagacttattccacaaaggacattgattccttcaccaaaaataggttcaacttaaagagagattgaaacttttctttttgttatgacgataaaatctattcaaccgaaccgaatgcctaaaccctaaagacttttgagacagaatcaatatcgatactactacgtcttaccatttagaacagattggggaaacgagcagaaatttggttctccatacgagagatcggtgttggataacccgacctgagatgaaaggaatgatacatcgtctttctcagagagcagcggttgtttgcttgtggaagacacaaacgaatttgcaatagaggttggacgtctcttgtataaggaagcgatggagctactgaatgatgtctcagtacttctcccttgtatgaaactgaccataggaggtgtaactccggtcaagagatccacagagtgtctgaattttacatgaaaaaaagaaggaagaatcttcacaaacacttcaaataatttcgttagatatcgaaaaacaaagtattttattttacctataactctgaggccagaaagcggaatcattctgggataatgaaaaagatgcattggaatcatcgtcgtcattaacatatgagacatcgacatggcagtcatcgtcatctgtctgaatcaatatgtccctttcttgctcctcaagatccatcttcgtcgtctctgcttcaaaacagagttaaatcagagcaagtaacagattccaggacagaacaaacgaaacaggaaaaaaaggagggaacagagaagtgaaatgaatattggaagaaatataaagagacgacgaagagactcggtattgagttcgatgtgttgtcacgtctgacgtctgtcaactttgtattagtcttaggaaaaaaacactttgtattagtccattgatactacttgatcatatgtaacgaattaaattctggtcgactggtcgttaaatttagagtggaaggtaacgttcacatgtttaaaaggtccaaagtcaaaaggtacatgcgtggcatagatttgccaataaattaaagaaaaaaaggtaaattcaagaaaggcttatcgagctaatttaagcccaataatactgaactatttgggcttgagtcttaaaggcccaatttgtggaggaggcgtcatcgtcttcgcttttccttttcccttgagaggtcgtcgacgaggtttaagatttttaagaatgttgtagtagcttcgcgaataatctcaggtcttctataaaaccaaactagcgattagccgactcttcctctttattattacaaagacgaaaaggcttcgagttttgtaatttcttcttctgttacaagttcttttcactgtgaaagtaattcttcaatg

SEQ ID NO: 27322 - DNA, 3000 bp, Unknown
  misc_feature (1)..( 3000): 2750-1469P.txt file - cDNA_ID_2731405; gDNA_ID_2684240; Annot_ID_137760
ggagaagtactgagacatcattcagtagctccatcgcttccttatacaagagacgtccaacctctattgcaaattcgtttgtgtcttccacaagcaaacaaccgctgctctctgagaaagacgatgtatcattcctttcatctcaggtcgggttatccaacaccgatctctcgtatggagaaccaaatttctgctcgtttccccaatctgttctaaatggtaagacgtagtagtatcgatattgattctgtctcaaaagtctttagggtttaggcattcggttcggttgaatagattttatcgtcataacaaaaagaaaagtttcaatctctctttaagttgaacctatttttggtgaaggaatcaatgtcctttgtggaataagtctactcacaatgccttacgcggtgaaagaaggaggatggctcgggctttgtatactcttatcctttgctatcatcacttgctacaccggtatcctcctcaaacgatgtcttgagagctcttctgatctccgtacctacccggacattggtcaagctgcctttggatttacaggccgcctcatcatctccgtgagttatatggaaatgatttacatatatacttcacatatctccaaactaatatatagggttcttgatctcttttgagagttgcagatacttctgtacatggagttatacgtatgttgtgtggagtatataatcatgatgagcgataatttatcgagagttttccccaacattacattaaacatcgttggagtatctctagattctcctcagatctttgctatatcagctactcttattgttcttcctacagtttggctcaaagaccttagcttactctcctatctctcaggttccattttctatcataagatccttccaatatagcttcgagattcgttcatatattctttaatatgtgtgttccattcttttagccggaggagtctttgtttcgatcttgcttgctctttgtctcttctgggttgggtcggttgatggagtcgggtttcacacgggtggaaaagctcttgatctcgctaacttacccgtcgctattgggatattcgggtttgggttcagtggtcacgcagttttacccagcatttactcttccatgaaagaaccatccaagtttcctttggtgcttctcattaggtgaaaaatctctttgattaaggttacttataatggacttcagataatattaggtcaaaattttcatttctctgtttctttttgcagttttggtttctgcgtattcttttacattgccgtggcgatttgcggctacagtatgtttggtgaggccattcaatcgcagtttacactaaacatgccacaacagtacacagcatctaaaatcgcagtttggacagcggtgagatataactttaaaactcggtaaacatgtttgtctcgacatatatataattactaaaatgtgattggttctttttctcttacttaaggtggtagtaccaatgaccaaatacgcgttagctctcacaccgattgtgctaggtttagaagaacttatgccgccatcagagaagatgagatcgtatggagtatctatctttattaaaacgattttagttctctctactttggttgtcgcacttacattcccattcttcggtaaaatactcttaccttctttttgcatgaaactatacaacaacaacaaaaagcatcttaatttatcgtcgtttgttctaattataactttgcagcgatcatgggggctttgatgggatcattcctcgcaacgcttgtcgtaagtcaccgtttaacataattacagctatcatcgattatataggcatatcacgtatgttaaaaaggattcatattttgtttaccgtgcaggattttatctttccttgtctttgttatctcagtatcttgaagggtagattgagtaagactcaagtaagatatatatatatatattctttttttctgtcataaagtaaaatggttattgtttagagtcaatatattttttacataataatttaatttaaactttatctatttgatcttttggcagattggaatatgcgttttcatcataatctctggcattgtaagcggttgctgcgggacgtactccgccattggaagattagtaggagaattgaattggatggtacaatgaagaacaatgaaacaacatatgttaaattgtgaaacaataagagattgtctttttatatgaaatttaacagagtgatcaagatttgtgaaacgtgaagcagtaattttaataccgtaatgaagctttgttttaacttgtaatcttctattttcacaaaaagatcttaaccttcgtcgacctacttttttttaatttatttttgacaaatcaaatccattccaaatttccaattccacgcatatacctttgacttttgaacatgtgaggggcggatccagaaacttttctagtatatggcacatatacatttatatgaaatatagcgaggtgaaaaatgaagaggaaaaataactgtctaagaagaaaattgaatcttacaacatgttttaacccaaaacttgaactgaaaggtggctataaagataaaattacatattataacaataattttatagaacaaataaggaagtgaaactccaccatctcaatgttttggagaataatcattaccaatggatcaaatatagaacaatgacttcatagtctcattatcctatggcttaaaatttctaattagtatggggcacgtgcctaccctagtggcaatgtagatccgccactaatacttccacactacatatcacgaccagaataaccagaatattaatttgtttatgatcatgtatcaattggattaatacaaactcgacgtgatagcaaatcgaactcagagctcgatctcttttttttttcttatagtattcatttcgctcctttgttgctctgattcgactctgttttgaaacagagacaacgacgatg

SEQ ID NO: 27323 - DNA, 3000 bp, Unknown; identical to SEQ ID NO: 14998
  misc_feature (1)..( 3000): 2750-1469P.txt file - cDNA_ID_2731409; gDNA_ID_2684240; Annot_ID_137759

SEQ ID NO: 27324 - DNA, 3000 bp, Unknown; identical to SEQ ID NO: 14995
  misc_feature (1)..( 3000): 2750-1469P.txt file - cDNA_ID_2731421; gDNA_ID_2684240; Annot_ID_192553

SEQ ID NO: 27325 - DNA, 3000 bp, Unknown; identical to SEQ ID NO: 14995
  misc_feature (1)..( 3000): 2750-1469P.txt file - cDNA_ID_2731421; gDNA_ID_2684240; Annot_ID_137753

SEQ ID NO: 27326 - DNA, 3000 bp, Unknown; identical to SEQ ID NO: 14993
  misc_feature (1)..( 3000): 2750-1469P.txt file - cDNA_ID_2731431; gDNA_ID_2684240; Annot_ID_192549

SEQ ID NO: 27327 - DNA, 3000 bp, Unknown; identical to SEQ ID NO: 14993
  misc_feature (1)..( 3000): 2750-1469P.txt file - cDNA_ID_2731431; gDNA_ID_2684240; Annot_ID_137749

SEQ ID NO: 27328 - DNA, 3003 bp, Unknown
  misc_feature (1)..( 3003): 2750-1469P.txt file - cDNA_ID_2731446; gDNA_ID_2684254; Annot_ID_138080
gtctaatccttttactatacatacgtgtattgtctaccactttcgtcattcgtccaaggatgatatctaattttctttctgcacgacatatatgatatattgtgtgcttaaagaaagctcatgagtcatgtctgatatttgagttcgaatttcgaaaactaatcttgctttactattcatacatcttgtgatatagttactgttgaaagttgaataatgcaaaagaaaacaaaagatagctcatggtgacgatgcctataaaaccattaattattcttcttcccgtcaacgtacttgtacatatatgatgaaatcttgaaaaaaacgaccatcccatcaaaccagattcccatttcctagcataaaatggacttctatagaaaaatacaaaggaaaataaaagtcgaaggcggtgactaaaacaacgagaaaaactcaaacctttgaaaactttagaattcttataaaataataaggaaaattcaaagtctcaatagcgtgggattcactccactcttaccattccccgacttccccctcatttccgccacacttatttccaatcaaatccacacacacacatgttataaatataacacatagtcacatacatacacattattcatttcattcataagacccttcattcatttactcaaagaagtggaagtgaaaaaattagaaaaagagaagaaaaaaaacattgactaccaaatggctccgtgtcgtacgatgatggttctgctctgttttgttctgtttctcgcggcgagtagttcttgtgtagcggctgcaagaattggagccaccatggagatgaagaagaatataaagagattaacgtttaaaaacagccatatttttggttacttacctaaaggcgttcccattcctccttctgctccttctaagagacacaactcttttgttaactctcttcctcattgatttcattttattttattcattgtattcttttaggtttggttttgtagattagatcaacatagggtattatactctttgtatatgcatacgatttatatttacttttgaatttgttcctttttatgtttatagacttaatatatgtttaaggtcattacggccatataaagatcaagaaatcgattaagctttgttagccttctactaaagaatattccatagacctcactcatcatacgctaatcaaacatatgtttttatgcaacttgtaagttatatcattcgtctttctcaaataggtcaatgtttgagttaagacttaagaacgtaataatcaaacatagagaaataaaatcgataggacacatgataagtttattactaattaggaaaacagaaaccaaaaatacaataaaaaagagtaaaagagaggggcattccgagaattgaactcgggacctctcgcaccctaagcgagaatcataccactagaccaaatgcccaatttgcaacattcaatcccaaatcaatcattaactcttacatctattagtctccaccaccatgagtgaaaggattgaaaccacttccaaacaatttctcaagtggccaaaacaaaggctttggtagattctcccaatcataccaatcccatccttcacacttctctggttccatattcttcggttcttgacttggatccaccaacaccgcacgtatcgaaacagagacgtagtgtgatggcgttggtgcttctttgaagacattgtttgtaacagtcaaaagcttcatcttttcaatctttagacctgtttcctccattacttctctcgctgcacattcttcaaagctctctcctgatcaaagaacaaagattagatcaaatcaagatttgggtgatataaagagagaagagagagaggagagagaccgaattcgaggtggccaccgggaagagcgaaagtggagttgccgattgaggaacggcggcgacctaataagattgagtttccgttgagaatgaaaacgacgacggcgactcttggtatcgcttctcctgtcgacattattatcgaacacagtgaaaccctttcttgtcgtgttttagttttgttgacttaatttgagtttaaaacgatgtcgtatcggttatgcgtttatatacgtgttggcaaatgtgtcgccgtgtcggtgtgattggctgtacacaattatcgctgtttctttttccattgcacttgttttcattttatttattaaaaaatttagatgatattatataatatatgttctttatgatgttgccataacgagaacgattatgtaaaaaataacatatacatatacttttctgtttataaatgattatttttttagaaaaaatttatttctaaaatattgatttttttaagttttttatgcaatatttattggttagtattgatgaattgtaattaaaaaaaaaaaattaattatcattgttttttgagttatagaaaactgtaaaacataaaaaataatgtatttataatcaacatttattatgttttcttaaaaaatagaaggagtagtcatttgttagatagtaagacttagccaaattatatgtcatttactgtactttagtttttttttccgatcataagaatgtatgttaaaataacaatcaccaaagaggcacaaaataaattgtaggtccaaagataaaacagagttagttaaaaccagttactcctttcgtagaatttttacccaaaaaaagaaaaaaaaaaatcgtagaatttccttctcttttcttcttaattataatatatcaactgtttgttttgttgtttagtttggaaaggaagaaaattagcttaagaaataagaatatatttttttggggaaagatgactagcaccacaaatttaactacgccataatttactgcgttgaccaccataattagtaattaagcaccatagctaacaaaccatatataatcactcttcaaaatatttaactttgatcactgcaattattcattccttcaccttgttcattgatacaatg

SEQ ID NO: 27329 - DNA, 3003 bp, Unknown
  misc_feature (1)..( 3003): 2750-1469P.txt file - cDNA_ID_2731462; gDNA_ID_2684254; Annot_ID_193067
tgtaactataatgttcatatcgtccgattgtttcttgaatgaacaattattttgtattgatttttttatataatcgtagacacgtataatactatctttgaggtatgaaccgataaatttgttgctaccaataaaaactgaaaacacactgtatttcataaatttaagataccatccgaatatgttctcttactacttactagactactagtccaactcaaattaatttgattaagaagaattaattatatacttgaatccatatctatttaaacactacaatatgtatttctatatcacctctcatcatcccaacacatttaatttatcaattaatatgaaacttcaataaccatccaaatcacatgataagtttgaatgctgaatcagtaataataaataaaaataaaaacatcagcgaacaagaaaattaagcatattttgctaaaccctctcatgttaactatgggaattaatttctttaacaaaaaaagaaagaaaattaagcatattgatagaaaatatcctgagaaaatcgttaaaatgtggatataaatgttgagaaaaaaagacaaataattatttgaaagtataagaaaaggtccatgcaacgtaggaaaaaacatcggggtaaggtgtcgcaacagacgatgtcgtttggtcaacaatttggagatgaaatttaaagtaggagaaaacttgtgatacgttttaagaacgaaaaagtcagctccatcattgtcatttgtcactgttaagtatggacccaaacctcatctcatcctaattttagtaatattccgattccatctcactcgttggttttagattcttatcttccatcgttgagatcgtacagttttggtaagaagacaaagacttcatgtattattgacattttttcgtatttccatcttcggctaatcagacttgactaactaaattatataattctggtggaataatgaaactcgtggcctagttttggaccaccagaactaacttaattaaatgattataccaccagaaccaacttaatttaactaatagattcaattttgtggctcctacatactatataattggatacaaaagtgaaaagaagaaaacttaaatattaactagcgtgcgactaattaaatattatacacatcaaacttttgtaaattgcagcagccactcgttagcgagtttccatgacctcactaagtaatgtttacacataagtatattattgtttccgtttacaatatatataaatgatctcacttataatattgtcaacaatgaatttatgtaaaaatattagacgataagctaattttttttttcatgttgctgaatcaaataatctaatttgcatttgttagatttactcaaaactaaataaacttgaaagtttatcaaatcaatactttatgtaaaagtgactatctgaaaaaaaaaaaaaaaaaaaaaaagtgactatctggaaatgaagcgactttgtccaacttgatgttctgttcataaagccgagcaaaacaacaaataaataaaactaactgaaaataaaattatcattgattagtttagctaattcgtgacttaatgtagtgattagtactatgataatatcatgtgaggcaaatgagaatatatttgactgtatcttttgatcacgtatccacgtcgatacagacaagctgtatatgttgcgcgtacattatggtcaatgttcttacgattcttttcacatttcttttccagtgctaatacaaatatttttatcagtatacacgttatggattcattgtataacttgtcatcggtgggaataatatttctcatctgttatttatccgttatgtcattcgtcgatgtacgacccgcttcaaaataaaagaatttcgtaattagtaaagcaaatacaaattgtcaattcaccaaatagtgatcaaatatatgtttgtcaaaaaaaattcttatatcttaagaagatcagatagctgcattaaatctttgaatatccgcttgattattcgaaacgagtatcataacatcaacaaaactagtagaaagtatacaagtaatgaaagtaattatatatatggactatatataacatttgtctaacatttgatagtatttgttttttctatgtcaaacagtgatttgttatatcgattcataacgaaccatcaagttttggccttaaatgttggcaagaaatatttataaatgcgtcggtcaattgcgtgacaaactttactacagtcattattgtagaatgatagtatatagtattactttgatagggagtagcatgttagttaagagtttaaaagcaccaatttcatataatatacaattatgaaagggaaaatataattaactatctcgcaaacaggattatgaagtcaattagcttacgtacatcgaggtcaacgaagtaaacaaatttgccaaatcgttgtcatataatagttgtacggaaatggtcaaaacacttcatcaagaaagttgatttctattatttcaatggcttaatggtataccatataatatcatatatttaaaaatgtgagattttgtgatacacatcaattgacgtaaatacattttaggaagactgaaagaaaaacaaatttaaatttaaacttaagattagccgagtcttacttagcttcaaatcgataattgatggggacttttctaaaccagagtttatgatcgggtggcgaagaattagatttatggatcttatcactaaaacaacatgagaagcccatttaataagcacttcatcattaatgggcctaaaaataagcccgtttattaaaccttacatatccgaatctgattttaatcgacgtgtcctttgtggtgtaaatctactaattaatttgaatgaacagaaaaaaaaaaaaaaaaaaactagtggtgcgaaatcaacgactgtttaaggaattttgattttttgtcttccaacaaaattcttccggtgaaaaaaattccgccatg

SEQ ID NO: 27330 - DNA, 3003 bp, Unknown; identical to SEQ ID NO: 27329
  misc_feature (1)..( 3003): 2750-1469P.txt file - cDNA_ID_2731462; gDNA_ID_2684254; Annot_ID_138073

SEQ ID NO: 27331 - DNA, 200 bp, Unknown; identical to SEQ ID NO: 265
  misc_feature (1)..( 200): 2750-1469P.txt file - cDNA_ID_2731470; gDNA_ID_99055; Annot_ID_147327

SEQ ID NO: 27332 - DNA, 3003 bp, Unknown
  misc_feature (1)..( 3003): 2750-1469P.txt file - cDNA_ID_2781280; gDNA_ID_1620759; Annot_ID_49964
attaattaaaaaaaaatatgcttctcgtttaaccaaaataccattcacatataccctttaaaatttttaaatgattaatttcatgtagaaatcatatagactgtaaatgggttcacgaaaaaaaaactggaaaacgatgaatattgatagaatgaataaaaatggtattgatagaatgaataaaaatgagaatgtaacaaaaaagatacgtgaaatttgctaatcccatgacaccgtgcttgcactctttttaagatctaaaaacttatatatttcttctaactagtagtaaaaaactaacccttttcttaatacaacttttttgcaataatatatatcttaactggtttaaatcttatggtataacaatttgtcccaaaaaaaaaaaaacttatggtatacaattaaaaaacagctactaatagtctaatacttcttgtttttttcatcagaagctactaatacaaaccattaaagttttttatttatttctatcaattatttctcgtggttttttgaatggtcaaagatcaaattgtatttaataacgtcacaaaataatctgagaaaaaacgagagaaatggtttgcgaaagtttctatcagactagagcaaactgaaaagacagaaaaacgaaaataggttagcaagcaaattgccacttaaaatatttcattaaattaacaactcaacaagaccttgttccggcaaacacatacagtgcgtcggattataaaaacatagtcggcattggtaaaatacaagttaaatgcgtattaaacataaacacataagctttacttttagttttattgtagtgaagcaatagttttgttaaaacatttttccaggaaaataaatcaagaatgatgcggcaatgcaaatcatctatctagcatcaacacctttttgacttttggattcatttctaaattaactagtataatttataatttaggatgatttgttttatattgaattaaaatggatacagaatctatgatcgagtagattacaaaaaatgattaaaaaaagaagaagaattaagttgaacaaaaaaaattgaaccaaactcgcatgaaatagtgaatatacagggtatgatgggaaccaaatatatatttaaattttaaacttacatctatcttaatttttgcttcccatgttatcttttggtactcatatcatagttcatagattatgtgcgtacacactacacatatgattatgatttatgaatactgcattaaactgtttcaaatgcacactttaatttctctttttctccaaccaaactttaatctagatctaaacattatatattcataatcatgtgtacccattagacaattattggaaaataaaaaattatatcacgcgcatgaatggagtctaagatcgcccaagagaaaagtaggtagcagccacgaccgaagtctttgttctcactttggttaacgtttttaagacgatagggagagtgagaaagagacattgtgttattcaacagtttattatgtaatataagcttaattgcaactagtaactaactaataacattttacattgtgtatacgtaacgacggcttatggttgtgatattgttttggatgaattattgagttagaaaacaggttttttaataaagtgaaaagaaagaagtaatattttatggttttataccataatgcactctttaagttgagtaggaatattcgataaatttaattccaatatataattatttgacttgtattctttaattatgaaacatcagatcaacgtagaaagtgtgaaggaattttaagatgaattgatatattaaaaggtggcgaatattatcaaacaagccaccctgtaaatttggtagtttatatcccatatgctttctatttttctgaaacactgatacataatatctcctaaaaacaaatatattagagaatttttttgataaaggtttcttagttcttacatcaattcgaaagatgatatacatgctatcaatatcaccatgaattatccttgatactagaaaattgatggcacacttgatataagaacttgtattttcaatatacatttattctatacaaaaaaaaaaaaaaaatcctagaacaagtgggtagagaatctctaacaagtaagtttcaataaatatacaagacaaaataaattatgtgataaatgataaaaagagacaaattaagcgagttttatggatcaacagatgatttgtctgataaaaataaaatctttatactggaaataattcggacggtgtgcaaagccaaatctaaaatacaaaagaagtaaagtgttacacatttgaaaagaatcctagaatgttacattattgcaattttaaaaattccttataaaaaggatatcaagtaattttcgaaatcagtatcctgaaaatggaaaatgtaagtgatagaactagtctcctttttaggaagggtctcttctcaaatttggttatatgattcaaacgatgggctcaactagtaaactttgtcattcagagttgtttcgaaatacttgaaatctctcattattgttctcttttttcgtaaatttttcaaactatttcgaataaaataaccccaaaagggaagagaaaagaaaccaattgaagtgtataaatagagacccaaaaggaaaatgccaaatgaatcaatctcttaaagaaaggagatggtaggggtccatctatgatgtgctcacatacatgctccacgaactcttgtttcttttactttaacttcttcttttttaacaatttgaatgaaacatatttatacatcttatctatgactatgactcgcacatattttctcagaattttatttattttattgaaagccaatctctctcatttgcgcctataaatagcaaccctctctcattctacaagtctcacatcaaagcaattaacaaatacacaacttgtaacttcaaatagattactttcaaagaagagagagagaaagaaagatg

SEQ ID NO: 27333 - DNA, 3003 bp, Unknown; identical to SEQ ID NO: 27332
  misc_feature (1)..( 3003): 2750-1469P.txt file - cDNA_ID_2781280; gDNA_ID_1620759; Annot_ID_167112

SEQ ID NO: 27334 - DNA, 3000 bp, Unknown
  misc_feature (1)..( 3000): 2750-1469P.txt file - cDNA_ID_2781294; gDNA_ID_2214503; Annot_ID_133708
caaaacttatagagagaagtgaaagggttgattgatatatcctggtcagataacaaggctaacaaaacttatggagagaactaaatctaaccctgaaaaaggtggacattaagacgaaagaagaagtggtgctgcagaatgtaatctgttatcatcctcccgatgtcaggtgccattttgcaacaataatttcttcaagtagcatggatgcatgcgtttctgagttcacaaacctctttccctcaagccccaaaacaagtgcgtgatgggtactctcatttggaagcattcccctttgaaccatcaaaccaatcaactcacatgctttctcaatatctcctacactgcaatatccatggatgagcgtattatacaaaacaacatctggctttaaccccgcatcaagcaacttattaaacaaaacaatagctttctccattctctgcgctttgcaatagccatgaagtaatgcactgcatgttacaacatcaggtttcattctaagatcagccatgtagaaccacaaaataaacgcttcctgaaaatcccctctcttcgagaacccaccaatcacatctgtgaatgctaatgtactaggaacaaagcctcgtcggataagctcactgataatttcatttgcttcatcgatatatcctctaacaaccatgctatgtatcaaaatattgtaggttgcaacatctggagagataccagcagatctcatctcatcaataagctcaaaaactttattcagctgatgtgtcttcccatacccatgcatcagattgttatatgttacgacatccagtttgagaccttcagttttcatattccgaaacacagattctgcatcacttatgcttccaaacctgctgcaagctccaataagtattgtagatgttgtcaaggatggcgggttcccgcttttcaacagcgccccgaagtattgaaaagctttatcagttctgcctagattacaatacccatcaatcatagtagtataacaaacacaatcaggaaggagtcccaactcgaaaatctcctgaaatatggtagaagctctgagcatgtctcctgtggaacatatatttgacagaaagctactgtacacaaaaatgtttggtctaagacgaaaagaatgaatgagcttaatggcttcctctggtttccccaccttacagaacccgtcgataacagaactgacggatacagaatcctgagagataccaaagagtttgagtttaaacaataccgaagtcgcttcttttagaaaccctgccttacacaatttatcaataaaaactgtaaatgccacaatatcaggtctgatgccgtagtgtttcattcccataagcaattcccaacctttatcaaaatagccatccgagcaatacttccttatgaataggctaaggacagcagcatttagatgcctccctcgactaagcatgtgctcaacaaattcccgagctaactccaagccatgaactcgtagaatttccttaagcaacgaaatacaaacccctcgtgaaggaaagatgccaaactggtccactttgtaagttagcttcagggccatgtttacctttctctctctaatgcaacaatcaatcagtatgctaaacacagtctctaaaaccctacgatcaatacgagtttcaaaaagatccttcataactaaacacaaagacctttcttctccactacatttcttcaccagacagagaagcatatctacagctctataattcatatttccagataccaaaatatgaatcatcctgctgatagacctgctcgagtgctcaacaccaatccacaactctgaccacctaaagaagtatagaacaatagatgcatccaaagtctcctcaaacaaatcatccaaaattctaatgacagtgtattgatcaagctcagtactaaacccactctcatatttctgtatccaattgtgtttcacaagcacatttctaatagtctcaacacaatcccttgggacatcaatattcttcagaatcgaaacaaaatcttcaccaaaatgcttacttgaactatgatagtaccgtgatccagagtaaggtagcctactagaatcagtctggaatcttgagttattctcagacaacgaagcaagagaaaaggtcctacaccagaaatatcgaaaagccttggttcttgtacaaaaatgattcaatccagaagacttgaggttaaagattgaaacccacataaacagggactggtcacaagttatctgaagaagaaacaaaatcaaattttgtcaatttttgtggttctgagagaaacccacatcataaaatttatcattactctcaagcattgtatcactcaagtagctgcaaaaacttacaaaatggcttgtcttaattttgatcgcccggaataataacggcgacggcgagcagagagagagatggagagattggtagagacgatgtgaaattccggttttttctcttccagaaatcaaaccggtgtcctaatctaataacaaaaactgggccttcttttatgggcttgaatcggaatctaaggcccattcacgtttcttatgattattatttatgatttgtgattccggtttgaccacaataaaaagagagagaaatatcattttgattccggttttctttctccctggattcgaaccggttttttagaaaccaattgcaataagatttcttattggaaagagagagaaatatgattttacccataatgtatttatggggttattatgcttataggctatatacgttatataccttaacgaaattttttacccataatgtattacagtatgggatttgggccatttggcaaaacctttttttcacatcacttccaaatgggcttttaaatgggtcttaaatctctcctgaaaaagcccatataaataagacaaatactccgacatatctcggcgacggctaagtcttcctctctctctctctctctctctctctctctgcaatg

SEQ ID NO: 27335 - DNA, 3000 bp, Unknown
  misc_feature (1)..( 3000): 2750-1469P.txt file - cDNA_ID_2781294; gDNA_ID_2214503; Annot_ID_184048
tatacaaaacaacatctggctttaaccccgcatcaagcaacttattaaacaaaacaatagctttctccattctctgcgctttgcaatagccatgaagtaatgcactgcatgttacaacatcaggtttcattctaagatcagccatgtagaaccacaaaataaacgcttcctgaaaatcccctctcttcgagaacccaccaatcacatctgtgaatgctaatgtactaggaacaaagcctcgtcggataagctcactgataatttcatttgcttcatcgatatatcctctaacaaccatgctatgtatcaaaatattgtaggttgcaacatctggagagataccagcagatctcatctcatcaataagctcaaaaactttattcagctgatgtgtcttcccatacccatgcatcagattgttatatgttacgacatccagtttgagaccttcagttttcatattccgaaacacagattctgcatcacttatgcttccaaacctgctgcaagctccaataagtattgtagatgttgtcaaggatggcgggttcccgcttttcaacagcgccccgaagtattgaaaagctttatcagttctgcctagattacaatacccatcaatcatagtagtataacaaacacaatcaggaaggagtcccaactcgaaaatctcctgaaatatggtagaagctctgagcatgtctcctgtggaacatatatttgacagaaagctactgtacacaaaaatgtttggtctaagacgaaaagaatgaatgagcttaatggcttcctctggtttccccaccttacagaacccgtcgataacagaactgacggatacagaatcctgagagataccaaagagtttgagtttaaacaataccgaagtcgcttcttttagaaaccctgccttacacaatttatcaataaaaactgtaaatgccacaatatcaggtctgatgccgtagtgtttcattcccataagcaattcccaacctttatcaaaatagccatccgagcaatacttccttatgaataggctaaggacagcagcatttagatgcctccctcgactaagcatgtgctcaacaaattcccgagctaactccaagccatgaactcgtagaatttccttaagcaacgaaatacaaacccctcgtgaaggaaagatgccaaactggtccactttgtaagttagcttcagggccatgtttacctttctctctctaatgcaacaatcaatcagtatgctaaacacagtctctaaaaccctacgatcaatacgagtttcaaaaagatccttcataactaaacacaaagacctttcttctccactacatttcttcaccagacagagaagcatatctacagctctataattcatatttccagataccaaaatatgaatcatcctgctgatagacctgctcgagtgctcaacaccaatccacaactctgaccacctaaagaagtatagaacaatagatgcatccaaagtctcctcaaacaaatcatccaaaattctaatgacagtgtattgatcaagctcagtactaaacccactctcatatttctgtatccaattgtgtttcacaagcacatttctaatagtctcaacacaatcccttgggacatcaatattcttcagaatcgaaacaaaatcttcaccaaaatgcttacttgaactatgatagtaccgtgatccagagtaaggtagcctactagaatcagtctggaatcttgagttattctcagacaacgaagcaagagaaaaggtcctacaccagaaatatcgaaaagccttggttcttgtacaaaaatgattcaatccagaagacttgaggttaaagattgaaacccacataaacagggactggtcacaagttatctgaagaagaaacaaaatcaaattttgtcaatttttgtggttctgagagaaacccacatcataaaatttatcattactctcaagcattgtatcactcaagtagctgcaaaaacttacaaaatggcttgtcttaattttgatcgcccggaataataacggcgacggcgagcagagagagagatggagagattggtagagacgatgtgaaattccggttttttctcttccagaaatcaaaccggtgtcctaatctaataacaaaaactgggccttcttttatgggcttgaatcggaatctaaggcccattcacgtttcttatgattattatttatgatttgtgattccggtttgaccacaataaaaagagagagaaatatcattttgattccggttttctttctccctggattcgaaccggttttttagaaaccaattgcaataagatttcttattggaaagagagagaaatatgattttacccataatgtatttatggggttattatgcttataggctatatacgttatataccttaacgaaattttttacccataatgtattacagtatgggatttgggccatttggcaaaacctttttttcacatcacttccaaatgggcttttaaatgggtcttaaatctctcctgaaaaagcccatataaataagacaaatactccgacatatctcggcgacggctaagtcttcctctctctctctctctctctctctctctctgcaatggactctctggtagcgagctacgcttcgtcggacgaagaagaagatcttcaaccacgtcgagaagctttcactgtaaaatcctcagaaccttccgcttcgtctctattctcagctattcctcaacctaaagaactcaaatcctccgaagatggtgatttaggctcatcttcctctcgaggaaaatcttcttctttcctctcatctctccctcctcccaaatcctcaatttcacggaaaaaaaatcccaatccgtcgtcaattccgaaacgtgtcgtccagatcaggcttccagtaaaccctagaccgagcaatcttgacgacgaagacgacgaagaagaagagaaagctaggaagaagcgtaaacagatg

SEQ ID NO: 27336 - DNA, 3003 bp, Unknown
  misc_feature (1)..( 3003): 2750-1469P.txt file - cDNA_ID_2781298; gDNA_ID_1620434; Annot_ID_156949
acattaagctacaaaaagaaattgaattgtgcaagggttttcgtcgaagaaaatattaaaattctgtaccaattaattaaattcctaatccctagaaaaataaatacaattacagttgaccacaagatttaattaagctaaacgtggctaataagtgtttgatcgagatacggtctccgtctttggagccgtcaaacaagcggccaaagcactctctagtttactgactacctccaccattgacggccttttccgactacacggcatcaaacactccgctgccaagtatccgacatgagccaccgcctcgatttcgtaaggggtcggcggtggaatcctctggtcaagtattctatgagcctcatccagcaaaatgtatggtacaacatattccactaagtttctagggttttcgtcttcgttattgtgtatcgctttgtgaccagacagcaactccagcaacaccacgccaaagctgtaaacatcgctcttggttgtgagctgttgaaacttgtagtactccgggtcgatatatcccaatgtaccggcagcgtgtaaagagagatgtgagacgtcatcttcttccgttggacccatttgagataggccgaaatctgaaactttggctgtccatgtggcgtccaaaagtatgtttgatgactttatgtcacggtggatcaccggaggcacgataaactcatgaaggtattggatcccacgagcagcgtcaagcgcgatcatcaagcgtgtttgccacgaaagagggtcaaattgaggattgtgaaggtgatcggctagagatccatttttcatgtactcgtacaccaaaatcctctcttctgtgtcctcatagaaacccagaagtcgaacaagatttttgtggttaagccgcgacatagactctagctcgttcacgaacgctgaatccttatctgctcgtcggtgtctcatcgttgtcccagacaatgtaggatttgttagctcagctcgtttgattgcgacatgacgtccatccgacaaaacaccttgataaacagagccgaagctgcctataccaagatgaaaccggacagagaaaccatccgtggctagagctagctcgtcaattgagaactccattagctgcccaggattacctaaacttgctagagtgcacagcctcttctcgagcttgggtatgtctattgtcctagtatcatcaagacgtccagagtcatggacacggcatcgacagtggcttttaaagatcaagaaactgatgacaaggagcaaggaaaacgttccaacgcatccgaccactagaaacgcaatgtttcttctgctccaagttttgttcttagagttttgagccctagtatcaggaaactctccatcatttcttttcaaatcgcaaatcatcaactcattgccgcataaggactgtgatcctgacaatggacggtaagggcattctcttctacacggtcctggcattaccacttgagaaattaggccttggaatggagtgaaaacaccggatttaaaattctcattcccccaacaaattagagtgtaatttcttgtggcaacaccgcaaaacattggccctttagcatatattgatgtaaaatgaatgtccttaagcgtttgaggcaaactaaagttgttgttgttgccccaacacaccacagttccattagaccatctaacaccgcaaccacggtcttccccaaccgctagtgctaagaacttttcacgtggcagcgactgtgtttgtccccaacactcgacatcattgtcaacagtgatcgcacacgcttgtcgtgatccagccgctatcgcgatgtagtggtctccactcggcactttggctataccttcacaactgatcataccaggtggctgagatagcccacagaaaaaattatctcccaaggcaatggaacggtaattatccggccgtggcagatagtacggttgccagcaacggaggcgccttgagactctttcaactccacaaatgcggaaattcccggcttctagctcttcgagctcaggaccgtggtagattcttttgtgcaacatattagttccatcaacagagaatctccaacaaagaagtgtggaagtgttggaatccagccgcgatatcaatccgcacacaaacccattccctgaaacaacccccgaaaaccttcgatttcgaaggttaccggttaaagaaaatggaatcgaatttaaagggaaactggaacattgaagataagagtggttgttgagagcacatacaagagtctgattagagatgtgggagatggagacggtggagagggagaagcaaacaaaggagaaggaagatagaacaagaagaaggagagacacaaagtaagaggagaaacaagagattgagatggtaagtgccattgaagaagagttctcatggcgtgtgaatgttttatgtttgaggagttgtgtttttaagacggcaaatcaacgcggttagagagacatgagacagagacagagacacctccttaccaagagaccaaaactaagtcttatttacttcattcatagtgatttttctctattctaaattatttttatggtcaactctttgaaaatttcaacacttactttcagtggcatcgtcgtatctaaaaactatacttaatcctttggttgaaacaaaataaagaatgactttcgtttatatattccaagatcttttaacattcataatagggcttgtacaaatccttcatgagaggatgacactcttcgtcatttaatgaaagcaaatgtggcccattaagtataattgaagcccaattacctttcacacagttaacaattaagtttttggtctgatcacaatgtttgcgttagctgcgaaacaagatgctgttacagtcatagaagtcttatgcgtacacgactccgatttcaaaatctgaacggaatataaactctcgacgacgaaaatctcaaaaaccccaaaatctcctccaactccgagttatg

SEQ ID NO: 27337 - DNA, 1746 bp, Unknown; identical to SEQ ID NO: 973
  misc_feature (1)..( 1746): 2750-1469P.txt file - cDNA_ID_2781324; gDNA_ID_1620343; Annot_ID_154045

SEQ ID NO: 27338 - DNA, 3003 bp, Unknown
  misc_feature (1)..( 3003): 2750-1469P.txt file - cDNA_ID_2781800; gDNA_ID_2214559; Annot_ID_134862
cagcaactacatgaagttcgtcaagagcctcgctgctgacatggatgatcacgttctcaaagcctaaatatccctttcacatcaacccatcatcacctaatatcatgatcatcatcaccctcatacgtacattgctccttttgtgtgtgtgtgtgtgtatcgtttttatggtgttttcaatataataaatgggggtttacatgtatggtttcatctactataatatgctttgatgttgtttattatggttgaggtttcatgtatgctcatctacgcatgtatccttgttaattaatgattttcaagagttatcaatcaatactgcccttttttaaagtgttgcactacgtatgtatcagcttccacaagctcacattgtatacagcatttgtggttgtattattcatcattttgtacgttcaattatggttattattcatacacagtattcattatatttatagtggttgtatagtatatttagttgctgttgctgtctttgtatgttcatttagtgtatagtaattaatgctgactttataagttcatatagtggttgtaacatttatcatttctatgagtatatattattactcatgtcctccgaaattggacaacatttaaacgatacaagcaaggaagacaataaaaatacaaaaatatttccttcgaaactctagtaaagaaagcatataatgaaaccagcatttagcaaagatgaggggtctatgtgggatgggggtcttgttggttcaatgatgtaaaaaatcattacgatttgttttaaggctattgtttttaatgggttgatatatgaatgacgaggacaatggtcatgtatatggattttgtcaaacctactaattagaattgtgttgtatgataagaacttggaaaacgtgaattatgtatggtatacagcacaatcgcaagtatcagtaaatatctattaatctaacatataaattttgagtttatatgattctatatatctttgtaaataaataatgtttatgctgtgcttgacaaaaaaaatgattatgtgtacgtacgtatgctaagagatgatcaaaattataactagagacattattagagcaaagtaccagataagacttttaaagatatttggaatattatatgaaatatgaaagtatcagtttaataaatactaaatgtagaaaaattacaatcgtgacagttagcttaactcaaactttatactaaaaactatctatactattaattgggaatcatcggaaaatttacaaccttttgaaacccgcacgtatgtgcgggtcaggatctagtgattctttaaatttggaaactcgaatatctcaaacgatattaattattcaggatattgatattacatggatggatcatggaaataaagcgacaaattgtttggagcagaatggtactatacatcatcaaatggagagacgtcaaccatgagaactgcaaatctttaagaagtctatcctcactacatgcagaagtggaagcgcttctctgatgatgaggtgtatgattggcgctaacaatcaagacgtagcttttctaatagactattcagatcaggtgaagatggtgtctttcctaaccgaatgaccagccttctcagtgtatttggaggatttgaaaaacgacaatgaagaatttaaaagttttcttttatctttaaattttagtacaaatgttaaagcggataatttggcacgaaaagttctataccaaatcacatcatatcacatatgcaaacaacattcttcgggaatggatctttaatttgagttctaactaatatcggttgacaaaagaaaaaagtttagaaataatattatctcatttaaactagatacataaatgaaacaacaacacacccatacacacaaaaagcgactctattttgttaaatagatgaagagcctcctctagaagatgaagtgatatctctagaaccagcactttcaacctagccacatagtgatggattgattaaggacaacacctcagaaaaagacttgtctatgccatgtatactttcgctaagaagtaagaagggagtgatttggcgccaggtaattgcaatgtttgaagcggtctttttgggggtctagctacttcatccttccaactgtagctatcttgagtctcagggaagatcataaccattgtgagcttgtagaaaaaggcttctacattgtcactgtgggcactcgtgaactgccagccaattttagaggtctatatagaatcttttttatcaagaaaatgtgtataacatataagagcaccctcaatagtgtatcttagcaaaatcttaggattaaaagcaattaaaataaagcaaaccaacaatccaaagctaagaagtgtatttttctttagatgtttttcttaagttaagatgtttttcttaagttaagatgtttatatgtgttatttgatgattggtttaaaaaatgaacaaaaatagaagatattgttttagaaaaaatgaacaaaatagaagatattgttttaaaaatatcaatgaaagtcacagctggcaggaaatctacggtatcgttatctggtggacttttcggcattcaaggaacaatacatcatatcaacaaacaataattatggtttgtttaaggtttaaattaaaattgatgtatgcatttgtctactctaatccttatcattgattcattatatgcttctttttttgttggtaaaaccattatatgcattttgtcaaacctatccttatcttaataacaaacaaaatacattgtatgataagaacttggacaacgtgaaatatgactcattctaaatatattagcagtagatatcaaataagtataaaacccggctcatctattttacgtctaaaccgttacacactctatatataaacgaaggaagatcacacgtgaaaatagtcatcaaccaaagtaagaagcgcacacacacaacatatttctttcactacccaaagagatg

SEQ ID NO: 27339 - DNA, 3003 bp, Unknown; identical to SEQ ID NO: 27338
  misc_feature (1)..( 3003): 2750-1469P.txt file - cDNA_ID_2781800; gDNA_ID_2214559; Annot_ID_185848

SEQ ID NO: 27340 - DNA, 3000 bp, Unknown; identical to SEQ ID NO: 1504
  misc_feature (1)..( 3000): 2750-1469P.txt file - cDNA_ID_2781806; gDNA_ID_1620409; Annot_ID_156211

SEQ ID NO: 27341 - DNA, 3000 bp, Unknown; identical to SEQ ID NO: 2988
  misc_feature (1)..( 3000): 2750-1469P.txt file - cDNA_ID_2781818; gDNA_ID_1620620; Annot_ID_46997

SEQ ID NO: 27342 - DNA, 3000 bp, Unknown; identical to SEQ ID NO: 2988
  misc_feature (1)..( 3000): 2750-1469P.txt file - cDNA_ID_2781818; gDNA_ID_1620620; Annot_ID_162246

SEQ ID NO: 27343 - DNA, 3000 bp, Unknown; identical to SEQ ID NO: 2988
  misc_feature (1)..( 3000): 2750-1469P.txt file - cDNA_ID_2781818; gDNA_ID_2926189; Annot_ID_140960

SEQ ID NO: 27344 - DNA, 3000 bp, Unknown; identical to SEQ ID NO: 2988
  misc_feature (1)..( 3000): 2750-1469P.txt file - cDNA_ID_2781818; gDNA_ID_2926189; Annot_ID_200908

SEQ ID NO: 27345 - DNA, 3003 bp, Unknown
  misc_feature (1)..( 3003): 2750-1469P.txt file - cDNA_ID_2781831; gDNA_ID_2214528; Annot_ID_134235
taggtgatccagcaagagaggtttttaaagatgcatgtcaagagctcatgcaaatgaacagacatgtgagaagcgtttttgataaggctgttgctgagtataaggatgaacaaaagcgtaaggaggaggctgaagaagaagagcttaagaggcagagggatctatttgggtccatggacattgaaaacaactgataaccattgtattctcctatggagtttatactatttttatcttaaatccagattcgtccttcaaattgactcgtcaaattcataatccacaccaaaatttaaccaagaagattcttatattgcttataaccattgtcactactactctgcttcttatatttgaaagatggtgaagtcttcaccgaattcacatagtcaaaattaacaaaaggttatataatgaaacaaagaaaaaaaatactatggatggattttgatttagcaaaatagattgtttgaatattgattgataaatcctcttagcctacgcagagtatcataactactaataacgcaagcgatagttacagaaactataagaacttaatagaagagagttttaaaagtaaacagcaactggaagttgaggtgttcttatcatctgtttcttcaataagtttcttcttgctcgtactcagcttcttcctcttcatattctccttcttcatcagccgttgcatcttgatactgctgatactcagagacaagatcgttcatgttgctttcagcttcagtgaactccatctcatccataccttcacctgtgtaccaatgcaagaaagcctttctcctgaacatagcagtgaattgctcactgacacgcctgaacatctcttggatcgaagttgagttaccaatgaacgttgaagccatcttcagaccagtagggggaatgtcacagacggttgatttgacgttgttagggatccattccacaaagtaggaggagttcttgttctgtacgttcagcatctgttcatcgacctccttggtgctcatctttccacggaacatggctgaagcagtgaggtagcgaccgtgtcttgggtcagcagcacacatcatgttcttagcatcccacatttgctgagtgagctctgggacagtgaggttacggtactgctgagatccacgagaggtgagaggagcaaatcccaccatgaagaagtggagacgagggaatgggatcagattcacagctagctttcgcagatcagagttcagttgaccagggaacctaagacagcaggttacaccagacatggttgcagagatcaagtggttcagatcaccaactgcacaattcagaaaacaaacaaaaaaatatgtgagtgaagtttcaatactaatcaataactaagcctgaaacaataaaccacagagacagatacagtaacaacattgactcataatcgaagaacattggaatacttacaacttggagtgctaagcttgagtgtacggaagcaaatgtcatacaaagcttcgttgtcaagaaccatacactcatcagcgttctcaacaagctggtgcacagatagtgttgcgttgtaaggctccacaacagtgtcagacaccttaggcgatgggaacacagagaaagtcatcatcatacggtctgggtactcctccctgatcttagatatcaacaaagttcccattccagaaccagttcctcctcccaaggaatggcacacctgaaatcctgtaaatccaaacaaccaaaaccataagcaaacaacgaatacaaaaccgaatccgtattccacagttcaaaatcagaaatctaaacctaaaaacaatcatacactaccaatacccaacctaaatttacagatccaaaaacctaaatagacaaaaacctaaataaggaagacggatttcaaataccttgaaggcagtcacagttctcagcctctttgcgaacaacatcaaggaccgaatcaataagctcagcaccttcagtgtagtgacctttagcccagttattcccagcaccggactgaccgaagacgaagttatccggtcgaaagatctgaccgtacggaccagatctgacactgtccatggttccaggctccaaatccatgagaacagcgcgaggaacgtaccttccacaactcgcctcgttgtagtatacattaaccctctcaagctgtaactcggaatctcctacataccgtcccgtctgatcaatcccgtgctcgagattaaccacttcccaaaacttggaaccgatttggtttccgcattgacctccttgaatatgaagaatctcacgcatcttcgctcacagagaagaaaaccctaaaactggatctaaaaagagagagagagagagagattttgaaaaagggaaaggagaagcagagaggatcttttgttttatgagagagagaagaagaggagggtccatttataaagaaaaggaggttttaacggctaatatttggtaattcgaaatcgaatcgacggtttagataatgccacgtaaatcgaggtggcaacgggtggcaaaattcaaaaattaatggctcgtgataaaaagtttttttgaatttcgtaaaaaaatatgttcgtgtgaatgacagctggattccattaaggagagcagttactaaaacatcgtcgcactcgcacgtgctttatgagagataaaaaagcggttccaacctggcaatcgcacgtgagagacttcttattgggcctaaaatgggcttttactcttttcatttcaaatctgcatgacttaaaacggagtgatgtgcactagcaaaatcctcagacggcaagcatgtgtttgtaaagtgaaactcatcgttttaatgattgaatatgcttattggatcctgaaccggagcctgaaccggagcgtgaaccaaaaaatacagtcaatcggaaaatgaatttcagattcaaacttgttcatcgaaattttgcttgaagattcgaatcgagaagtccgtggaagaggaagaagaagaagatg

SEQ ID NO: 27346 - DNA, 3003 bp, Unknown; identical to SEQ ID NO: 27345
  misc_feature (1)..( 3003): 2750-1469P.txt file - cDNA_ID_2781831; gDNA_ID_2214528; Annot_ID_184852

SEQ ID NO: 27347 - DNA, 3003 bp, Unknown
  misc_feature (1)..( 3003): 2750-1469P.txt file - cDNA_ID_2781838; gDNA_ID_1620671; Annot_ID_48169
gtggtcaacacagctggtggtgtgtggtactcatatgccaagtaccgacagaaaaaggctaaaccggctaagctaatgtctgatttggaagctcacaaaaaatgagaatttcggtccggtttggtttcgtttgggaaggcattaccccggtttatagactttgccactcaaatcaatgatcagaacgaaccgatgtatttgagagttgaaccaggaaaatcggtcctagagtgagatttaattttgatgtgaaacttcattgatcagttaatttctcgtttaggttaagaaaaaaaaaaaatcaatacctatttttatatgtagatgcaatcatgctaatgtataattgttaagttgtggctgtagcataaccatattaaacattagacatgtgttggtatcaactatcaactatcaagaacacatgaaatgtttgttctatttaatggtggaaaagttttttaaatgggtctactactactactaattaatactttggattaagacattttgtgatagaaaaagacagcacataagtcattacaacgtcagtgacctctgtttaagtcttaattcgtttccttaaatctacggtttgtgcatacggatcataactaatatttttggtttttgaatttgcaaacgtttttagttggactttagagatttcaaataaatgaagataaataaatgactcataattcatacgaaaggctatagcatttatagagttcattttcttggcgtgaaattagtagtacattcatttattccatgattttgctcagaatattcaaatttataaaagaaatggacattactttggaagagttgaaaaacttataaaacaaaaaacataacaatagaaaactttaatcgattaaatgaattattgaatgattgtatccactaattacaattattgaaataaatatgtataaagtagagggtgtaaagcactgtatgaaaagattatgataacatagttcaaagaatatcattatgagtcataactaataatcattcaccaatacacaatcgatcatcttaatatatacatgattaatttggattcattttaaagcacacttaaaaatatatcatgtccaataatttgtgaattattatttcatcagaattgtcatagttatctaaccatttgtgtttagggcagaactgtgtctgaggctaaattcattaaaaaatgtcactaaattctgcagtttttgtttttttccatctatgacgttatataatagctagccagtaattattaaaaccgtatagaatatattcttgagtctaactttaatctacatgacaaatttttaattactcagcaccgattggtttctgtagatgcatgtcacaagcaacacaaaataaaaaaaggtattacaaaaaaatagtactaacctacaaaattacttatttataattcttttgatctttctccttttagcttttccttttctcttattagtgtttatatgatactttcgtaaaacgttaggtattgtatagtaaataaaaccttaaaaatgccaacgaatatccttatcttctagtgttctacatgtgttgatatcaccaccgacaagtatctcgggtaacctaattgttggttggaactttcagaatttttaaaactgaaaaattgacattatccttctaatgaatcacattcttcttttttttgtcaaatacttccctttgtcaaaggcatgcaccactaaattatcttttgttttacaaaatgaccaaaattagcggcaatattttacgtcaacacttgaccaattttgattgttagagagcactttgtcaataaaccaaagtataatgtttccctccttactctcctaatgtataatatatattttgattatagaactcatagttaatattgagttgcatccctttgttttaacagtaaggctttgacttacgtttgtgattataccaattaccaagtatgatcaacactcaagatttttttttgacaagaatataataatgaaaatgcttatgctttgagtaaattaatcaggaaaacttttaactcatgttaatatagtatttttaacaaatatgaatggactacaaagagaatttgactaaatgtataaaatatataatttggaaaaaacatggaacatgacatggggagcacgtaggagaagcggtgatagcaaaatagagtgattcacttgaaaccgatttggtagtatcttttcttataaacatgttccaatgtaactagtacatagttggtcacaaatacaaatttgaatttgtcttcacctcaaattgccaaacaacccatatggtccccatccatcaatggattttcctcaattttctttcttttgaatatataacaaatttgttttttttaagaaaatacaaatatttgtaatgaagatccatgacatgacaagtgcttgtgaaagattacaaagagtgataataaaaaggggatgaattttgcatgctgaagcaatcaaataagtagctgaaagagtaacacacacatgaaagtgcaagtgacacatcttttacaacttctctcactgatgatacctttcttcctcttcctctgcctttgcttctctctctgagtcactacactctctcaccaacccatccttctctctgtcattctctaaaaaaagaggtccactataaatgagccttgagctgtggatgcttctttgtctggttttttagaatataataaaaaacaaaatgggtctctagatttcagatttctgggatctgggtgttagattaatctctttctcttccattattagtagagaaagctcactcctttcactcaaagtttctacctttttgttttcctgaaaatgggttgtgtttgaaatctcacactttgagatttgggtgtttattttgggatccttcttaccacatttagaaatttcagctagggttttcgatttctctacttctcagaggagattttagaggcaaaagatg

SEQ ID NO: 27348 - DNA, 3003 bp, Unknown; identical to SEQ ID NO: 27347
  misc_feature (1)..( 3003): 2750-1469P.txt file - cDNA_ID_2781838; gDNA_ID_1620671; Annot_ID_164123

SEQ ID NO: 27349 - DNA, 3000 bp, Unknown
  misc_feature (1)..( 3000): 2750-1469P.txt file - cDNA_ID_2781838; gDNA_ID_2926200; Annot_ID_141470
gtcaacacagctggtggtgtgtggtactcatatgccaagtaccgacagaaaaaggctaaaccggctaagctaatgtctgatttggaagctcacaaaaaatgagaatttcggtccggtttggtttcgtttgggaaggcattaccccggtttatagactttgccactcaaatcaatgatcagaacgaaccgatgtatttgagagttgaaccaggaaaatcggtcctagagtgagatttaattttgatgtgaaacttcattgatcagttaatttctcgtttaggttaagaaaaaaaaaaaatcaatacctatttttatatgtagatgcaatcatgctaatgtataattgttaagttgtggctgtagcataaccatattaaacattagacatgtgttggtatcaactatcaactatcaagaacacatgaaatgtttgttctatttaatggtggaaaagttttttaaatgggtctactactactactaattaatactttggattaagacattttgtgatagaaaaagacagcacataagtcattacaacgtcagtgacctctgtttaagtcttaattcgtttccttaaatctacggtttgtgcatacggatcataactaatatttttggtttttgaatttgcaaacgtttttagttggactttagagatttcaaataaatgaagataaataaatgactcataattcatacgaaaggctatagcatttatagagttcattttcttggcgtgaaattagtagtacattcatttattccatgattttgctcagaatattcaaatttataaaagaaatggacattactttggaagagttgaaaaacttataaaacaaaaaacataacaatagaaaactttaatcgattaaatgaattattgaatgattgtatccactaattacaattattgaaataaatatgtataaagtagagggtgtaaagcactgtatgaaaagattatgataacatagttcaaagaatatcattatgagtcataactaataatcattcaccaatacacaatcgatcatcttaatatatacatgattaatttggattcattttaaagcacacttaaaaatatatcatgtccaataatttgtgaattattatttcatcagaattgtcatagttatctaaccatttgtgtttagggcagaactgtgtctgaggctaaattcattaaaaaatgtcactaaattctgcagtttttgtttttttccatctatgacgttatataatagctagccagtaattattaaaaccgtatagaatatattcttgagtctaactttaatctacatgacaaatttttaattactcagcaccgattggtttctgtagatgcatgtcacaagcaacacaaaataaaaaaaggtattacaaaaaaatagtactaacctacaaaattacttatttataattcttttgatctttctccttttagcttttccttttctcttattagtgtttatatgatactttcgtaaaacgttaggtattgtatagtaaataaaaccttaaaaatgccaacgaatatccttatcttctagtgttctacatgtgttgatatcaccaccgacaagtatctcgggtaacctaattgttggttggaactttcagaatttttaaaactgaaaaattgacattatccttctaatgaatcacattcttcttttttttgtcaaatacttccctttgtcaaaggcatgcaccactaaattatcttttgttttacaaaatgaccaaaattagcggcaatattttacgtcaacacttgaccaattttgattgttagagagcactttgtcaataaaccaaagtataatgtttccctccttactctcctaatgtataatatatattttgattatagaactcatagttaatattgagttgcatccctttgttttaacagtaaggctttgacttacgtttgtgattataccaattaccaagtatgatcaacactcaagatttttttttgacaagaatataataatgaaaatgcttatgctttgagtaaattaatcaggaaaacttttaactcatgttaatatagtatttttaacaaatatgaatggactacaaagagaatttgactaaatgtataaaatatataatttggaaaaaacatggaacatgacatggggagcacgtaggagaagcggtgatagcaaaatagagtgattcacttgaaaccgatttggtagtatcttttcttataaacatgttccaatgtaactagtacatagttggtcacaaatacaaatttgaatttgtcttcacctcaaattgccaaacaacccatatggtccccatccatcaatggattttcctcaattttctttcttttgaatatataacaaatttgttttttttaagaaaatacaaatatttgtaatgaagatccatgacatgacaagtgcttgtgaaagattacaaagagtgataataaaaaggggatgaattttgcatgctgaagcaatcaaataagtagctgaaagagtaacacacacatgaaagtgcaagtgacacatcttttacaacttctctcactgatgatacctttcttcctcttcctctgcctttgcttctctctctgagtcactacactctctcaccaacccatccttctctctgtcattctctaaaaaaagaggtccactataaatgagccttgagctgtggatgcttctttgtctggttttttagaatataataaaaaacaaaatgggtctctagatttcagatttctgggatctgggtgttagattaatctctttctcttccattattagtagagaaagctcactcctttcactcaaagtttctacctttttgttttcctgaaaatgggttgtgtttgaaatctcacactttgagatttgggtgtttattttgggatccttcttaccacatttagaaatttcagctagggttttcgatttctctacttctcagaggagattttagaggcaaaagatg

SEQ ID NO: 27350 - DNA, 3000 bp, Unknown; identical to SEQ ID NO: 12950
  misc_feature (1)..( 3000): 2750-1469P.txt file - cDNA_ID_2781846; gDNA_ID_2214583; Annot_ID_135304

SEQ ID NO: 27351 - DNA, 3003 bp, Unknown
  misc_feature (1)..( 3003): 2750-1469P.txt file - cDNA_ID_2781957; gDNA_ID_1971973; Annot_ID_58683
aagatagtattagggccagaactcactcaacagtgacctggatgatatctttgttgtcttcattgaattctaggagaggctgatgtgaagaacagaataaacacagagatcatcagatgagaggagcgacacacccagatcaggaagaacgattgtcatgttgtggcaggaaaagtttttgattcatataaaatcaaagacagtaagatggttgaacctgaagactttggcaagaaatgttgtaccatggagaatctgacagttggcgaccttcgagtgaaacatggtaaccaaagccctgaacaaaagagagaagagggtttcagaacatagctgaacataatcataaccaagaaaatcaatgcatgatctaccatggtgttagtgttacaaaataagacctgatcaatctcaccttacctgattgaaatctgagtaaaaaggcaagacttgtggataagtttggactattccccatgacttctcgacaagtgaccaccatctggagagaaaacacatgcatactaataagatccagcgtctcctttacagcaatagtaaaataaagttttaagctcacagtcacagtaatgctagttcaaactttaaagatgacaaggagattggaaaatatttaaaatattacttattctgagctgtgtgaaaattggggggttgtgcagtctcataaacccatccaggagcaaatatggcagctgacacattgtttctcttcagcaaatccagagcagcatttacctagcatgtaaaagaataggaagaaaagaaatatttaagtatagatcattgttttgtactctacaccaatagagaagcaaatattaaagagtggctgagacatacagtccattgcccaccaccaaaagagccccgcccaaaaacatcaattcccatgtagacatcgaattttctgtccccagcaacttcagctgataggtttgggtagctctcctgatacatcattactcactaatagtaaaacaagacaaatagaagaaactgagactcgagagattgatcaaacccatagacagaccttccatgtgtagttcatgaatattccatcgcataagtcaaagaaaggtttgttcagctcagtcaattgatcttgccactgaagattaccacgaacagtgacactgtcatacctgcagaaagttatcagaacaaagtggtatacaaaaagaacaaagaaaaacttctgatcaactcaccatatgactaaagccccaggtgtcgataaatgcaagactttttttagatggctgacgaattccttcatatttggaatctgttcctcatctatatcattctctatatttatctgcaagtgacagtctatatattatagaagtctttcttcaccagccacccatcaaatacagatatcttataaaaaccaagcaaaaaatgctcaccagccacccatcaaagcctagagcagtagcaagttcagccaaacgctctgcatacatttgagcagactcctttgtggcaagcatctctttgcaggtagcttttccttcatcccattctgtgatgaaagtccccaatacctttatatttccataacacacaagaaagtaaacacttttaccaataaaatcctcagcaatattcatatctctgtacacaaacaatcaaactctctaattttatcatcctaatcagcaaactcagagatatctcaataaaaatcgaaactttggatgttgaacaatcaaaaagttttgagcttacttactttaacgccatgcctatgagcagtattggtccagcaaggaggaggaatagtgaccagagaatgagagaagtaaacaaaaatgtccatcaagtaccaatgccaaatcgcaaatccggcttcgttttcacacccttgtacccacttgtcatctacataccctcctttcatgtcatggcagactaaaacccttgggcgattcggtaaacagtcggagtttcggcggaaaggtactgtggagcgattaaactggaaatgaaaggaatcaaagtaagagcgagatttcaggtcttgaagagctttgatcgggaaagatataggtaacgatggcttgacaagatcaagcaacggaacggcttcagattgtgcaacgtcgtcatcgttggatttgggcatgaggagagagaggggaaatgaagtgaggagcttacgggagagggtgaagaagagattgtaaagagatacgagagttcttcgagagaaataggcgcgaagaagttctcgcattttgcagtggtcaacgaaggaagatgatgacgatggctttttatttaatttattcttcttttggtttattcgtacgccaaattaaagaagaaaaaaaacagagcatgtgaatttatcattcttttgatgtgaatctaaacgacatgacaatttcattttttttataaagtaaacttacacgaaagcagagagataagatatttatatgggccttggcctgtgattactgattaaggcatgaaaagttggattcttctttattggatctgataaaatgcttataaggcctttgaatacaaacaaagttaaatgttattgttgatcctttaaaagttcaaacatgtgattagcaaaaagtgtagtggcttttcttgctttctttttgttttataacaccgtaatccaaattggaattcagactaatttggagatagataagttcattggatacaagcaacgaaattgttccaattttgtaagtttgaattaaaatataaacagtcgtgcttaattatgggcaagaacatgggtttggttttggatcgtgcaagtacaacaaattatagctttgtttataaacattaaaatcatatactataataattcagtatactccaaattaaagttttaatcaaaccaaattttgtcattactacaccataaaaagagaaaggcgtaaaaaggaaaaagaaaaaaaaaggtaaacgttataataaaagaaaaaaaaaaatatg

SEQ ID NO: 27352 - DNA, 3003 bp, Unknown; identical to SEQ ID NO: 27351
  misc_feature (1)..( 3003): 2750-1469P.txt file - cDNA_ID_2781957; gDNA_ID_1971973; Annot_ID_177507

SEQ ID NO: 27353 - DNA, 3000 bp, Unknown; identical to SEQ ID NO: 1158
  misc_feature (1)..( 3000): 2750-1469P.txt file - cDNA_ID_2781970; gDNA_ID_1620364; Annot_ID_154766

SEQ ID NO: 27354 - DNA, 3000 bp, Unknown; identical to SEQ ID NO: 14877
  misc_feature (1)..( 3000): 2750-1469P.txt file - cDNA_ID_2781978; gDNA_ID_2684231; Annot_ID_137613

SEQ ID NO: 27355 - DNA, 3000 bp, Unknown; identical to SEQ ID NO: 5056
  misc_feature (1)..( 3000): 2750-1469P.txt file - cDNA_ID_2781994; gDNA_ID_1620758; Annot_ID_167058

SEQ ID NO: 27356 - DNA, 3000 bp, Unknown; identical to SEQ ID NO: 9122
  misc_feature (1)..( 3000): 2750-1469P.txt file - cDNA_ID_2782011; gDNA_ID_1971986; Annot_ID_177716

SEQ ID NO: 27357 - DNA, 3003 bp, Unknown
  misc_feature (1)..( 3003): 2750-1469P.txt file - cDNA_ID_2782170; gDNA_ID_1620753; Annot_ID_166859
aaatgcctatcattttttttattttaaagatagtgatagagtggataaattgagatgatatttagatctaattaaaagtctatttcgactaatcgttgattaagttagaaaaaagttggataacgaacattttgtttatgtataaacaactcatatgttaaatcatatattacttcaaaattatgttttcttaattctattattttaaattttatacaatctgtaaagtaaaattttggggattaaaacccgaatatattataaaatttatagttgatcatttaaaatttaatatgatatttgtacaatggcaaaaaaaaacttactaacatttctataaaataaacaattatcgattaaccattgtataacgcatgtccttatctagtcacgcttcttttcctcaattatggttaccatgtaaatccaccaaatcactaatcaatattttttcaaaaattataaaatctaacaaatcaatccaaatatatattaaaaagtccctcaaatctctccaaatctaactttcatcaaatcttctaaaattcttagctcaataaatattgaaaaccaaataataaattattgataatatatattgataaataatatatagttttggttttaatatatttataatatatcgagtatcctcgacacactctcatccttcatttttgaatattcttcactaattccaaagaatgagtgagattaaagaactcgtgcgtattgatgaaagcgttacacgtaaatctacatctaacacaatggagatctaacgcgtagaaacaaggtcattgtagtatcaagcactcctcatccgttccacacccctcaccttcttttgaacaacatcgttggctttgatgtatgcaacatatatacttctctatgcagagctccaatatcccaacttatgcaacattatgtcctacaatatcgcttccgaagccaaacgagttcatgggccattgtacatctattttcacatcacattaatcccgcaaatcgagactccatgacaatcaaagtctaggataattcatactaggattaggaagtaatttaaaataatatttagattttatttatttgtatatatagatgatattaccttgggaattaactaagtttaaaatatattaaaatatatattttcacatattctacggtaaaaaattaataatatattaatgtacgtatagtttggttaataattttctacatttaaaaatgacttaagaatctggggtttaacatgatgaagtggtatatttgagttgaacaaatcgatcctctcaaagatttagtattttaatttgaatgttatgtgtggaacaattcgattctattaaagattagagttgaaatagatatttgttatgttattctctcttattttattttattttttgtatagtatagaatgtgtgggataatttctacttatttcctaacttagagtttagaacattatagtagttgatgttttaaggtaagatagataacaaatttagtttttgttgttttgaatgattattatcaaccaaaaataagatcaattagattttaacctgcggtacaccgcggagacaatttattttttaaagttattatatataaaaatttgcaaattgtatttatctataaaatatttttattttatagtttacaattgttattaagtaacgtcctgccaaactcgccccgctaagtctgtcccgtaaaaaaaaaccatttattttattaatattgatcttatttatgatatgtttatgaattattgtctatgtattttagtcgatgcgggacgttatttttcgccaattggttaatatatgttcattttttaaaagtcgaatcacaaaatatgacggaattttttttgagattttttaaaactctatatattatataatgatgttaaaaattgtgatatattaaaaaatttataagtttaaatatataaataataatatttaaaaaattaatattttttggtttttaggtaatgacataataactctaaaagtaaggatttagaaaatttaaatctttaattaaatattttcattcctaaataattaatgccagtagcatgacattgtaaataagttcaaatacaagatttatttatttaaacaaaaaacatttagtaagaataatatttatttaaacaaaaaactttgtttaaaaatattgttaacaaatacgtttatgctaattttaagggattgatgtgaagtttgtttagattaaatttaattaataatgtgattgacaatttaaatcacgaatttaaagtaaaattaattatttgggaatttttttttaatgctaatgacattgggttgtaaatcagttcaagtataggatttatttgctaaaatagctgcaaaaatgtatatgtagatatataataagtgtgtattagttgaagatttaattcttattatttcgtaatagtaaatggtgaattaagtgcagaatcgtccgaatttagtccgatatacaacatacctcacaccattcaaagcctaagtaagtaatttattctagtttttccatcatacatggactaggggacatagtctaaaatttcaaaaactaaaataagtttgttacttgattttctcaatatattcggcaaaatcaaaagatatgataattgaattgcgactatatttcatggaattcatatttcgtaaataaataaaacttataaaacgaaaaaaagttaaattaaattcaccaagatacatcaacataataatttgtgttactcttttgatttaatcttaataaagttagttgatgaaagtatttgaccaataagcgaaagatgaacaaaaccctaaacaatagatgactcacggaaaccaacgccgagaattccgtcgaacacttgagctgcgttttaaagttctccaaatggcgccttttgcctactaaaaaacctttaccttcttcacagagatctaacctctccttttcccaatg

SEQ ID NO: 27358 - DNA, 3000 bp, Unknown; identical to SEQ ID NO: 5512
  misc_feature (1)..( 3000): 2750-1469P.txt file - cDNA_ID_2782654; gDNA_ID_1620797; Annot_ID_168521

SEQ ID NO: 27359 - DNA, 3003 bp, Unknown
  misc_feature (1)..( 3003): 2750-1469P.txt file - cDNA_ID_2783357; gDNA_ID_2685554; Annot_ID_138126
agtgtgtgtgtctatcttaacagtgatggttttgatgctatcaatttctaaagttacgaaaggtaataatgatcatgcgccggctccaatgtcagagaaagggttgctgccaaatccaatatcatgtgtagcggacgcaagaaaaattccagattgtgtagaggcaataaaacagggccatttgaaaattataaaaaaagaatgttgtatcattctactcagtcttcccgaagattgttttgggattttatttcctatacgtttctactatcgtatcatacttaagattacatgcaaattaattggcatcttttaatcacaatttttttttaatctttagatattttttcatgtaacggtattcatattatttcataataaaaccatttttctttcagtgatttgttaataattacctaaatgattatgttaaatataaaataatgggttttctatactaactaagaattaggctagtgttcgtgagacccttcgtttggagctagaagattaatccctagttcggttattggttgggaaggatttcatattccgggccaggagatatatgagtctcacctggtaattccttagagttgtagttaattaacgaatcaaaaagaacatgcattgattattttattggccctttgttatatgttttcttaaaaatgtgtaacgcttaaaatttcttgcaaattacttgtagtttcaatagtttaaaaattttaaagacttattgaatgactttgtatcacttcattttatattcaaagactctgtatcaatatgagattattattttttctttattttgtggtgtctaaagaatcacttcaaatagatcttcattgtaaatattcataggtgaaaagttagacatgctcgagcaccactgaattattttaagatcatatccatgtacttttaatttgcaatataaaaggaaaaatattagttaaaaaaaaggaaaaagtatttctataagtcttcaaatgcacaagattttctgaattgaatgttttatgattagagtttttctcccattttatcatatatactgataatattaataacaaaatgatttgaaccccttacatgtgctcgaggagctgatgcacatggtccatccaacatttttttttataagtaaatctgttacaattagggtccaaatttttattaaaaaataaaatataggaaatgatgaccaattcttttttttagcacatgatttttaattattttgagccagccctaagtaaaaaacgtataggcttttgtcgacgattatgttataaacttataactagataagaactcgcatctagtgtgggatgaaacgattaaaataaattatttgataaaattattgatatttaatatttgtctgtatataataaaacatgtaattaatgtttttattttattttaatttatgtttgttttgtgtaaaaatacgtttcacccgtgattgttaaagctctaattcttgagtgggtcggaacttggtttaatttgcaacataatacaaacatcgatatatcagatcttttttagtttgtgttatagtgtgctcagtggggcggctgttgtacggatagatttgaaaggattctttgttatgattccaacgtttttgcaatcactagagaaaaccaatgagattgtaaaagaaaaacggaaacaaaacaaaacaaaagagaagaaagctagagaacaaaaaaatgatattcactagacatggtttcgacgaagaaactggaaaccagccatcaaacaaatacaacaaagatgatctgagcttagtcgagaaaaaaggatcctgaattgctcggatgataaaatcagacgtggttgggatttctctctaaaatgttctcatcatttaatttggccatttggatatgatttaaatcctaatttctagctttagtttcttgtttttttttttaaattaatcaagcacaataaaaaccttagacttagaaccctccattttttttccaacaattttgaaaactatataagttcattatttttatctctatatatatatataagcttaagaaaatgtacgtataattatgtttgttcaaatgttcatccagaatattttacgatgtcatattggttttgttttgttatcatgttgtgaagtaagtaatcattttttttattgtcatttccgttcttgtattaaaaattatatattgatgtggttgttaaaccgaaaaagaaggtgaatttggtagatcgcaatatttattgatgaaattaagaaaatatcaataatatgatttgggttcattacatagtttttttttttacatgtgtaaccccttctcacggccacggtgaaattttcataatatacacaaaaagggcaacaaataagaaattttcattacatagtatattccttaattttgtttttattctcatttagtttttactagaaacattaaaatgaacttatatttgtaacgtgctattttgttttctgaactatcaaatgaacgtctaacaaaatcaaactcaaaaacttataatttataactctaatttccatttaataaataatatacccactaaattaaaagttaaaagttaactagtaaaatcgactataattgcagaaaattagaaactgttttatcctttctttacattgtcggttttcaccgtccaatactccaatccatttttagtttactaactaaaatttttttattttaatttacttatcaagtttacccaagaataatattaagtcttaccaagtcaagacagggcagtacgtatgaagtgggacttgggatttaatgtcacatttaaagcttaaacgtcagtgtttactagaaactttgacaagttcttgattgcaacacaacaatgattgcgacaatattaatagatatatagttatattttccaccacatatctaattcttcatcttctcaactaaacaaatcagtcaccgggaaaaatataaagagatg

SEQ ID NO: 27360 - DNA, 3000 bp, Unknown
  misc_feature (1)..( 3000): 2750-1469P.txt file - cDNA_ID_2783361; gDNA_ID_2685554; Annot_ID_193352
atttttgttttacataagatctttcaatatgtcatggctattgtttatatagacatgctattttcataaatacatacgagtttgttcaaatgcaagttgtttctttcattatttttatttgattcatgtcacttcttaaaattacatggtttttttctcctttccattaatctttgtcattagatgactttttttcactgaaccttacgttgaagtctccaccaccaaaaacaaatgcatcagtgcaaaaaactataaatttacaaggttaattgtcctttcctcaccttttccccaccacaaaaagagtcagttaccccaacaaactaaccattattaatttatgtgtaaaatttggctagattctaatattaccctttttatacttgtatccaaaaaatatcgtcaacattcaatagaaaacaatcgaaagaaaaaaaaagaatactttataaatttatatattaaactgattcaaaaattaactcccaacctaaaaatatattgatttatcgaaatattaattttttgagtattaatttatagaaattttgttgtaaacatttgttttgcatgtttttaatctctcttttttacatcaaaatgcattttagaaatgtataaatcaaatacttaaatttattggggttatacaaaaatttatatcaacgtattaaaaggttatttttgcattcaacctaaacattcgtactaccaaaatcatgttgaaaggaaaaaccaaagtattgtgatagaaataagttgacaaatttgttgtgcatattttgtgaaataatatgtttggtttgaaataattttgattgttgaacaaacaaagattaatacagtacatacattatatatatatatatatatattattgctatttctataaatgtgtgattaatttttccgataggagccgacatacttcataacaaaaatggtgaataaagaaaggttatttattatggttctgccgaattagtaaatgatggttcttaggagatcactttatgattatggatatattgacataatggatgacaaactcgtggctgaatgcaaagatagccatgacgatcatctgggtgataatggatatatttatgtatcttcgcgactttgcatatctatgtgggtgtagatggtacaccaaaaagtctttgttcgagactcatctgaattcatgcatctactaactaattttgtcgtcataaatatggatgtgaatgaggatgataatgagaaggagtataagaggagaattaactattaataatataatattacctttttagatgatatattaagagaaaaactcaaagtcgaaggaataatgtagagttagcaaaaataaaacgacaatgataataagcaaagatatatcaaactctcgttttctcatgcatgtgattgtgatatataccagtctttcgagtacgacactagataaaattgttcatgttttagtgacactattaggaatatcatgcaccattaatttgatatgtttgctaaccataagaagatacgaggatctacactggagacctactaatatatttaatatatctaagaaacttttcattaaaccgaagtggaaatctctcaaacttccaactttcatagcaaacaaggcttcatttacccaaattcgaatggagtaaaaatatttcgcacataaaagtagaattttacagaaatatcctttaaaatgcatctccatatgatacattgtatcgcattatgacgactaaatctctcaaacttccaactttcataacaaacaatgctgcacttacctgatttctaatagttaaaaatatctcgcacataaaagtggaattttacatagatatattttaaaattcatctccatctgatacattgtatcgcattatggcgactaaatctctcaaacttccaaccttcataacaaacaatgctgcacttacctaatttctaatggggtaaaaacatcttacacataaaagtagaattttacatagatattctttaaaattcatttccatttgacacattgtatcgcattttatggcgactagtttttagcatgtaacttttacaaagtgttgaaaatgaatataactcactatttaaaaaaaaaagaatatagcttactataccaaaactaaattttattcaactaacatgttgtacatagtcaccgtaagtgaatacacattgtgttaaccagggagaaggatcagatcagacttatcttctctaaataacctcaatgagtcaatgttaaacacttttttatctaaaagattttctaatatataatacaaaggaagaatacaagtatggaatacgatttgatacaaaaaaaactggtagaaacttaaaatacctgtggataagtacgatctatatttgtgatccataattttaaagtatattatatataacctcatttaacgtcgttgtacatgaaatgaagacacattacatatacactgtcttctacaaatatgttatttaactttcacaaaatattatattgacaattttagtgttacatattcatgatgagagttaatataatataatatttcctaaacactaatgtgttcttctctcatcaacactcacaaccaattgttttgacttgtagtatatacatatcttctaatatcaaaaactttactataaatgaaaaaataatttttttttgtcgatttgaaaatggtataatagagcagtgtcagtggtatggaggagtagcaaatagcaaagtggtatacggaactagattagatggaccaatgactcattgctcatatcttcttctcaattccaattttgtaatccttatctcaaattaatttctatttttataactacttaatctcaattagaagaagcctgctctctaataacaaaaaaaaaaagccgtttgggatttcttttacacgaacacattcttccgatctttcttgtttttaacttaccggtaataacgaagatatg

SEQ ID NO: 27361 - DNA, 3000 bp, Unknown; identical to SEQ ID NO: 27360
  misc_feature (1)..( 3000): 2750-1469P.txt file - cDNA_ID_2783361; gDNA_ID_2685554; Annot_ID_138127

SEQ ID NO: 27362 - DNA, 3000 bp, Unknown; identical to SEQ ID NO: 15053
  misc_feature (1)..( 3000): 2750-1469P.txt file - cDNA_ID_2783365; gDNA_ID_2685554; Annot_ID_138128

SEQ ID NO: 27363 - DNA, 3003 bp, Unknown
  misc_feature (1)..( 3003): 2750-1469P.txt file - cDNA_ID_2783416; gDNA_ID_2685557; Annot_ID_193374
attttttattataataaatgaaatgtcaaacaattgttattattagatttccaaacagataagacggtgaaataaaattctaattgtttttgttttattatttagcataaatatagttttatttatgtttaacttcaaatgatgggaaaaagtagggaaaatatgtctctaagttaaatgttataagcttttataaattgaaaccataatgtttttatataattaatttaatattatataacaattgttattatttatatgtgatgtaatggcaacaataaatgaaaccaaaaacttaggaatcatatatataaaagtaaagtttcactctttccttaatggtccacttggcaatataagtttttttaaaatttatataaataataaataacttatttaacacacagtttaatataaaactgaaatcaaaaaaatatgtatcaactatatttttccactctactttattcaacacacaattaattaaaaattaactaccacaatttatttacaaacctgaaatcataaatatatataaattaattatatttctccacaccattttattcaacacaaaataaattaaaaattaactcccacaatttatttttaaattgtaacttccatcacttctcatcctataaatatatacattctctcattctctcatttcttcatccccttccaccgtatcttaaatattgttttgtttagttttaagtttttttcttgttgttgttatgagtttaaaaaatattattgtaaacacttaattctaaattttaattttagattatgaaccttacactgttattcttttttgtttaaatacatctcgataatcaatttttcattaccatcttataaataatcattctctcatcattttgcactatattcatgtatatatatcttatgttgttatatgggtaaaacacaataaatttaaaagatagaagttgtccttggggtttaaaaaaaaaaacttttatattaaaattcatatgattttataagaaaacaaattagtttgtcacttacaaaataaaatgaattggaactattatgtatgagtttatatcaacaaattattttgtaatttactttatcatacatttattttgtaaaaataagatatgatatgtttattaatatatacatgcataaataacatagaaaaagaaaaactgttaaaatatgagcaaaagtaagatatcaaattttaacatatttttaattttttaatcatataatattgatacaaaattattttaattaattaaggttttaaaaaaaaaaaactaaagatggaaaattttcttataaaattggaggataatttatagtagtgaactattaatgtgcagtcttattggttcctaatttacaaggaattttgatgacttcaattaaatccttgaaaataaagaaatgaaagattttaaacgattgttagagagttttttataatcttgttgattagtttttcataatcttgtaaagtttctcaaacaatctctttattttgataatactttccatgacttttcatgacttcattttgtgaagaaaaatgtaggaaatcataaccaataacacaataatttaaatcattaacaatcattaacaatcaaagatttttttgttttaattgaataacacaaaacttttaatgactttataaaagtatgaatctaataacccaaaatttatgaagagtttagattactttttacaaatcttaaatgaataacacaaaaatttaacatacttttaaaaaatcttgattgaataacaacagattttacatgacaatttaaatcactaaaactcttttgaaatcatacacgaataacaccccctaaaacataatatcatgtcaaaattttaaagatttgattttgtaattagttaagggagttgcaattatgctagaagaaaattcatttcaaaattgtagtttaatatgaagtaatttcaaagtttaatgactatttttctaaatatttaatatatctattaataaattattttagtcaaactacaattaatgataagtacatgtgtcatcaaagtatagtgccaaatgtcgcattagtaggcaaagttaggaaaaaccttctcttattatataagattttgaattacaggaagtgatgaggatgtctagtaaccgaaaggttgtgatcgataacaagactcatgatgaaggcaaaaaagcagagcaagtccataagcttctctccctagtagatgatatcagaaggagcaagtgtggagaagcatataccgatgatacatatcatatgataaaggtgaaaaaatctcttgcatatattctcctcagatatttttgaaactttaaaatgatcaaatctcgtggtatcttaggaagagtcagagaaactaaggaagcatcatgaggagctggaatcaaagaactattcagaagaatgtgcagctgaaatgaagaatcagtcacttatattgtataaggagaatttgaaacaaatgtcagagcaggtaaaagatatgatcataaatcttatatgactacttccggttttccaatattaacaagctctgagtatattttgttaagttggagaagaagctcaaagatgctgcggaggcgcaagaaaaagcgctaagcaagatgacacaagaaaacaacgagctgaacctggcgcttaagattcacatcccgttgccgccaattactccatgcaacattctttgaaaaatgtcttctttctaacaaaggggtttctcaagaaatatcagtaactattatcgtccaaagggattttgggttgccataagaagatacaatcaaggaggttttgtttgtcaaaatttcaaatgttttaccaaacctttctgttttttttcccattttgtatttcagattacatgttctgtccaaaactatattgtggtttcttttgttgtgtgtggacttttgtataactatgttttcttccatgtttgaataagtgtatg

SEQ ID NO: 27364 - DNA, 3003 bp, Unknown; identical to SEQ ID NO: 27363
  misc_feature (1)..( 3003): 2750-1469P.txt file - cDNA_ID_2783416; gDNA_ID_2685557; Annot_ID_138142

SEQ ID NO: 27365 - DNA, 3000 bp, Unknown; identical to SEQ ID NO: 15076
  misc_feature (1)..( 3000): 2750-1469P.txt file - cDNA_ID_2783455; gDNA_ID_2685559; Annot_ID_138156

SEQ ID NO: 27366 - DNA, 3003 bp, Unknown
  misc_feature (1)..( 3003): 2750-1469P.txt file - cDNA_ID_2783486; gDNA_ID_2685560; Annot_ID_138173
agcgtgatttgggttgtggtgtctaaagaggtgaatgtagagaatattctagatgaaatcgctcagaaagttcatattagtggagagaagtgggacacaaaatataaataccaaaagggcgtttatttatacaatttcttaaggaaaatgagatttgtattgtttttggatgacatatgggagaaggttaatttagttgagatcggagtcccctttccaacaataaaaaacaaatgtaaagtggtattcaccactcggtccttagatgtatgcacaagcatgggggttgaaaaaccaatggaagtccaatgcctggcggacaacgacgcatatgatttgttccaaaaaaaggttggacaaataacactaggaagcgacccagagatccgtgaactttctagagtagttgctaaaaaatgttgtggtttaccattggcgctcaatgtggtaagtgagaccatgtcatgcaagaggacggtacaagaatggcgtcatgcgatatatgttttaaattcatatgctgcaaagttttctggcatggacgataagatccttccgcttttaaagtatagctatgatagtctcaaaggggaggatgtcaaaatgtgtttgctatattgcgctttgtttccagaagatgctaaaataaggaaggagaatctgatagagtactggatatgcgaggaaattatagatggaagtgaaggtattgataaggctgagaaccaaggttatgagataattggtagtcttgttcgtgcatcattgttgatggaagaggttgaattggatggagcaaatattgtttgtctgcatgatgttgttcgtgaaatggctttatggatcgcatctgatttgggaaaacaaaatgaggcgtttattgtgcgtgcaagtgttgggctacgtgaaattctaaaggttgagaattggaacgtcgtgagaaggatgtcattgatgaagaataatattgctcatcttgatggccgtcttgattgtatggaactcacaactttgctactacaaagcacacatttggaaaagatctcgagtgaattcttcaactccatgccaaagctagctgttttggatctatcaggcaattattacctctctgaattgccaaacggaatatcagaactagtttccttgcaatatctcaacttgtcaagtactggtatacgtcatttgcctaagggtctacaagagttgaagaaactaattcacttgtacttggagcgaacaagtcagcttggaagtatggttgggatatcatgccttcataatttgaaagttttgaaattatctggttctagttatgcatgggatctcgacacagtgaaggagttggaagccttggaacacttggaagttttaaccacaactatcgatgactgtactctaggtacggatcaattcttgagctctcataggttgatgagttgcatacggtttctaaagatatcgaataatagtaatagaaataggaactcatctagaatatcacttccagtaactatggacaggcttcaagaatttaccattgagcattgccatacctctgagataaagatgggaaggatatgcagcttctccagcctcatcgaagtgaatctaagcaattgtagacgcctgagggaattgacatttctgatgttcgctccaaatcttaaacggcttcatgttgtctcttcaaatcaactagaagatataataaacaaagagaaagctcatgatggtgaaaaatcagggattgttcctttcccaaagctgaatgaacttcacttatataatctacgggagctgaagaatatctattggagtcctctaccatttccatgtctagagaaaatcaatgtaatgggctgtccaaatctgaaaaagcttccactcgattctaaaagtggaaagcatggtggaaatggactcatcataacacaccgtgagatggaatggattacacgtgtggaatgggaggacgaagctactaaaacccgcttcttagccaacaggtctagtttctcatcttctcttatttgtttttcaaatgatttagtttctcgtgatatgaactgcttccatctttaatgtctctgtctctttttgtgtgtgttaggttgattatagtcagaactcacaaggttaaatgggcttctcaggcagaaacttcaaagtggatgatgcaatttggattgtgtctttttgtgtttaagtctttctctatgcgttgtttttctgtgaactattttttagatttgtgtcggcactgaactctactattgctatgtttggaatttattggaatatatccatgtgccatttgcaaatttgtcctttaaagaacttttctaataacagaaatgcggatacgattaaattatgttggattccttgtgcttcaagtattgcgtataacgttttgatgtccgttatcatcatatcttatttagaattaaatgtaatccaacttaacaaaacactcgcgatccacttgctttgcagctcaattataggaaacaactcaatcatatgtgaaatcttcatgttgaagccaaattaaactagttattttgcatctattttctaatgaaaagctgtctgaattttccgacagaatattagagtttgtttccttgcaatatctcacttgttacttgtcagatgacgaaactataggatttggaggaaataagtcatctcccgagtattgtgataggatatcaaatttgaggatattgaaattttttgttctggtaagcagggtgaaaataggcataccataagatactgcagactgggaaaatggattgatggtgtcttagcttcatctgaaatatgaaatttataatattttaaggggatcagctgacccttcttctctttgtgggtccgcccaattgacatcatctccacaaagtctatatgaccaaagatttgaaaacactttataatcacatattaattaacatgacacaaaaatcccattacatatcctaactaattatg

SEQ ID NO: 27367 - DNA, 3000 bp, Unknown; identical to SEQ ID NO: 15093
  misc_feature (1)..( 3000): 2750-1469P.txt file - cDNA_ID_2783490; gDNA_ID_2685560; Annot_ID_193462

SEQ ID NO: 27368 - DNA, 3000 bp, Unknown; identical to SEQ ID NO: 15096
  misc_feature (1)..( 3000): 2750-1469P.txt file - cDNA_ID_2783490; gDNA_ID_2685560; Annot_ID_138174

SEQ ID NO: 27369 - DNA, 3003 bp, Unknown
  misc_feature (1)..( 3003): 2750-1469P.txt file - cDNA_ID_2783494; gDNA_ID_2685560; Annot_ID_193463
taaacattggaacaaaatattacgcatatgaatgtctatttgaaacattttaatgagactttttgtatgagtaggtacaaatattacttcccatttctcgacacgaaaggcgaagtgaccgttgaggataaccgtgttggaccattatataagcatgttttcccaccagctctttctccgggactttcattcatcggattaccatggcaggttaatgatttttacaattgtgattagaatatgaagtaacaaactcttgatgtcaatcaacttattggtcaatgattcggatatttataggtcattctttttccaatgtttgaactccaaagcaaatgggtagccgcggttttggctggtagggttttattcgaagctcgaagcctcatgtattcccaaaagatacacacatcttatggcagaattagattctcaggttcgtactgtattcctttccataacatgtatgaaaacattatccaaaaagaaagcatacattaatttgaatgtgtttttttggttacagtttgtatacgataattggcttgctgatcaatgtgactatcctcgtatcgagaaatggagagagcaaatgttttacaaggtgttcaagagaatacaatcccaatccagtacatataaggacgattgggacgatgatcacctcatcgcagaagcatatgaagatttcgtcaaattcccatctaactatcccagttctttaatcgaaagagaatatacaagctgaaaaacatcacttgaagtctctgaaatgagggtatgtgggtttattacatgcgaaataatgcatattgtattgtaaacatcacttaaggtctctgaaatgttggaaacttacatgtaacaacattacttgaagtctgaaatgttcatgataggagcgagcttcttgtctttgaaggctattcttgtctcaacaagacaacaagtgattgcatcaacttctgtaacctagcaagaaaataacaaatagaattagtcatacagtattttatagtgaccagacattaccacaacgcgtcattagagtaaaagcaaaaaacgttaattcaactcacagcttttaccctcaaggatgatgcaagtgttttaagaaagcatatcgaggaagcttttgtctaatctcccatcatgcaacatattagcgaccaagccaatggttgaagcatctccaacaaacctgcaactcctcatttctctgatgagttcagctgatgctgctttgtcaccatctctcagatgtgccctgataagtgtattatatgtaccactatctggaagaggcccgtcttctttcattttttttagcaaggcataagcttcctgtaataggcgtttactacacaagcctgagatcatggtattgtaggttacaacattaggcttcactcctttaaggctgaggctacaaaatagatcccacccatcatccaccttcccagccttgcacatcccttcaatcatagtagtatatatgtaaatatcaagttttatctcactcttttgcatatagtcgaaaacctccaatgctttctctagcttcccgttattacagagtccatctaacaaaatgctgtatgtcattatatcaggaggtacaccatcagaaaccatctgtttgaaaaccttttgggcattatcacagtcgccatcatgaaaaagcccttggataagagtggtgtaagtgactgtatcgccaaccaatcctctatgagacatctcgcggaagagttccgtaccatcttctactctcttagacttgcaaaatccctttatgagagtattatatgtatctaaatctgggaaacagtccttgctaaccatgaactcaaacatctgcttggccttgtctagacgatcatgcatacagaacccgttgatcaatgaattgtaagtgaaaatatcaggatctatagaccttttgatcatgtcatcgtgcaatttctcagcctctacaaactttccttctttcacaaacgcatcgatcaatgcattgaacgtgactaaattagggttgattttcttctcaatcatatcactcagtagttgagaggcatcactccatcttccataactacaaaggcaacttatgagggagctgtaggtaacaacatttggtctaattcctttggtttccatttctttgaataggttgagtgcatcatccacatgtctatatttgcagagactatcgatgattgtgttgaagataacaacatccgcctctattttcgcagcttccatcttgttgagcagattaaaagccaaatcaatatcacctctcttacataatccatttactaccactccataagtaaccagatttggttgacagcctctttgaaccattcgatcaactaacgccacagcttcagaagctttgttgtggagaaaaagcccatgaatcaaagttgtaaatgtgattgtgtcaggtctataccccatttccaccatttgatcaaccaaagctacagcatctgaaatcctcttaccgtgacagtatccattgagaagagaagaaagcgtgacaatgctgggctcatagccgagtttcatcatcttgccaagaagagctaaagcaagagagatttgagagcgtcggcagaaacagttgatcaaaatattgtaagtatatagattatgtgaaattcctaacctctgcatcttctcacctagagagatgacaagatcaaactttttcatcttagcaatggcactcaacagtttattgaactcaaaaatggaaggtaaaggacgtgacttgaccatgccaccgaacaaaccaattgcatcatctaacttcaaatcctgtaacacttttctactcaagttctctctgtaatcaccactgctaccagaaaaagctcgtccccagcaacagaaaccgtaaagattgaaggagtaaggagcagttggatgattacctttccccaggagattccgacgaacagacaatctcttcgccgtggatgataatacatg

SEQ ID NO: 27370 - DNA, 3003 bp, Unknown; identical to SEQ ID NO: 27369
  misc_feature (1)..( 3003): 2750-1469P.txt file - cDNA_ID_2783494; gDNA_ID_2685560; Annot_ID_138175

SEQ ID NO: 27371 - DNA, 3000 bp, Unknown; identical to SEQ ID NO: 15091
  misc_feature (1)..( 3000): 2750-1469P.txt file - cDNA_ID_2783498; gDNA_ID_2685560; Annot_ID_193466

SEQ ID NO: 27372 - DNA, 3000 bp, Unknown; identical to SEQ ID NO: 15091
  misc_feature (1)..( 3000): 2750-1469P.txt file - cDNA_ID_2783498; gDNA_ID_2685560; Annot_ID_138177

SEQ ID NO: 27373 - DNA, 3003 bp, Unknown
  misc_feature (1)..( 3003): 2750-1469P.txt file - cDNA_ID_2783514; gDNA_ID_2685560; Annot_ID_138183
tacttttataagcaattcatattggttggtaaaataaaatcaataactattctctgtaactgatagtagtatattatatattaacgcgtaaataattagatgtcaagttaaataaataattatttcgaagagccaaattatttgagagtcaacggtgtgatcacaggaatcgacggatcggagagacccacgcgagcactccacccgtttcggctaaataacaatattacccttaaatcatgttcccatttgtgaaaacgtcgtgacttctgtttctcactttaccaaaacgataaaacatgctccacgatgacggtgagactatagtaaagaggaataatcaaactcattgcaattgaagtttgatttacgaaaagaaaaccctaaaacacctcagcaaaaattatgttattaatcaacacactaaatatagacataaagttacttttagtgtttttcttcttatatttcgttacttaataatagaaatttgtgaacttggaacgatgaagaaaaagatcatggttatataataattacgtataaactaaaaaattgtattatacgtttgaactttcttatagtcaaaggagaggttagtttcgtcaatagaggttaccaatatttaatggacttgagagaaatttcgttcgtttccttacaagtccattgtcacgatcccgtaattaatataaatcttaagcttaactcatcgacatcaacaaaagattagtcaagaaaaaaaaaaactcttacggagagaaaacattcaaaacaaaatgaaagtttggagccaaagattatcgtttctaatcgtcatgatcttcattttggccgggcttcattcctcttccgccggccgcaagctccctagtatgacgacgacggaggagttccagcgattaagttttgacggcaagagaatattatcggaagtgaccgccgacaagaagtatgatcggatctacggagcttctgctagattagttcccaaaggtcctaacccgcttcacaacaaatgatatatttctatactattatagttacattttgtcgccaataattatactatcttaattaagtttgtttagggttttgtttagaataatttaatctaccttgtgtctcaacaaattctgttattgctggttctttaatttcttgtattttgtagatatattgtatgatagatatacgtacagagacttatgtaactttcttttttcatatttacatttatttatacgatgttgaaaatatgtatcaaatattgatttgcacgagatgagaggggtgattattttatattttgattatagttcattataataaatatgacatgttactagtttgacagagttattaatatattcaattcagatcatgtacgtatttctgcagtatagtttccgttcctaacacagtaacatgacatgatcaaagttatttccgttgttacgagtctatctatggtatatcttctcaaataagactagctagactattgaatttcgattttctttgcagtaaatcgatccgtcactcatatcagaaaaaaagacaaaaaaaaaatcgatccgtcaacaatcaacatgtatatatatgatgaaaacattacgcaaaagaataaattcagtcgtccattcaacaacgatagaatcatagaatataagtcaacatctatacttgtaaaataaatttatttttacaacaataaaatgataataatgagttttatgagtcaacagaaggggtaggcaaggaacgacacggcaatgcgttgaccctgttttatgttctatatttaagaaacgaaaaatgtaaacacatctctaaataaaactgattttttttggggtaaggtctgttttttgaaatgtttatagacgcttaggacacttagagcctttcaggtttaatgctattggctgaacaatctctcttagattgcttcaagttacagtcttttttagatttcaatgttgcagtttgttggttctcaagttggcagattttctaggataggatcaatcttcttttactaggttcaggtctcttcacactttggtaagcaagaagctctcttaacacaggcataaaatgcaagttttaagttcagttacgaagctttgttttcgtttgctgtttttattgagaagttaagaagattgactttcaaacactgctaccatggtttggcctcttctctggtggttgatcatcgagcatccagacttttcccttttgatgtttatagtcttgattcagttctttttaatttctttctttagacgtctttggattgtataatatgctctctgtatcatgaatggtttgtacgatatgtttcatataaataataataccctttggcaaaaaaacaaaataaaataaaactgattaaaaccatttacgtaccgatttaatatattgatggtcatcaatataaaaacaagagtgcaaaagagtcaaaataaaacaaaaataaaccccatcacaatcaagataaagacaactaattttctgtgtttcttcaacaatcatagctttattaatgtaaaagatgtttcacacagacattcaacaaaaaacacaaacatacaatttttaacaaaagggaaagtaaatacaaacaaatacatagaacaaatataaatgtttaattagccggcaaaaacttatcaatttgacttcattttcaataaaaaaaccacttcaatgtcaatattttggccactttctttccaactcgatgggatggctaaagcttatgaccttgacattccaataacaaaactttggggttaataccattaaaaagcattatttagggattaacatgcaaagttttcagatattatgtcacgtgtcacgtaaaactccacgacaacgaaatgttatcacttcttcttctgtcgttctcagaaacacagagtgtcaaaacctggtcaccggaaaaaaaataaactctgttttcagaccgaattttctcaccggaaaatg

SEQ ID NO: 27374 - DNA, 3000 bp, Unknown
  misc_feature (1)..( 3000): 2750-1469P.txt file - cDNA_ID_2785269; gDNA_ID_1621122; Annot_ID_56303
tcacgcgagggtttctcttggatccatccagatccttttctatccttttctgtgttcttcttaccagtaaattctcaaaggacgtcgattgtggttttacactaatagtttcacatcgattcgttgcattattaaaatccaatcataaaatttctatttatacatgcacacatacggtacatgttcaattgaaacattttccctaactagacatgccaataaataataagttggtttggtccaaaaaataaaataataagtaaaattctacaaaacaaatggtacagttttgttaataactagatattcatccgggtacacaacgtatttatatttttgttaacaagttaaagattttattttagttaatagtatttataaatgataaacatattaagaagtacacaacgagcctatatttttctcaaaaatttttatttttttgttttaaagatgatttatagatatatgctattgcttttttttatgtatgatacatctcgaaatgatttatataactaaatttctgaaattttaagttattttttgtattaatattgtaaattttgtttaattttagaattttaccatagtatatcattccgtattaatattgatccaaaccgtctcaccatatatcctagttctgtgaaattaaacatcattttgtcattttcttataaagttcaaatctatataatatttgaaacttcaaaaaagttttaaatatattgtattatatcgtcccgtattaatatatttttaaatatatatattatataaaacttcataagagttttaaaattataaatattaaaacgttttaagaagttttaattttaaaagttttacaatttgtaatatttaacttttttggttcttcacaaaggacagaaattgagattaattttgacacaattaaagctccgaattcgcaggggtcagttgattgatatactcaaaataactggagagaatgactatcgcaagatgaatatattcaaactttcctcaaaccaccttctcaagtaaaatttaaaaacatattttcaaatcaatgtaaaatagaaacgttgaagagaaaaacaactgaagaatgggggcaaagcgccagaaacttgtaaaaacaagtaaaaggattggcaaaagtaagaaagcacaccactttaaaactaacattaagctttggatgatgatgattcttcttcgtcatcttcatcaatgtcccaacttaaatcttcatcttcctctgcagcactcagacgtttacgcagctcagctctgtttggactaccaccagaccgactcgtttccttaccatctatgctactcatatcctcgatctcgtcccatcccaaatcctcttcagatggttgttgagttgatgaagaagcagccacatctggtttagctgagtcttgggatggagcagcctcatcagattttggtttgacagaatcttggattggagcctcatcagatgttggtttgacagaatcttggattggagcctcatcagacgcaggaggagcagcatcaacaaatgatttttcttctggaacttcctcactatcagtctccttcttttcctcagaatctttatctgtcttcaaaccaacattgctcacttcagtcactgaatctgcacttgtcacttcatcttgcgtgctcactttagccactgaatatgtactttccacttcatctttcacagtttcactcacatctccaccacccataccatcattcccttcaagtttcaaccttgaaacatctttggtagcttcaacaactttctcgctgctctcctcttcatcatcaatatcccagctcaattcttcttcatcatccagagagatggctcgtttcacaagattagcccttaaatcctcagcttgcttgagcttgttaaccctatagaaatacctaaaccagaaggtctcgtgatcaaccatactcggaacgacccttttatacactcctttcatatcaccattttcctccaacaatttctccatctcctcagcttttccatccagagaaaacgcagattcccactttttgtaatcatctgaatcctcaggctcttcacagtaagtgttgagatctccttgaacagcacgaatctgagcatcgaaacgactatatggtttcgaactgaagctatcacgacgaccaaaactctgactactattgttatcagaagaatcagattcattaccagcggctaaaatcgcttccttaccttgagcaataatctcagccgtaccttttagcaccgtgttcccaagctcatcaatcgcatgtcccaccgtaccaagcgatccctgagccacctcgatctctttcttcaaacctgtgccaaattcttcgagatctcgtcggtaggtttcaatcacggattcggatctggtggctagagttttcatcagaccaccgaagctccatccaccgtcgtcgttagattcagattgctctggatgttcttgctctggatgttcatgctcttcgctgtgtttcggtgaatcggattcggattcggtttctggaggatctaggtcttccgtgaagacggatttgaagaaattcatagcgtaaagctcagatcttaccaatcggtactctcagataatttgtttgatccgtgaaagaatcaatttgaagagtgaaggattcgaattagcgtcagaaataggaagatcacaaaagacttgaagcttgtcgctgcagagacgtctaatttttttcccatttttttaatgaagataaataatactttatttggcgtcaattatcagattaatgggccagaagttttataaatgggccagaagttggatatgttagtccaacaaataacacaaaaccctagaattcattcaagggaactaacgtcaaggtttttgctcttcttctctcccaagtcccaaactcgttttgcatcgccattgttgtgttgctggagctaaatagagagaaagagagagagtgtctgtgatg

SEQ ID NO: 27375 - DNA, 3000 bp, Unknown; identical to SEQ ID NO: 5631
  misc_feature (1)..( 3000): 2750-1469P.txt file - cDNA_ID_2785751; gDNA_ID_1620807; Annot_ID_50567

SEQ ID NO: 27376 - DNA, 3000 bp, Unknown; identical to SEQ ID NO: 5631
  misc_feature (1)..( 3000): 2750-1469P.txt file - cDNA_ID_2785751; gDNA_ID_1620807; Annot_ID_168912

SEQ ID NO: 27377 - DNA, 3003 bp, Unknown
  misc_feature (1)..( 3003): 2750-1469P.txt file - cDNA_ID_2785775; gDNA_ID_1620586; Annot_ID_161302
cttaaggtccatccgcctcagagaatgattgacttaagaccaataagtctttgttctgttctttataagattgtggcaaagattctagtgaataggctaaagaagcatttgtctctgattgtgtctcctactcaagccgcttttgtctcagacagaatgatatctgataatgttttgatagcgcatgaagctatacacagtctgaaatctcatcctgttttttctaactcatcgatggttgttaaaactgacatgtcaaaggcctacgacagagttgaatggtcttttctcagagaaatgctacaactactagggttcaataatatatggatttcttggataatgggatgtgtgacatctgttacatactcaatcttgattaatggccaaccttttggttttatcagacctgaaagaggtattcgccaaggagatcctctctcccctttcttgtttgtgttatgcacagaagctttgattcatctgtttgatcaatctactagagcaggctccttatctggaattcagtttcatccttcagggccagtaattaacaatctgctgtttgctgatgacagcctctttatgtgtaatgctgataaagatcagagtttggagatgttgaactgtttagataagtatgagaaaatctctggtcaaaaaatcaacaaatcgaaatcagcaatcactttcggattaaaaattgatgaggctacaaagaagtggattaaagatacaactgagattcaaacagaaggaggaacagggaaatatctaggattcccagagtgttttagtggatctaagcaggaacttttggattatattaaagtcagattgaaggatagactaacaggatggtttgcaaaaaatctatctcaaggaggtaaagaagtccttattaaatccgtggctatggctctccctgtgtatgcaatgagctgtttcaaattaccaaagacttctatcaagaacttaacaagtgcaattatggagttctggtggagcaattcaaaggatcacaaaaaaattcactggttggggactgaaaaaatgactttacctaaaacacttggtggctttggatttaaagatctggaaattttcaatcaggctcttttggcaaagcaagcttggaggctattacatgagcccaattgtcttttttcaagattcttcaagagcaggtactttgtgaattctccatttatagatgcgtctgttggaagtaaaacatcctatgcgtggagaagtattttgtctggtagggatcttttaattaaaggactgaaaagaatcattgggaatggaaaagagacattggtatggattgataagtggatccatgatggaataaacaggagacccacaggaattcaatccctccaaaacattagacttcgagttgatgctctgattaatatggaaacgggatgttggaatacgaatctgttgagagctttatttcatcatactgatgttaggattattcaagcatcaaagccagtagttgggagatcagatttcttttgctggacagaaactaggaatgatatctattcgattagatcaggatatgatttagcttacaaatttcatcatttagatcagattacagaagctacaaatcgcccttcaaggaccacaattgtagaggcctgctggaagattcccactgttccaaaaattcaggtgtttctatggaaactactaagaggtgcactggctgttacagaacgtttgaagacaaaaggaattcagagttatgatggttgttggttttgtgatgcagatttggaaacaattaatcatatgttgtttctatgtccatatgcaagacaagtttgggctttgtctaatattccatcaccacagacaggtttttgcaagtcagattatgagaatttccattatttgatgagtttgcaatcacaacaaaaggatattgcagaaatttcaaaggtttttccttgggttttatggcgcttgtggaaaaataggaatcagctattgtttgaaggatctttttttccgccaaatgaattgattataaaagcaagggaggatgctactgaatggtttacagctcaagaagctcgagaatcacctatgagaaagcctaacctcagccatgatttccggaaacctccagttcagggagaatttaaatgcaacattggatattcttggtccaagttgcataggcttgcgggtgtatcttgggtacttagagattctctgagtaatgtagttctccacagtcgtcgatcttattctcaagttgtgtccttgtttgaagctaagatcaagagctaggaatgggcagttgagagtatgaagagtttacatgttcaaaaagtgatttttggagccactacaatggagataatcaaagccctgcataaacctaaggattggccatcaataataagtcacattctcccaatgctagttatggctgatggaatgactgattggttcattttatttgaacctaatgggtgcaacaaaggagcctataaaatagccaagagtgttacctctgacataagagtgaactcttatgtagctcaaagctatcctagatggatgaaagatttcttcattaaggagaaatgtattgtcgatagtattaggtcctaagttttttttagttttaagttaggagttgtaattatagagtgtattttattaggttctaggtccttctttttatttattccagtaattttctagttagatagatttttaaagagattacttcgcaatgatagaaaaaaaacaaaaagatttagtccttctagacttaagcggtggattaatgtttatagtcttttctggggtttgaatctttgactttagctttcttacaattaaggtttctccttctcgtaattgatcctagagtatataaattaggaagtctgctttctcttagtcctgtatctttaagctttcataattaggaaaaaaaaaaaaaaaaagagagaaggggtagcgatg

SEQ ID NO: 27378 - DNA, 187 bp, Unknown; identical to SEQ ID NO: 180
  misc_feature (1)..( 187): 2750-1469P.txt file - cDNA_ID_2785779; gDNA_ID_24689; Annot_ID_146455

SEQ ID NO: 27379 - DNA, 3000 bp, Unknown
  misc_feature (1)..( 3000): 2750-1469P.txt file - cDNA_ID_2785791; gDNA_ID_2214514; Annot_ID_133916
attgaaggcaacaaagaacatcgttggattgatccactccgagagacaatggaatacaagatttagttttatttagggaacacatttagttttgtactcaaaggaagaaaattagtactttaagtgatcatcaatgacctaaatacttgacaggaacaagtagaagctcattttttttgcccacggcgagtccaggagattcttccatgtcaatatcttcgaccaccataccatctggtacttcccaatcaaactgatacaacatattcgctagaccaaactccaccattgttgtccccatgtacattccaggacagattctccggccacttccaaacggtaacagctcaaagttctgtcctttagcatcaatgttattatccataaacctttctggataaaacatatctgcatctttccaggaatcaggatcacgccctatagcccaaacattcacgtaaagcaatgtcttgggttgtatcttgtagccattgatctcaaattcagacataacttctcttggaagtagaagaggtactggaggatgtagcctccatgtttctttgatcaccatcttcaagtaaggtagatgatctatatcatctaaggtgatcactgatttgtttatcatttggtttctgatttcggattgtactttcttcatcactcgcgggtttcttattagttctgccatggcccatgtcattgtcattgcagaagtattgatggccccaagaagaacgttctgtgataagatgagaaaacaaagtttagaatcataaggtatctaatgtgttgcacatatttgtatagtactaaccattaagatggctttgacatggtttcttgtgagcttgccatatccaagaacagtttcttctttctctaacttcaagagcaagtccacgaaatcttcgactccttgtttgttttcttgtttatgcagatcaaacatttgttgatagaacacatcaagatccttgacgcttttttctctccgcctttgtagacccgtgagccagtcgatgatccagccaccatttgggaagaagtttgaggccgagaagctccccaaaaacaaaaacgcatcgtggattaacttgtcaaatccatcattattgagaactgaagtatggaagtctagactgaatgctgccttgcatatcacgcttacagttaaatcaagaaacttctcgctcaagttaactggtgatttctgagaggctgattccgtggctgaaacgatcagtttcctcacttcttcttccttgatgggttgaatagagtgaactcgcttagcactaaagagttcttggacacaaatcctccttaattctttccaataatcatcaaaaggagagaaagcaatgtccaagtaattgtaagagagctcttttgcccctaacgaatgatcaaaatcatggtttttgttgagttctatgaacaaaggaacaaatagaaagaaagaaaattgtatgtgttaagttagagttatagtacctgctaagctaggacggctacaacaatgtagatcattgattttcagaacttgttttgccgtctcagaagaagaaactacgaccgttgggacacttccaagcttcaaaagcatcaccggaccatacgttttggaaagactccatagagattgatgtggtaattctccaagctgatgcaagtttccgatgatcggaaagccaggaggggacggtggttgctgctgatttgtccgacgcttcttgtgtttaaaggcggcgaggagaatacaacagagaaagagaagtgaaagaaaccaaatcgtagccatttttccgtattaacgtacgtctcaagttttctttgtgatattgatgaatcaagctcctgctttaaatatatacacatttcttacattattgtttattgctgtcttaaactcttttaatttcgttttcaatatttctttaaaaagattacattttttgttggaaatttcaaagaaaaatgcataccagaatcaagaagccgtctaaatgacgaagacctaccttctcttaatcgtgtctccatctttgttctgcattttaaatttgtcttttaagtactcattacttgtcttttactaattaatatacgaaacccaattaattggttaatgagtacacaacaaagtcatcggtcttttaatatgcaactatgcaagcgacaaggacagcttatctaactacgaaaagaattcttctctagtaactagatttaccactaggtctccactacataaacaaaatttataaatttcaataattatgtaataagtttttgggttaaatattgccttttaaaaaaaacttagtcgtatttcttagcaccacatgtaaatatagtaggcgaatatataaatgttgttaaatatcgcctactactagatttatgaatatttaagcttgactttatcttagctcaaacaattcatataactaaggtctctttgtttaaccaaaaaaaaaaacgaaggtctcattgttacttggtcatactcttgaaaataacacgtcaacgatatatgtatgtaagggccacttgttatttagactcaatgtgattttaacaatagaaaatgtttgaatgaaatggatataggactaaattaaattacggatatgtaagagttggaattccaaaatggacctacataatttttttcttgcaaatttgatcggaagagggggtatattgaataattaatttatttgggatacaactatgagagttacttaagtatagagctaattatgaaattaaagaaacgcgccgcgtttttgatccataggacggtacaaaaacggcgtgctgttttgttttagaataaagcttcttcgttttttggttctttctcttaaaatatcttcgcgacaaagaaccatcggagaagaggaagaagatcagtgtagagctatcgggaaatttatctgaagaggaaactgaaattgagatcgaagttttgagtttgggtaaaaaatg

SEQ ID NO: 27380 - DNA, 3003 bp, Unknown
  misc_feature (1)..( 3003): 2750-1469P.txt file - cDNA_ID_2785798; gDNA_ID_2214694; Annot_ID_136767
ataccaggctgaatcagagcagttcgtcttcggatagaaacgtcgtactcttcatcatctccatcggaatacatggtttcatctttctcaattctatttccgcagaaaccttgctgggttctgaaatggcgatcgccgacggtttcgagctcccggatcttagtacctgaatctcccacacggaaacgcaaagattcatcttcaacgtggaatacgaaccgaggatcgatactgtcgttaacggacatttgcttttccgccggaaaattcagaaggcgatcgatagagactggaagagcacagagagagagtttaaaacgacgtcgtcgtaagtgggacatgagtagcacgcgcgtcgtgatggttaatgattatgaaaccgtatcatttacctataagcttttggtgggtccgatttacatggactcataaagtgatatcgccacgtagacataacatataggtttttatatttatctgaattaccttaaaaacaactaatatcaagaaccgggttacattcagaatttctcgaccacaattcgtttacggtttagagaacatacagtacaatgccattacagattctccattttgttctacattaaagagggatcaggtaaactcaaaaaaaccaaaactatagtgagtaggatcacagtgtagtaaccggtttagctgggcaaatgaaccaagtttcggtttgataaagatgtcctcatttcacagttcagtccctgaggggtttcattcccagtgatgctctcagtctattcatctctgcaatttcaggatttggatgatcggttccatcttccttcatcttctccttcttttctttctttttcttaggttcttcccgatcccgcacatcatcagtttcatgtctcttacgatccctactcctgcttctacttctgcgccttgccctgtctcttctgtctcgttctctatctctgcctctttccctgtccctatctcgctctctatagtgatccctgtctctctccctatcccggtctcgaccatgcccacgttctctttcatagtctctgtcatgatctcgatccatatcatagtctctgtcataatcacgatccctgccaatcacagaaccatggtcaaattataattcatgaaacaatgagctcaagtctcaacatcaatcataatgaaaatctgtaacaaaaagaaaacattgattgagctaaaaactagatgggaagtgctctcatgattaactgatctttttcaaagtaacacaatgacaactaccatatactgtatcagggtaaggattgtaataatgtctgatccataatacttctctctgaacactgtcagtacagagaaacctggaaggatctctacaaatttaatttcggaagctgtatccaaccgctgatggcttgagatgccatagtggaaacagacactcaaaagacagagtactagacatgatgcaagagcattagctagatcaaacagcttccacaatcacaaagaatttttttttgaaaaatgttaactagcatagaaatgtatctagtaaaggtcacggattcagatacctgtgtctatgactgtcgcgtctcctgtctctgtctctttctctttctctttcaggactcttacggcgctgatcctgtaaaagaggaggaagatggtatcatcttagagctgctagatagaaacagaaaacagatcacataaaaactattgcagaatgaaagcactgaccatctcatcttcagatccatcagcaatcccttcattctcctccttttcttcctcttcttcaaagtcgtcttccaaaacacttttccttggctctaataaaccattctgttcaagcgtccacctatcatcagagtgaaaaattaaccatcttaaaatactgcagaaaccaaaaactaattattcagcttcagacaaatgcaaaagaagaaaccttttcttcaaacgtggcattgcaatatcacaagaataatccttggttagaagttcctcaatgacttcgtccacatgtgtcagcgaaaactctattccaaaccaaagaaataaatctagttagtgaacaaatcaatcaaaagttaaacacaacggatccatcgaaagaaaatgaaacttactcccatcagataacttttgtctcactttccggtagtcattgtagagaggttcgaggtagcgatagacatcaacatcagtcccagtgagacgcagatagaacgcaccaagaatacgaacatatctgcagaaaccaaaagagtaaatatttcagtaattcaagaacaaatatctgcagaaactaagagagtagattatctaagaccaatagatttgagagacattccatacctgtatacttgagaaacaactacgacaaggctaatagcagtatccaatctagattacgcagaaataagcttttggttagaaatcttacttgtagtcatcattttttatgaactccacgacaatttccttctcaggctggatttgaagcatcttcaatatgaggcaaaggaacggagtaggcttgcggctaccaccaaaggtaccacctagatggtcgagctccatagctttgtccaccaatgtctccgccgtgagaccaaagcactgctccttccaaaaggtgtgctgataaatcttcgttcgcacaatcttctctaccagattctgcggattcgttcctcttatattctttgccaacggatctgttctgtttgccattatcgcctgaagttaatcagaaactgcctcaaaggcctagtcgtcggaataataaacgtcgagcgacgccgcttcagtgaagccggaatcgatgaaacagcttccacgaatttgccgtcgtcgaagacgaagacactctaggtctttgaagaatctgagaagttaattcatttattttattttattaatgattgctttcggtggtaaagcccatagtaagaacatattaatgggctgctaatatatctaggcccattatagatg

SEQ ID NO: 27381 - DNA, 3003 bp, Unknown; identical to SEQ ID NO: 27380
  misc_feature (1)..( 3003): 2750-1469P.txt file - cDNA_ID_2785798; gDNA_ID_2214694; Annot_ID_189464

SEQ ID NO: 27382 - DNA, 3003 bp, Unknown
  misc_feature (1)..( 3003): 2750-1469P.txt file - cDNA_ID_2785806; gDNA_ID_1620669; Annot_ID_48127
gataaattaaattatttcaatgagttatctatcctaatttatttgtatataaatcttgagatttttttttttaaaattaacaccatatcaagtatataatatgatagtgttgacaccaatttgtttagctttagtttttaaacaaaaatcaaatatacatactactaagcataaagattagtaggcacctttatagtatatactttatagggtataaacttgtgtgtacaatcatactaaaaataaggcataacatataaaataaaatagtttacgcattttacatcattcaaaagacaaaatgttttctcactagaataaaacagtactatgaagaggcaggtagttgataatataaaattttcgtctattaaccagtatagatacgtatcgaaatagtcattaatcaacacaaattcaaagggtcttatccaggcacttaagattatctaagcattatataagatggaaagaataagctttaattacgatgagaatataaaaccatcaaaaggccataaacttggaagcagcaactcggttcattgtgccaaagtggggacctatagtgtgcattctgattcaagaaagagatgatcatgacctcaattgaaattgtaaatcatttttaaaaaaagtaaagggacttcatatagtctatatatagcatatttttatcattaaaaatgtttgtttaaagattcaacttagaaatttgattaaatactagtattacttaactagtgcgttcaaattattagtaaacaagatccaaccttacaaaaaaaaatcacactttattggcacctcaactgaatcttttattttagtcgtcaaagaaaaaaaatggattcattcaagctgtaaatggaaatgtgtcactaaggcccataaatctattttgaaaaagcccattaaaactaggttcttaagtcttaaattgaaatatatcaatctacttttttcttaatagatataattggtcatcattaaaattcttgcattggctaattgcaaagaagaaatattcgacatgaaatttgtacatttggtgctattgtggaacgcatcttttttttcataaactttatcatataagaaagaacttgaaaaaaaaagagattctaaagaagaaagatcaagatgtctccaagtaacaagttgcagaagattcaacagcttcatcgagctcaatatctccacaagtagagagaattgttgcaaatatataatcatcaacttcaaatccctctgcctccattctatacattagcttcaatgcttccctgcaaaacccattcctcgcataacccattatcatcgccttccatgaaaccaagttcttctcaggcatactgtcaaaaacccgaaaagcttccgagacaaatccacattttgcatacatgtgaatcaaagcacttcccacaaagacatttgatagagcatgattcttctttgcaatggaatggattgatctaccgataagaagagattctgaattcgcacaagcttttaaagccgaggagtatgtaaatgggtttggctctacaccttcttgaatcatctctttcaagaagtctagcgcttccgattcatgtcctaagctcgaacatccagagatcatagcggtccatgaaaccacatctctagatggcaattgctggagaacattgaaagcgtcacgagattctccgcatttacaatacagccacaccaaagtacttcctatatagacattcttttcgatcgaattcttgataatctgtgcatgaagttccttccccaacaataaagctccaacagatccacacgctctaagaatgcttactactgtcaaattgttagcaatcaaatgccgcctcttcattatccggaagaggctgatagcttcctcaccaaaaccttcccgagcatgagcagctataatcgaagtccatgtgaccgtgtttctattactcattccatcaaacacttttctgcaatcagaaatctccccacacttagcatacatgtccatcagcgaagttcccacaaaaacatctgtctttatcatcctcttaacaaccaagctgtgtacttgccttccgaatcttaacgctttctcctcactacaagccttcaaaatactgcacaccgtaaactcgttaggcaaaaaccagtgattcaacattccgataaacatgcctatagctttaattccatgcccttttctcgaacacgccgatataacagcagtccaagatatcacatctttctcctccatcatatcaaaagctcgtaacgcacttgtcaattcaccgcattgcgcataaaaataaacaagagaactctccacaatgagattccccactccaactttcaccatattaccatgaacttgtctccctaactcaaactctgctctcctactacacagattcaacaaacacacaaacatcctctcgttcgtaaaacgtattccatgcttcacataatcctcaaacagtgcaaaagcctcatcctcaagaccatacttcaaatacccatcaatcatagcagtccaagtaacagtatttttctcaggcatactgtcgaacactttacgtgcataaaccaaatcaccaagtctaacacaagaactaatcaaattgttcccaaaatagataacttgatcatcaaaacacttcaacgccatcgcatggatccttttaatgagtcgcatcccattagaagactgtagccactccgctaacagagcataatcaactctttcgctatcgaaagaagacgaatcatcctgattcacattctctcctttgaaaccactaaaacccgaatcgaaagatgctctctttccagaaactaatcgaaacccaggtaatctcacgtgtctctgttcctctcgcttagttcttgaatcgctactgtaacatatcgtcggagatttgtaggattgagtcaccggaatctctgaaatccggagacgcggttggattaacgataacgaaaacattgtcggcgatg

SEQ ID NO: 27383 - DNA, 3003 bp, Unknown; identical to SEQ ID NO: 27382
  misc_feature (1)..( 3003): 2750-1469P.txt file - cDNA_ID_2785806; gDNA_ID_2926170; Annot_ID_140100

SEQ ID NO: 27384 - DNA, 3003 bp, Unknown
  misc_feature (1)..( 3003): 2750-1469P.txt file - cDNA_ID_2785812; gDNA_ID_1620813; Annot_ID_50624
ctcatgcctaatgggagcttggattcttttctacacggtacacataaaacagagcattaagcacaaaacgtgtatttgagtggtttctttagccacaagttttttttgttatttgcaggaagaaaagctttggattgggcgtcgagatatagaatcgcagtaggagcggctagagggatttcgtaccttcaccatgattgcattcctcacattatccatagagacatcaaatctagcaacatacttcttgatcacaacatggaagctagggtttctgatttcggtttagccactttgatggagccagacaagactcatgtttcgacttttgtggctggaacattcggatatttagctcctggttggtacacaactgatagattcaaatatataaaccaaaatttggattgcatttcgattttgttcatgtttgtttttgttataaacagagtatttcgatactggaaaagcgacaatgaaaggagatgtttacagtttcggagttgttctgttggagcttttaactggaagaaaaccaacagatgacgagtttttcgaagaaggaacaaagcttgttacttgggtataaagttatctatctattttccttgtataagttattaatcttgtttggtttcaagcgacgtcgttgtggtgtgtaattgtatacaggttaaaggagtggtaagagaccaaagagaagaggtggtgatagataaccgattaagaggatcatcggttcaagagaatgaagagatgaacgatgtgtttggtatagcgatgatgtgtcttgaacccgaaccagcaattagaccagccatgactgaggttgtcaaattgctcgaatacatcaaactttccacacgttcctctttttgatgtttctcttgtcaagaaaaataatcaaattcagttccaaaataaagttttgctgaagaaaaagatttcgagatctgcttctttgaaaagctaaattgtaatttaatactccatattagtatagtaaagattatttataattgatttgttttagtatggaataaaggattattacacacaaaaaagccttatatcaactattcttttttaagattctcgtacaaagtgggcattggatctttaatttttccctaatttacagctcagctcacgttttgatgtcttgttatttgatcccaaatgttctcactactacattaaaccttttgaagcaattagcaaccttttttttttgttacttagcaaaaccaaaccaaacattacgtttatataacgacacttttgctaaaacggttacttttcctagaagcaatttgctggattattcacctcaaaatcctaaaaacattaattagcattagatatctaaaaaaagtgaaatacaaatctttgtttctttttaaattgttttattttataaaattgattcacttgctcatcatttatatacaccaaagagtgtagaagagttctctcactcaaacaaaaatcaaacaatggctaaagcatggatctgcctttccttcctcatcttcctctaccttgtctcaggtatataaattaccagtttaccactaatcagccatcctagtttaattaatttaataatcctaattaacagtatcatcctcatgttctttccttttaacagaacgaaacttcatcaacgtcaacgcagaggtatttgcttagaccaactatcaaattgctatctgatttttttttcttactcaatgagtttttgttctaagttgttgttatagaccaagacttggtgtgtggctaaaccttcttccgatcaagtagcacttcaagataacataaacttcgcatgttctcatgttgattgtcgtgttcttttgagtggatgtccatgttactcccctagtaacctcatcaaccatgcatctatcgccatgaatctttattaccaagccaatggaagaaactattggaactgcaatttcaagaactccggactcattaccataactaatccgagtgagtttgctctttctctttaattatgctatcgaaaaacacttctctatctatatatagagagaagtggttttaaaggtaatttcatttttacctttaagtatctggttaattatattaaaggtaatttcattttttctatatgtgtaggctatggaaactgctactatgaataaacatgagcaagaaaggaaaaaaaaaaaccatatttcttacaagcaaacagaagaggaatgtgttttcttgttgttgcaatgtttatgagttataatttaaatttccaaagttcgcagattttgattaatcaaatttgataacataaaagcaaaaaagaaagtatccaacacttatcaaaatttgatcacaattattccatctcattttcagtaatgacccttattacgtactgaccgtaaacatagaacttaccgtaattaagcttttaaaattgaattcttcaccacatgaacatttggaaatatgtagaacaacgtaacgttttcttttcttttttctttggtgtcagaaactaacgcatttctaaagattttttttttttataaaggtaacgtatttcgatatactcgaatgttagtatgttaaaccattggataaatgacacgtggtgaaatcttagcctcaagattagataagcgtagactaatcaatcgtttccctcttctccttggtattgaacaaaaacacagtcgtcactttcgtgcctcccgaatgatctcatgtgggcttgtctcgtccacccaacaaactatagaaaaaaaactcgatcggctgatacttaatcacccacttgattttgtatttttgtacctttttttgttgtaatttttccatacacccaatttcccgtggaagaaaaggagtcagctttttcgtttgctttaaagcttgaatctttacatagttccagttactttctatagagcttcataatccctagttgcccaaaaggattctgggttttgtgagaatgatgacgtcatg

SEQ ID NO: 27385 - DNA, 3000 bp, Unknown; identical to SEQ ID NO: 5056
  misc_feature (1)..( 3000): 2750-1469P.txt file - cDNA_ID_2785820; gDNA_ID_1620758; Annot_ID_49933

SEQ ID NO: 27386 - DNA, 3003 bp, Unknown
  misc_feature (1)..( 3003): 2750-1469P.txt file - cDNA_ID_2785827; gDNA_ID_2213663; Annot_ID_132596
gctagggtttgtgtgaggagagagatcaagtggacaaccatgtttgagtcaaaactacagggaagagagatatatttttaattcattgaatatatacattggtgaatggagagggaagttgtggtagattagattttgtctacgtatgtctaccacttgtctacatatgttaaagatttagttgtgacttaggaggtcgtcaagcgcacgtgctaagcacaccaacgatttcttgatcttttcttcttgttggtatgaatatgatcctagaggttagtttaacaattttctaatgattttatgtatagtgaaacagtaatattattcacaatttgtggaactggctgatccaaaatatgttaaaaatgacattcggctactagcggaggtctgattcttagcctaacccttattcaattcttttaatactactagtgttggtttgaagtaagagaataataatgtacgtaaatgtatgtaatttgaaagtaagaaaagctttcgatgaagtcttagacagtaacaaactaacaaacatatccgctcaactaaatttacctaacaaatttccatagttttcaaccaagatttaaattaaaaatacactggaaattctaaacaaccctaaattatgttttttttttgttgtgtgagagcgaaatagtcggaattagagtaagaccaatcaaattttaaatatttatcgtaacttttatttcaagttgctttatatgatgtcttgaatctcaattgccttgccaagaaaaacaagcgctgacatatataaaaagcctaaaattacagaagaaaaatacaaagagctagaagaaaaagaaattcccctgttcttccgtaaatatcgttaattcgttatgacagagtttcattctctttgactagatctttatttttttctttacaccgatacaagtcaaaactcttaacaaacaaatatttagatcaacatagaccaaagagtcaaagaaataatgtctgtctccataaagtctccaacttttataacaaattttccgttgaatatgacagtaaataaaccaacggtctagttcttatcatgtctaaaaaccacaagctccttcctcatcttacgctcccctctttacctctccttttattctccttctcattctcctctcaacaactgatcgtataatcattctcacggagacgagtgaccaaaacaaggtctcccgcttcttgcgaagattaaacgaatccatttagattttaaaaaccacacaaaaaaaatatgggtcggctcaagttcgcatgtccggttcttgagatcaatttaatctcagctcaagacttagcccctgtctcaagaaacatgaaaacgtattccgtcgcttggatcaacaccgatcctatgagaaaactcaccacgcgtgttgatcaatccaacagagctaaccctatatggaacgagaagtttgtgtttcgtgtcaacgacaagattctctacgttgacgcatcagcgattgtgattgagatctacgcagcggcttgggctaaagatgctcttgttggtactgtgaatgttcttctcagcgatctttttgctccttggtctggttttggtgatggtaacgacggtggtggtgggaataacaacatgaggcttgtgactcttcagattcgtcgtccttcagggaggctacaagggtttttacgtctcggtgttgcacttcttgacggtggtcaacggagtatgcctttatctattgaggttttcgatggaagtcgaaaaggagagaggaatagtgttaaaagagaccaagaggcttcaagaatgatgcatcgccgtacgaatagcgatcaaacggatttaaccacgtctacgaatgattacggtgtgaaaacaggggttgttactggcaatggaggagaggtggtggtggtggcggtattgttgttggtgcggatagtatggttaatggttcgctttgtagctctgatattggaccatcagcgtctgtggttgcggctgcgattgcgcaagggctttacaatagacagaaaacagcggttaaagcggctaacaaagaggacgcaagttcgatacttgaagggaaaacagagggaattgagcatagagttgaacggtggagagcagagaaaaatggcacgggtggagcgggtggagcggctggatcaagcgatgattctagcgggaaaggaggagcgggaaggagaagaaggaggaggagaagaaaggagaaacaacaagggaggagaaacggtggaggagagggtaagaaagggttgttttcatgttttggaaacgtgtttggatgtgagatttcgataacatgtggcggtggaagcggcggagaaggagacagcacaaagaagagatataataacaataaagtagtaaatcttagtgctgtagacgaaacgtttagtcattctgcgacttgagataagagaaaatgtttacttatttttggtttcttttggtggtgtaaaacgtttgatgatgggttaaaccatacagatttgaaagtattgaggttaaaacgtatgaataaactttcccgttacatttctggtaaatggactaatttgaatatttgtataatactggggttattgtgaaaagcttttaaagaaagggaaaagaaaagagagctttttgagaaacgcattaacacaccataacttcatcatcaaccttctcctctttcttacgcaattacaacttcaacgcctctctatctcttcgccgtgaatgtcgagatagtcgtaagctctctgcttttcaaatttctctcaaattgaggtagagagagagggcacagagatagagagagaggggcataggaaacggtgattttcccagttcccggaggaacaatcggctgatttctctgtaatcgaagaatctaaacctcacccactcgaaatcagctcgtgggttttggggggtctctattaatttccaaattctggagaaaaatcttgtatttcttcaagatg

SEQ ID NO: 27387 - DNA, 3003 bp, Unknown; identical to SEQ ID NO: 27386
  misc_feature (1)..( 3003): 2750-1469P.txt file - cDNA_ID_2785827; gDNA_ID_2213663; Annot_ID_181884

SEQ ID NO: 27388 - DNA, 248 bp, Unknown; identical to SEQ ID NO: 7352
  misc_feature (1)..( 248): 2750-1469P.txt file - cDNA_ID_2918439; gDNA_ID_1621142; Annot_ID_56644

SEQ ID NO: 27389 - DNA, 136 bp, Unknown; identical to SEQ ID NO: 580
  misc_feature (1)..( 136): 2750-1469P.txt file - cDNA_ID_2918666; gDNA_ID_1592100; Annot_ID_151967

SEQ ID NO: 27390 - DNA, 3003 bp, Unknown
  misc_feature (1)..( 3003): 2750-1469P.txt file - cDNA_ID_2918714; gDNA_ID_2214477; Annot_ID_133148
acggtccagatttaaaacactaccccagtaaatacaaaaccaactgaagaaaaataaataaaaagtaaatttttaaagagtccgacccgggtccctcaaaaaaaaaaaactccgacccgggacaagatccgtatccaacaaacttatatgtgtatcggacacagaagaatactttccacgatcatcagcttctggagatctcttctgggaatcgagcttcactgttaaagattttccttcaatcggctaaaaatggtaacaatcgccactccctttgcttttgggcttctctgttatctgttcgaattttggatctgccttcgatcttgtactattgcatcgagtatctacgatttgatttgatgatgaaattgaatctaatcctccggtatccgtagatttctgcttggatctgtccggttcttttctcgcttacgaattgatcgattatttaggaagtgaaaggattagtttgtttcgtgaagcttgaaattgttatgtttctgttgcccattcgaatctcttgtgagttattaaatccaattcattgtttttgaaccactattgctcttgaagtaattaagcttcttggattcaaatgtaatagggtctaagctagttcatgtacctcacatctctttatttgcctctgtttctgaattggcaaaataagctcgttgatctctccatctttccatatctttaaatggtttaaaaacttttcttgagatgcttgtggcttgcgtttaggtgtatgatggtaaatgattctcaagttctggtacttgatctctcacaattccctcttttgcttgccttatgcaattatgtgcatttcaaatctttatgagttgccagaaatcgtgatatatactactggttttgtctggtcttgttttaattctctttatctcgatgctgtctttgtgattctagaattttctcatgcttgatatgggtgaggagacgtcaaaaactaattaatgtgttatgtattgccattcacaatgatagaataatgctttcttgaaaagaaaaaaaaaaacttctaaggtggctgttttgggttatgtttgtattttcagatacatttcgtgttactagtcagtcgacaagggaaagtaaggctcaccaagtggtattcgccgtatacgcagaaggaaagatctaaggtatgtacagcttaagtgttattgagttaatgccgcattatgctttgcatgcctatttaatcttacatttggaaaaatgatctggacaggtcatacgtgaactcagtggagtgattctgaaccgaggtcccaagctctgcaattttattgaatggagaggatacaaggttgtctacaaaaggtaatagacatattttatataagtagcatgtatttgctactttaaaaacaatggttataaacatgatggttttgtaattttgcagatatgcaagcttgtacttctgcatgtgcattgatgaggcggataacgagttagaggtactggagataattcatcactacgtcgagattcttgaccgctactttggcagtgtgagtaaacgcttatccaaaatatactcctaccactctatcataaccttacaaaacatctagattttgattaagagctgtttattctatgatcttcaggtgtgtgaactcgatttgatttttaacttccacaaggtatacatactcaactctatcaatgattctctactctctgtattttacttcaatatgacaattttcgaatctggttgttttgttctaggcgtattatatactcgatgagctgttgatcgccggagaacttcaagagtcaagcaagaaaacagttgcaaggataatatcagcccaggtatggtttcttaatcctaatgcccactgagacaaaaacgattagtccgtaagggttgtgtaaatgatgttgtgttataatatttgaaggatcaattggtggaagttgcgaaagaggaggcgagttccataagtaatataattgctcaggctaccaagtagtccttttctgaacttttcttatgcagctgaaacaatcgtaaatgagttaatattttccttaaactctgagatattctcttctgaatcacacttttgtttgtcatgtcatgtgattgtttgattgattagaagaaagaagcattcatcgttttgggtttaaaagtagtgattgatctgcgaaatcataaatggtatactattttttcacatatgttacgttttaaaacgtggaatgctgaaatttcatcaagttcatcatctcgaaattataatttgtccgattgattgaatagaattggtttttgagcctgaggactgatgcaccaaacaacatgccagtgtctcgttctttcttcttcaacgtgcctaattttgtaattcgggcgacctaacctcattttgtgtaaccgtgatccgccatgagaggaggtatccgctcgaagagttatcctttctcctcacaaaagcaacgccaatgtcccttttctcactttgccctgtttgctccttagtacttgtttcaccaaaataatctataggatttcaaatacatgaagaatgtttgatggtaacaccaaaaatagtggagaagaaacagacacttatgggcttgggctcaaggactcgaaacttgtatacccaaacttaaacgtgactgcgtcttgttcttaccaatccaataatttatagtaatgataataattcatctttccatatataattttttttaattattgaaattaaaaatgagggaaagaatatccgttttctttgccacaaaaacattttcatttgggggttttcataatttttggttcttcagctcctcaagcttcgataggtatcgatcgtcttcaccatacttttggattttttctgatcacgtttcaattccaatctgagagatcttccttgattcgatttctgaatatatctctgtaattttttttctggttttttctagggttttagtaattttccgatg

SEQ ID NO: 27391 - DNA, 3003 bp, Unknown
  misc_feature (1)..( 3003): 2750-1469P.txt file - cDNA_ID_2989965; gDNA_ID_2214494; Annot_ID_183768
agatatagaggctgtggagatggccatgggatttgtccagagtaatcaacccttcttgtgggtgatccgaccaggctctataaacggacaagaatctttagacttcttaccggaacagttcaaccaaacggtgaccgatggaagaggttttgttgtgaaatgggccccacaaaaagaggtattaaggcatagagcagtgggagggttttggaaccatggtggatggaactcgtgcttggagagcataagcagtggtgtaccaatgatttgtaggccgtattctggtgatcagagggtgaatactcgacttatgtcacatgtttggcaaaccgcgtatgagatcgaaggtgaattggaaagaggagctgttgagatggccgtgaggaggctcattgtggatcaagaaggtcaggagatgagaatgagagccaccatattgaaggaagaggttgaagcctctgtcacaaccgaaggctcttctcacaattctttaaacaatttggtccatgcaataatgatgcaaattgacgaacaatgataagtggtaaatttggtgagaacgaaattacgtgtgtggtgttttaatttttaaataaaaatatgtgtttgaagtaatagcggtttttgatgaataaattttacattcatccaaaaaaatacagcaattttgtattgttcttaagttcttaatggttgaagctaattttaggatacaatgatattttcattggtgttaataacaagccagtttttgacatgtgccaagtgtgtatttgcgtacgtaggatccaatcttctttgcaattttatttgtagctattaaggaatatttgtaaataatttatagtttttataaaataaacatgtaagagcatactcactaaacaattcttgatcggtatctttactatatattagtaaataaaatttaagacattatctttccagtgtctaaaatgtcttcctaaagacacaaatgtaatgctaaaagacacttcccattttttaatagggaaaaatgtcaaaaaaagcgcgaactttaaaatttgggacgataaaagcatgaactttcgaaatgtcatttaaatcataaaatttcatttgactttttaaaaaaattgtcaagtttcgttgacttgaccattttgggcacgtcgttaaatttccgttaacagcattaactttctgttacaaatttctgttaaatcgaaacgacgtcgtttttagatctccaaaacgacgtcgtttcattagaaaataatgatgcaaaatccgcgtccgcaatggctcgaacatatgacctattggattcatatagggcaatataccgctgagctacgacaataatttacaataataacaaacattgcatacatatactaaccaatataatatactattaattaaaaatatatgcaattaattaaaaataacaaaattaaaaaatatatattaaataaacttaccataatatattttaaatttcaaatatttaattatatatataaagacatcttctatatttgaaaaattatagatctctctagaattcacataagtctttgcaattgtatttttggaatagataaaaactgaaaaactgaaaattgaaaataatttgcataagtcttttctattgtattttctaaatttggaatacttaaaaattgaaaactaaaaataatttctcaaatataaaaaacatctatatagaaatttaatatttcaaatttcaaaatatatatgtatggtaggtatatttaaaaactttgtatatatttgtttttttgtagttttgtaatatataatttattgtatatattttaaattaattgtatagttttatttgttagtatatatatgctatgttttttttttatcaaactgttctcgtagctcagcggtagattgtcctttaggagtccaataggtcagatgttcgattccatgtgaatgcggatttagcatcattattttctaacgaaacgacgtcgttttggaagctccaaaacgtccaaaacgacgtcgtttcgatttaacagaaatttctaacagaaggttaaccccgttaacggaaatttaacgacgtgcccaaaatgaccaagtcaacgaaacttgacaatttttttaaaaagtcaaacgaaactttgtgatttaaatgacaattcgaaagttcatgtttttttcgtcccaaatttgaaagttcgcgcattttttgacatttttccctttttttatcatattttttattagttttttatttaaagacacccacacataatgatcaatgtggatgctcttacatgcctacaaaacaaacctattttatagttcttctttgggttttcaaatgttcttataatagagattgtgtatagattgagcattatcgatccaaatatataaaaagagaaagaaaaaaatatatatgatttatacccattcattgttttataatgatcggtagacgttgaaaacccaaaaatgataaaattagtagtagctaattgagttctagaaataaggtttgtaaacctcattagtttttttgacatgggatacgacttaagactactaattattaattgttctatttctgttgacacttattttaagaggaaatcgaccctgtttctatttttagggaagaaataaatagtaaaagattgctaggagttagaatattaattttgtaagatgttagatgtgaagtaacaaaagaatgccaaatatagattaagttgacggacacggtggtgaaccaatgaattttcacatcaataatcaaaaaaaggtttaaccaatcattcatctatttgcttcctgccacaactatatttgcatcaccccattgttcttaagctaaaaccaaacccctttcaatctcaaatctaattttaaatctaccttttcttttgtttttttctctcctcacaaattactcaatttatagttgttaattttttgaggagaacaagaaggtggtagtattatttcaaaatg

SEQ ID NO: 27392 - DNA, 1666 bp, Unknown; identical to SEQ ID NO: 1913
  misc_feature (1)..( 1666): 2750-1469P.txt file - cDNA_ID_2989969; gDNA_ID_1620467; Annot_ID_157950

SEQ ID NO: 27393 - DNA, 3003 bp, Unknown
  misc_feature (1)..( 3003): 2750-1469P.txt file - cDNA_ID_2989975; gDNA_ID_1972069; Annot_ID_178536
acttgcccacttcctacatcactcagaagcagattgaaatccctacctcccctgtatatatattgaacccttgtttactccaaccttgggtttccaactttgtgtttccattaagacaaaaacacgattttggatttggtttgcaggaaaaacaatcgccaccagtgcaggaaggtttgggtgcttttcaaaaactgcccatggtcatgccatctattgatttgtatgcttctgctctcaggaagtctaaaagagtccaaccaactaaaggttatttgattctttatcttgttgtctttgtttacacattaacttcttcaaactctttaactgagtctttgtccatttttggtctcaggcattgctaatattgctaagcgagaaagaaatagaggtgctaaacagcttgatgcattcatgaaagtaagttcattgcatccttcgctgtgttatggtttaaattctgaaacgttaattgtctttaccaaatcagaaattgtttttttgtgaaaggaactggctctacctttaaaaggctacatggaaagttttcccaggaagaaactcttgcatccatatgaaaggtctcttattgacttgacacttggtgatggaaagtatgaagaggtatctatttttaagtaattcagcatcttagcctgcaactgattttagcaaaggcttatagataagtttttaggtgttaggaaaagttgatgttctgaggaagaaggtgcaatctgttggaaaggaacatgcttctctctgcgccaaggtcagactcctcagttccgtcaaaagcatattgtgtcttacattttagttaatcccatatactgtagattgtgattggtactacatcagtaaaggccttataagcttcataccgatcccatttttttcatcttattctatcatatatcagtgtaggaaaagttaaacatctttcaatttcgttgcaggctttgtcaaagaaggaggcagaggaacgcttgagcgaaggtgtggagaagctggaattggttttccaacaacaagggggagctgttgatgatttgctaactatagcgaaggttccttactagaatcttttgtttgtctcttccagtgttatcagaattgtatgtatgaacagagttacgcactttgcaggttttgagggctatgccagttgttgacttggaaatgccgactctttgccttgtcggagcaccaaacgttgggaagtcatcattggttcgcatactgtcaacagggaagcctgaggtctgccttatgtaccaatctttatatatgtgataataacttgcattgtctaatgcttatggttttttcggttgtcagatttgcaattatcctttcacaaccagaggaattctgatgggtcacatcgttttaaactaccaacgatttcaggttgcgttgcttacttcgctgcgtctaatcactttcctcatgatatagattattgaatcatccagaaacgcattgcaggttacagacacccctggccttcttaggagatgcgatggtaaagtctagttgctacgaactctcatgtggatgaataactatatgatatttgattaagtcttgattcttgtatttttttatttggtaattacagaggataggaataatctagagaagttaactcttgctgtactcactcatcttccaaccgcggttctatatgttcatgatctaacgggagaatgtgggacttctccttctgatcaggtatatagtaagaaacaaatccttatggatttcgttgcatcagatgtgtcaaaggaaagcacaagaatgtgcaccgttatctgatttgccgaataattgggtctgatatatcctgattcagttatatgtttgttgtgagggcattgcagtttcaaatatataaagagatgaaagagaggtttaaggattacctgtggattgatgctgtgtccaaatgcgatctgctgggaggctcaccggtgatgtatgccaaagaagatagaagcagtgatgacgcggaaatcattaagtaccgggaaagaggacctgatgaatcaattcatgtctcggtgaaaacagaacaaggtctcaatgaggtatgaaacttaccagaaatatttaatgtggaaagaaagcaagagtgtgttttgagtggtctgtttctctacatggctctgcagctaaagaacaaagtgaaggaagtactgagtagtgagatggagaagatccaaagtggagagaaaactgatcaaagtgttgctacttgctagtgcttagctagagattttttgcccattttagcattttgacattaatgtctcatttgtttttaatatacttaaataggattaaaatcttaatgcattatatatacatagctatttctctcctcccttgttagtagtggatttggtacgcatatatatatatacatatataagttttagcaataatgcaggattagattgtttttaaaaaaagagaaaaatgttgccaaaggaaaattgtgacgcacaaaaaaaggaacgatcctgaaattgtcagaagtagacagaaacaagaaaacttgtggagaacaataaaatatcggattcagaacagagattaaaaaaaaatattaaaaaaatagaaatcgataagtaataataatattatctcttcttctctgcttccattttgggtatcgataaaccaccacatccttccctgaaaccctaaccacaacaatcgccgccgtctctagaaatatccatccacctacttcggctttgtttatcaggttcgatatatctatcaccaccgccttcttatctcaatttctgtgtttgatttttgctttgttggtgtttgattttaccgcagattttgatgaaaccagatcgggtcttcctctagatccgttctaggttttctatttccaccgtcttatcattatcatcatcatcaattcatcatcatcatcaataatccagatgctcaccaaattcgtcattcatagacatg

SEQ ID NO: 27394 - DNA, 3000 bp, Unknown
  misc_feature (1)..( 3000): 2750-1469P.txt file - cDNA_ID_2989983; gDNA_ID_2926300; Annot_ID_205685
gttgagaaccttgtttatcatcctggtcttactgattccggttctgtcaatttgaattccgttactgagaatcctgaggagaatttttgggcatattgtacagaggagcatttggaagagattttgctgaaacatttggagtttttgtataatcaagctgtttctaagcttcttgaattgggctatgaggaacgtgttgcgttgaaagcggttttgagtaatggacactgttatggtgaattggatgtgttgactaatatagtgaataattcattatcttatttgaatagtggtggaggtggaggtgggagtaatgggaacggtgaggatcgaacggagactggttttacggatttgagagatttggaggagtattcgcttgcgggtatgatttacttgttgcaacaagttaagcctaatttgagtaaaggtgatgcaatgtggtgtttgttaatgagtgagctccatgttggtagggcaagtactctggatgtcccaacgaataggtctagttgttgtactaaggaagatagcaatgtagaagatgttggtacgggtggtactctagatattgctggttttatggcaccagcgttgtgtcgattccatggaggttggggttttgggaatgggggaggacctgagttttctggtaatgggttttctatgaaaggtgctgagttgaagttgcagagagagattgattgtcctaaaaggtttaatctttcgccatccatgaagtccttgttgaagcggaatgttgcagcgtttgctgctgggtatcgtgctagtatgaagcagaagcaaatacagtcgtctgatactattggtgatagcaaagcttgtaatgatcctgcaattgtgaagagttgtgggcagcaaccacgtaagtcagggagtgaagaaagtgttagtacggtgttggagaaatttcgtgatctgaaccttgatgataatctggaatcggtgggtgtggatgataaggattgtgtgatagtcgatctgcttcatcaggttaaggatttcgagaagaaagtaaaggaaaggaaagagtgggctcagaagaacgcaatgcaagccgcacaaaaggtcagcgaggaattagctgagcttaaaacattgagtagtgaaagagaaggaatccaactgctgaaaaaggggaaacaggctgttgaagaatcaactgcgaaaagatttactgacaaggaaattgaactcagaaaagcttgcagtcaaaatgacagggccaatgtaattgtaagaaagcttgagaatcaaaatgcagagattcgagcagagcgggagggatccaaattaagtgcatcagaatcgcttaaagcgtgcatggaagcatcaaagaaggagaaaaaatgcttgaagaagcttgtggcatgggagaaacagatattgaagttgcaggatgagattacagctgaaaaagaaaagattaaggccctatataagactttagctcaaatcacagagtatgaaaaggagattgaggtacgttggttcatattatattcatttatactgtgaaagttctctagatcctctatacttttaactctagaattgtgggaagtacatttacttaggattcaaaatatttacgtacgttatcatttgaggcacacatctagttgcgaagttggttctgtcttagatggtagtatgccataagacttcaaagatcattcaagaggtatagtctgtgtctgccacatattttgctagggtagatggaacctggatttgatatgaatataatcttggagaatccgtctcgagttgtagaagccaaatgatttgctatacctattgatatgttccactggatagcttttctctctacatggtggtctatattttcttttcgttcctgacgttttacctgtttgcgccttgcgggtacgttatctatgttgctgcacattgtgttcaaaaccttgctctagatttgcttacttggactgtggttgatgactgataattgaaatatcaatttactttacctcaattaaacatggaatgatggttagtctatcaacttctttttatatttacctgttcatatgttatttgcaggcgaaatggaggcaagagcagaaggcaaaagaggaggctctggctcaaatggaggaagaacaacgctcaaaagaagcagctgagggtcacaacaagagaaagcttgagactttacgactcaaaattgaactagacttccaaagacacaaagacgatcaccaaagactggagcaagaactcggtcgactcaaagcctcttcagatagtgactcaagccacatatccaacaacgcttggaaacccaaaaaatctcaaggagaaaacattgctaagctgcttgaagaaattgataagcttgaagggtcttatgacaatgaagcaaactatgatcgagaatgcataatctgtatgaaagatgaagtctctgtggtgtttcttccttgtgcgcatcaagttgtgtgtggtagttgcagtgatagcttcttcgcgagcaacaacggcggaagcaaagtcacttgtccttgttgccgaggtttggttcagcagcgaatccgtatctttggagcaacctcataaaagcagaaataagcttctctttgggtttcagagagatcaccacaacttcaggttttactttgtaagtacaaataatatgtttagcttcttcctcagagctttttacactcaggaaatttgatttttttcgatgaaagatctttgcacgatgtaaaataacttattatcgtgattatcttgatgaattcgatttggaggaaacatgcctctctagtttttaccaaataaaaatcaactatcgtttggtttgtttttggttttgtttggttaaaccggattggacacttgttagcaaaacaatgacaaccacaagttcttgaaaaccacaattattgatgctttgtctacttttcttcttgtgggttttgttgtgtggccgttacttgcaagaaaatg

SEQ ID NO: 27395 - DNA, 3003 bp, Unknown
  misc_feature (1)..( 3003): 2750-1469P.txt file - cDNA_ID_2990006; gDNA_ID_2936587; Annot_ID_195145
gacaccgtcacaccccaaccagaggagtaagtctcttattacagttctaacctaactgatttcagattcgggttatagtgttggaggtttgattattgcgtttatgtgaaatgatgtttcagatggaccctaagttcctgaggaaccagaggtacgcaaggaagcacaacgtcaaggccggcgagaatgctagcgctgaagaataagtgttttgattatctgtgagacattttgaagtttttttttaatgaatttaagactttcttagacaaaggaaccaatttactttgcgcttttgatcatgtttacgcaattgtggtttgtgtactctcttatcctggccttaatttaatatcagcagttttctatgcatcttctcttatctgcaagttacttgattcgttaccgattcttttattgtttagcatatatgtttgtgtgtacctgaaatctgatagccgaatttgatctacaaattagatgttaagcatataatccgtacttgatctacaatcatctttgattgttaaacatatatgttttgtgtttttattgtttcttttaaattacatgtagcttcgctatttgttggttcatgattgccctagttgctgcatcttcaggatgattctctataatcctgttttgtataaaattgtctattggtattgaccatttacaatactgtcgttcctgtttggttttgtgtatgcctagtgtttacgattagtaatcgtttgaggtttcattttggataaaatagggcatcttctttgcatcccactggtcttcatgcatcaattttgtttagcaacatcaataataatctcggaatagttttaaaacaaagttaaccctaccaatgtttaagtttaaaactttaaacaaatgaagttgtgatgactaaagaacccatttactctccccgaatgttacacagagatcctgataggtcagaagaactgttaaatatcgtttcggcaagcctgacgttgtttaatctcatgtctcgatcagaaggaaaacgttctaaattttatttctagaaaaatttcactctagttaacgaaagcagttgttgaatagtgcttctaactcaattgttgacgttctcagtccacgtcctgtattaccgactcaactcacatcatcaaccctcagatgcagccaattccaggtcatatgcctcctcattaactattttccttcttatcatttatttagatgaattttcaactcttaaacattttcttgtattttgtccctaacagacaaatgtgttctgcttaagagagcgagatcttctagagcgatttacttctgaagttgcacagcttcaagggagaggagaaagtcgagaattctctttcctcctggtaaagcatttttttcacctaaaatttgcttccttttctgttctccgacctttaggattcagtaatagttttcttctcctttccatccgtacttgcagagtcatcaacttgctgaagacttaggtaaagctttcacagagaaagcaatgcttcaaaccattttggatgctgaggcaaaactacctactggctcagtaaaggtaggtcaaaaggattattacctgtgacgttttgaacctattcagttgaatcatggttgttttgctagctctagggatcacggatggtacttcaggcttccatgtcatatgattagccattaacgtgcagagtaattgattttaaactatagttttttgctcgatagattgtaaaaagctgtgagacaagtgggatgttttgcttctctgagcacaataatagttcatcagctttagtcactagcaaaggagactacgcactagcagaggaaataatctaaactaactagtaacgacctccatgtatttgatgacaggatgtgttgggtcttgtaagatcaatgtacgcattgatcagcctggaagaagatccatcgttgctgcgatatggttacctatctcaggataatgttggagatgtgaggagagaagtttcaaagctctgtggagagcttagaccacacgcgcttgcactcgtcacttcattcggcattccagactccttcttgagtccaattgcattcaactgggtcgaagccaatacttggtcttcagtttagttacctgctagtaacaatctcttccataattcccatatatctcttataaaagttatgtttccacaaatctacagaaactgttgtatgctcgtcataataaaagggtatatatgatatgtatccagggtttattctttacttaaaactggtccaaacaaaaatgtttggtaataatttcaaattcttataataattgttattatgattcttgattggtttgagttgtggataaaattttttgagtacttaattcattcaattttcactagacatgtttatatttttaatttatattgaagtttgccagattaattaaggaaacacaaacgactaaaaaaaaaaaaaaaaaacacaaacgactacgttaggtgtgaaaacaaaattgaatttgtacgtctctaacgaccaaatgactatcaaatgacaggcaaacagttttcttaacggaaaaaatacagtaaaaataagaaaaaaccgtttgatcatgtttataaaaaattgaagtgggctaattttgtcaaattgatttagctaatgaaacgggcctaagtgggtctattttaagcaagtatacaaaagcttcattaccggaagcccatattctcgccaatcacatataagaggccactatcgtaagcccatatattatctaagaggccactgtggtctgtggggtgatttaaattccatctagggttttgactattgtgtatgtcacctatctttcctctcgcgtctctcccctttactcaggttagctgcttatatccggctgatcgctggatataatttgacttttaactcttctcgtttgtttcgttggtgattgagtttgaaaagttgtgttgtgccgttgttacagaaatg

SEQ ID NO: 27396 - DNA, 3003 bp, Unknown
  misc_feature (1)..( 3003): 2750-1469P.txt file - cDNA_ID_2990010; gDNA_ID_1971873; Annot_ID_176651
agagagttaccggagatgaaactcggtaatgttcttcaggagatcggaagatttcttcctggtcatcagtttgcttctgtaagtctgacatcttgtatagttgatgctaaagttgtgattttgaggtcaagttaaagttcaaattttgggtctacattggctttgatctttctctcaaggaagaaaataagaaaatttctgaagtgggttttaggtaagagctgggatggagatggctatgattgatgcagctgctaagagtgtaagagtgccattgtggaaactatttggtggagcttcaagtacgattactacagacataacagttcggttctaactttagctcttcctgctacaatttcctttcaatttttgtgtgtttgcaaacaaattcctaaagtttatagtcattggctcctaaagtgattcaactatgactataacttagattatgtgtgttaacactgcattcatagtttctcaagtatgaaagtatggaatgttaatggcttgaaatttggagcgtatgaagttttgaattgtttgtagaatgttaatggcttgaaaacaccgggaacactaataaattactcaagtatgaaggtttgtgtgatttgtggttctcagattccgatagtttctccggctgaagcttccgtattggcctcaaagtatagaaaacgaggttttgaaaccttgaagctcaaggtgggaaagaatcttaaggctgacatagaagttctccaggctatacgtgcagtccaccctacttgttccttcattttggatgccaatgagggttatcaaacagaggaagctgttaaagttctcgagacgctgcatggtaaacaggtttctgaatcatttttggaattttctcagttaggtattgagcgctagaggttttaaaaaaggataggtgtttggaaaacttctagcctgttcaaactttagtagctggcgtttcttttctcggttaaaacctgaattgttgtgattgttttgcacagaaatgaaggttacaccggttctctttgaacaacctgtccacagagacaattgggagggtctcagtcacgtgactcgaactgcaaagaacagattcggagtctctattgcagcagatgagagttgcagaggcttgactgatctcaaaaaaatcatagaaggtaatatcgtagatgttgtgaacatcaaactcgccaaaaccggaatcctcgagtctcttgaggtaattgaattggctagatcatctggcattgagcttatgatagggggaatggtggagactagattagcaatggggttctctggtcaccttgctgctggccttggatgcttcaggtatactcaaatttgtaaacaccacatttctttctaatgtgaacatcataattctaacaagttaagaaggaatacacagattcatcgacttggacactccgcttcttctggctgatgatccagttcaaggtggctacaaaggtaaaatagtctctgttttcttcatcttgcatttttccttgttaaaaagatgattgaaattcaaaatgaacaagtctaatgcttgtggttttgttgacagcatgtggtgctgtctatgagtttaaagatgaaggcggtcacggaggatatcttcagtggaatgatgttgctcagtgaaattccttttgtctacttaggtcccttttcttttgttcaataggattttaatcgtaagtttaatgttggttttgggttttgtaaaggctaatcttggtcctaaattctcagtatgtgttagttgagagtgtatgtaatctagaatctttgtaacttcagccccagggagtaataagtgtatgaattcattacagtgatctgcttgatatctgtctgaaacacacaacacaggtctaagtcacagagcttataatagatcacaatatgtgattcttgtttcgatctttgattattggggatttcatttgcagagtctgttttgtcaactaattccagacttttattttagtcattatttgtgagtattgatagagagaaagtgaaaatgaaattgcttttcttgtggaagaaataagagcaaaactggtaggtgtagtggtgactggtgaggcgtgaaaatctcaacagatgtacagagatttctggtaaaggtccaattaaacactggactagctatttatttatttttaattacagaaaatattatttggctaattacagaaaataaaatgtcaatttttatggtcatctgagttttgaaaagaatccaaaatagaatacaaagcccaaccaaaagaatttaagccctaaaaaaaaaaatacctataaactaagtcgaaaaaaaactttaaatttttcggaaactaagctatatgcaagaaaaatataaacactagaattataaagcagaactcttaaagccaaaatccaaagatatcgaaatcatatactaagaatagagacaaacaaacttaaacccgaagaaacaccactaaatccaaagacaaaacatggtctttttttgaaaaatttacgaaatagatttaccaatgttttttttttgttttttttttagatgtaccaatgttgttcatggccaacccatcaatgacatatgcctcctcctattacgaggaaagatgatatttcgaatccaagtaaccaagactttataacttggcaagcaaatgcaaaaaatgagcttaatacttggcaagtaaaatgtcaacttgccaacttgtcaagaatatggcttaaatgcgtattcaaaaagcttaaaatgtcaaaccaaagttgacattggtggctagtccggaatggatgaaaccaccctttaaaaaagttttaccaaaaaaaaaaaagaaaaagtaaaatgtcaatataaacagacaaatacaaatgtttattcaaattgtattggtaaaagctaattttgagaatcgttttctaaaaacaaccagcacaatcaacaattttttatataaaaaaatctctaatatg

SEQ ID NO: 27397 - DNA, 3000 bp, Unknown; identical to SEQ ID NO: 4888
  misc_feature (1)..( 3000): 2750-1469P.txt file - cDNA_ID_2990026; gDNA_ID_1620744; Annot_ID_166569

SEQ ID NO: 27398 - DNA, 3003 bp, Unknown
  misc_feature (1)..( 3003): 2750-1469P.txt file - cDNA_ID_2990045; gDNA_ID_2684113; Annot_ID_190694
aaattcgagtgttttcatattgttaatctttttcttcaaggaaagaagagattttgttttccgtttctgggggtttttcttgattctgatctctgatctgatctcatcatcattgtccgtggattctccgatgggtttctgattgtgggttctttcaaatttcttcacttttggagcttttcttctctctgtcttttgttttccctcagctatggcttggaatgagaccaaactcaagaggctctatcaagtttggagaggaagcaatgtaagtcctgacattttccactttgctttcgtttctttcacattttcataacctggagaagatttatcacataggttttggtcattaatgaaatcgctcttggattcctttgagtccaagtcatagcatttcagactcttgactctttattttggtaatgaaataagaaagaagcaaaccagttttgtatctaattgtcaccttccgttgactcagtttagctcttgtgttttagatcattttagactcttgactcttattcattctcttagtagttgtagttgttactatcttgagtcttgattgttcttatatggaagttttcaggcgatggtcattggaagctatggatttaaaactgactttgattttccatttttctttgaagaaatttctatgtggcgggaggctaatatttggtcctgatgcatcatctctatatctatcaaccatcttgatccttggtcctgctgtaatgttctttgtcaaaatgtacactaaaatggctgatcctcgtaccaagaatccaaatctatgtattccaattctctgtgtgtcttggatactcacaattttggtatgtcttctgctttcgaactttttttaaatgatttttttgtgtgtaaaaagtgaactaaagtttcaatagttttcttcaggatatatttttcctcttaatgacatctagtagagatcccgggattgtgccaagaagttttaggcctccggaaaccgatgatgcaccggattcaactactccatcgatggaatgggttagcggtagaacccctaatataagaataccacgggtcaaagatgtaactgttaatggacataccgtaaaagtgaaattctgtgacacttgtttgctttaccgtccacctagagcttctcattgttccatatgcaacaactgtgtccagagatttgatcatcactgcccttgggttggccagtgcattggagtggtaagtttactccatgactcttgccatatattcccggttctatgttttgaacttgtttggattcttttgcagcgaaattaccggttcttcttcatgttcatatcaacatcaaccactctgtgcatatatgtgtttgccttttcttggttgaacatatttcaaagacatatggatgaaaagattagcatctggaaagctatatccaaagatgttctatcggatattctcatagtttactgcttcattactgtttggtttgttggaggactcacaatatttcattcctatctcatctgtactaaccaggtgattagaaagatatatgctttcgtacatttcaggtctttctttttctgttcgctctgttttgttttaatggtgaaaatctgttttgtgcagacgacttatgagaatttccgataccgttatgataagaaggagaatccatacaacaaaggaattttggggaacatatgggaaatatttctgtctaagattcctccatcaatgaacaagtttagatcatttgtcaaggaagaagattatatgatgatgatggttgaaactcctacttcaaatctaggtgaaagtctagttagctcgaaagagaagattgatatcgaaatgggaggaggaaggattgttgatgagagtggaaagagctactctctacctgagattctccggaatctaaactatgaagatcttgaggatgattgtgaggaagatgacttgaaggctaaggatcatcaccaccaccatcaccatcaacatcaacataatgagggaatcatccctccttttgaccctttttttaccaatgagattggtagtaacaaagatgagagaaatggagaagaatcaggaggatcttcaagtgatggtgaaaatacagggaaacgcgttcgggtctcagatgaagatgaagagaaagttgaagggtatgaacgaaattggagtacagataaaggtatgaatataaacgcaggatctgaagatggagcaagctctcctgtatccacttcaccaatgcttcgtaaatagaggtaatcaagctttacctctgtgtttctctagttgctaaagcaagttgcttgcttttcaagaaaccgttctcagccctaaagctttacctctttgtttttttttacttgctagagaaggaaggacttgaagctggagaaatggagtttgtgctttatcattcttttaattctgtttcatataattgtgggaaaaaaaatccgaaaaataacaatcatcttagaaaattgtgagtttgagcactagatttttttatttttaaaattctcctttttagttgtatttatatataccagaatggtctggatatcaccagcatcacatattttctctcttttttatttttccttttttgttataaaaaaagatttggaccacgaatttgtaacgtatatactgttgtcggaattatttttccttattttattggttgattttcatattttatttgtttctaatgatttatcaatcacatatttttctttcaaaaatgttctgttaaataacgaaatcgcaaaaataaaacagtgatattatcaagaagacaatgcaaatcaagaaaaaccaattaattatcgccacgtgtctggctcccacatcagaattcagattttcacaagatgagatttttcacaaatataaatcaccacacagcctcatcttcttcctctagctgcttttgctctctatctcactctttgcttctgcaactcacagtcaatg

SEQ ID NO: 27399 - DNA, 3003 bp, Unknown
  misc_feature (1)..( 3003): 2750-1469P.txt file - cDNA_ID_2990057; gDNA_ID_1972122; Annot_ID_179042
caaaatcgttgtttagtgctaattacttatacattcaggtgtcgagactcatccaagaacttgcagcagctgctgccgcggaaaaaggactaacctttgaagagaacatggtggaaagactatgtgcttattcacgagctgtttctcatttcccaactgctgttaaagaagtacatatatcacttttatcatccttgatctctctctttcaatgcatgtgcatgtgcatcagtatctgtttcacaactagttttctgattattgcagtttaaatggaggaatggttggttttattcactctcagagaaggcgattgcggaagggcaaccggatccgtgtcccctccataccgaatggctgaaagagcttaaagtgatatagagccagtctttctaaattgtgagtatctggattaagtatcattcttacatattttaagtagatgatctgaaactagtgtcaactgtgtacacgcctgagaagtgaaaaaaagatgtaattttttaataaagaaagagaatcagttcacgctttgtaaaatgtccagacttttatatgtgtaaacttgtgcattttcaagaatcaaaacttttctgcttctagactcccatcaattagggaagactagaatcttcaataataaacaaattatgacagatacctatgtagactctttggaatcatcaatagttgacaaagtaagaggcaggatcgtccacgcttgtttgaattttcagcctttgcaggcaaggtggtccaagtaggcaactgtggtttcttcggttagttactatataacacataattctatattagctttagctttagcttcacataacataactcagttttctacaaagaaaaaaaaacagagcataatgagcagagagaagttttccatatataacttgctctctcttctggttctgctgatccatggtttgattgcagcatctgctcaagatctcactgtcttcagttcttgtcaaagccattgcgggggaatagcgattccttatccctttggaattggtaaagattgctatctcaacaacaatgagtggtatgaagttatctgtaaccgaacctcaggaaaccctctgccagttcttaagagtatcaacagagaactggtgaatatctctctcccggacgactcaagcgatgtctttgggctaacccgaatcaagaatccggtaacttctttaggctgttccaatatggaagaaatcagcttggctttgaatgtgaccgggagcccattcttcctcaccggccgtaatactttagtagcagttggctgtaacaacaatgcctcgatgactgatgataagctgcagattggaggatgcgagtctacctgcgacgtggggtttggtcagagaggacggaacagaagctgcaacggctatagatgttgccaagcgaagatactctctgaccgtctgcaacagattggcatcaagatagagagtcttgatggtaacacaacgaaataagctgggtgcagagttgctttcttgacagacgaggcatattctcctttaaatataaccgaaccagctttgttttacgataagggatatggaacggtggagttaggttggttcatagataggttacacaatatgtccgttgtactggggtttgctattcaattaccgagggtacaagcggttggagttacagtaactatgaagcttgcatatgtagatatggtaagtatttagagcgaagctatagaagctgcaggtgtaacagtggctacagaggcaatccatatctctcgagtggatgtacaggtaaactaacattttctggtataactttgcgttagtttctgtaagctccatgaatcattgatgcattcttcgcctaagtagatattgatgagtgtgaagaagccaaagctgaaggaagcaaccattgtgggaaagggtatgattgtgagaatatcccaggaaactttaggtgtaaatccaacaaaaacaaaagactagccatcattcttggtaagctaccgatcatctgcgatatgtcatcatggatagcaataaaacggatttggctttaaatgtgtttcttttgtgttgggtaggtattagtctaggctttggcttgttggtagccattggagcatggtggttgtataagtttatcagaaagcaaagggagataaagcggaagaagttctctaagcttaatggaggactattgatgcaacaacaattggtttctaacgaaggcaacattgagaatacaagagtattcagctcgaaagaattggagagagccacagaaaacaagagtattgcaacatagaagatccttggaacgtttgtactgattcttcctccaacatcaccaccacatcttcatttggtcgaaacattgtgaccatcagagaccactagatgtaaccgtatcatttgaaattttggtgttattcgatttgtttagttgtatgtattttgttttatccggtttggagaatgttatattgaataataagaaccacaaacatatcaacgaaagtaatcgctcttgactgaatatttatgagattggactatgactagaatagtagtctcattgcatttgtagtactagttgttcgcaacagctcagattcataaggaccaccagccaatcaatagaacaaaaatgaaaagtgaaattatcgcccaccgtggggctcgaacccacgaccacaaggttaagagccttgcgctctaccaactgagctagacgggctttgtgcttagcttaactgttaattgttagatagtctataactgtaggtaccaagtcaaattttaaaatatctcaagtcaatgatctgcactctgcagaaactaaataattgagatgaaaggatccatacatggagttgacttttgatgataaaagcttcacgcgtctatccaaacttctttgaacgtggacttttgtcacatagaagataagagaagatcaatcagattaaaaaaatgcagaagtatg

SEQ ID NO: 27400 - DNA, 1250 bp, Unknown; identical to SEQ ID NO: 364
  misc_feature (1)..( 1250): 2750-1469P.txt file - cDNA_ID_2990066; gDNA_ID_1564380; Annot_ID_149357

SEQ ID NO: 27401 - DNA, 3003 bp, Unknown
  misc_feature (1)..( 3003): 2750-1469P.txt file - cDNA_ID_2990070; gDNA_ID_2096295; Annot_ID_195529
aagaatgtattagttagttagatataattagttatatataaattgccaaatcaagtccataacaaattagaaacgtggatacacagctttatccttaattttgtttttgttttaattagcttacatgattgcatgtgacacataaatgacaaaaaacaaatttgacataaaccatactttaaaaataataaaattatgtattaatgatgttattggtttaactgatttttattttagaagtctacactttaaagtttaatccctacctccaacatctttaatcctaacaatcctatgaaattgtatatgcttaagcagttaaccctaacactgtgtacccttacgctaatttaaaagattctatgaaagtacttctaattttatattatttttagcaatagaatttcataacattaatttctatgctttataaacatgtttaattctagatatggtataactatatttcttaaattgttaccctaaagtcgtataaatgtgtgtaaaaaaaaaagtcgtataaatggtgaacaattaaattgcaaagatgaaagaacacaaattattcacgtggccagcccagcccagtaattgatagatttgttgtttaagcccagcaattagtatcgaatcgaaccaatattctgaaccgaatacatcatggttacacgaccgacacctataaggttgtcttctttgatgatcaaacctaaagtccgaaaaagaaaaaaaagaaaaaaaacccgaaaaactttagctcattgaaagactaattgactaaagacatggcaaaaaggatactgtatttagtaattgtttgtgtttgaattgattacgtcaaatatagtttgataacgagatgcatattgcaatcccatagccaaactagaaatatacaaatttgaatagaaaaagaaacgaactaaggcaagtcatatacggcaatgaaggacatcaatacacttcccatccaaagcttcccatctttctcctccacttcactcactgccttcaccactttccctttactatcttccaacacctttagcactttcccttcttcactgtacttcacagctacagcatgaggccaaccacctacctgcagcaagtactgaaacttcactgatatcggcagcttcagaaagaacttcctcaccctcgggtaatgcgccatcaagtgtgtgaatatgtttctgtggcagtgcaccgccacccagaaatctccatctttgtttgtgcggatgttgtctgggaacccatgtaatagagctaccacttctgacgttccagctttctcccctttcaaccagtatttccgtaatctgaacaacaacaacaaaaaatgacttagattctgttcacagtattggagtttgtttctagcagaatcattgaaacgatatggaaacaacatgctaatcgttccattttagcttcaatcagaaatgctgattgcagaagttatgccaagtatatatacagacaatgatgtggaagtcagagaggaattaagatgaaggactcaccttccaatagatccttcacaaaagatgaaaaaggagccgtctttgccgagggataatccgttaggaaactggagatttctcacgagagtggtagtctcctttgtttttggattgtatttcaacaccctcccactgtcttcccccgagacaatcaaaagcataaatttcctacaaatagcgcaatcaacatactcaaacaaaagtagtaactagacatcggaagctcattgcaacttcttgtagatcctcaaaagataaacagaattcaacatttaaggctctgaagttatagccgcagtcaaaattttcaatttatgtgcctatgacagatcatttcaatcaatataacatgagttccaaaaagcaacactttatgcaagccactgatcaggagagttagtaaagatcaaaactttaaaaccttacataccttcgttggaagaaagagctgctatcagtaaagtaaacattgccttcatcatcaatgtcaagatcattggtaaatctcaaaggcacaccatcagcctcgtttgtaacagaagttgctaaacctccttccggaccaactttcattatccccaaatacgcatctgcaatgtacaaatccccatttttcttgtcgaatcgaagacctaaaggccgaccacagatatcttcatcctttaagtaatccaaaagcgatggcttaggatcacatagctctgacctaataaaacatcaaagttgagaactttactggaaacgaaatggtcacaaagactcgattgcaatcacaagactcaccgattgttcgaagtatatgcgaaatctgtccaacgagtgccattccaaaagagaattcgaccgtcggcgactccggtataaggaccacgaccttgcggatcgaaagcaatgctctcgggaccttgaacctcgttaagaaacctgatctctgaattctgcaacagattctggcggtctctctcctttggaagtgacgataacggaggcatgtcaatcttgtaagttttgaaatccgggaacttggaaatggagctgtgactgaagggatcgatagcgcaatagatggcaaagacgagaaagatcttcgcgagtatgctcatggccattttctttgtacgagggatgatgatgatgatttgaagaagaaaatggttggggaagttttaaggtagagaagtagagaagaagtagttgcagtagagtacacttttctggttgaaaatttaaaacttttctcaattgctgctctttttcgatatattaagaaaagtcaaggagcaattgcaaatcggctaatctgatggcaacccggtattaaattaaaaaaagaaacatgaaaaccgggtgaaccggatcgaccttccattttttcggtagaccagttttatttattctgcaaataataatcgtcttcaatcagagaaaaagtttgcagtgagaaggagattgattaatcgatctgagaaagatg

SEQ ID NO: 27402 - DNA, 3000 bp, Unknown; identical to SEQ ID NO: 9642
  misc_feature (1)..( 3000): 2750-1469P.txt file - cDNA_ID_2990072; gDNA_ID_1972164; Annot_ID_179697

SEQ ID NO: 27403 - DNA, 3000 bp, Unknown; identical to SEQ ID NO: 7216
  misc_feature (1)..( 3000): 2750-1469P.txt file - cDNA_ID_2990081; gDNA_ID_1621133; Annot_ID_172559

SEQ ID NO: 27404 - DNA, 3000 bp, Unknown; identical to SEQ ID NO: 6652
  misc_feature (1)..( 3000): 2750-1469P.txt file - cDNA_ID_2990093; gDNA_ID_1621099; Annot_ID_55823

SEQ ID NO: 27405 - DNA, 3000 bp, Unknown; identical to SEQ ID NO: 6624
  misc_feature (1)..( 3000): 2750-1469P.txt file - cDNA_ID_2990093; gDNA_ID_1621099; Annot_ID_171310

SEQ ID NO: 27406 - DNA, 3000 bp, Unknown; identical to SEQ ID NO: 6652
  misc_feature (1)..( 3000): 2750-1469P.txt file - cDNA_ID_2990093; gDNA_ID_2926167; Annot_ID_139962

SEQ ID NO: 27407 - DNA, 3000 bp, Unknown; identical to SEQ ID NO: 6624
  misc_feature (1)..( 3000): 2750-1469P.txt file - cDNA_ID_2990093; gDNA_ID_2926167; Annot_ID_199230

SEQ ID NO: 27408 - DNA, 3003 bp, Unknown
  misc_feature (1)..( 3003): 2750-1469P.txt file - cDNA_ID_2990097; gDNA_ID_1972144; Annot_ID_179322
acaccgcgaaatacaaatgaatacatcacaagaaatctgcgtgtatgatagtcttgatgtatgagcttaccttggcagtgttgaaggctacattcttgcagtctggcaggacacttacagattttggagacaaacgatatgaagaattacgaaactgtacagtagactcgcatttgtcttgattcaccagaatggcagcgcataggttcgccttcttcccaaacacaaaagcctgttaaataagacgtaaagatcactattacaacattcttcatgatatcacgatactgttagaattttcttacagtttgtagcttccccaatgatattgtagtttgcagtcctgaaagtagaggctcttcacacaacttaactgcagcatgtaattccttaaggtgtccccattttggttgcctaagtaaccctgcagcaccaaccatttatgttgtactttcagatgaacatctgattttgactgtgaatggtttgaaatattaccatattcatcaagtggagcctgatcataataactggtgattacgaactgtgaagcatttctcccgaagttggttcctccatgatactaaaataagatacaatgtcaaatcatcattattcttgcttctcttatacattagagatttttttagtgagactggaaaaggtaccatgtagtagtttacaaagcttccattcttagcgatgaaaagagcaacatgaaacgctatatcctcagctgaccttatcaatggttcctcaccatatgtttgataactatacaaaggggtcagctgaaagttagtagtttatatctggggattgggaagtacacaataatgtagtgaatttgagtgaagaccatacaaactcgtccagttctcagtccatattgcaggtttgttgggtgaattgggtcctttgaatgtttctccacattgcctcccattgcaagcattaacctgaggcaccatagaaacaataagaaaactaaaaaaaacggattcagaagtggaaaattggcagatgagccacattgcaggacaaacataaaaaccaaccaaaggatcaggggcatcatcttgcttgcacataacccatggcactcctgtgtcaagctcaacagccaattttgctgtccatttgacatatgatttcccttcttgtcgaaaagctctaccaaccatcccatactcgttctcaatctgttttgcacataactttaagatcattaaaaaaaaaaaaaaacttcgaaggaaacatacatgaaaaaccataatgtaaacctgtgagagtatgataggtcctccttgggaagcatacaagttttccgatttcatcagcttaacaatcattttcgcatatctcttcatgtgatactgcaaataaaacgtaatcttctttagaccatagaagtaaggaagccatctgagttcagtaaattaattaccttgaatggctcattatctgtcctgaagacaatcccttggacattatgcaaccagaaaggcaaacccctgcaatgtgttattgaaaaccctaaaattccacgaacattgtgttttaccatatcggaaaatctcaacgatctaaagacggaaagagtttacccataagaccattccccttggataaaaggtccaatccgaagacagacatataagccatgattttttacttccttgataaacttcacgatatcacggcttccactgaaatcgaactgtagattcacaaaaaccatcaatcgcataaatacctaaattcgtctgtatagggtatagagacggagagactgacctggccttgttgcggctcgtgaacgttccagaacacatatgtgtctactacatctattcctccagattttgcctttgctatcaaggacggccacatctgcaagttcgatttcccattaatatttgcagaagaagaagaagacaaagagatcccgccaaattttattggaagtttcatacgtttcagaatgtttggggtcgaataataataaatcagaaaataagagcacttaatttcacgaaatccataaaactaaaaccaaatcagaacgtttggggtcgcataagaataaataagaaactaagagtacttaaactcgcaaattcgataagttcaaaacggcctagtcggaaaagacgattttatcctctctctctctctactcttaacggctcatgtgtttcgtattagcaacctgccgccgacttagtgtgctaattcacgtgactgatcggcgcgatttcgccgggaaattgcagaaattaaattccggcgacgttacgaaacttctagatatagacggatcggtgagaacggagagagaattacctgaggagtgctgcgagtataatggattgagccggagaaaaggatcttatgttcgccgtcgatgatcagcgagcgaccgtcgtatgttacgtttgcgacgtctccggcaactataaccgccatgagaacgagaaaaactagcgagtactgaaaagtcgtcatttcttatgtaaacactgacgtttgaagattctagagagtttttatagtttgggactatgcacaactaactgtgcagtgtatctcaccatcgtctcgaatttatgcgacccaatcataaatttcttctttattttttcttaaatccggtttatatatgattcaatggaaattgcaattataaagtaaaagcccaatagcgtcaaaaaaaagtaaaagcccaataatagtgaggcccatcaataatctggagtcaaacaatggtggataatggaaatctctcaaaatccaaatccggttttagccggttataaatgggtttgactggtttcgggtcacaatcgaacggttgacgtcgatcatcattctggtagttgaaaactttgtcgtcgtcgtcgtcgtcgtcgtagcacgtgttgcacgtgagaaatttcccgcacaaaatcttactcttttcgtcttcttccccaatctgggattgaatctccagaatccatg

SEQ ID NO: 27409 - DNA, 3003 bp, Unknown; identical to SEQ ID NO: 17711
  misc_feature (1)..( 3003): 2750-1469P.txt file - cDNA_ID_2990119; gDNA_ID_1621202; Annot_ID_174959

SEQ ID NO: 27410 - DNA, 3003 bp, Unknown
  misc_feature (1)..( 3003): 2750-1469P.txt file - cDNA_ID_2990123; gDNA_ID_1620815; Annot_ID_169197
atttctttacctaatggaaagggcttgttcaactgaggaaccaaaatcttgcaaagcaggtgcgagtggaccttgtccgactgggtcaagtggggaaccgggatatcgaattaaagctataccgccaaggtaggaatcagtgaaccgagctgtggcgaatatgtagtaagaccggtaaattccaaccgggtcggttttggcagtgacaagaatagagtatgattggcctacgtggatgtccaggctcgagtaaacacgtttttgaacatacgtaccctctgtctcaactagaagcatatcgtggtcttggattctgaagtttaagcatgttttgagacccacgtttgatattcttagcctatatgttttgcctgtgattatatatagacaacataaaaagaacatttgtgtgtaaactacattattaaagatataatgtaatatttttaaaagaagaaaaaaactcacctggttcaaatgcaaagaaggtctcttcagggccacgcccgttaaaaagaataccatcaggatttggcaaactgtgaccagcgtcaagtgaagctctcataaccttacaccaaaatttggaaaccaagtgttaattatgcaaatcaagcaaaacatcttttacaatgaaactaataacacattcaataaatgggcaagataaaactcaataaccaaaatgattatgatctacaaaattagtttttttatatataaaaaggatagtattggaatgtaggtttgatgataatacggtaatttatcaaagaaacatactgtatggtcgagataaaaccaatctccaatcaagatgtcgtattcttcgtcgggcttagggaatgggactgggacaagttctgggggatagattctaatagcaccgtatcctccggcagctttctgaagtagaagggtcggaaaataaaagtaacttccaatttgatccttcacctgaaaacggtacgtccaatttgtccccggtagtatgggacagtttgtccctcgaactccatcttgccacgagttcttccgcaattgcaatccattcctttaatttacatagaggtttaataacaattattcctaaaattaacccaaaacaaaaagttgaaaatatataccaagtcatgaggaagggttcgggcaaattgttgaaaatgttaacgacaatgatatcgtttgctgttgcattaaggatcggtccagggaacatgtcgttgatcactataacctatagattttttttttggtgaatactataacctatagattgatcatgcatctgaaatttcatataagatagctaaaaccatattattgtaacaaataaaaacatattcaaatgaaaatggttacctgcttgttgcctccaagaatgaaacgttgagaatacgagacgacccattgatacgatgagattggtgcaaacgcatagctcaactccaagatgaccaaagagatcagaaccaacacctcgacaaagacatgtctcatcgcgaaaagagtgatttaagaaattttaagatgcttgtgatgtgaaaaagaggtgttagaggcaagacgtagctacatatttttctttggaacaatatattaattagacgacaactattgttactctgtttggagttaacgtttgttttgtgctatgttttttgaatatgatcgaaaagttcatgcaatctgcatttccaacctaatttatgggcagcacatttgtgcttttgttaaaatttgctgggcttattcattatactaaaccatgcataaaggcccattaaatatcttattgtaatgtgacggacgaaaaaaaaaacgtgagggaggacgatggcaattgcttacgatatattgtaaagtggatgtgacctgtctgtctacacaatattacaaagatggtcgctattactcctacaaaaaataatacaacgcaaaacaattattgaaaaattattcatcacttttgtatctttcaaactttcacagttcacaccacctaaaaaacagtaaaaagtaacaacattatcactttccacaacaaaatatctaacaactttgagtatacagaaatgtacatagtacatacgtataagcaaaatgaattttgtttctccttttttttcctggtgtatatcgttgcaaacttgcaattgatcaataaaacgcaaagatattatattgaacaaataaataatttttatatagccaagatattatatggatcctcattcctcaaatataataatttacatggcccgcgattatcatgaaagacgttgaaacgtccactaatcgtacctagttgttctgaaaatgaaatgatgattttataaatgatatggttttagacttttgaagttcttcatcacttattgttagatgaaacaacaacgttgcattcaaatctcaaattcctataaatcacagataaaaaagtaattttgttttacacgtctacgtggttacaaatcctaatcacgtaactaaacagtaaagttaaagaatcttgaaaaataaagatctactttacgttttgtagatatttttaattaaaagtgaacgtcaaaaggtaattggatattttcgttaaaatgttatcaatcaaactcggacaacaattagtggtaatttaactatttaaaaaccagactaacccattatcgtatagtgctaattatgaactatgaaccgattaaacaacaaaatttactatataaaatcatcaggtgcttttcttaatctcaacggttaaaaaaaataaccaattagatgtgtccacgtaagcaggcgtaccataagctaccaaccaacacatacaccagattctcaccaacagaggaaaaaagcttctactataaagcacacatcttcttcttcatctctctttcgctctcagaatcctcttttaagtctctgtttcataaataaaactaataaagaagaagaagaaaacagagcaattaaagtccttaaatcttcttcttctccaattcaatg

SEQ ID NO: 27411 - DNA, 3000 bp, Unknown; identical to SEQ ID NO: 5505
  misc_feature (1)..( 3000): 2750-1469P.txt file - cDNA_ID_2990123; gDNA_ID_1620797; Annot_ID_168504

SEQ ID NO: 27412 - DNA, 3000 bp, Unknown; identical to SEQ ID NO: 6719
  misc_feature (1)..( 3000): 2750-1469P.txt file - cDNA_ID_2990142; gDNA_ID_1621102; Annot_ID_55901

SEQ ID NO: 27413 - DNA, 3003 bp, Unknown
  misc_feature (1)..( 3003): 2750-1469P.txt file - cDNA_ID_2990142; gDNA_ID_2926189; Annot_ID_140937
atcactcattatcatattgttacttgatgtttataaatttgagattcctttttcattttctcactgcctctttctgtaacaatagcaatttcttagatgtcaccactggcttttatctggttggggatttaaggggagatcaatttaatcttatttgatgctaggattttgaaaaacattctgcaggtaaatcctacagatgtaataattcttgaagggatacttttgttccatgatccacgcgtccgaaagttgatgaacatgaagatttttgtttgcacaggtaatttgttgcctcttcccgttataattattgtaaactcttgtttcgactacattccatttcccttttgtagattcacttggctttttttttctacaaaatttcacatgatggaacaacttcttatgctttaagattttgctgtttcacattgcttattttgttttctgcgtagatgctgacgttcgtttggcaagaaggataaaaagagatactgtcgagaatggtagagatatcggcacagtacttgaccaggttagcccgtcttagtattgttactgtatatattatcatcaagaacaacaagaaatggtttacctcttgcattttaaatattacattgctctgatctgtatgtttttttctcatattagttcggcgttttcaaatctatatgtttctacccatattttatatgatgtcaaccttttgatgcagtactcaaagtttgtgaagcctgcttttgatgacttcattcttccaacgaagaaatatgcagatattataatccctcgtggtggggataatcatgtagctattgacttaattgtgcaacatatttgcaccaagctgggtcaacatgatctctgtaaaatatatcctaatctctacgttatacactcgacatttcaggtaattgatatatcaatctcatctacatacgagtaacattctcttaactaccaaacaagatccagaaaattgatttctcttgcagataagagggatgcacacccttatacgagattctcagacaaccaaacatgattttgtcttctattctgatcgattgattaggctggtaggattattaaagctcatttaaatggctgaccaaattctcctatcacgtctcatttctgttgtctgagtttttttcttatatttatcaggttgtagaacatggtcttggacatctgccttttactgaaaagcaagtgattactccaaccggtaagcttggtgatttttgtttttgcagtgttgttcgtgaattcacaagattattatgtatatatttagaggttaaactcgtgactaataggtcatagatatcccggttacctgtctcaggatgtgtgtattctggtgtggatttctgtaaacggttatgtggtgtctcggtgattaggaggtactttcctatatcttagctttagtttatacaataggaacttccccatcctttcatatcccactctctcaccaacttgatggtgttttgaaataatgctagtggtgagagcatggagaatgcgttacgagcatgttgcaaaggtatcaagatcgggaagatcctaattcacagagaaggtgacaatggtcaacaggtaaacgagtcactcctatttcattccaggtgttctgtttcatcactgttgatgtctgtatcactgtgcagcttgtttatgagaaattgccaaatgatatctcagagaggcatgtcctattgttggatcctattctcgggacaggtaattaacccgtctttcttcatcactttttactgaaaacattttatttcatatttctctttgctgtaatacacatttgttagccaattcaacacacttgaagtgcctagtgacactgaaattatacatcttgtcaggaaactcagcggttgaagctatcaacctccttataagcaagggcgtacctgagggaaacatcatatttctaaaccttatctcagtaagctaacacacaccctttgcgtatcatttatacaccccttgtgattactccttatccatgtttatccacaagaatgcagctggattgagatattttttttctttgttcaatcaggcacctcaaggtgttcatgtggtctgcaaaaaattcccaagaataaagatagtgacatctgaaatcgataatgggttaaacgaagagtttcgtgttattcctggtatgggggagtttggggacagatattttggcacagacgatgactaggccactgtgttcctgcagcattagttgtcccatccatgtcctgcatagcagtttactgatgcattcaccatcctattctctacaacggctacacaaactatcaaaggaatcacctttaactttgttggttttcccatttaaaccccctcaaggtgttgggaacagttttgtttacttataaatgcccaagtgaggggttgatcgatcccgggacttgggattcggtgtaccatatataattacccttggaactcttgataattcatctacaactcttgtgtaccatatataaatatccttggaacccttgatactccataagcataatacatttggcttcgaaaggaacatgtgggccaatggttgcaccacctctgttgtcatctcatgaattcaggttcggacctggtctctctctctcccaagtgggaggtatatgaacggcccaattatgacaaaaggaaagaaaattatatttggcttcaatgtccaatatatctaagtttggtggtgacttatgttggttgaagtgtgagagaggtattatagaaaatactctgctcgttctcctccacatatccaagactttggagataatgctggtatccttggctagcatttggtagtgtcgaagcaatcattcctcgggctctcctttctaactgcattcctagaaaatattaccctaaaggcctttgtcttggcatcctcgtcctcttcagcaggaactcatctgtcttggaagaattattaccatg

SEQ ID NO: 27414 - DNA, 3003 bp, Unknown
  misc_feature (1)..( 3003): 2750-1469P.txt file - cDNA_ID_2990145; gDNA_ID_2214553; Annot_ID_185630
tggaaactagaagaagtgaaatgtaagtgtctaccaaaaaccattattccttcttcagaatatatgcagagttcagcagaaccagttcagagattgacataataactttctcgtgagctgtgaattcacagatcttgaagtggagcttcctgtaatgtatattcttttcatttttggtcgatataaacagcatcaacatcatcaagttctagtagtttctgcattagctctttgttcaattccatggcctcatcatccacctgcaacaaccaacaacaatcccaagtgattacattttccaagtgaatcgttgatgaatactgataagggtgtgactcttatttgggcggaacaagaagttaaaattaacgaacgaagaacacaaacaaattttctataagtttattgccatttccaattatgcttatgtagcatatgcaatttacaatgtatttaacacgttaagagaagataaactacatgttgacgataaaaatagaatcaataagttaatattagacagggcacagaggttacagaacagagcgggagatttgatacctcaactgtagtcagagggagcagttcagagccattgtcaggctcgaagttcactccttcatcacgtagctttgataatattgttgagtagttctcattagaagttacaattttgtagtacctgaacagatatagagacaagaagctgatgaaacaaaaaaagagcataatagttatgagtcacctaggtatcatctcgtcttagattggcaagatggatttcttatttcaaatcgtttggtgtgaaacttttattgcaatttagctgtttatgagaagaaaatacactaggtctaccttcagtcgcttgattactttttcaattcaatcttgaaagaaatttctaacgcatttgaataagtgagtcgactatctctatcttccctaacttaggattcaccagcaacagaaaataataaatgtaatactgacaagaagaaaagaaatgcggaaagacattatattggttatatacctctcttccctgtcttcatcagtatcatcttcataagttgggggttcaataacatcctctgctccagcatctaaagcaataataaggagctgatctttgtcagcttcggtgacctttatattcactaccctaactcttttaaacttgaacatgacagatcctgaatcagccatttttcccccataatccttaacaaccgatctaatagctgccactgatcgattaattttgtctgttaagacctcgactaccatactaacaccaccgtagccatatacctaaagcattgaaaacaagtttattttagagtcatcaaatcttataattggacccaaagaaatgataacgaggaactggatttatggtcctgtaaattgaacaaggtgctgaggtagtgaagttatattagctacagtaaccacatacttggcctgatagagtgatgaactaaaacagattcataggttttaaattaccaggccatttccccaccttactaggatgattcaccataacggccccacttacaaacataaaactagaattgaagctcatgacctcacctcgtaaatcttctctataaaagcttcttgccccttctcagaagccctcttaatattacgctccacaatgtctttcggtacatccagttctttagctttgtcaagaatagtagctagagtcgtatttgaaactgggtttggaccccctttcttgacactgcatgatgataaacccacagatgatactttttctagtaagcatatgtccataacaaagtaagaagttgaatccaacaaactaaacaccatctatatctacaactaatgtgcaaaatttcatctcaaaaaaaaaagatgcaacattgtgaaaaaaatgttgaagacttacgcagatacaacctccttgccaattctacagtatagcttcgccttctttgaatcttgagcgccctgtaattcaccagaaacttcaatctcaaaagttcttaaatacaatcttcgtcttggaaaaagagttttatctttctgctctgctgtaatatgtaattctcatttacaaaaacaaaccacaactttcaagaggaagattgttattcacattctgaaattcatactacacgagcaagagaaacttccactataggcttcacaattcaaacatggtgaattagctaatagctttcaagagtgacataacactgaaagctagactctttacaataacacaattaattgatataaacccataatcaaaacaactctctctatctgaggcatttcatcaaacaggtgtttggcataaacaattacgagctctagactcatcaaaacctataaattttatatttttaaaacctagtaatagcaccaacgcacttctaatctatatgaacccacaaactcagaagcttaacgaacctttcgaccagcgattttggaagaacgacgacccatacaaagaggagttgaaatcgaaatctttctgagttgaagcttgcggaagcagttctggtcatctgattgttgtgacgcagccgtgaaatgcgaagtagtagtgtggggagagattgaggaaagagacgagagagtgttggtcatggtaagactaagaagacgatggttagtggagttgagaatggatctggaagagacgccattggagaatctgaggaggattactctcatggagcaatgggaggccatatagtctttggtgtggattgagaatagagggaatgaggtaatcaatcgatttctcaatgttatattggtttaaggtaagaaactaggataagcgagtaaaaaacttctttttgcttggaaaaagttgcgattgtgattttgacttgaaatctgttgttgagccgcgtgaccctcacggactcaaaaaccaatccttcctttgcttataaaccccaatcttcttcttcgagagagagagtgaaagagaagaaaacgacaatg

SEQ ID NO: 27415 - DNA, 3000 bp, Unknown; identical to SEQ ID NO: 11425
  misc_feature (1)..( 3000): 2750-1469P.txt file - cDNA_ID_2990156; gDNA_ID_2214495; Annot_ID_183806

SEQ ID NO: 27416 - DNA, 3003 bp, Unknown
  misc_feature (1)..( 3003): 2750-1469P.txt file - cDNA_ID_2990159; gDNA_ID_1621150; Annot_ID_56852
ccttggagttcagattccaaacttagtttctccgtaatacctgtgtatagcaccaagatatcctcaataccctcttcacagccttttccatccacacaattcacactttcaataaactcctcggtacaccgttttccaagacgaagcttgaggagaagaaaacacactggccaaacatcagagttatgtgaaacaaaagattttgagctggtattttttattaacatattctgttctttcaaaaattcaaacaacacctctgagctaataaaaatccccttctgttgtaacccaacaaaaatcaaacccatttccgaagcaccaactggttttctcaaagagctagtttcttcagcgataattcgatacacattccttccagtttcaatcaactcaatcaaatcaacataagcattctcatattcgtcaaacttcacacaagaaacactcaaacagcctgtgatcaacccttccttatgcaaattaagtagtgcctcacatatttgcataccaattattcctaaacgtaaagtctcatcttcgaggctatcaaactcctccaacgaaaatccaatgagcttttcacccactaaatacaaaacaccattcttcaaatcaccccacaagccaaaaactttagaaacacctctctgtttaacagagatgatcgcatcaagctcatctctttcctcctctcgcataccccacagacaactcatcatcctctggacataactatacttgaggacagaatcacaatcaccatgctcgaacgaagcaacccgtaaaagactcaccttcgaatcatccctcagacttccacataaacgcgaagatgaatcaaaatcactactttcactctccctaatttccacggaaacggcgtcgtgcactagaatccgatccttccaagtggcgtaaaagtcgtcggaccatgatcgagtgacaaattcaacgactttttcaaaattccggccaggttccagcttaagcttcgaaatcgaagggaacaatctgagaagatcaatgtttttggggagagctgatggtccttgaggtggaaacttgacgagaacggtgcaagcaggacatcggattgtgtccggaaacttcttgggtagatttgttaagcattcttcgcacgccgtgtgtccgcaggcgagtacgcgcgggacagtagactcgccgtcgtaagactgtagacacaccggacactccggttcctccatcacctccgatgattcgatgcgacgaacaactgagttaatccgacgacgttttagactttaactaaaacaacatttagtcccgagggtagttctgtatacctagtgtgtatatacatgaaaactatttgtgttataagtcatcaattttctaaaatgtctctttagtctggtggtaaagtcttccagatgagctcataatttatgggccggctctgattctgatgaagtgaagtgcatttgcaaaggtatattgtcatcttacctctgccaatatcttgcggatcctaagacatatgaagtattttcatagtacaagctagacccgtaaaagctaaagatcaaatgtatatagaattcgtcgaagtcttggaaaagaatgatgttacaaatccaagactttatcaatgccctagcaacatgcattaataaagtcttgcattaggaagattctctcttgtccatctatgatatccacaagccctggctcactagaatagggtggatgtgtgcgataacttaaagtatatgctcacttaaaaaatttacatgagaaaaaagcttttatttttttggtaaaaaaaaaagtccaaatataattgataacaatcctaaatttcttttaaagatatattagaataacccagttcttttatatacaaaaatgccatatttttaaaaatgttaaaacactatttttttatttttttttaacactcaaaatttacttcaaaaaagttctaaaaattgccttttttttttttcaaataacaaaaggtccaaacaaaaacaaattcccgtaatacacaaatttatgttgggtcggggctggacactcagtgtcagttgaaagtttaagcatatttataacttaatactgaagttccataagtttattgatgaatgtgataagtttgtctcaatgtaacagctcgagatccactcaatgtagcagctatgttctccagattcattcgtgtttgtaaaaaatgaaaactagaggtggcttgattgttcgacgagtattgttccaggaagcagccgtcttacttcttttcaataacacatgttaaataaatcgatattgtttgttcaatcatagagagaacttcttttcttcttttattattattgtagtagtaatcatgttcattccaattgagcaattatttgctttccatctacgcccaaaaaccaacttctcaatgcatcgacatgtaagaaaatttgcttttatgttataaagttgtgtaacatttctcttggaactattgattgtctcaacgttgcaaataaagtaataaaatcctacaagatactaataatatccaaactgggcttataatcctaaaaatgacttccataattaaaacgaatttagtttattaattagtgtaatggaatattttgtcaataaaataaataatcacgaaggattatataaaggaagaaaaaaaaaggaaggtgggaattttaaaagggaaagacacctgtctctctgacccacccacccattcatttctgtggctactctatcgtcgtcgtctccacaccgtcggtgccctcacggatcaatttctagagagagagagagcgagagagacgattcgtttttctagattctcgtcaaaaaaattttccctccttcgatctctcctttttccttattcagcatttccccattttttcacgcaagatccgtgattttccagggattgatctgattgggggatcgtgaaattcgtttgtgttttctgctcgattaaccggagaaatg

SEQ ID NO: 27417 - DNA, 855 bp, Unknown; identical to SEQ ID NO: 513
  misc_feature (1)..( 855): 2750-1469P.txt file - cDNA_ID_2990159; gDNA_ID_1591559; Annot_ID_151167
  misc_feature (279)..(279): n is a, c, g, or t
  misc_feature (507)..(507): n is a, c, g, or t

SEQ ID NO: 27418 - DNA, 3003 bp, Unknown; identical to SEQ ID NO: 27416
  misc_feature (1)..( 3003): 2750-1469P.txt file - cDNA_ID_2990159; gDNA_ID_1621150; Annot_ID_173203

SEQ ID NO: 27419 - DNA, 3003 bp, Unknown; identical to SEQ ID NO: 25741
  misc_feature (1)..( 3003): 2750-1469P.txt file - cDNA_ID_2990166; gDNA_ID_2214526; Annot_ID_184753

SEQ ID NO: 27420 - DNA, 3003 bp, Unknown
  misc_feature (1)..( 3003): 2750-1469P.txt file - cDNA_ID_2990170; gDNA_ID_2926090; Annot_ID_196549
cccacggtacaccgcgaatcaatatctaattagcaacatcatttgttttaagacattaaatactttgaaaataaagtatagcatttaaagcttctaactttttgttgaattactcatgttttattttatcaaattgaagtactctctttggtaaagaattcctctacttttattggagtcattctgtatttcagaaacattatttgttgttaaactggtttttaaattactcagctttagtatctattatatttatgtatttcaaaagcttattttctgcattatgtttttactttttagttaaaaaccaaaaataataaataatactaattaaataaaatatagctaatcccctgttaatctcgaaaatatgtaggatgataatgtaagataaatcataaacgaatcttttttttcaataagagaagaatcttacctgccattaaagatttaaattatataaataagattatgggacaagaaaaatgacatacgaataaaatcactaactttctttatacataataacagccaatggcggaggcacaatattagtaaggggtcagatgaccgacccccataaatctttgaatttttgcttacaagcttatgctctatttgattattgtggtaaattgattgctttctaataaattgacctcatgtccagtggtcatatcttttctttgcacctatggaaacgatattatatttattcaactatatcttttgcaattatgttttaagaaataattactgaaactatcacaaaatatgtaaaatggaattatatatatactgtatttgatgaataaagaacaataatgattatcttttattttatttatttttaaatacaatgaattttaaatttttaaagttagatttttttagaaatgaaatattatatttaaatatttaattaaaactaaaaataaaatatgacccctaaacaattttttctagctctaccactgataacagctagacattgcatgtctatcaacaatctccccctgtattatattcttaatcagaacctcttggggatcacaaggaaacgaaatgaagattaccaaaaagaaaaagaaaaaaaaagtagaagaaaagaaatggatgatatcaaaggtccaaaaccaccgtagaggagtactctttttgttccttattaattgtgtttttagagaatttttttttttcaaaaagattgatttttatatttctatgccttatttattagttattattgatgaattttaaactgaaaaacaaataattgaataacattgatgtagaattacacaaaaatgtaaatcacaaaacaatacatttgtaaatcaattttaatataatttcttaataaatttgttttttctaaaaaaataattaaaataaataaaggaaatatgaattaaagacatgcataattcgaacatgggggttggttgcctatctactctccgtttccgaggcattaaaataaatttaatttagtgtacttaatgtaaattgaatataattaattagtctatacttatccatcggttaatttattttattctgtaatgacccttctatttttttagtaatcctacaagtacaataatatatatatatatatatatatatagtacaagtacagtaatatatatatatatatatatatatatatagtacaagtacagtaatatatatatatatatatatatatagtacaagtacagtaaataaatgtgaaaatttgtgataattattggattagttttgtcattatactaacatttgggtattatattcctaagaccatattcaatggtatgagtgcttgagagaatcttacctattttttaattttaaattttgacaatttgaaagtttagcaattctattggcctcttaacaattatcttgttcaatggtaaggtccttaagaaataaaatttggtgtttggtgttttgaagttttgaatagaaagatagaaaagagacaagtgaagtttggcattagagtcttgataaacacattttgaataacaaggattcatgaaaaaaaaaaaaaatacaagaggttttgtattaacaaagattcatgacaatacataacaataatatgacaaagtatacaaactgtgtgatgaatcgccatgttgtaatcaccgccttgtcctaattccataaacttgatctcagtgttccctagattccacagtccacttgaaccatttcatcaaaaatgacacgcgatgttaagctgtgtgagacaatcacaaagtttagctcatgagacgggttgatgtggagtctgttcatgtcgtcgatgtctctgtagagacttgagaaaacctgtacaacaacactcaaaaaagaccaacttctagggtttgatctgaataatgcggcatctgtggtggctgttgctagttacattgctggaagacacaattgagctcttgctagttacattgctaggttggtttaataagaatctaggataaaagttttatccaaagttccccactttcaactgttttggctgcattgctcttaggacatcagaattgtgaagatgagcatgacgtttgacttgttagttcaaaactcacttgatcctgacaaaaacaggtgcttcgttggtttaataagatggatgctcaaggaaaaaagttttacctaaagctccccactttcagctgcttttgatctaaggactgagcatgacatatgacttgttcaatatttacataatcctgacaatatcaggtgaaccattttatacaccagcttatgttatatgatttttctatggatccgcttgttagaatatgtacataaaatgtgacttattcgaccaaacccataattgaaaattcatataattttgttggcagattacagttttaagacaacagtaaggacgttgaccttcattgcttccaagcattcgaaacctattaagagctccacttaatataatattatatcggagaaggtggatcggccatg

SEQ ID NO: 27421 - DNA, 3000 bp, Unknown
  misc_feature (1)..( 3000): 2750-1469P.txt file - cDNA_ID_2990180; gDNA_ID_1972029; Annot_ID_178216
ggattaaagaagagaaggaggtttgtcttaagcagaaagcagagctaaagctaataagtttatgtgatgtggaagatgttttgaaaccatcatggaaagttcctcttaaagattgtgtgcaaatcagtggacaaacagaagagagaccctcttctttagctgaacgtctttctgcatatccagcaactctaagaaaaataggtatatctttcttcttcggtggcattattatgtttctgttagattccctaactaaccactttagcaaaactttcattcagggatcagtgaagatgaatatacatcagatacagtgttctggagagaacaagttaatcattactggcggttaatgaatgtcaatgagactgaagtacggaatgtgatggacatgaacgcattcattggtggttttgctgcagctatgaattcgtatcctgtttgggtaatgaacatagtacctgcaaccatgaatgataccttgtctggaattttcgagagaggcttaaatggcgctttccatgattggtaagctgataagagttcttctagtctatcaaacacttgtttttgttttgtttcggatccttgccataaagcatcagcatcacttgaataagaacaaatgtgtcttaggtgtgaggcgttctcaacatatccacgcacgtatgatttggtgcattccgatcatgtcttctctcactacaacaaaagctacggagatggttgtttgctagaggatatcatgcttgagatggaccgcatagttcgccctcaggtacctttgcaacaactaactaaaggtgacattaaactgttgaatcaaaaagaacacttgtggtctggtcttttattatttccgggtggttgggcaggggtttgtcataataagggacgaggaatatatcatctcaaggatccgaggcttggctccaaaattcttgtgggaagtggaaactcatgagcttgaaaacaaagacaagaagataacagagtctgttttgttttgcagaaagagattctgggcaatcatttgaaatagactcactatttttagctctgatgatagtttacatgatcgtaaaaaggaaaaacacatgttcttcacttctttcttcttctcttcttacgatcatccttcctcttctcaatctctgtttttcctttttaccaatttggagattaatcaaataatgatttccaacaagatccgccgttttctttccatttttagcacctttttagaacatagagattcgagctcaacaaagagtaaaattcgacccgctttcgaaaacaaatctaatactggtactggttcggtccaaaatcaatcaaaaaccagattgatgatacacgagtgtttaatacattagattactctatacaacagacacaaacatatagaggttctagctcaacaaagagcaattgtactatgagacccatctgttctcgtagcggttgagagagaacgatgaagattgaacctcgcttaactggaaaggatccggttcgattccatagtccgttaatggtctatgctcgagcacattgtcatggttcttcacaaagtcgggaatttccacctcgcctttctttatgtcctcccaaaggtactgcaacctgctcacgtacttaatcttccagtacagtctgcaatgttgaaagagatattgttttgacaaaacagttaagtccacagttgttgattctaaagtaatctagatcccataaccgtttcaagttacaagctcaaaagaagatcaatactcctagacgccagagtttattagatcatgaaagcttcaaactttagggttcaatattcgattatgcaagtttgaaataacttgtatataaatcaactgatacatatgaaaagaaatgattaccctccacttaaaagaaggcggccaagagtggcaatgacaagtcttgaacgaagaccagggtggatgaaataaacaagttgaagcctgtctttgatatctgaaggaaggtcctcgtaaatccaccgtaagatggtaattcccggtgaattgtcgtccttttggactgtgctatgcatgtaaaccaagcacaaaggtccctcaggacattggttgcttatcttctgggatatatacttcttcagccgctccgcactcactacacgagctgcgtttcatacacacaattagaagagactgaagtggacaatacatgaccagacgttatctaaagcagcaggaaataccaaaacgctaatctaataagccaaatcagagaacatcaacatgtccttgtgatcaagttagcaactttgtcccaaaatcacagtatttttaattaagacacatttcaactaataagaagagagagtgattaccagggaaatactttccgacgatgcggaaaatccggttaccggacctatccaagccctggagagtaaagaactggagaagatcgagatcagagaaatcttcatctcctaagtattggggacaatcatgccagttttcttgttcatcaacgtcatcgcttctcgtcaagaagggtctagcgtcaattcctagatcagaagccaacacaaccaccgaaaaatcttcagccatcaccggaatattcctcctcctcacggattctctcgtgtcctttttgtttagaccagggattagaggatttatactaacctgcgggtgagtacacagtgtttaacgtgcgactatacacgtgcctaaatctaacgagtctaatgaccttttgaacactagagaaaactacgtcgttttattaatcgtctctctcgtttctcagctacattctcagcggtgcgtctccgatccggcgagattcgattcgatttctgctgacaagtcaaactctttgcccagaaatagctaagaaggtaagcgtcttttgttacccaattcgagaaagtcgaatttttttttgatttcattgagataagtgatttaacagagcttttttgtcaggtctagaggtgaaaaaatg

SEQ ID NO: 27422 - DNA, 3000 bp, Unknown
  misc_feature (1)..( 3000): 2750-1469P.txt file - cDNA_ID_2990184; gDNA_ID_2926273; Annot_ID_143477
atgatgatgatgatgatgattgtgtcgtcattgatattggatggtagaggtgataaactgtaccctgacagaactatctcgagagacaagagaaatggagtttacgttgatagagggaggagaaattgaggactattgtttataatatcactcgaagaataagaaaataaaatattataataatttatttattgtaatagatttctttgtttggactagctattaaattttttaattttcctttgactttttttttttgaaaaaaaaaagatataaggaaattacttttaaaggacattttaaaaatttataaggagaagaatatccatttgagctattaatttctcccaaatacattgaagttggacaaattaaattgattctgtgtaaatacaagattatcttcaaatgaaagtaaattgtagactatattcttagatacgtgtacgaacgattattactctattaggcgtgagatgcgttacattttaaaataaaaaaaaatcacacatttaagataattctcccaagtagtgatggcttataatcccacaaaaaaaccctaaaataactaacaattttcaaaagtacagacgaatatattacttcttcttattgtttttaaaagttgtgtttgattgagattacacacatttagggtttcaatcccattacatcataaagtccaagaccaagtctatcacttcttttaggagtgtaaaatcaagtcccaagtaattatttatgtttcattagcaactgagtgaaaattagacttctttggttggccaaatcaggaggaatattaaaggtatcatgggtttgttctcatctaattcaaaaataacatttttgggaaacaaatctagaagcaaaaggaagctatacatttggaaacaaatcaccaattacttcttgatgtggtgatattcttttctatctattacatgattagaaatggtaattgttatggaaaaaatacatgacattgtttttgattaaaagggaaaacaaaaacgttgactaacgcttaaacaagtgttcctctccagatcgaggatctatgtgtttaatccaacggctaggaatcttcctcaaaccattaccaccaccactggctcccacgtgtacgatctctaatcctctcccgacgggtaagaacaccgatctcacgacacgtgtacctcgtctcaaaagaccttgccatttaaacccagggatagatttcagcgtggcgtttttacacaccaaaacggcgcccattttgctcgttttcgctaatcccaacgcgtttacgaactcgtggcgtttcgaatcaaccaccatgaaatccacgccggagattctctccaccacgtcctccgccgagtctaagaccataacctccgttgagtcactcgtaacggctcctctcatcaccgcctcgtactccgacctcgactcttcgtcaggaactatgcacacgtgtcttccacatgtgtgtatcgctgccacggcgagtccgacgctagttgcgatcggatctccacgtgaccaagtctcaacgatcagcctcgtgttccatcccgccgccgtagccgataaaaactccgccacgctcgagtctctgtagcttttacacttcaaagacacacatatagaaataattacatcaagattctaaattcatatatgtacatgatacatcaagatcgactaaataaaaaccacatatacttcacagcgaagaaaatattaattataagaactataaaaattgtaattcatatacatattgaagatttccttgatcaaaatacaatttaggtcaacaagttgaattgacggtgaacaaacatgaacaagaaaacaaaagatgatgtacaaaatgcgccatctgaattagaggaggattcttactgatctaacggtgtggatgtaagcgttagaggcagtttccggcgaccagacgagcctcatgatcgtattcttgtgttaatatcttgataaaaatgtttggctttcgagagaagaaagggtttctatataaagagaagttgaggaaaggaaggtgatgacaagacggttaggcagttaggttaataaatgggtgtggtttggctttaaggaatggacttagcgttgacatttgtttaacccaatcatttacgtgtccttcattcccttctatcttcccatttatttactcacttcgattcttagattttgttttgaataacatttaatgtcgatagcgaatttatttctttaggtctagggtttaaattctacaccctgtgcaacatattaaatgacttttgattatgatcatgtgtaatgtgttaagtattcgtttgggactgtgatatatatgtagtgtaacgtgcttgttaggttaatgtgtatacaatgacgtttatccctattttgtgtctacatacattgtgaatagatcggtattgcataaaccaatttagctaggttccgtttttgtttaaaatgagttttgctattaatgcgtctttgttgttcacttatccttaggttgatgactacttgattagacttctaatcagaacgattggatactttcttatgcatcctattgtaataatatagtttcaatttaaaagttcattacacaataaacaactaacaaaattgtatacttaaacctgctaatactgattatgaaaaagaactaaatgctaactaatttaaaactaacgaaagtttttatctattttcgaaacggtaacgtttacatatgtgttgttttatacatgagtttcaaggcctccttttgtagacttttaattttaattgggcctatgtatgaaaactaaagcccatatagattagggaacaaaaagacctgtggcacgaccataagatacgaggtatatataaagaagcaatttagggtttgtggattctctgaagcgcagcagcagccgtaagaaagaaaccgaggaagaacgatctcagtgagaggacgatcacttcgccgtcgcagtcatg

SEQ ID NO: 27423 - DNA, 3000 bp, Unknown; identical to SEQ ID NO: 27422
  misc_feature (1)..( 3000): 2750-1469P.txt file - cDNA_ID_2990184; gDNA_ID_2926273; Annot_ID_205204

SEQ ID NO: 27424 - DNA, 3003 bp, Unknown
  misc_feature (1)..( 3003): 2750-1469P.txt file - cDNA_ID_2990187; gDNA_ID_2936584; Annot_ID_195021
ggagagtgtcggtgttgagattgaataagaagagtataccggatgttaaccggaaagtacgtgttctaggccggttagttcccggttgcggtaaacaatccgtaccggtgattctagaagaagcaactgattatattcaggctctggagatgcaagtgagagccatgaactctttagttcagcttctctcctcctacggctcagctcctccaccgatttgatgaggttaaaatcgtctttttaattctaccatctctcgatctttcacagcttatgtgtatatagaagattcggtttgattataatctgtaactactcttcccaaccgctgattcttctctgctacaagtaaaagtaaattttgaaccgagtcttcccatttttacgatcctcaagtctaaattaagtatatgattgattaataaagtctttaccattagggttcaaatcgtagttggattatttgatttagattgatgaattcgttgttgatcaaaaaaaaaataagattgatgaattcgttattggagttagtgggaaaatgggttcctcttttaacctcatagtatgtgataactaaaccaatatggaacttttgatgtacttttagttcattcaatatggctttgtactatatcatcttatgtactatatgaaatttcaacatgaaatagatttgtactgcaataaagtggaaagaaaataatttcccatttagaattttaaaatacattatagtagatgtaggaagataatgggttaactttagttttgattatggtagcatgtgatgatgcattagagaatgaatggaatgatacattcaaattcattgaattgaatgatgactgatgagattgatctgtcactcaatcatctactcgctttattgcccctcctttgaatcccatttttgatacttataggttgtttgtcttctttttcttttcttttccttatttcacaagaaatataaaggaaaaaaagaagaaaaaagattaaattagctaataattccctgttactaaataagttttctcaaacactaatctgcagttctgcacgtactgtatatccttcaatattcatcacgaagcaaaactgaataacctgtagttaaaattgacttaacaggagtttgattcattagcttaattaatatacgaatttctgtgatagggatatgatttaagaacactggagtatgactaggcgacaacaagagacaagtgacgacaaaagcaaaaaatatttaaaacatagagagaagtgaccttaaaagtatgaggaggcacatgggagtggccatgcctttgtcctcttgtttctttttaagccttctcttattaacttgcacgacaactcttttcatcacatatttcataagttatattattattgccaaaagggacaaactattagagaaaataaaccgcaacattgtagaagattggattaaaactcgccaacacactattagagaaacttgcccagataaaattatgtccatgtcgaacacagttataaccaaggagcctaattcccaaaaaatgatttttatatttggaaaccatccattgcagatactcctggaggtttctcctagtcttcagtgccgaagatttcacgacaaaagaagacttgaaaatctcgatactcttttgcggaactttcccaccgcgacacaaagagatcactccacagagatatgaggcagctttgagtcctttagacgcggcttttgcaaacattcgatccctttctcttcatcaacaatattactgaataggtaaaagcacttcacaattccttcacgagccactgcttccgtgtttccgctctctctgcatctcttgagaaaactctagctttagttataggtcatcgtttgcggttttgatttcgtcgaggcagacgtgttcgagaacttgagggtcgttgcagagattatgtaatgatttgcatacgaggctgaagttgaacaagcttgagtgaagaaagagccacgcgtggcaagatctccttcacaaccacttcttctgggagagactccattttatagtgatttgagaaatgatattttaatttagggtttcaacttagacgtttgcttattaaattgtgtgaataaataaatatatatatatatatatatatatatatatatatatatatcattaataaataaataaacgataagagtaaccttaaaaatctagttgaaccctaaaccctatggctaatatatacaatgtaatatattattcctctaatcatcttttagaaattttttattatttttaatttacacataaatcaatatctttttcagatatagttttatctacattgtatgtaatacctccatgttgctacacgttaacacttgcatatttgttactcaatctaattaagcaggaattaaaaacaacggttaaccggaaaacttttactatttatccattcagtattatcttatagctcaaattacttttagtttttacatataggatataactctcacacacgtaaaatacgattaaatttaaattcaaactaggacacttatctaatctagtgttatctgaattcatagagtgttagaagaattaggaaacgttttttaatcaataacatcatttttgggaataatatgtttatcaaatataaacctacccaaagaaaaaaaaaatcaccaacaaatatagtacgaattaagattcataaacgtgttccggaatccaaaagatcgaaagttttggataagtaagatattcacaaatattcatttttaaaattcaaaatattcgataaatacaagcgatcttccggaacagatcttaaatacgataaacaattaatatattttagaaataagatcggtggcaattaataattatgctctagcgaagacgtttcgtgataactgtgaacattagaggttaagtgacgacaagtgatcgagagagacagagagagccaaaaggagaaactacaaaaatg

SEQ ID NO: 27425 - DNA, 3003 bp, Unknown; identical to SEQ ID NO: 27424
  misc_feature (1)..( 3003): 2750-1469P.txt file - cDNA_ID_2990187; gDNA_ID_2936584; Annot_ID_143812

SEQ ID NO: 27426 - DNA, 3003 bp, Unknown
  misc_feature (1)..( 3003): 2750-1469P.txt file - cDNA_ID_2990191; gDNA_ID_2926247; Annot_ID_142969
aggtttggacactgatccgtagtcatatgccctatatctgatctttgcaacaattcactatgtatatgcgttattaccaaaccgaaagatacccgtttaaaactatctctacatatttagtatttacataattacatataatcttatttaagagaaaacaattatatttgaagttagaaatcatggtctttgaaatatgatgttagctttgaatattataatttttggttaaatattctgaaaagaatatgactttttaagcattaaaatgttataaaagtatgaatactgactaaaacgtaacttataaagtattattttgtttatatggtactttttttgtgtgatgaacctgtaggccctgaagtagaaaagttggcggagttggccgggaagaacaatgtgtacttggtaatgggagcgatagagaaggatgggtatacactctattgcacagcacttttcttcagtccacaaggtcagttcttgggtaagcaccgtaaactcatgcccacaagtttggaacgttgcatttggggtcaaggagacggatcaaccatccccgtttacgacactccgattggaaaactcggtgctgctatttgctgggagaataggatgcccctctacagaactgctttgtacgccaaaggtcagctcttgatgcaatttagtttgagtgtttgacaaatgtagcctttaataaaagattctaacacttttttttttttttggtgcgttcaggcattgagctttattgtgcacctactgctgatggttcgaaagaatggcaatcgtcgatgcttcacattgcgatcgaaggtggatgtttcgtattgtcggcttgccagttctgccttcgtaaagatttccctgatcatcctgactacttgtttaccgattggtacgacgacaaagagcctgactctattgtttcccaaggtggaagtgttattatttcacctttgggacaggttcttgcgggaccaaactttgaatcagagggtctcatcacagctgatcttggtaaaaatatatataatcttctttagtttttatcttaggctatagaaaaggataatttttttagctaatcatattttatttttgtcatcaagatcttggtgatgtagcaagagctaagttgtacttcgatycggttggacattactcgagaccagatgttttacacttgaccgtaaatgagcacccgaagaaaccggtaacattcatttcgaaggtagagaaagcggaagatgactcaaacaagtaatcggttgtgattcgtcagttcatgtcactcctatgaaggagtcaagttcaaaatgttatgttgagtttcaaacttttatgctaaactttttttcttaattttcgttaataatggaagagaaccaattctcttgtatctaaagattatccatctatcatccaatttgagtgttcaattctggatgttgtgttaccctacattctacaaccatgtagccaattattatgaatctggctttgatttcagttgtgttcttttctttttttctttgcatatttgcatttagaatgtttaataattaagttactgtatttccacatacattagttccaagaatatacatatattaatttatttttcttaaaaatgttttggaatgactaatattgacaacgaaaatagaagctatgctaaaccattacgtatatgtgacttcacatgttgttgttttacattccctatatatatggatggctgtcacaatcagaaacgtgatcgaaaaaagacaaacagtgtttgcataaaaagactatttcgtttcattgacaatttgtgtttatttgtaaagaaaagtggcaaagtggaatttgagttcctgcaagtaagaaagatgaaataaaagacttgagtgtgtgtttttttcttttatctgaaagctgcaatgaaatattcctaccaagcccgtttgattattaattggggtttggttttcttgatgcgaactaattggttatataagaaactatacaatccatgttaattcaaaaattttgatttctcttgtaggaatatgatttactatatgagactttcttttcgccaataatagtaaatccaaagatatttgaccggaccaaaacacattgatctattttttagtttatttaatccagtttctctgagataattcattaaggaaaacttagtattaacccatcctaagattaaataggagccaaactcacatttcaaatattaaataacataaaatggatttaaaaaatctatacgtcaaattttatttatgacatttcttatttaaatttatatttaatgaaatacagctaagacaaaccaaaaaaaaaatactttctaagtggtccaaaacatcaattccgttcaatattattaggtagaatcgtacgaccaaaaaaggtaggttaatacgaaattacaaacatatctatatacatagtatatattattacctattatgaggaatcaaaatgcatcaaatatggatttaaggaatccataaaagaataaattctacggaaaaaaaaaaaagaataaattcttttaagtttttaatttgttttttatttggtagttctccattttgttttatttcgtttggatttattgtgtccaaatactttgtaaaccaccgttgtaattcttaaacggggttttcacttcttttttatattcagacataaagcatcggctggtttaatcaatcaatagattttatttttcttctcaattattagtaggtttgatgtgaactttacaaaaaaaacaaaaacaaatcaatgcagagaaaagaaaccacgtgggctagtcccaccttgtttcatttccaccacaggttcgatcttcgttaccgtctccaataggaaaataaacgtgaccacaaaaaaaaaacaaaaaaaaagtctatatattgcttctctcaagtctctgagtgtcatgaaccaaagtaaaaaacaaagactcgagttgatatg

SEQ ID NO: 27427 - DNA, 3003 bp, Unknown
  misc_feature (1)..( 3003): 2750-1469P.txt file - cDNA_ID_2990191; gDNA_ID_2926247; Annot_ID_204255
gtagtcatatgccctatatctgatctttgcaacaattcactatgtatatgcgttattaccaaaccgaaagatacccgtttaaaactatctctacatatttagtatttacataattacatataatcttatttaagagaaaacaattatatttgaagttagaaatcatggtctttgaaatatgatgttagctttgaatattataatttttggttaaatattctgaaaagaatatgactttttaagcattaaaatgttataaaagtatgaatactgactaaaacgtaacttataaagtattattttgtttatatggtactttttttgtgtgatgaacctgtaggccctgaagtagaaaagttggcggagttggccgggaagaacaatgtgtacttggtaatgggagcgatagagaaggatgggtatacactctattgcacagcacttttcttcagtccacaaggtcagttcttgggtaagcaccgtaaactcatgcccacaagtttggaacgttgcatttggggtcaaggagacggatcaaccatccccgtttacgacactccgattggaaaactcggtgctgctatttgctgggagaataggatgcccctctacagaactgctttgtacgccaaaggtcagctcttgatgcaatttagtttgagtgtttgacaaatgtagcctttaataaaagattctaacacttttttttttttttggtgcgttcaggcattgagctttattgtgcacctactgctgatggttcgaaagaatggcaatcgtcgatgcttcacattgcgatcgaaggtggatgtttcgtattgtcggcttgccagttctgccttcgtaaagatttccctgatcatcctgactacttgtttaccgattggtacgacgacaaagagcctgactctattgtttcccaaggtggaagtgttattatttcacctttgggacaggttcttgcgggaccaaactttgaatcagagggtctcatcacagctgatcttggtaaaaatatatataatcttctttagtttttatcttaggctatagaaaaggataatttttttagctaatcatattttatttttgtcatcaagatcttggtgatgtagcaagagctaagttgtacttcgatycggttggacattactcgagaccagatgttttacacttgaccgtaaatgagcacccgaagaaaccggtaacattcatttcgaaggtagagaaagcggaagatgactcaaacaagtaatcggttgtgattcgtcagttcatgtcactcctatgaaggagtcaagttcaaaatgttatgttgagtttcaaacttttatgctaaactttttttcttaattttcgttaataatggaagagaaccaattctcttgtatctaaagattatccatctatcatccaatttgagtgttcaattctggatgttgtgttaccctacattctacaaccatgtagccaattattatgaatctggctttgatttcagttgtgttcttttctttttttctttgcatatttgcatttagaatgtttaataattaagttactgtatttccacatacattagttccaagaatatacatatattaatttatttttcttaaaaatgttttggaatgactaatattgacaacgaaaatagaagctatgctaaaccattacgtatatgtgacttcacatgttgttgttttacattccctatatatatggatggctgtcacaatcagaaacgtgatcgaaaaaagacaaacagtgtttgcataaaaagactatttcgtttcattgacaatttgtgtttatttgtaaagaaaagtggcaaagtggaatttgagttcctgcaagtaagaaagatgaaataaaagacttgagtgtgtgtttttttcttttatctgaaagctgcaatgaaatattcctaccaagcccgtttgattattaattggggtttggttttcttgatgcgaactaattggttatataagaaactatacaatccatgttaattcaaaaattttgatttctcttgtaggaatatgatttactatatgagactttcttttcgccaataatagtaaatccaaagatatttgaccggaccaaaacacattgatctattttttagtttatttaatccagtttctctgagataattcattaaggaaaacttagtattaacccatcctaagattaaataggagccaaactcacatttcaaatattaaataacataaaatggatttaaaaaatctatacgtcaaattttatttatgacatttcttatttaaatttatatttaatgaaatacagctaagacaaaccaaaaaaaaaatactttctaagtggtccaaaacatcaattccgttcaatattattaggtagaatcgtacgaccaaaaaaggtaggttaatacgaaattacaaacatatctatatacatagtatatattattacctattatgaggaatcaaaatgcatcaaatatggatttaaggaatccataaaagaataaattctacggaaaaaaaaaaaagaataaattcttttaagtttttaatttgttttttatttggtagttctccattttgttttatttcgtttggatttattgtgtccaaatactttgtaaaccaccgttgtaattcttaaacggggttttcacttcttttttatattcagacataaagcatcggctggtttaatcaatcaatagattttatttttcttctcaattattagtaggtttgatgtgaactttacaaaaaaaacaaaaacaaatcaatgcagagaaaagaaaccacgtgggctagtcccaccttgtttcatttccaccacaggttcgatcttcgttaccgtctccaataggaaaataaacgtgaccacaaaaaaaaaacaaaaaaaaagtctatatattgcttctctcaagtctctgagtgtcatgaaccaaagtaaaaaacaaagactcgagttgatatgtctagtactaaagatatg

SEQ ID NO: 27428 - DNA, 3000 bp, Unknown; identical to SEQ ID NO: 12585
  misc_feature (1)..( 3000): 2750-1469P.txt file - cDNA_ID_2990201; gDNA_ID_2214559; Annot_ID_185836

SEQ ID NO: 27429 - DNA, 3003 bp, Unknown
  misc_feature (1)..( 3003): 2750-1469P.txt file - cDNA_ID_2990205; gDNA_ID_1971748; Annot_ID_175267
ttaataaaccagtgcttatttagttacctatcccactgaagaaaatgccataattcattcctctgtacacggttggtatcactgttgaataagggcattccttggaaaatccaaccttttggttgttagattcttggattgattgtttaagctcgtttacgcaacgctggaactgcttgtggcagtcaacataagtcatacctgtaaaaaagcaccaaatgcagcattctcagatccaagatgcagagtgcaattagatttgtagtggacaaagtagttaaaagatgttaacttcactttgtgtttctctgtttatagaatagttttacgtagatattcttgattggtttaccttttaaatcaacacaattatcatgagtcatacaacaatcatcaagatcatcacaaggtggctctccaggacatccaaagtaacctatcccacaatacttcccatagcgaataccgagaactgaaacagagataggttttgcttcagaaatgttctccatgttcaaaggaatgcataagaaaaatgaaaatctcaccattgcatttctgtgcaatgcaggttttgctgcacttttcctgacattttgatccaacccatcagaaagaactagcaataaccatcatttggaataaaccacaacgcacaaacatgaacaaagaacagtaagtgatatgtatcaacctggctgtgaacgacggcaaggaggaggaagacggttaagcctaaagcaacatgtgtcaaagcaccaccgcggatcatgtttctatcttaccttctccagtagaagtttgttgttttgttctttcaaattctgaccccaagaattataattgtgtctctttggaatggaaggtcccattcttggtcctcctgctttctcgtccctcctctttctcatatgtaaaaaaagaagacgtttcatgattaccaatcaaccaccaaattttatggccgttctttatcaaaaaataaaaattatggatgttaagaacagagtatcatgaagatctacataatcttttagaaacgatatttattagattgcaaatgataatatggtttcaaattttgtatcattgctgatattgatattaaacaaggacaaaaacattatagtgaaagcaatttcctgggaaattttgttcttattgagagcaacctttatcaaagagttatagcaaaatggatttttctcagcttcaaagcctccgtttcagggataaactggaaaaaaaattgattcaagagagaatcatgaaaactaaaaacggaggggattacacaatcttcaagttattgttactctccttcatgggtaatagcctgtgaaggtgaatcctctgccggcgatttcacctgcgcaataccatgcaaagcattcgagaccaaacaatgcagcgattcctgcatcttctaccttcagaccggatctgttcttccataggttctttgcgtagtctacttccttccagaaggtttcatagcgtccgggaatgctgtaataaggagtggaagagtgttagatacttaacactatgggcaaaatcaagattgcaaaatgtgaatcaccaaaactcttcaattcatggcaaaacaaaaggtggtgatagaactcgcatatgtataaacttttcaagattaaggaacaggacatgctctaaagccgtcatcaagaaaaaggcaatatactgagacctcttttgtacccgaaaatatggaccgtaaaagattaagagtcaggttattgtataatctaagacttagtagactggaatgatcgttgcaaatgggcttattagagattaataatcgaacaaacttaagattgactactttaatacacaatcctgcaacttatgaaaacagattaaacaagacaaacagctcaacaaaaagatagcatcacgaggtcatagaaataagaggatagaataaaggattcatagtatgccattttcagttccatgaacagccaagttttgtatgagctcagcattccctggctatcttatacctcaaagaagatgctttattgacaaaagtctctttctaaccagaatctagataaggtaactatgaccagggaaatgttcatatagaaggaaaagagagatatcgacctagcaagacgggtgtagagcaactgcttagacaactcttggcacttctcaacagtggcaggttcctggatatactgcttgttcttctccaacagctgtctgtagtaggaagttccatgcttagccacaaactttgaagcctcacatgcctttgattgaacttgtatcaacttcgatgccatcttcacaaccaaatccttcaaatacaaaaagagattctttgaatcataaaatttaaattaatcaaattttgacattgaaaattttgtaaatttccctactacagcaaacaagagacgtttcagtgaattcacacaaatcaagcttaaagacttaaaaagcctaaaaccccaaatcctatattccataacgatagatcgaacaaactacagtgtgaatcaatcaagcaaatcaaaattacaaatcagtcactcctagaacgaacaaatcgttatcgaagcaagaagagatcacagatatagatctaaaagtcaaaccacaaagcatagcatatacaagagaagcaggagcaaaagcctcgacccaattgagaaacatcggtcagagaccagaaactcgccgtaccttcctgcagttttgataatgcagcaccggtgagctgagagatgagtcgattcgagatttcgggccactggttcaacaacaactgcgtaatacttctcttctttatgttagaacgacggcgtaatatgcgtttcgattggaacgatgtcgtttctttcacactcttagaacgacgtcgtatatattcgttttcctcgagttctataaaaacgacagcgttttggatatttggctttattattaggccttgccggaaaaacaaaaaactagctcatcgtcgtcatg

SEQ ID NO: 27430 - DNA, 3003 bp, Unknown; identical to SEQ ID NO: 27429
  misc_feature (1)..( 3003): 2750-1469P.txt file - cDNA_ID_2990205; gDNA_ID_2926196; Annot_ID_201444

SEQ ID NO: 27431 - DNA, 3003 bp, Unknown
  misc_feature (1)..( 3003): 2750-1469P.txt file - cDNA_ID_2990209; gDNA_ID_2684112; Annot_ID_190671
agatctttcccaattaatccggtctattgccatgtcttcctcgaagaaggttacgttcgattcacaatcttcatttcttctctttatgaaattatttctcgtatgatcttagtttttctctgatttcagggttccgatcggaatcaaatcaggaagtcgttgaggaagttaaaaaagcagattggggaattggagaaacttgaatctccggatcggttgaataatgtgaagcctatcttcatcaagcgcagtatccttttctgttgtcacaagatgctatttttttttgtcatacaaaactgtggaatattatttgttttcacatgacgagcttggttttaagatatatacttgaagaagaaactcaagaagaaagttaaggatcatggcatattctgttcttgctccttggatcctggttcttcaactctttgtggcagcgattgcaattgtgggtatgttccatatctgatcacaagtacttgtctgactaaatattcgtggcggcattggttctgattgttgatgtattgttggttttttccttgatgtataggattctactctcaagctgttcgtctagttgcaaatgcagtagtgaatgcaccaacaagccgttccaacaacgacatatcaagaagatgaagttagttcaggttggtttattacaatttgttgtcttatataaagaatgcattttcaacgttagttgaataagttgttgcttgcagacagagaaatgtggatatgggattgtagcagatgaagatatcaactcaggagagtttatcattgaatatgtgggagaaggtgatgttattacctttggtttctcatatatagttagagtactgttgtgattactctgcttactcttatcaatcttcttatatccatttcttattgtagttattgacgacaagatttgtgaagaaaggctttggaagctgaatcataaggtcgagacaaatttctatttgtgtcagataaactggaacatggtgattgatgctactcacaagggtaataaatcaagatacatcaatcacagctgcagtcctaacacagagatgcagaaatggttcgtttgtaacttattatccatcttctcacttttcttctgttcaaaacaattgagcaaagttatagatcatgaacctttttgttcccatttaggataattgatggcgagacaagaatcggcatttttgctacccgtttcataaacaaaggcgagcagttgacttacgattaccagtaagaacatttccttgcatcacaacaataaagtatttgaatgtaaatgtttagttgtgtgatactaataaatatagcaggtttgttcagtttggtgcagatcaagattgctactgtggtgcagtgtgttgcagaaaaaagctaggtgcaaaaccttgcaaaactaagaacacaaccttagaagaagctgtgaagccagtggcatgtaaagtgacctggaaaacgcccaaggtaaatttgagctttgccttacttttttttagtcatcctgtgattgctaaacagtaacttgtcctttcaaacatatggttagggaaaaactcgagggagacgcattgctggttagtattaattatttggctcgattatcgacaagcttctcaattcagaggtaagagaaaccaatttggatgcgtcaggacaagcttggaacaatcatagccagaggaaaatatgttgccgggactgcattggtgcggtgatctggttagcacgtcccatgaaccaaaagtataactatctttctttttttctcaaaaaccaatttcttccacaccaaagaacagtattacacggctcagatgaaggttttgactctagtagttgacatttttcaggtgttttggaatcattacacaatatgatgagttttaaataagcacttggtatctattcatttgacttattgccaacactgttgttcacattctatctcagtttacgaaatctaaagaatgaacattgactttgtccaggtcatgtatgaggatggtgttaccgagatcatcgacatgtgcagagaagtttggaaggttgtaactgcttgatattgtgactgttccaagtctgatttcattcccttacataggattacacttgaattgtcaagaaattttgtaaccaaccaaaccgtgtcggttggcaaataggtttagactttgttgttgtatgtatccaacttgaatcagtagttcagtagtacattacactgtatgtggaatctttggaccaaataaagaaaagtgtttttggattttaaaccggggttttggttatttaagagacaaaaaatctcatacccggtttgctctgtctataactcgagtttgttaagcacgtgattctccttggcaatgctgctatatcactagcctactgtccgttgtagcggatgatacccacgcgccggtgaccgacagtggatttgccgttaccggtggtaggtaatgtggggtcgtagctcacctacctaactaaattttctttttcttatgtttagttggaaaataagaaaaatataaaaactagttttttgtaaaggaaaaggataaaattactattatggaaaagataaattccaaaagtgaggaaatatgtatttagcacaataaaaagtgatagcaatgtgagaaaaaaaacgtgataacagaaatgctgtgctaaatttggatttctttgttgaaaatatatttacattgataaatattatgtaattagaaaaaggaaaattcaaaatagatgtgtagaaaaacaacaatgttgataatataattttttatctaaagtttttaccggttaccagttaccaccaaagttgttggatctctatcttcatttttagagattagtataaatgagtgagtaaacaaaccagagagaccaaacttgcctctccaccaccacttcctctacctatctaattccgaatctggatttggatttggatctcatttcgattcaacgatg

SEQ ID NO: 27432 - DNA, 3000 bp, Unknown
  misc_feature (1)..( 3000): 2750-1469P.txt file - cDNA_ID_2990213; gDNA_ID_2926239; Annot_ID_142834
caagagaaatataaacctcgatcatgtcgataaagcgaatgatgttaggatgattaatcttccttaagatgataatctccgacatgagactctcttgcaacttcttattaagccgagccatagcgatctccttgatagcaacgacggtgccatgaacaagatgcctcccttcccaaaccacggaaaacgaccccgacccgatttgtcgacccaccgcataatcgccgataacccttccgcttctccccgccgccgccaccaacgacgactgagccattttacctccgacaaaggagtaaaaatacaactccggagatccgaaattgagctgatgatgactaaaagtttcagaaattgattgaaggatcgatttggagttgaaaattaaaggattgaatttgggaggcggattcagataaaatgatagagaagaaagaaagaaagaaagaaaggtttattttgaattgaattcaatgcaaagtttttttttactaatattattagagcaaaggaatcaacttgtaaaatgacgcttctgatttatacgatcggagatgatgatgatttgtattaaattttaatagtatggttttatttaaaattacggctttgagtggacataatgacagcatgattagtggtcttaaactatgaagtcatcgctacaagctacaccaatcataacaatttaaagttatgaaataactacgaacttatgtttctacgcgtcgttactacaaatcttcaaatattttcgaattgtaaacattactaccttaaacaaaacaaaaaatctgttgttccttgatcagattaattaatatctattgaaattattggtgtccgttacaaatattttttgtgtttacatttccaaaacaaacttctgtatgaactgcttttggattgaagatttgaaacaattcacagaaacaaatttgtcgataaaataaaaataaagatggagtataaacgttttatatgaagtgtgaaaatgggattacgtgtatattgatataaacgtataaataaatagtaggaaatagcgttaagtagtcacacaagaattttaatttgtaggatccagagcagcctatatagcgtgccgttgtgaaaagcccactagctttttctgcttgattgtgactttagccgcttttgctaactctttccagccgtttatttctttccataatccttacgtttcagtttcaaatttgggagataatatactcaaactaaatacctaaaggtcctggttcgaatctttagcatggtatttggcaaactctctcatgattggtcatttgttgcaatgttgcatgtttatgtctatgattctcacatgtgtttcctttgaaaatcagattttttttgttcttaactcggatagtacaacattcataatcttcaaatggtctttcaaatgatctggaactctttggatataagaaaatgctgacaatttgatcaaaattgttaaccataccggaccaaatttgtgctttttcatatattagcggaaccatgtatgaacttgtcttcttgtccagtgggccataaaactttttttataatctccatggacttctctttatttttggcccagtagggattcatatgcatccacttagacttagaaccatatgtgagtcaagagacagaaaaacttagatgatacactaaatcaaaataaaaatgattcaaggaattcttacacttgtggcaatatataaatgaagaactttggcaatgtataatatattacacttgtgacagttttcttaaataaataacaaaaacatagcattattttcataattcaaccaaaccatctatgtacagtaattcacttttaatctccagcataaaaacaaacagaaaacttaccttccttttaaaaaacttgaatgctttgtcttttttttcttcttctttattcctcgtgtttggttcatggctgaataattcagttatgtatcatttattccattaaaggtaattaaaatgaggttgtaatagtcatatacgcatacataatgataaataacataaaaaaagaatcaaccaacaaaattattcgatctggcaaaaaaggtcattaaaacatataataaatcccacacatgcccacagatcattcaacatcatatcccatcatggtttaatatataaaggagtcacaggtcattttatactctcgaacatgttggtcttgattcctctttctctataaattaaaacacttgttcacatctttctcgatatgcatatctacaatgttccattcttttatttctgccgatattaaaatgaaattttcaaggcttttgggtggtttattagagatgtgatcatgacaagaagaggaattgtatgaacacaaaaatggagaaattcttgaagctggcacaatcatttgcatttgtttggggattcatcttgctggcggctctcgtgtgttgctgcatcagcactaaacctaatcgcgaaaatgatgatgatgatactggttgtgccgcctgcgacggagggcatgccggattttagtcgatgatcctctgtttctttcacttttcttttttggtcctctggtagatttgtacaacatagaatcctcatggcttatctttttcataattacacaaagcattattttgtcttctcttttaatatagaccaagtttatatttctttacgtttgcatttcatgttctagtgattaggatattgctataaacatatacattgaatgaaaacgtcggtttattcagttatggttgcataaaatttggatttgggtttagatattttgtgtataaaaatttacaactgagtaaaaaaaaaaaaaaaaaaaaaaaaaagagtggcaacgaaacggagagagggaattaggcaaattagaagagagaagtcgtagaccatacaatttgcacacaaactatatctctccactgactccaatcatctccttcctccgctcccatctgcgtctcaatg

SEQ ID NO: 27433 - DNA, 3000 bp, Unknown; identical to SEQ ID NO: 27432
  misc_feature (1)..( 3000): 2750-1469P.txt file - cDNA_ID_2990213; gDNA_ID_2926239; Annot_ID_204004

SEQ ID NO: 27434 - DNA, 3003 bp, Unknown
  misc_feature (1)..( 3003): 2750-1469P.txt file - cDNA_ID_2990217; gDNA_ID_1620325; Annot_ID_153471
tactatttataacaaggaccaatctgatgattagatagccgataaactaatctcgcatttgtttgctaactaaaaggaaaatggagtctagagacttactggtggaggaaccagaggcagaagcagatgatacaacgccgaggctggtgatggtctcagtgagaccgccgtagacggtgctctttaacaactcaatggcgaatctttctccgtccggttgaatttgtggtggtgattgtgtggtgtttatactcttcctcacatctatatattcttcaactgcatatagtttgcaaattttctttgggtacaaaatatatgtagttctatcgaatattcaaataccaaagataagcctataaacattttttatgatcaaagaaaccgttgttgattttttcccaaattgaaatcaatttgtctagtccggtttaggtgagaggagtaatatttttgtttcaattcacgataacatacctgatttctcaaccggttttcccctgatataatcaagttgtaagaactttgttcctgaaatttaaaatataaaaccagggttgatccatcaagtttacaaaaccaagaaaacctggaaagaattgactcagaaccggtttaattaaggtttgatttacctaaccggatgaagtactttagatcacaaaccaagcaagtaaagatagttccctctttatcttcttgatcatcctcaatccgagtctcagggacataaaccttaactggtgattccatctcctcaatgtcgcttggttcgtccggttcaacaaccggtatatcgggtttcagatccagagatgaattaacgtgcttccctcgttttcttttcttgagaaccacatttctggtgatacatgtgctacagctaggacagtaaagctcgtagttttcttgtgtcgcaagcaaattctctaggtttgacttctcttctgaatctgacgatgatctctcgttcttttcttcatcctcatttccaagctcatagttttcttgtgtcccaagcaacttctctaggtttgacttctcttctgaatccgataatgatctctcgttattttcttcttcctcttctatctcacaatcttctccattccgttgccttttgttctctacatttggcaagtttgtggagctcgactctaaccaattattaccattttcttcgtttgaaccggtttcagattcttcgtttgaaccggtttcgctcacagtactctcaagtactattggatctgaatcggaaaatagcgatgatgtactttcactaacagaattgttacctacgatggcaattaataccaaaaataaacgagagattgatctaccggttaagcaggtttgtgtccggttaaaaattaggatcctaaccaattagtagaggtaccaaaaattaaaagacaaaaaaacatgtaagaaactgacaagttgactaatgtaccttgagcttgagatccatcattatcctcttccaactctatctcggtggtgttgaccggcgccggagccgtcgctgccgccttggatcgaaattctcgggcgggaacattatctttaccaaatctatagctctcaagaagatcaaccaaaaattcagcatcaacgatttctttatctccgtccttcaattcggacaaggttacatgaactggttggtttgacttttccatatcaatccctatgtaatgaatctgattccaatgttctttaaagtgattatgagttaatgaaggagatattatgatttgtgagtctctctctctcttttcttcttttttcttttttaaatttaaaaaaaaaacacagttgttcctaattatcgtgtccaatcatatgatcttttatatatatacataaataatacccacgagggaagcacgaggggttaaatattcgtaacgaggattacttttggattttggtaattagggaaggtgtcatagttaattagcactctatttaaacatgttaatatatgtcagtttcaaaacaaaaaaaaaaaattgtgtggtatagtatatgtcttctttttgtcatcagtatatgtcatgaaattgatccataaggttttagaaaaatgattttaaatgattaaaaaatattagaagtaatacgaaaggtgcaatattgattaaataaatacaaactgtgatagtatgataccacgtaaaataaattactacagaaaatgaatatcacatgataaaaatactagtagtcaactctttaataactcataatgacgaggaaagtgggaaacgttacagttagttggaaacaacgaaccatattcaaaacgtgtatagttaatgacttcttatttattatgaagcccattagacatttgtttcttgggcctatatatttcattcacaataatcggcccataaaattaaccaaaagcccaatccaagtaaatcaccataaagctggaacacataaactggagcccactaatttacacgtggcacaatatgaggctccaatttcggcaagaagtgtgtgatcttttttttactcgttcttgatcttcgcgcttttctgatagatcctcttgggacaataaaaccattaaaatatcggagagtaaattttataaaaccaaaggcaaaaattgcatagatcagaaaatatttgttgcaactattgaaattatttttgttggttcgaaatttttacatatttatgttggttatgactcttatggaaatgataatgtgttttaaggaataaaattaaaattgattctgtttcatactaaaatatcaaacaaaaaaaaaaaatttgttttggcaaagaataaaggttttagtgtactctttctctgtggttaactttaaagttttggaagcatgtcggcgaagctggaaggagattctttacgtagtagataggccacaggtggtttcaatcttccccaacaaccagacgaaatcaaacataaatctgtaacagtcgaagaaactctcactctttaattgatcaatg

SEQ ID NO: 27435 - DNA, 3003 bp, Unknown
  misc_feature (1)..( 3003): 2750-1469P.txt file - cDNA_ID_2990229; gDNA_ID_1620505; Annot_ID_158989
ttgtcccttcaagcgcttgagtgtagaacgccgtctctctcgcaaggtcatcgtttacatccacagctcctccctggtcaatctcaacagtaagcttatgagtccaatcaacatcttcaggccagctaatatcttgaagcttatcaagcaacccatctctgttgtatatcgcagtcttcgtaggctcagccaatttctcggtgatctcgttctctgtatccgaatccgaaagagactccgcttcggagtcagtagcatcatcctcatcaatcatgttcatctcatcatctgatactatatcctcttccaatgacatctactcaaaattcgataacaacaaacaaaattagattcagaatcaaaaaagttcagacttttatacctttgggtaaaaaaaaaacttggcgaatcacagaaactagggtttataagtcaccaacgcaaagagagattccataactggttccgttaccttctatatgacaataaagttcgatactttatctaaggacttaagattataaccatgaacaaaattagggtttatcattctattgacacaaaccctttgagaaggaatagaagaaaacttactgttgattacggagaagattgaagaagcttgtgcttgagtagggtttttgagagagagaagagagatagtgaacccgccggcgcaaggaagaagaagaagaaacttagttttaaaggcttcgactttgtaaaacccttttctgctttatactaaaccggaaatctcacaaaaccggatcataccgggttcaaattatcgctcaattggttcccgttactatttataaaccggatctaagacatgaaaacttgtgacaaattgattcatttcattttagtaaaggtcacatgatttgagatctaacatagtataagagtatcattcaacagaaaggaaaacaaaactttgagccaaggctccaaaactctaatctctacgaaacagataaaggactgtgagaatcaatcattgttttcgattgaaccaaactctgaatcttgagttttgcttctgccatatttttcttctcaagctcatctaccaacattttgcaagtgctatctctaggaaccattccttttcgtactgcttcctcaaagaacaagcaagcttcttcaactttcccgctcatacataaccctctaatgagaagaatatatgtcgaaacatcgatactaacatcgtttttcaccatgtgatgcaataatattccaagtagcttcattttcttcttatggcaacacatcttcaacaatggagcataagtctcaacgtttggactacatgattccccctcctcatcctccatccttttaagcaaacgtagagccatctcatctcgtgagtgatgaagcgcagcggaaatcatggtattgtagactaaaacatcacgacgaactccttgattcgtcatgtcctcaaatatctcagctgcatccttaaacctaccagtcttcgacaaaatatgtatcaatgagctataaaacttagcatcaggaacacaaccatcttctttcatcttctcatacactcctaaagcttcagctacttgtttagatttacccaaagaatgcatcacaatagtataagtcacaacattaggattacacccattctctcgcatctcttccaacatttcattaaccctcctaaaatccccttccttgcaataagcttccacaaagctagtgtaagtaacaacatcaggagtgaactcagtaaccttcatcaaatccatcatcgctctagcatcatcaaatttccgagctttacaaaaaccgtgaatcaaaatgttgaatgtccgcgcatccggcttgattgtatcgaaaagcttcagaaaaacttcatgagcatgctctatactattctctttcacaagtgcatccatcaaactgttcatagcaatagtatctgttttcacaccataactcttctccatctctaaaaaagcatcaacagctttattatatttccctgacttggccaatctcctcataaccttactcatcgtatcaagcgtaacaagcttagattcttcattcttgttcatctcattgactaattcccacatcaaatcaaaattcctacatttccccaacacatcaaccattgcattataagtatgacctgaatgcacataacctgtttgtgaatttgcccaaatgaaaaacccgtaagcttgattccaaccattactaaaccttcttagaacttgcaaaaccaaactctctgtaaccaccacatcgcatttactcaactctttaacaacatcctcatgagacgtgtccttcttattcaaaaagtcgcaaactttatcaatatcttccactggtttcttcactacatttccctctgagacttgttgacgactaaacttctggctctcgacccaattcgccaaagaagggataacaaaatcttcatcatctttggaaaccgaactcgatgaagaagaaggcttgtttgatagaaagtctttaatccaagacggtagctccggtgactctgcggcaacaatcggcgactcctctgcagtgttattcgttaccagaaacctccgttggaagattctccgaggtaaagtatacgaaacaagcttactaatcctaagcttagtgagcattttgttccgtttgaatctaaacgcagacttctctcctgtttttccgatcaaagttcgaatcttttagacctaaagcttgctgctttgtgccgggtcgggtcggttcgttaattggtacaaccccggttcgatttaatttaatttagcgtttagatttttggtttaccccacatctgacaagtgacgatttttactgacacgtgtacaagtcattctcttcgtcttcttcctctaaaaaccctaattttaaggaacctcgtgtggtcatcgtcttcgtacctttctgctttctacgccgtcaaaatctaactgctcgacagtgaccatgcaaagctcaatgacaatg

SEQ ID NO: 27436 - DNA, 3000 bp, Unknown; identical to SEQ ID NO: 9703
  misc_feature (1)..( 3000): 2750-1469P.txt file - cDNA_ID_2990233; gDNA_ID_1972173; Annot_ID_179929

SEQ ID NO: 27437 - DNA, 17 bp, Unknown
  misc_feature (1)..( 17): 2750-1469P.txt file - cDNA_ID_2990236; gDNA_ID_1563305; Annot_ID_147435
acttgaaattcgaaatg

SEQ ID NO: 27438 - DNA, 3000 bp, Unknown; identical to SEQ ID NO: 13339
  misc_feature (1)..( 3000): 2750-1469P.txt file - cDNA_ID_2990239; gDNA_ID_2214619; Annot_ID_135845

SEQ ID NO: 27439 - DNA, 3000 bp, Unknown; identical to SEQ ID NO: 13339
  misc_feature (1)..( 3000): 2750-1469P.txt file - cDNA_ID_2990239; gDNA_ID_2214619; Annot_ID_187613

SEQ ID NO: 27440 - DNA, 3003 bp, Unknown; identical to SEQ ID NO: 26407
  misc_feature (1)..( 3003): 2750-1469P.txt file - cDNA_ID_2990249; gDNA_ID_2214604; Annot_ID_187166

SEQ ID NO: 27441 - DNA, 3000 bp, Unknown; identical to SEQ ID NO: 9495
  misc_feature (1)..( 3000): 2750-1469P.txt file - cDNA_ID_2990259; gDNA_ID_1972133; Annot_ID_179123

SEQ ID NO: 27442 - DNA, 3000 bp, Unknown; identical to SEQ ID NO: 1818
  misc_feature (1)..( 3000): 2750-1469P.txt file - cDNA_ID_2990274; gDNA_ID_1620452; Annot_ID_157528

SEQ ID NO: 27443 - DNA, 3003 bp, Unknown
  misc_feature (1)..( 3003): 2750-1469P.txt file - cDNA_ID_2990278; gDNA_ID_1621182; Annot_ID_174316
ctaaatcacaatgggtaaaaatactaaaaattgttgtatgtttgggtctaaaataattatatattttagtctaaataatttattattttatggatgattttttggatgttgtgatatgaagctttttgatggttcatccatgaacaatcataatggtgaatttgattgcaattgcgctggggcttgcaaagactatgtattgttagaccatctacattggtaatctctcaagagagtttttcactattaaaataacagaaataataaaaagagaagagagagtgtagaaagtttctcaagtgagaaactatgagatactctctacaagccatcattacatttctcttcttttaattgattcaatttttacactaaaataaaaatttaatcatataataaaattataataaaatactaatatttttcttgttcgagaaactttttgggtttctccttgatggagatactcttaggttttgttaaactctacaacacatcaagcttaaacctttgccatccacaccaactcacggaaacagagtaagcaagatataaagaagtagaggaaataacagagcagaataggaagaagaggagcacacaagtatttgttcacaacgaaggagaaagagggtgattacaggataatactagtgaacgtctaaaacttttctctagctaaagactcactctccatcatgtactacttgaaaaactaccccaaagcatatacagttatactttacagtttctctcaccccttatgatctaatctccttagatctacattgcttgttctttctctgctccctagtgcagcttccagacgttccttttgaatttacaaacggacaaattctccttattggccaacaatgcagaggctatagttatcgttgcctttaccttgtatactagaaaatgtgaacatcaagttctcatcttcatatgtacagtccgttttctgcattcgagtaagcttgttggaggagtgttcttcagcttttgggtgatttgtcatctttatctgtttgctaaaggattgattgtgtttgtggtcgattattgtgtctctgctttgggtgtatgataatcctccttctggtaaacaagactacgcagtttcagtttccttgatttaggggttttctttgtttgtggtacaagccttgtttgtacgaactcagagctaatctccatctccttgtatcagctgattcagacaagacggatactaagttgcaagtttcttagatgcaagagttatataatttgactttgcagcttgtatcaacttatagcaattgaaacagtcttgtcaccatcaatgtttttagattataatttgtttcatgcaagtttttgtgaaagatttttatggaagttcatatatatatgaatactactgaaaaaaaaatcaacttaaaattcaaagcaaaatctccacaaatagatctgtttcattatagaaatacttaaaaaaacaagaaaaaaaacgtggcagaaggaatttagaagcaaaaacagcttcaatctctctctgatccgcttgctacttcacaattgactgactcttaaggaagcttcaatgttttttcttttagacagatttgttagcagagaagtcttgagttgtcagaaaaacaataactgttagaattgttgtggagaggtggcagagaagatgtgtgaagcagactgctcggatcatagcttgaaaacatgtcttgagagaagctagtgttaccgacagcattaccataagtgttctggttgaaaccagaagagaattcatgtggaaccgtgtttgagagattaggatattgtagaacgttgtttttgttgatgatttcactcatcatacacatgttctgatcaaaaccatgaagctgatcctgtcgctgcatcaagtgattattcaacccgtagttattcactgcagatgcttgtaccgaaagaaacggtgagtattcttgtgtgtttgacacgccaggatgttgaaagttgttgttgttggtgatgttgtccaaacacatgttctgaccaaaaccatgccgcatcaagtgattcaggtaattggagttgattggagagtgaagcagacagtgggagttgtgagagagtagcagcatctccatggttgtacatatacggcgagaagttgctaggattcaagtgttggatctggttcagatacgatggtgttaaactctgatgcaccaagtttttgttttgttgtttctgcgactcaacaatacgaagcctttcttgcagagtagaaagagtccgttctaaggaatgaatcaattgagagagttgttgaggagagtaatgatcaaagtcaggataccaattcttcacataattcttctttttcgaattcgtcttccccttgtcatttgtctttgtctttgtccttgtccttctccttctcgatgaagtcatgaagattgagactcttcttgcgttttgtggcctctttatatctcgaagccatgtctttcactgtatttctctccttaggccatgttctcagttcaccgtctggtccgtaatagatgacgcaaacgtcaatagcacagagaatcgaaagctcttcagcttttttgaagatggttttgagtctgtttgttaaactagttgaattacgtgacgaagaagaagaagaaaaagaagattgcttcatcgtgattttgccttgattcggcaagaaactagggttttttcttccgagagagagagaacacacaaagaagaaaaattatggaaatgagggtgaaacattgtgaactcaatacgtttctatagatgccttgatgcctacggaacaacgtgtacgcatctgtgttaaattcaaaactaggcctataatgggcttagcagaaagcccaattagaaaacgattggtttttgtggaagagtaaccctagaaaatatcatatataaagatattgtcttcttcgattaactcttcttcgccaaaatcagggagaggctaaaatg

SEQ ID NO: 27444 - DNA, 3000 bp, Unknown
  misc_feature (1)..( 3000): 2750-1469P.txt file - cDNA_ID_2990278; gDNA_ID_2926183; Annot_ID_140640
aatcacaatgggtaaaaatactaaaaattgttgtatgtttgggtctaaaataattatatattttagtctaaataatttattattttatggatgattttttggatgttgtgatatgaagctttttgatggttcatccatgaacaatcataatggtgaatttgattgcaattgcgctggggcttgcaaagactatgtattgttagaccatctacattggtaatctctcaagagagtttttcactattaaaataacagaaataataaaaagagaagagagagtgtagaaagtttctcaagtgagaaactatgagatactctctacaagccatcattacatttctcttcttttaattgattcaatttttacactaaaataaaaatttaatcatataataaaattataataaaatactaatatttttcttgttcgagaaactttttgggtttctccttgatggagatactcttaggttttgttaaactctacaacacatcaagcttaaacctttgccatccacaccaactcacggaaacagagtaagcaagatataaagaagtagaggaaataacagagcagaataggaagaagaggagcacacaagtatttgttcacaacgaaggagaaagagggtgattacaggataatactagtgaacgtctaaaacttttctctagctaaagactcactctccatcatgtactacttgaaaaactaccccaaagcatatacagttatactttacagtttctctcaccccttatgatctaatctccttagatctacattgcttgttctttctctgctccctagtgcagcttccagacgttccttttgaatttacaaacggacaaattctccttattggccaacaatgcagaggctatagttatcgttgcctttaccttgtatactagaaaatgtgaacatcaagttctcatcttcatatgtacagtccgttttctgcattcgagtaagcttgttggaggagtgttcttcagcttttgggtgatttgtcatctttatctgtttgctaaaggattgattgtgtttgtggtcgattattgtgtctctgctttgggtgtatgataatcctccttctggtaaacaagactacgcagtttcagtttccttgatttaggggttttctttgtttgtggtacaagccttgtttgtacgaactcagagctaatctccatctccttgtatcagctgattcagacaagacggatactaagttgcaagtttcttagatgcaagagttatataatttgactttgcagcttgtatcaacttatagcaattgaaacagtcttgtcaccatcaatgtttttagattataatttgtttcatgcaagtttttgtgaaagatttttatggaagttcatatatatatgaatactactgaaaaaaaaatcaacttaaaattcaaagcaaaatctccacaaatagatctgtttcattatagaaatacttaaaaaaacaagaaaaaaaacgtggcagaaggaatttagaagcaaaaacagcttcaatctctctctgatccgcttgctacttcacaattgactgactcttaaggaagcttcaatgttttttcttttagacagatttgttagcagagaagtcttgagttgtcagaaaaacaataactgttagaattgttgtggagaggtggcagagaagatgtgtgaagcagactgctcggatcatagcttgaaaacatgtcttgagagaagctagtgttaccgacagcattaccataagtgttctggttgaaaccagaagagaattcatgtggaaccgtgtttgagagattaggatattgtagaacgttgtttttgttgatgatttcactcatcatacacatgttctgatcaaaaccatgaagctgatcctgtcgctgcatcaagtgattattcaacccgtagttattcactgcagatgcttgtaccgaaagaaacggtgagtattcttgtgtgtttgacacgccaggatgttgaaagttgttgttgttggtgatgttgtccaaacacatgttctgaccaaaaccatgccgcatcaagtgattcaggtaattggagttgattggagagtgaagcagacagtgggagttgtgagagagtagcagcatctccatggttgtacatatacggcgagaagttgctaggattcaagtgttggatctggttcagatacgatggtgttaaactctgatgcaccaagtttttgttttgttgtttctgcgactcaacaatacgaagcctttcttgcagagtagaaagagtccgttctaaggaatgaatcaattgagagagttgttgaggagagtaatgatcaaagtcaggataccaattcttcacataattcttctttttcgaattcgtcttccccttgtcatttgtctttgtctttgtccttgtccttctccttctcgatgaagtcatgaagattgagactcttcttgcgttttgtggcctctttatatctcgaagccatgtctttcactgtatttctctccttaggccatgttctcagttcaccgtctggtccgtaatagatgacgcaaacgtcaatagcacagagaatcgaaagctcttcagcttttttgaagatggttttgagtctgtttgttaaactagttgaattacgtgacgaagaagaagaagaaaaagaagattgcttcatcgtgattttgccttgattcggcaagaaactagggttttttcttccgagagagagagaacacacaaagaagaaaaattatggaaatgagggtgaaacattgtgaactcaatacgtttctatagatgccttgatgcctacggaacaacgtgtacgcatctgtgttaaattcaaaactaggcctataatgggcttagcagaaagcccaattagaaaacgattggtttttgtggaagagtaaccctagaaaatatcatatataaagatattgtcttcttcgattaactcttcttcgccaaaatcagggagaggctaaaatg

SEQ ID NO: 27445 - DNA, 3000 bp, Unknown; identical to SEQ ID NO: 27444
  misc_feature (1)..( 3000): 2750-1469P.txt file - cDNA_ID_2990278; gDNA_ID_2926183; Annot_ID_200394

SEQ ID NO: 27446 - DNA, 3000 bp, Unknown; identical to SEQ ID NO: 9524
  misc_feature (1)..( 3000): 2750-1469P.txt file - cDNA_ID_2990282; gDNA_ID_2926139; Annot_ID_197343

SEQ ID NO: 27447 - DNA, 3000 bp, Unknown; identical to SEQ ID NO: 9524
  misc_feature (1)..( 3000): 2750-1469P.txt file - cDNA_ID_2990282; gDNA_ID_2926139; Annot_ID_138948

SEQ ID NO: 27448 - DNA, 3000 bp, Unknown; identical to SEQ ID NO: 9524
  misc_feature (1)..( 3000): 2750-1469P.txt file - cDNA_ID_2990282; gDNA_ID_1972140; Annot_ID_179262

SEQ ID NO: 27449 - DNA, 3003 bp, Unknown
  misc_feature (1)..( 3003): 2750-1469P.txt file - cDNA_ID_2990286; gDNA_ID_2926241; Annot_ID_142890
acaaccacacagaatcaaaagacccacaagctacaaagaaacacaaatcaatttcaagtatctagtggattgagaaaactcaataacctaaaatctccaaagagaatctaccaaaacgcatgcaaaatcacaaaagatgttattttggttacacccatgaggaacaagaacaaaagtcggagaatttcgcagaaatttttctgaaaccctaagcttcaaagttacgatttttaagaacaggaaacgattacagagcgagactcatcactaaggtagaaaaaaagacttagcattacgtcaagaaattggaagatacaagagctaaaagaggagagagaagaaccttggtgacgacgaacgctgaacgcagagaagggatgcaaacgtttcttcacaagactaaagttatacaatgctacaatataaagggacaagtactttctcctaaccggatctcgttgcgattgaaccgggttcagttcagtttaaatttggttcggattgatggaaatccagaattctgattggatgaattgctttaatttgatttacattatttttatgtttggtacgatttcgttagggtttaggtcaatttgttactacaataaatgtgaaccggttatgctatttgctttttaacctttttttttctgacatcccctctctggtttcatctgacgacggacaagatttaagggataatcgaacggtcaaaattataaactacgggacagatttcgtttttttttttttttgacaagcgacgaagatttttctttctttcaaattgtgtttttctctatattcgattcgagattaaattctgaaatattgttctttttttttttttctcttttgtggcatgaacataattgttttcttttgttctaggaatgtcatttgtcacttttgttaatgcaattgagaaatttgaggttgcagttaggtatgcatttaaaataagattgtctagtagaaattggacttacgatttatatgatcttcataagtaaaaaaggatgctaacatattttaaaaaatctgttgttcaaaaaaaaaaaaaacatatcttaaaaaatcaataaaatctaaggatgtaagatattattacaaatagtagagatttataacttaacaaaaaatcgaggagggactaaaaaataacgctcgtaattaagccctagtacacttgatctgtgaaagaatctgattgttcaagaacttagacatgaatctataagccttttgagtcaagtgcactccgtcccaacttatgaacttgtgtggattctgacacaccggaactcccactgctccgtatggcctctttccgtcgtagttgtaagctccaccggtcccgcaacacgatttcaaagctacactcttgtcgaatctttcacttcgtagaacgtattgaaacgcattgtagtaatctccgtatactatagccacgtctggaaactcttttctcaaagaagctatagcttcttggagttggttattgtgatccattgcgaattcgttgagatgcgtcaagcaaccgttgtcgtcgtaatcttttgtatctttcacgggaaaagacgtcaagtaaatcggaaaacatcccactggaaagtttcccgggacgaccacgttaaccgcaccagcacggatcacctctctagctgcggctgtgatggctccaaccacgtgagggatgtagcttctgatttcttccattggtttgccttggaagaaaccgtagttgtagtcgttgcctcctatctcaccgaccatgaaaagagagtgcttcaagcaatccgaagaagagccgtgacacgtggaacgtagatgacccttgaaccaagcaagctgcatggagagaggagtgtttgttgccggaacgtggagatttctctcggagaagaaagagctgttgagtgctgtgcttccggaaactccgaagttaacaaagacgttgtgttcccgttgaggtaagggtttaggagtgggagatgaagcctgcgtgccaagtaatcgatcattagcagtccgttagatagacgaccggtggcttggtgaaagtatgtttgaccgtatggataattagcggcgtgagaagatctggctccaacagggccgttgcggattaagtttccagtgtcggagatggagtcaccgaattggtagatagagttgataggacattgatccgatgaatgaacaagggacacgaagagtataaacacaagaagcgataatgctttggtcgtagacattgttagagaagtttgagagatttgtttgttggttttagacaaagagaaggatgagagaatttgttgcctatgtgtgtgtatatatagagtttcataatctagctcctagttagtctgtgatttagatagatatattcaataataattattgatagtgataaattcaagaaaaatatttgatagaacgagatctgagaaaatatgtcagaatttttattttattttatattattaaaaaacattattatttaatatttaatcaactagaatcaggcaaaacgaggcaacgtatcgaaaattcctctttttattaatatcaatattttgcctaaaacaaaaaggaaataaatattaaaacgctttctttacttttttattttcacctgaaaaattcgaaattaagaatgaaaaaggaaaccacaaaaaaaaaagaatgaaaaaggaaatttctagagagaaatctctgtgttctttgatttttcttcacctcatcttcttataaatcatctgtttcgttgcagagagctctaaaagaaacaacaacctttctctctgattatcttcgccatttctcgtcgaaattagggattttgttcattaaatcttcctgatttggaaggtattttcattgtctgcttgaaaaaaattcaatctttgtcggttcattatgagtaattggagaagacaaaaacccagaaacaacaacagcaataattatagtcgtcaacgagggacgacgatg

SEQ ID NO: 27450 - DNA, 3003 bp, Unknown; identical to SEQ ID NO: 27449
  misc_feature (1)..( 3003): 2750-1469P.txt file - cDNA_ID_2990286; gDNA_ID_2926241; Annot_ID_204091

SEQ ID NO: 27451 - DNA, 3000 bp, Unknown; identical to SEQ ID NO: 7168
  misc_feature (1)..( 3000): 2750-1469P.txt file - cDNA_ID_2990290; gDNA_ID_1621130; Annot_ID_172458

SEQ ID NO: 27452 - DNA, 3000 bp, Unknown
  misc_feature (1)..( 3000): 2750-1469P.txt file - cDNA_ID_2990294; gDNA_ID_1620682; Annot_ID_164501
aaattctaacttcagccctttttggttttccattgccattgtctctgaaagccgtgcaggtaactgcattagaagccttagaactacctccactgccacatgctgacttattgataccgtttcttaagataggctcattatcttcggttccttggctgccagtaatcttcctttgcagcttccccaaaaacttatccgcctacactagtgtatatgcagatttagcttataacatgagacaataatcgttctaagaaatgtcaatgagaagtgtcttgtttaaggagccaacgaagacttaccagtgagccatacttctcgaaagttgtggaggcaacaaccggaacattttcatctcggctcctcgaattatgatttccattgaaggaatcatctccatttctctgtggtagaagcttcgacgccttcttggtttgtgcagaaaacagcaaaacaaacaatcattcatgttgcacacgaattattatataaaaaaaagtactgagaaacttcgaacattcatgatgtgagatctaccaggtttgaagcaacagctgatgaatattgtgggacaactggaacctgtgatgctgcagcgatctgaggcctcgggaggtgccactgatgttttctcaagtttgattcatgtctattattactacgagcttgttgttgatgctcattacttagtggatgcatcctattgaaaagggttgcatcgctcgagacagtaacaacaccaaccagctcaccgttttcatacacagggcttttagtcaccaaagccataaatagttcaccagttttcttctgaaacggaaactgaccagtccaagtctctccacggcacaccctattcctgataccagtaagggaattacggtattcttcggttacaagcacatcaatagttctgtagccaacaacttcctcagcataccaatggtacagattctcagcagaacgactcctgaataataataaaagaatctctccactcagaaacaaatagtaaatgtccacttgcatatacaatgaatcgctatatataactttgtttaactacttaaacacacaattcaatgaaacagtacttagaagaactataagctcctgatctacaaacaccatagatgaagaagaagaacttatcaagctcaccagaatgtaatttctccagacgcagctgatgttacatgaatcgcgtgtcccattgaatccatcaaagtccgatacgcactatcagcgaaatagaatcctgaaacagctctctcccaagtcgccgtcggattatcccaggaatccgccgcctccgcttccacctctacctcagcctctttctccgtgtccgtctccaatcccgtcgccgattccttaccggttcgactctcctcctgaagcaataagtcatcaacatcctcccttagtctcgcttgactcgtctccatcctctgacaccactccaccaaaacctggtagagactcgattccgagttgtttccggccatcgtaatcgccggtgactctgtttgagcagtcgcatcaagatccgactctgatgaaaattcacaaattaaaaatataatttaaaacgttggcattccctcattgtttattatttttcagctgcttcttaaatcactcgtgacgccataattaacaaaccccagctattataaacactacgacgcattagcttacgccacgtgtgtttgttactaataggatgctgccacttgtagaattgccgatgtaattgaaggttgaagaagattgagagataatagacgaatttgtcacgatttaaaagtggtgattgacgaaattaacctcaatataatacccattcttgttgccgccattgccaaatgggcctgagtttgatggtgtttttatacctccaacggtatttgtcaagaagaaaataaaatacacgtctcttcaatgttcacattcacattcctctaaaagtaatgtgcccaataaactcaaagttcaagttgattgaagaacaataacaataaattatagttgaatttaaatgtaatcaattattagtagtatacttcaaatcattgtagaataatactctccataaggtttcttagaggaagcaaagtttaattggagtcacaaagctagttttgtttcaatttatctaaagatttactttgtttctgggacacaaactgaaagccaacccttttttttggacaaaaacgacaattcttatattacaaacggccgaaagagaacatgacagctcctttaaaggcactatatagagggaagattgggatgatcataaagtgaggatatctttggatattttagttttgggtttggttttggtttttcgttgttggaccgaaaagcctttacattttaaggcttatttccatatttactgtcaaattgacaaataaaatatgtaattggtgtgaaaaaaaataaattatgtaactttttttttgtacattaaaaattatctaacttttaatgtatatacactataacaattaatatcatgttaaaaaaaaaggtcaaaaagttcttggctagtaaaaactaaaaagataagtttaatccactctgaatttgactcgaattccagtttataaaatataaagactctgaaaaaaaaaatccaatttcaactgaataattatttatttagttattcagattaggacactccatatattatctcaagttctctgaaaataatatcttgaatatcaccgaaaatatacaaaaagaataaagaaaataaagtttaagaaaatccacaccaaataaaaaaggagaattaaaaaaaatggaaaagaagaaagaccctaaaaaaggctttaaaaatcttaagagtcaccgatccaattcctttcttcactgcaatttttgtgatttacaacatatattaattcttgcctcctccttcactccagctccaaacacaaatctccgacgaaaaacttctctcaagctttctcttttctaatg

SEQ ID NO: 27453 - DNA, 3000 bp, Unknown; identical to SEQ ID NO: 27452
  misc_feature (1)..( 3000): 2750-1469P.txt file - cDNA_ID_2990294; gDNA_ID_2926181; Annot_ID_200277

SEQ ID NO: 27454 - DNA, 3000 bp, Unknown
  misc_feature (1)..( 3000): 2750-1469P.txt file - cDNA_ID_2990300; gDNA_ID_2936581; Annot_ID_194901
gggaaatgtggaattagatgcaaaaaaagatttccaagattcaacaatatttcaggtacctcattttatctgcgaaactgtgtacaataatgtagaccacaagccaggccaggctagcatataatatacaccaagggaacaaatatgtgtaggctctgatataaccttgtcgttcattttttgttccattgacagtctgcagatgactgcgcgattgccatagccaatattatcaggcaccatgaaacagagtaccttgcatctctagaggttcccaattagcaactcatttatctcgtacttttccatttcatgtgttgttaatctcgttgtatctgacccaatcattaggtagcttattcaaaattaccggataacactttcaaggtaattgtctctttccaaataacgatttcagtggctgcacaatggtaacctcgaggtgtatttagaaatttctgagcagatatatggaattttgcaggatttgaggaggaaacttccggtgacacgaactctgttcccatggcagaacactttacagttcagcctaacaagagaggtcgagaaagaacttggacttggcaagtgactaatcatcaactcgcaaccttttgagtgctatatttcgttgtcaaagtttctgtgatttccattatgtaagtgaaggataagtattatttctgttgtgtcttgtctttcctttggagtaatgtatacaaatcgcattagtaagtatgatagatattgttccgcaagccgcatgaaagaattgaagtttggtcccaaaaagagctccgttgccgggaatcgaacccgggtctcctgggtgaaagccagatatcctaaccgctggacgacaacggatatgttattggaactgttaaagaactaaatatgtattaaactttaatatgaatgataaagatttccttaaataatctgttaataaaaaaaaagcaaaaaaaaaaaaagagagcacaatttgaaaggaaagcccaataatagaggcccatggtgaaagtcttaggccccgggtggtaatctaatcacgtttgtagtgataatctaatcacgtttgtttttaatgataatgcgttgtccccatccttgttcttaattcaattgtcaatcacctccattaattttgtgttcacctcggttagaaagctttgttttaatttgttaagacgatgctgatatatcctgaatcatgattaaattaaaatccttaagttaaagtcattacaaaaaccacttttgaatattgatcagatattggtcccatgcccaaaacgatggtgcaaaatgtctaaagagtgataagctagcaattactagatatatactaaaagaaatagtttcagttccaagcatgagcactagtcatagttgaggctcacaaatttcttgcaaatcatcttcgagttttccacgtccagagatggtctccttcctcctgatacacacacaaacaactaagtatcttccatcgtctaaaaataaacaaaagcatacgtaattacccatttcctccaccttcttatttataatcaagttgaacaattttcaaatcatccaagacacaatcatttattaaatattgatatatgcaatgacaaaatatccaaaagtattgacttcaatgacattcaatttttgctatttttttatttttttgtacgaatagtcttcagatctttttcagttgatgtcaatccaaactttaatcatgagtctatcacaatattgttgaagtacataaaacaaggaattgatttatttataatcgagttaggaaaattttaaactacaaacataacatagttacacagaattgtatcaaaatatcattattgttgttatatgtattcatttagtgaaaaaatattaaaatcttataaataattagctttatagacaaaatatataaattgatatttcaaatcacaaatgaatctaaccataaaaattatcactacatattatggatctaattttattaataatacaaaaataaacaaataataaatataaattagcataaagaacaatcaatgtaatttttttttaacaatttttaaaacaaacccacgcgtagcgtgggtagtcatctaatacaaatataattttacctgatttcataatcgcatattgctgactttggacgtcttcagtgatcactttcatcctcctgctttttcgcctcagatctagccgaatgatactgcacaataaatgtgatccctatgggaatcactactcttgaaattgcatacatcccgccaactcccgtgaacgtcatcgttttgctatatgaagatggctccactatcacaaccaatgctgacttagctacaaaaaaagcttgtttaatgctactacttttctgttgttgattattgttttttttagattccgaggcattacttgtcatttatgattgagttttgagcatatatatgtttacttaacgctcgaatatatgacaagaatttgtaaaggtttatgatgttttaatgaattttggttttcttttaaatttcggatgagagacataaataaaacagcatttctaataaagtttgtttttttggaagaaatctttctgttgcagttcttgtgattaaggttcttgcaatttcaagagtagatttagacattcataattggaatgtaaatctgaaagctatagtcaggggggtttaaattgtcttatattgagttagttcgagagaatgtggaagactctaactcgttcagaggttttcccctatgcatttctttgaagacaagttttcctaagaaaactcttttttatttttaatagctaatataatttacttttttctttttggttatttattttctctcgtcttctctccttattggttttttttctctcatagtcgctctccctctcctctccctttgagaaatccctaactctttgctcttctcttcccggcgatctatctctccgatttgggtattgaaatg

SEQ ID NO: 27455 - DNA, 3000 bp, Unknown; identical to SEQ ID NO: 27454
  misc_feature (1)..( 3000): 2750-1469P.txt file - cDNA_ID_2990300; gDNA_ID_2936581; Annot_ID_143748

SEQ ID NO: 27456 - DNA, 878 bp, Unknown; identical to SEQ ID NO: 276
  misc_feature (1)..( 878): 2750-1469P.txt file - cDNA_ID_2990304; gDNA_ID_99881; Annot_ID_147394

SEQ ID NO: 27457 - DNA, 3000 bp, Unknown; identical to SEQ ID NO: 7166
  misc_feature (1)..( 3000): 2750-1469P.txt file - cDNA_ID_2990311; gDNA_ID_1621130; Annot_ID_172464

SEQ ID NO: 27458 - DNA, 3003 bp, Unknown
  misc_feature (1)..( 3003): 2750-1469P.txt file - cDNA_ID_2990315; gDNA_ID_1621153; Annot_ID_173324
tattcagcgattgtgattcctggaattcacattaaaaaaaaaaaaaaaaaatgagcataggcaatgggattcatcaataactattaaatctgtgtgcctgaacattacctgtgtaaattgaggcttcacgagcagccacaggcatgttagaggtgttagcaacaagtgtggtacgtttcatgacagattcctcacggccatcaggcaacgtcattgtcaattgtgggaagtccataagaacctaatttatgagaaacaatcagatcaaatgtccgatttgtatgaacaatatgcaaatttagaatgagaagagatatacctcagccatttcatttcctctctctccacaaccaacatacacaacagcatcagagttggagtactatgtaaataagaaaaagttagctttggaaattcaatctatccagtaattaaatggaacaaaaccagagagtgtcacaaggtaccttggaaagtgcctgactgataacagttttcccacagccaaaagcaccaggaatggcacaggttccaccaagaacagaagggaaaagggcatcaagaacacgctgacaacaggaaaagaaagcaatcagcaacacatgtattcaaatgactatcaccactgtaagaagaattaatcgagtaatcacctgccccgtaagtagaggagtatcggcagcaagctttgatgcaactggcctaggcgtacgtacaggccagctctgacatatatcaaccaaaccaatttaacagagtgaaccaaatagcttaaaatttacgtttgcaagtaggaagattaaagatacatgcaaacctgaagcatggtgtaagatttcttgatcccctggaattcaagctctatcacggtatcctgagaaatgaaaatcaccgacaaacaattattagcaacaagccaaacatgatctacaacaggaagtgattaccaattgatcaagttagccatatattaactcaaacgttgaattcaaagaaatcaaggaagaaaaagtttgaaacgtatttattcataactgtttgagggaaacttaaagtcaaaccttaagcgaatattgaccagctggagcaatgtaagtgatcttccccatggcatccggaggaagggcaacgaggtgattcatcaaagtgttctcaaagacagtctgcattccaaagtttaatttgactttcagaaaaaactattcccagtgtaaacaagggaaacaccacggtaactgtgtaaatagattcccttgtcaaaagcagattaaagaggagaccaataaacttacagcatacaagtcaccaccagttattgtgtctccctcgactgcaaacaaaacgaattcaattgaccatcaagattaaaaccaaatgaacacttccatagacaggcatatggagtaaaccacattaccaaatttattgggctggaactcccaaagacaatctttgtcaagagctggaacagacacaccccgaggaatgtacacatcaccggatattcttgcaatagtcttcaaaggcctctgtgacatttaaagaaatgaaaccaaagaatcgtaagaagccacataaaacgaatcataaaagtaaaaaaaatcatgtctagcaagattataaatccaactgaacctgaattccatcaaagatatttcccaatattcctggcccgagctccacagaaagtggctgtagtaaattcaggacaaattatatgttagctgcagatgaacaacactagaaaaaaccaagataaataactcgcgaaccttgtgtgttcgaagaacgggatcattaactgtcaatccagctgtttcctcgtaaactgatcaaaaggaagttgccaaatatcagttaagatatcttacttcgacagaggtcacataagatgccgtaaagtaaattacactaggaagcacaatagaagaaacaaaccttggatggtggcagaatctccttcaagacggatgatttcaccaatcaaattatcatgaccaacacgcactaactcatacatagcagcaccggccataccatcggcaacaacaacaggacctgaaacctgcatcccataaaagaaaatgtcaaatcactgagaactatcagatcagatcagaaattcaaagacgaggttactgaaccaacgcggaatcaaccgattcaatcactgataactatcagatcaaatctagctatcccaccaatcttacctggtaagcagatcaactatttcatctatccatcaccaaaaactaacatcgcaaaacagaaaaaaaaacaaattgaaaccagatcgaacgaaacaggataataccttacgaacgtaaccatactcgctctccttctcatcgtcctcgaaggtcgtaagctttcctccgtaaaacgccggcattttctcagcaatcagagattcaaaaactcaaatccgatcggccaaaaaaatcaaaattcacctcctagaaaatgccgagatccgatcaaacaacaacaacaacaaatcagaaatcgccaaaatcagacaactcttaaggtttttcaaagagagcgatacaataaatcagaaagaaacaaaaaggatcagagagagagggatagagatctcctaaccagtgaacagacaggaagagtggtcacaagaagaagaagagagaggtggatgcacgtagatagatattgaaagagttggagaagttttgatctgattgacgaaatcgtggagtgatccggtacatgactacacacgatacgcgcgtagatctggactttgtcgttaatagccacgtgacagtttatttattgggctttataatatatacttacggcccaataagtgggtccgtttagtcaacaaagacatgcggcttgagaatctctctctctctctgatcaagccggaaaattcacaaaagtgatcagttttgttttctcggggaaattttctgaaagtgaagaaagggaaagcaagttttttttgaagtggggagagagatgggagaaatg

SEQ ID NO: 27459 - DNA, 3000 bp, Unknown
  misc_feature (1)..( 3000): 2750-1469P.txt file - cDNA_ID_2990319; gDNA_ID_2926267; Annot_ID_143342
atattcaggacgtaaatgttgcgcatatgagctgaaatacatagaaatttctgcaatagcccatgtatcatcctctatatgcctcgagcgtcgaagaagtttcacattccgagtttgaatgagaggagagatttgtggcataaaattcacattaatctacaattataaagatataaaattatcactagttctaatttttgtacggaaaataaataaatgtttggtaccttttgcaatccccgttgttgtgattccacagacacatccgcgatgattgacggaaagattttttgccaacttacctgaatagataaacaatataagaaaaaaggataaatgtgtatattattatgatttcatgtagtttgtcacacacttacatgattcataagatttgccacgagcgatgaagcatcacatgggacaaaagcagaagctcttgatacctcatgtacaaacccgggtgcgtttcttgcgtaccaaggaaataatttagagtagtattcgtcgagattcaatctcccgttacttgtccacatcggagttctttgcctcgcaagaaaaacaacttctttcagcgaaagtgacgtcataaccgccactccgtaacccacttcagtcaaagacgtagcaaatgcgggatataggttcctgaacgaatttaatctccatatgaaacaagtcaatgtatcaatctcggaccgaagacgagcattctccaaccatagctccctctcttcggttgaaatgatgggctcctcacaagatctgcagattgatggagaggtcatagcatgaatcctagctctgttttctgctctcagcaaatcattttgttggtggagaaaaatcctcgtttgaagatgatgatacatatctgaccttttcatgtgttatagtcatagaaaaaaacaaaaaacaaaaaagttaaacaactattgtgaatttgtgatatgttgtttaaaaaataaaacctcgtttgtttaacagaaaacctaaattgaaaagaattgaaactttagtcgaagatttaagaaaccatacctaccttgataaactcacagaactcctcaaacgatgaatctgtagagaaaaaacttctgctagttatgagtgactgagtattcattctctgaaaaccattaaccatatatatatataaacaagaaaaactattatgtgtaggttaataaatgaaaggctcacgagattcatatttttttgactaaaatgagacaaatgttcatcattatttattgtaattcaaagtggattctctgccaataaatttccttcttattttgtagttaatgacttttttattcttaaagatatataaaaaggcgttacggttattcagaaaatacttattctcgtaacgcttttttacaacctatctatgtatgatacgttgacatgaaaccaaaacaaagttaaagatgtagctctaaacttccgaaagattaagccatcttttccggtcctcgtgtccatttatccgtctctacctttagacaacatagatatttgccaagggtgcaaagtcattctaaaaaaatattagtaaagaaaatgatcccaaattttagaaaaaaaaagttttttagtaaaaaggttaatttattttggttttaccaaaggccctttaatagattaagacggcacatcacacataagatagtttccatctactctgtgtgaccacagaccatataacatcgtatgagtgttccgtaggcattcaaagagtaatggcacacctctagctgctacatcaacactaaacccaaaggaacaatgtttcgaaaatgtcatacgacaactattatgtgatgagttttcaactggattaaataagtctagagatttcattatggtcatctcgactagcatcctaagtttaactttaacgttcaatatataccttaagaagaagcgacgaaaatcttttaaaacaaatatcaagatgcgcttggtacgcggtgaccacatcttgatccaccatgcaattccatacatttattccacgatcaataagacacatattaccggcatggttattatgatcctttttctaagagggattttacccatctcccacaaataacattctatatctctaaactaatattcctaatggtccacacattcgaataaaacattataatcatctcttccggaaaaaaatctctttgatatcattccaccaaatatcatattaggtcttcaacgattttcgactaagacctaaaactttactcattactatattttcggaacccgattattcatttaataatgttgttcatattaatttaaacgttagagagtcctcaacataacaaatatatgttgtttttccgatattattaattgatagggtatcaagtccagaagtttagacatttacacgagccaacgaaactttcttaagaacccccaaagacaaaggaaacaagagcaaagtatcatacatcacagctttatactatcggagtatctgattgagatactcatcaattaaataataattaaaaagagaaaaaatatgaaagaagagagaaaagtggagaaatgtttctggcaagaaagaagattctgagcatttattcagaattgtcattcaattaatggttcatttactttaaactaattaaaatatattaatttaattaaaatattaattatttattttttgagatactctctaccacttttgccgatggagatgctcttaaagcaaatttggaaatccagcgcacgttagctccgttacgatacagtgtgcaatagaccacggtacaccgtaacacgtaccacaaaaaccggtattatacatttacacgtggaaagatttaattggttaacagaaacccactttctcacccactctcaaggtttaactcttcttaccgccttcaatccaaaaaaaaaaaaaaaccaaccaaaacaaaaaaaacaataaacaaattacagacagagaagagagagatcactatg

SEQ ID NO: 27460 - DNA, 3000 bp, Unknown; identical to SEQ ID NO: 27459
  misc_feature (1)..( 3000): 2750-1469P.txt file - cDNA_ID_2990319; gDNA_ID_2926267; Annot_ID_204972

SEQ ID NO: 27461 - DNA, 3003 bp, Unknown
  misc_feature (1)..( 3003): 2750-1469P.txt file - cDNA_ID_2990323; gDNA_ID_1620631; Annot_ID_47252
ctgtactgctggaatctcaggttcaggatctgttcttgctctgaattttgtttaaagttttcgaatttaggttgaaggaatctggaattagggttacttggttgtgagaaacttggatataatgaagaaagtttgatacttaaaagtaatttcacatttaaagattgaaactttgagtaattttcttcttaaagtttgaaactttggttagtttgccccactttgtttcttctgtgtgaagatcataatctgattttgacttgtgtgtggcgaattggtttggtaatgagcaggaggacatattaatccggcggtgacttttggtttgttcttggcgaggaagctatctttaaccagagctctgttctacatagtaatgcagtgccttggagctatatgtggtgctggtgtggttaaagggtttcaaccagggctgtaccagacgaatggcggtggagctaatgtggtggctcatggttacacaaagggttcaggtcttggtgcagagattgttggaacttttgttctggtttacactgttttctcagctactgatgctaagagaagtgccagagactctcatgtccctgtatgttgctaattctctagtatccttgagttgtgttgagttcatattcttcacatagagctcatgtgttttttggttatcgaacattttgcagatcttggctccgcttccaattgggtttgctgtcttcttggtgcacttggctaccatcccaattactggaactggcattaacccggccaggagtctcggagctgccatcatctacaacaaggatcatgcttgggatgaccatgtaagttttcctctttaattacatcaacggttgtgctaagtatgataagttatgaattgcatctaaatagcaactcagaatttttgataattctgctcttatctgttgtctcttttgttttatgtgtctgcagtggatcttctgggtcggtccattcattggtgctgcgcttgctgctctgtaccatcagatagtcatcagagctattcctttcaagtccaagacataaagtttcctacatattctctgatcatcatcaagctaagaatatatcaatctttaattctatatgctttcttcttgtttcctatgtcatgtgtgatgatctctatatgtaccactagagctttgatcttgtaacagtgtaaatgtgtaatctattatgtatcaatggcattgtatcttgtaacattaattatgtcaatggaagaatacattgtgtacatgtgtaagctcagaatcttgtttgaatatcacagagacataactgaactggacataggtatgctaagttgctaacattgtcaataagtgtttccaataccaaacattagcaacataattgtaaaatgtgtagaatttgatagaacaacatctaagccgaactgaactggtctaacaccatcatcgcaagtatttcttcatcttctttcttctataagagtctttcattttccactttttataacatgcttataactgaattttcaacttttgaatcacagtttcagttatagatattcttggatgatgttcagttcggggttttggttttggttttggttttggttgatagtcatgaaaatgcatgttctgttccacatggtagggttccagtaaaataataaaagaaccagatttagtaacatctttcacatgaatgataacatatttcacatgtttgatgcagcaacttgtaatatggatgatagtcatgaaagaatctaatgggccaagaaatgtgaaagagtctacatgactatcatccaaaaaagagttgtagcaatatggatgggccaagaaagtgcaagacttcagcttgagcttgactttaagagaataagtaatttgcatttgccctttggtcatgtagtactcgggttgtttacatttatcaaacaaatatcagagttgtttattgttatttgggaaaatctttaaactttctacataatctttgagactagtgggaattaagagtggtgatgtagtggatcaagattaaaaaaagttgattgtttaaaacatcgagtatcttgcaatacaaaacaaaacccttaaaccaatcaatacgaaaaagatgaagatgtcaactttccttttcaaaaatatgcaagtttgaatccggatggtaacatactgatgttactagttacacaaatatctaggctagatgtcctaatcatcttcaaaatattttgttgatgttttatcttaaataatcaaagtttttcaattattgtgggtgttgtatatatttaacataatcttaatccataaacaaaaagtaatataaaggtgttgcgggaaaaggttacttaatggttaagaagtttggcttatgatcatcccactttgtgaagtatggcatgaactttctttttaccgatattagagccaaatgaaagcggtttcttaatcgccaagttccaaccaaaaaacaaaaagcccacatttacgaaaaatactcttaaaccaacattttgaattcatatgatacaaagcttcaaatatccaaatcgaggaaattattttttaaaaaaaacaatacataacttttaaatataaattgcgaaaaaaggtaaagccactcatcaaaattcaaaagtgatgagattaaagcaagtgaagacgcatacattatcacattaaaagtagcaaacacaccaagaaattagataaaaagataacaaaataattccatccactttctttttcttttgttttgtcaagattttgttttttgtatttcagtcatacgtgtgaatgtatatcaacaacattgtttttaatgtataaaaatctcaactactataaagtagctgaatgatatgtgattaagatatatatcgagagagacaagccagcaagaattttcagcacacatacacacacaaaagattcaaagaatcatctagtaacaaataaaaaaggagagagaaggaaaatgaacagaatg

SEQ ID NO: 27462 - DNA, 3003 bp, Unknown; identical to SEQ ID NO: 27461
  misc_feature (1)..( 3003): 2750-1469P.txt file - cDNA_ID_2990323; gDNA_ID_2926182; Annot_ID_140608

SEQ ID NO: 27463 - DNA, 3003 bp, Unknown
  misc_feature (1)..( 3003): 2750-1469P.txt file - cDNA_ID_2990331; gDNA_ID_2926046; Annot_ID_196095
cacaaaatatcaataatggactgtttggctacaagtttgcggcggtcaacgctaaacactgtactaaacgctaaacacactttccagatcgatatttgttatctatttctatttgtacttgatccaatttagccagccatttggtattcacatattcgctaaaattcaaatgtttgatcaaatatcgatcagtttgctaaatcttattggggaaattaaatttagaagagttctacaatttccttcatgttctaaaatttccttcatgttctaaactatatgtgaaattgtattctaagaatttctatagtttctaaaaacattagaaaacgtttatcgacaaattccttcatgttctatagttttttggagagatacttatctcattcattaaattgaatcaaagtacaaatataagagagattcaaatatcccaaaatttatcgacattagatctataagatattctccaatgctaaaaataaaataaaaactatgtatcaattagatccacaagaaattggagaaaaaagtggatagcatcttagtgcaaagtgcaaactagttcatagttaatcaagggttcatccacaagaaatgagaaaatactcagttaaaaaacatactaacttgaagacgattctaaaaccttggttctcaccggcacgagaagttctacacaacatttaacaaacattttttttagcaaacatttaatttatgtttggatttattttttatgtataatgacgtcgaatttcatataatgttttaacaaacatttaacatgtgtttggatttatttcttatgtatagtgattagtgacgtcgaactccatatgaattaacttttaccaaacattttaacatatgtttcgatttattttttacttttacagcaaattcaaagtttttttttttaaagaagattttttagaaaaaaataaaaataatcataagtagctattcatttcaagatgaaatcattaattatagtgttactgtgtaagtttaactaaaatatataactttgtgatattttaagtatagttttcaatagtataactctataactataaacttgtagacttgtatccatagacgagtcacgagagatgatgtgtttctctcaaaatcacacttcaaataaacaaatgattttacattgtttttggttcaaaaagacaaaaagatgtttgtttttcaaaagcaatggtttagtctaaagactccaaaatctaaaccgatatataacgttttgaaaatgtgcaaaaatcagtgatggactgtttggttacggcgatcaacgctagacactttacgaaacgcactttccagcgtttttgttatgtataaaagttttttttgtttaaattcttagttattgtgctttcataaggttttaaagctttaatatatagtttgctaataatatttaccagctggagttgggtatttgatcgaatatttgaattttaatgtatatgtgaaagatttgggttagatacgatcacaaattcacaattccacaaaaccgtataaataataaaactcacaaatattaaattatctaaaaacgaaacaaatcataatttaataaacaaaatcagtggttttaaaataaaagcgaaatttaatatgtaaaaagtgaaacaaatcatatatattaaaataaataatatttgatatatatataaatgtatatatatatgtgtcttgtttatatatatatatatatattgattttgtttcttaattttataaaattcaatgaatttataactaatttgatcactattatattttttatatacatgatattgatcaaattagctataaaataattgaatcacaaaattaaggaacacaatatctatacaaaaagatacacatatatctatatttttcaaagcatatataatcaaagatttttaatttaaatctttgtgatttgtttcgtttttagagatcaatatttcatttgctctgttaacttatgttagccaaaaaaaatgaacaataataacaaagcacataaggtatcgaaactgatatttaagaaatttgacaagccccaaaattaactattcttgtcactatctataataacgactaatagtttaagattaaagtaatttattgtatattccttggatcgactctataatctattgtctagtagtatgatatagtagtatctttttttttggtcctccatagacgaacaatttagacgagataatctaggtgtgaacaaaaagaacggctttcttctccctctttattgttagtcaataaaagataacttataaaccaaaacatagcttatacatcaaagagtcattacatcgacattcatgtatctgaaaagatattaaaacaaaagattccgtgaatatattaattggtacatataaaaatccaaaaacatactactaaattcgaataaataattatgtttagggagcttcacttatttaagtatagcatctatgactaatctaattactacacaactgatctacacaaaataattaactgaacaaaatacttaaattacaaattaattaagcaaacggtcttcccttgttaaccaatcctatttaagttacgaaactagggatagtatatgaaatttaattcataattaaacatttagtggatgaattaattgtaagagatatataattactattaatttataagattctatgttaggttgaatatattagaagagtccagctcataactcttgtgcccatctccacaagtagtttgtgaagtcaaacaaaaacttccacttttaaaattttctcttatttctttctctctcataagtcataatattcaactaattaagtgcatatatatacgatgtatcagtgcttataatcttcatgaggagctttatatatttagcataatatctttcagaagtgtgaggccttgttaattaagctcttcttctctatctctctctctccctctcaacctctcaccatg

SEQ ID NO: 27464 - DNA, 3000 bp, Unknown; identical to SEQ ID NO: 15075
  misc_feature (1)..( 3000): 2750-1469P.txt file - cDNA_ID_2990335; gDNA_ID_2685558; Annot_ID_193394

SEQ ID NO: 27465 - DNA, 3003 bp, Unknown
  misc_feature (1)..( 3003): 2750-1469P.txt file - cDNA_ID_2990339; gDNA_ID_2926232; Annot_ID_142691
caatgtcaaatgtatgcaaaagatgtttaatgctttattgttgaatgtctttgttataacacaaaaaaaatctctttcacatttttctttgctctcgtttattcgcatagcattggattatcctctgctttgtgaagaaaagttggacaatagaaatcaagtgatcaatgaaataaacttatgttcaacaactatgccttctttaggtatttgaacctacattgttttcactaataacttaaggtatcttcttttcccaccaactcccatgaactggttattacaatgtacaatgaatacaatttaccactctcatgacctgattattatatcttacccacaccaatcagtgagactatatacattccttacaataaaaaaaactatgcaaggcgccacacttcattctctttttggtgagtgtttaattaggcatagatatatgcaataccaatcgcttgaatctttaacttagtgaatgtttctctgaagtaacatcttcacactatatatatgcgctacttctgatggaatgtgcaggtctggtatttgacttatatatctacatctattatttattctctccggtttttcatggtgtctttctataagatcttataataaacctctcttttttttgttgtcaaattctaaaagcatagccatctcttcatttattttgttttctctggatgagaaagatcaaaaatagtttgggcaaatatcatatgtttttaaatatgcatgtatctgaaaaataaaaatgtctgtagaataaaaataagaatgtaagtaaaatactaaaatcaatcttctaaatagaaacagaaatcttataacaatctttaaatatatgtttaattataattaagaatttcatattcacaacctgccaagtatatcagagtggcgcagcggaagcgtggtgggcccataacccacaggtcccaagatcgaaacttggctctgatattaaaatgcataaatttttttagttagttttacatttagataaaaacacataattctttatagtaaagaactaaagattaatgttttgtactttatgtactattccatatcaacatatatttgtattagtcttgggaaagcaaaaaaatttgaaagacttttttttccaagtatgaaagatttagttaaaaattttaatcagtaacagaattcaagagtaatgtttattacataattatatactttagaaacctgctccagttttgaataaaataaaataagaaaatatttgttcgaaactccaaatccagctgaattagttttgcatgtttttgcacgaaaaaaaagaaagaatatatagtttacgtatgaccatattttatgttttaattttaagaatttccatccatataatgtaaacccgtatattttgggatctactatcatgtaggctgtagtctctagctatagccaagaaaaaaaaatgacagatagattgacaatcgttataagaaaaaaaaaagattaatactcttaatcatacacaacccaaataaatattaaaaagatacttacgtaaatgatatgaaacttatttagataaatgatcaaatagaatcttaatctaataattagtaaaaagtcaaatacacatgtgaacgcgatggagatatctatatttgttgtgggaatgacttaagtcgactgtcgacgtcggaaaacaaaatttcagagtcatgactgaaagaaaattgaaaattccatcataatgttaagaaaaaaatgtaataaagtttttgcatgagtgttgattttccttttgtttctacaaagtcaagccacgtacattgcgtaaaggctgattttgatttataaattcattttagacttttcaatactcaactttctataaaaatatatactttattgttatctcaataacattgtgaaagctgtgtgttaccgttattagactcagtcattcgcttcgtcacttgtacaataaaatgtcgtcactcatagacatattaaatcctcatgtgatttttttgttagcctatcttttttttttttaataataaaacagcctgttttagttgcaccttcatgtgcgttttaccgactgaattggcgagataagcttcggattatagcaacaaagaggagatgtgattcgagtcgattgatatagatacgaatctatttgttacaatagtaaaaaaaaatataaaaatatttcattttcaagaaataatgtcataagaagtcaaaggaagatattgtcattatggttagtcaaataaaaaaattgtaagccagcagttacgttcatacctgctttccgttgacttttataataactacactagtcttttgaaatactccattacctaattgcatttgttccaaaaatataccactactagtcttaataaattgtaattagactaggaaataatttttatttgaccaaaattatattaagaaatttggatttttcttaataataatcagttgatagtaagattttatggattggaataattgatttcctttccaaaaataaacaatcatgagatcctttcataattattttacactcaagattcttttctattaggggagaacaaataaaaaataaaagtgtttcctttttttttttttttttttcaaaaataaaagtgtttccttcatatataaatacatataaaacttgcgttacccattttataggatctcgtgcaaataattcatacatacagacgtatcgatcttgctgacccatcaattaaattttgacccaaaaggtcaaattcactataagaaaaacagaattcatttcatcaaaattccatttcacactttttctgtctgttacgattcttgcttgatttctttctaaacaaagcaaaagttgtctttttggagttgtgagcaactaattctctgaaattgaggaagagaaagcgagaaggtttttttggagtcagagacagaagaagaatttaacagattcttgtcggaaacatg

SEQ ID NO: 27466 - DNA, 3000 bp, Unknown; identical to SEQ ID NO: 6558
  misc_feature (1)..( 3000): 2750-1469P.txt file - cDNA_ID_2990343; gDNA_ID_1621097; Annot_ID_171133

SEQ ID NO: 27467 - DNA, 3000 bp, Unknown; identical to SEQ ID NO: 6558
  misc_feature (1)..( 3000): 2750-1469P.txt file - cDNA_ID_2990343; gDNA_ID_2926165; Annot_ID_199067

SEQ ID NO: 27468 - DNA, 3000 bp, Unknown; identical to SEQ ID NO: 10913
  misc_feature (1)..( 3000): 2750-1469P.txt file - cDNA_ID_2990347; gDNA_ID_2214462; Annot_ID_133003

SEQ ID NO: 27469 - DNA, 3000 bp, Unknown; identical to SEQ ID NO: 10913
  misc_feature (1)..( 3000): 2750-1469P.txt file - cDNA_ID_2990347; gDNA_ID_2214462; Annot_ID_182805

SEQ ID NO: 27470 - DNA, 3003 bp, Unknown
  misc_feature (1)..( 3003): 2750-1469P.txt file - cDNA_ID_2990351; gDNA_ID_1620797; Annot_ID_168508
aagacgaatatgatgaagaagaagaacaagtttacgaatcttgatcttacaacacaaaccaaaagatgaaaaaacacagaagtcacatctctatctcttttattgaaatctctattcctactattaccactatatatatatatacatgtatcaagttgaagaatctgggaaatgtgtttgtttgtttgttactttatctttgtggttctctcttattgtattttgcaacttagtttcttcttttcttctcattgcctttataataaagagtctgtccacgtatctccctctttagccttttatttcatagtattcaaaaaaacgattcttagaatcctttcagtttatagtatagacaaccaaaacattggaaacttggttgcatattcgttacaaaatcctgctatttctgctatataattatcaccccaaaaaaaggtttatcaaaaactacttaaattgataagaagagatgaatctattaaaaagcttcttagatcgaatcaaacctagtcttctttgtcttgcttgagcagctacttggactttatttggcactctctgaaaaccctcctctgctgctggaagaaggttcagatcaaagccacgtcgttccaagttatccattcgcaacgacgccgtttcaacatccctcacattgaccgtacgatcaaccgcaaaaaacggtagttgttgatcgtatcttatgggctgggctattaaaccagcttgctccctaagtaaacctgtctccgcctgtatctccacagaatattatcaaaacggaaacaaatatcaaaaatgctaaacatttttttatacaaaagggaaaacaaaaaataaaaaggtaacaatgaacacctcgaggactgaagaactctgatttttcctacaaaattcttcttctaaaccctttttaatctgtcgtttatatcaaaaacaaacacaaaaaacaattactcaataccaaatttaccacataatgaattttacacagatacaaattagaaaaatttaagaacaaacacaagaaaaacaagtctctgtttaaactgagaaaaattaagacttacgatttgagaattggttttcttggcctcaccggttaagcacgaagaactcgaattacttcccatatcgccgacatcagccatacacggcagcgattttatcaccggttccggcggatgcaggtgagaagaagaagaagacctctttttagtgcgaccccatttatgtaacacaggagaatcagaagagaatatgacaggatgtgaaagttgcaataagatagaagaaatttcgtagtcaatgctatcgaaaaaatcatctctcttcttgcctttgccgtcacggtgatcttccattgataaactctgtgtcttcttcttcttcgacattgaatgaagagagacacgaatgaatagtcttctcttcttcccggcttgaaacgattgggttaatgagataaatctttctcagaagattttgtttgtttttatttttcatataataatttgatgggtctaagcttatgacacgtgtcagtacatttttttggttaaattttcttttctcgtcttttgtttcttattttttttattttcgagtttcttgttttcgtcgtaactacctttttggccaactaatttcagtcaattttggaagtaaaaaaataggattaatccccaatatgtcatgtaaaaaaatacaaaaaattatttttatttctgatattttttcgactttcatatcttttttttatggtataatattaatttccatccaaattgggctttggcaatgggttacaacaaaaatcaatggtggtctctttctttctccaaacttagcaaaactcacacaagactttgttctgatgaagcaaaccaatgttgaatgttatgagcttaacaagtttggtaagagaggtgtgttgagtttttcttaattagtttttatgtttggagtttttgactcaccaagtttcatttgattgttcagtggcaaatgacttgaggatgaaaagaaaacaattctgatttctgactatattagagataatcatcaacaccactagaggaaagattaggagaacaagaacctcataaaataggggaaagtgggattgtatttagatattggaaagagtttagctgtattattaaaaacaaatcgattattgaaataattgcatcaatcaaatctaaaacttcctataacctatatttttataattaaagctctaatttttatttcatctactgtttaatcttaattactattatcgcacgtatattccaaatcaaattcttgaagatcaaaactgattctgcaaagatttggggagtgttagtggattgatcacctcagtacattttaagagcactatactaaattaataattaccactctaactaatataatcattttgtggaatctgatacagtctaaaatcagaaaacaagatatttacatagccgtagaaacaatcattttacaacacataaaattatgcaagaaaaaaatacaaataattatgaatcaatactacacaatccaattataatcgtttaacaattcattacaaatattttgaaatgaacttacattaagtttgaagaaaacctattcaataaagtttctctatgaatacaaagagacaaattaaaccagagtcgttggcttaccacgaatctaatttccacctaaacatacttaacaatccacgtgtcaccgtcataaagtgttaaaacttttggacttttttgttctgtaagaaaaaaggagtgatttttagcaatgggtgcgttaccaatttctccagtttcccactccacatccaaaaaaacagtgtaataataatcataatcacctgatcaatctcttacataaaagctacagatctggttttatacaatcatcaccgcaccaagttcctaaaggtttcgactttactgtttctattttcggaaagagagtgcaagattgaaatcgaagatg

SEQ ID NO: 27471 - DNA, 3000 bp, Unknown; identical to SEQ ID NO: 5045
  misc_feature (1)..( 3000): 2750-1469P.txt file - cDNA_ID_2990358; gDNA_ID_1620758; Annot_ID_167068

SEQ ID NO: 27472 - DNA, 3003 bp, Unknown
  misc_feature (1)..( 3003): 2750-1469P.txt file - cDNA_ID_2990367; gDNA_ID_1621103; Annot_ID_171498
tgcttttaccgccgccgtctgttcaatggaatcataattatgacggcgaaggagatggtgacgtgtcgctttggagttactaatattcgatagtcgtttccatttttgtactatagtttgaaaatattctagttcctttttttagaatggttccttcattttattttattttattgttgtagaaacgagtggaaaataattcaatacaaaacaaatcgttttctacttctttgcttcacataagttaaaagtcaaatatttaacaaaaaagatattaaaagtcatattgtagttgctttcaaggcaaaatatgtggacagatcattacacgtggatgatgtttgtaaatatgccacaaaacctgcattacattattttattctatctcatgtaagttacagatcttacaatttagcaacagaaagccacaaaatattacataaattggctcgtctcgaatctagcaaccaaaaaaattcagcccagttcactataaagaatataaaaaaaagtttcctaaaatagtgtataaaaccgaaacaaactaattcaacaaacccgaaataaacaaatccgtacgacaaccaaaaatatctttcagatgggttccacaagataacccagtgccaatcagaattctgaaagcgtggctcgaccgcggaaaccattgtccataccttctcttctttgtccccccttacgtggctcgctgtggagtctcgtaccacgtgtcgcgtcacttcactctttactttctattttccactaaaatcataatttgtctttttcttgaccatacccactcttttttcttctcgttgtcgtcttgcttctcctaaatatctcaaataacgtgagagacttgagtgtgagaggtaggtaacgaggcagactttttttggaagcgaatataacttatgctgatattttatttagctttctgattggagttgagatattatataggtattattgagatattatatacgtattattgagatttgagatattttgtagattttatagttctatcggactaattcttggcttaatccactaacatgtttttgtttagttaattaaactgattattttctgcgctatagttttgttaaacaccttttagacgtaacaaagcaattacgcttgatcatccatcgtagactctttttctttttttacatctcatagaagttttgtttaaacacagcaggaagtaaattattttcttattacgtacgtatgattgtttttagactattttagtactttgagaagtaaaattggggatacgagataaaagacaattgattaacatgctttttattttgacttccgaaactaatcatggttgtctatgtttataaattgtgttctttttgttgaaaaactcagataatgattaaatcagtagcgaatggatggagaacacatgattttagattgcataccgtaaaacaaaaaaaatcatgatggatgtagaacattcaaatgggtcaaataaatacgtatgtgatcaaaagaaagtatgtgatcaaaagggttagcacgagtaccttgggaggaaattcttctaattatgaattatgcaagaattttcgtcaagggaaggtggggaagaggtagctaaagaatagagaatcatatgactaaggacgtggtggttgaaggaaatgagagaatacatgaagaagagaaacttctttgagtgagaaggaagtgcgctggctggagagaaaagagagaaaagagtttcgagtgagagagagggcgttgagattgtgatcaacttaatgtaatatgttcttttattacattttctttttgtcatatactcaaaccttttactattttgtctcataaatctaacacaccccaccatttgttaatgcatgatggtagaaaatattaaatataattaactacttttatgtgatcaaaattaggtttcagactcgtttcgcgatccgatctacaattacaactgcatgcttctaattgatctaaattctaaattttttatacatattaaaaaaacaactttttgttaaattctcaatcatcatttttgtgattaacaattttttataactctaaaccaataatatttgattatttattttatatgtataatgatgattgagaattttaattagcagtctatttagggttttcctaaagttacaatatgttgttacccttctagttaaattttccaaaataccatatttcataacttttcaaactgtttattaattcaaccgtaaaaagcactaaaatgttacatttgatcattcacccaaattaaattcaaaagtttttccgccaaaactacttggtgacttacgtgcttatatacggacgactattattatgttctatacttttttatactttgttgcacaaatatctactctcccaattcatattctagaaggatgtgctataagaatgggagaaattacacaagaagagcatctttaaatatcctctcacaatctttatgtctaatacacgggtgaacaattaacgacaatttctttattcaggaatataataatgaataacggttaccctacacctagtacactaaatccttaacagccacacattcatacgcaaagagtttataaaactcataaaggtataataataacgagtgaataagtcaaaaaaagtcttctctggacacatggcagatcttaatgagtgaatccttaaactactcattttacaattgcttcgctgtgtatagtttacgtggcattaccagagacacaaactccgtcttcgccttttcttttgcctctaaaatatcttccgccattataaaacagcatgctctcactccaacttttatttatctacaaacattaaatccacctgaactagaacagaaagagagagaaactattatttcagcaaaccataccaacaaaaaagacagagatcttttagttaccttatccagtttcttgaaacagagtactcttctgatcaatg

SEQ ID NO: 27473 - DNA, 3000 bp, Unknown; identical to SEQ ID NO: 4703
  misc_feature (1)..( 3000): 2750-1469P.txt file - cDNA_ID_2990367; gDNA_ID_1620723; Annot_ID_165876

SEQ ID NO: 27474 - DNA, 3000 bp, Unknown; identical to SEQ ID NO: 4703
  misc_feature (1)..( 3000): 2750-1469P.txt file - cDNA_ID_2990367; gDNA_ID_2926187; Annot_ID_200725

SEQ ID NO: 27475 - DNA, 3003 bp, Unknown
  misc_feature (1)..( 3003): 2750-1469P.txt file - cDNA_ID_2990381; gDNA_ID_2684116; Annot_ID_190814
acggatctgccactatctccggttcgattatttttggttggcgtcggttaaagactgatttaatttggtggtggttttatttcaacccaatgattatattttaatttttgttcttctacatatccgatattttcagaaatcatgtggaaataaatctaaaaatttagaaatttagttacaagttttataaaactaatcgtctaatacaatgaaatttcatcaaaataattatttttctataaattatgatgatctaagtaccggattaagaacaaattacaaataagaatactgtacacaacaaaactcaaacatgtgacttcagaaaatattttactcgtaaattaaaacataaacatacacgaatactatccttcatatatatctttgtatctaagagtaactcaatgttcaaaataaaatacagctaaaaaaagtaataagcaaaagaatatgggataaactattttaagctgaaaaagtaacaaagtgatagaacacactcatgcatcattagtttatgtaacaaagaagaactcattttaagttgttgcaatggagacttgcttcaaaacctttgaacagtccacaagtttcaagcttttaaacgttctacagatgaacaatggaataaacgactaggccattcttttcaaaagagtgttcataagggaaatatcatccacatgcatttggaagctctttataagctttcgattttgcccgtacctaatgattttcgtttgtccatctaggaagtactcgatttaaagtttagaactaatttaaacaatcattgttttgataaggttaagtatttgaaatcacttttagatgactttggaatagttttagaaggttataatccagtgaagtttaacgatgcatcgttattccttaacataaatagaactctaacttaaataaatttcataacaaaatcaatatttttaacgataatgttggaacataaattatatagcgcatacgattatttagaggaatttgtaaactaaatattaatatcttgttcgaactcgaaaatagcttacttttttttcttcataagtgttggctttgatatataacaacaaagtgttacaatagtggaaaactccacttacagaattcgataggctaatgagcattacgatattaaattatcaaacacatatagataatctcctttaattttcatctactcagaattgaacattttcataatctgcaagttctgctttatcttgtctgctttcattggaaatgaaatggtatatgttggtcggtaaaagacgaatcaaatttgtaaactaacaatgaactattgaaagagtaaatcttacagaaatctcaaaagaaaataagatactaaaaagggagaaactgaatctctcacttaatccccattcggggaacctttacacttaacacgcgatctgatggagccatgagtgcaatccaatcaatccaaaacttctgcaaggccctcttacacagatatcctaacgaaaagtaaccacaaagatccgcttctcaactccaaaaccaatttgcgcaaatagagattttgcctattttgctatctctttcttcttaaaacaaagccttcttaaaacaaaagtccaacaacaaaagtcaaaccgagcccaatatagtaacccatcgaggaagggataagaaagccatacaacacagagacatgtgtcgcctcatgaggaaatcacagacacgtgacgagaagaacgtgtttgtcgagaatgccaaccactgccggcatgttttctgagatcgaagaacgcctacccaccgaaagttcgttcactccgcaaaaccagaagcttcaagtagagcactgaagaccctctaaagaaattgcacatctagtcttcctcttccaaacgaaattaaactcagatttaacaaacgaacgaaactttctttcatatgaaggaaagcgtccaccattccaaagtagcatgaagcatcacaatgacgtaagcaaccaaaaagattttccggtgagacttaacgtcgccatgcccatcaagtgaaactactacaaaatttgaacgacaaggcttatgaagccgaaactcttaaacttccactttttcttcgtaatgaagaaacttaataagtttattagaaataaagacaaataaaggcaaaataccaaagaacggcgacgataaaaccggatttaccggtaactataactagaactcaccgtacggtattgaaacaaaaagttggaccatgtccgaacacaacctcacaaacatacgggaaggcatacgaaacaaagaattttttctttttctcaaaattttagagaaagaagagaataaaaaaattctgatcgaaaatagcttacttaaaaatcataattgaatagtatcttttgtttttaaactaatttagtctatataataataatattattaaccatcgtaaaccacacatgatattcaatacttataataaattaatcgcataaaatacaatacttaaaacgagtgttatataattttacgtaacgtaaaacaatacaaaattttaattcctgaacgaataaaacgagtatattaattaatttattgatcgtattaaaacgaatatgatccaattaagattacaattactaaaatccccacactattattgtcattatttaactatggcagatagatagatacagaaccgtaaaggacgttaggaagaggaagaacgttgacgaagtcaacaacgaacagaaaccgtcgatttgaggcggctctaatctcaaccacacgatcttctctgcctttccctcttctctcttcttcttcttcttcatcttcttcctcgcaattaccgcgaaaactcatctctgctcaatcctcaatctcagtctctctgttgactccgactgttatataaaaccatacaaataccttcagattcactacttcaaacctcaaagcaaccactgaatctcgactttgatcaattgagagagaaatg

SEQ ID NO: 27476 - DNA, 3003 bp, Unknown; identical to SEQ ID NO: 27475
  misc_feature (1)..( 3003): 2750-1469P.txt file - cDNA_ID_2990381; gDNA_ID_2926275; Annot_ID_205289

SEQ ID NO: 27477 - DNA, 3003 bp, Unknown
  misc_feature (1)..( 3003): 2750-1469P.txt file - cDNA_ID_2990389; gDNA_ID_2926232; Annot_ID_203724
aatattcttcttctgctagtcgtttgccatgataccatttttgtcaccaaccaaaaatgatggcaaatgatgtactactaaaaactatgtgaaaatgatttaacaatagttttttacaattaaaatgaatatttaaacaatttagatactataaacctttataaagaagaagcaattctttctcttactactagttttgaaattcttgtataaatgctgaatatattggatcacgttccttaaccacaaagagaattcgaagaacgtagtgtcgtaatctggcccatggtttcttctatggatcatgcaaaattaacaatttggccgacgtgcaaaacaaaaaaagaaagcaaacgaatatttatgtgtacgattatgattatctatatatgtattttaactattattgtatatattcattcgtggggtcgaatggtcacttccaagaatttatgccacatttcaagatatatgttcagccgcatggccgacatcatcgttatagtttgatatcttataagggttcacgatccaaatttttggtacatgacaaactgacgataataatcaaattagtatacgaattttcgctatgtggatttaaattagggttcaagtgcaaagatgttgtaagtatagttaatcgaaatcagagaatctaaattactttaaattaatgtctgatcaatatatgccgcacattctattttctataacataaggaattttattattatttcaaagtaagatgagatactttgtcaacccatgcacacaaaatatgaaatatcttatcttttctttcttttctatttttagcaaaagaaagaaagaaagggaaaaaaaaaagaataatatcttttgtgcactacactatcataagagttcagccaatatgcaacacgagccatttggattttggtaggatggtttcaatggagttactaattaatttccgtataatggaattaactatatagcgtttctcgactcaatagtgacctccgaatttttataaaacaataataataattaaaggcaaattttgattggtactgtttgaattaaattgttaaaaatgtattttgaagaaaaagaggtcatcacgacgagcttccaaaagtggaaaagtctagtgccgtcacgttcagagactatataatacaagcaaacaagaagttacacttatttctttttccttttctgcagttttcttcacgaactggaaaatctcgtagccgtttagatattttccttgcatccttttcacgagagttttaaaaaacttgaacaacaccggctaaaaaaggtttctcttttgtttggaacgactctattagaaaaacgtttgattgttctaaaaggttggttaaaattaaaactcttgacataataagtcttctattttgttttattttaatatacgtggtgacaagacgacgcatatagaagaagaaaatccaaagaatcattatcactgtgctattaaaaaaatttcatcgattaaaagttaatagagacatgtcgacaagaaataaaagttaatgtagacataagtgagctatagaccgacaggaaaataaaagaaaaacagttaatacattttttttatttatttatcaaacagttaatacattattaaagttaattcagtcatcgtgaaaaatgctttgagtgataatcaaaacgagatttagcttaatacaaaccaactactatagaagaaagaaacagaaccctttattaaacataaaaataaagataccattcgtgctacatcaggaaaagtattcgacaataattgaatggagacactgcccattatgtttgatatgcatatgttctcgagatgttgtgaagttctaaaaaatcgaatagagatatgcagatgttttttaaaagatttatattccaataatgggctttagctgccctctttcctttgcaataatgggcttttactctaatttgtagtagtttttttttctataccactaacttgtagattatttcaagtaagagacataaacaaatacagtataaccacgtttgtaaattttggttaaattctgcttagcaaaatgccccccaaataaaattaaatactataaacaccaagtttacaagccaaaaccaactacactactacagtatttttaattttaaagaatccacaacatacaccattaatatcataatctcaaacccaactttaatgacttttgattgccacttaaaacatctctacaatacctcattttacatgctccaattccccattaccaactataatcttactccatctcttattcaccacttacatttttccaaatcacattctcaccaaaaaaaaactgatttcattataaaaactctcaacatttttttccaaatataatcaaaatagttttcaaaagtagtcttgactttcaacattacttttttttttttttaacatcttcattttattgatattgtactttcaacattccttttcctccaaggctttcaaacaagataatttgtcttcttttttttttaatttatttaaaatctttttttaatgatgtataattggagcctcctttaaattagggcccaaacggtggcttcttttagattataacccagggccggcgcaacccttcttcttaacaaaaaccttttgattccaattgttcttctctcttcttcttcttcttcttcttcttcttcttcgccgcttcttctctctcgaattcaccccatctcaagtaagcttctcctatttccttgttataccaaacaaacaccatcttcaagtcaattgattttgttaccctaattgttcccgtccccgtcttgtaatataatcgaaaaatcgaaactttctgttttagagacatggattttgtgaaccctaattgttaacgaatcgttgatatctgtgacgtatataaaccctaatttcgttttcatgtttctttatctacgcaggtgtacgttagcctcctccctctaatg

SEQ ID NO: 27478 - DNA, 3003 bp, Unknown
  misc_feature (1)..( 3003): 2750-1469P.txt file - cDNA_ID_2990391; gDNA_ID_1972029; Annot_ID_178214
gaatcgggagtttttcaaagcttactatcttaggctaatggttaaacaccagataatggaattcaacaagttgcttgagcagcaggttcaccacatgcgtcagatgcatccaactggtgttgcttctgtccaaaacacaaatggttctcatcttcaatcaagtaagattcgtttggagtgagatggattttaatttctgcattttagggtctctttattgcttgtatacttttgctatgaattgttgttcaagtgttgtagtaaacagtcctcatatgcattgtcttgttttctggcttccacttttgctgccttagttcttttcaaggtttctttttcctgtgaacattatgtgtttgttgttttccttagattagtcattcattcaagtcgctaactgatgagtattaaatagctaatctatgtgattttcttaacagtgaatcagaaacaattatgctatccctctgagcacactgaccaatctttgaagtctgaaagtgcacatcatccaatggcttctagtctgtctaatgcattcctcaatggctcttccacactcaatacaaacgtgccctcttctataaacatatcaacccatgctaggagagttgatgcttctccaaatatgctctcatcgcagaccacaaacatgcctatgatgcaaggaatgaatggaggaatgatcaagtctgagactgcctttacaaaccctgcttcattcatgtatggtggcgaacggaatgccctcgaaggacattcggcagttggggatacttcgattcctaatttcagtaacgagtccaacaaccaacccctcagtgatccgcttcttgaagcagaagcttctacttttgggttcttaggtcaaattcctcgtaactttagcctctctgatttgactgctgatttttctcagagctcaggtctttctccatctcaatatctcatatactcctttctctctcgttgttctgacgtcttagcatgcgtataacaccaagtagttattagtggttttctagtacaagagccagtaaacagctaataggataaattatttgtcgtaaccataagtttcctggttgatttcagagattctggagagctacgatagatcacccttccttgtgccgaatgctgaaaacttcctggactcccgtgacagaggagaatatcaaggtgagagagctctaggaatctttcttactttctgtaatatatcgcaagtaatcgggtttcaaattcttcaagacacaatagactagctcgctggtttagagaaagtagaagtattgaggcaacagacagaagtgataatggtaagtgtgtgtttttgcaggagacaacaagagattggataccatatctgaaggtttcagttacgataacatcgggagcgagtagttgggtattaggtaagaatatatatactcatctgcctcaaatctcaggttgcactttttttttgaatttgcatttccaacatcatcattttttggtttctggaaactatgcaggttttgctttatcactaataacataggacacgtttgtgtacaaaagattcagcatttgatggttttcctttgcaaagactacttggtggggtgtataaaaagggctttctattaacattgttacttaagcttgaagttagtaataagtttaagaagaagatcatgtaattttcagtgtgtgattttgtctcttttctcttgtgttttagttatcttttttacttgttacaattgttactctttttttttccggatataagtggtttggatagtgccgaaggctaaggatagagtcaaagtaaggaatcgaaaagaaaccagaaacttgcatataaagcaagtgtcattctaaagaacacaagaacaaaaaaaacaaaacgaagaaatttcttaagtaaaagagatctgactctcaacgtgattcgggaaaacatggagcgtgtaaccatgttcattactgagcacaaactcgtcgtcagtgaaccctttaagctcgaaccttctagaagtgtttctcaccggatcataaaagaaaatcttagccgatttatgaaacatggattctacataaataatctcaccagcatgagtgaaaccttttagtaggaacttattagtactcaaactcttatctatgtgaacaagaggtgcaagaaagtctttactcgaccacttgttgtgtttctccaaaatccacaatctaataccattcttctctattatttctctaccaacgcaagctaacctcccattataatctatcagcacatccttgtgaacatccgatgatggtaactcgatcatatcgaatatttcagatctgacatcaaagctcattagaacccacacacacatatccttgacataggctatatgatatacaacaccgttgatgcatctcccagaatcataatagtcagaacgatgcttattatgagttttgaccgttctccataatttttgagctgatcctaaggttaatactcgacacgtatcataagttgctgaaaactccatgcacattactttgtgtttaccttccactggatcgtatcctaaaaagattgttagatcattcgagttcccattgggttttggtaaaattaacaactgtcgcgtactagggttccaaacaatcagcctagctgattcttgaaagcagatcaagccattgacagattccgtaggggggaagtaattcatttcttctgagaattccatatgataacgatcaataagctgagaataagagtgagacttgttccaagtctcaaacgtctgacgatgttgcggaatcgaggaaacaaaaaacttttcatttgctttgaagcagagtaaaagccgtggagacctagttgttaacaagttgatgaaatatggctcggtggtgattgatgaccaaggcttggacacgcaacgaaacctcgcaacagatttctcaggcagtcttaggagtatctctgagactagatctagaggaatg

SEQ ID NO: 27479 - DNA, 3000 bp, Unknown; identical to SEQ ID NO: 11166
  misc_feature (1)..( 3000): 2750-1469P.txt file - cDNA_ID_2990399; gDNA_ID_2214481; Annot_ID_183347

SEQ ID NO: 27480 - DNA, 3000 bp, Unknown; identical to SEQ ID NO: 1526
  misc_feature (1)..( 3000): 2750-1469P.txt file - cDNA_ID_2990403; gDNA_ID_1620413; Annot_ID_156318

SEQ ID NO: 27481 - DNA, 3000 bp, Unknown; identical to SEQ ID NO: 852
  misc_feature (1)..( 3000): 2750-1469P.txt file - cDNA_ID_2990406; gDNA_ID_1620328; Annot_ID_153574

SEQ ID NO: 27482 - DNA, 3000 bp, Unknown; identical to SEQ ID NO: 3291
  misc_feature (1)..( 3000): 2750-1469P.txt file - cDNA_ID_2990410; gDNA_ID_1620636; Annot_ID_162910

SEQ ID NO: 27483 - DNA, 3000 bp, Unknown; identical to SEQ ID NO: 3291
  misc_feature (1)..( 3000): 2750-1469P.txt file - cDNA_ID_2990410; gDNA_ID_2926204; Annot_ID_202060

SEQ ID NO: 27484 - DNA, 3000 bp, Unknown; identical to SEQ ID NO: 14374
  misc_feature (1)..( 3000): 2750-1469P.txt file - cDNA_ID_2990413; gDNA_ID_2684112; Annot_ID_190647

SEQ ID NO: 27485 - DNA, 3003 bp, Unknown
  misc_feature (1)..( 3003): 2750-1469P.txt file - cDNA_ID_2990417; gDNA_ID_1620682; Annot_ID_48359
catacaagttatttaaaaaattccaaacaaaaaaaagaattgcatatgtaccttttccgaggaaataaaatttgtgataagtttagttcgcatatctatttatattgctttgaacgtgaaaggtatacagccaattaatcataccaaattaaaccaaattttcaagaacatgaacaatgtacagtaccaaattactaacaaattttcaaccattttgatacttgcgttttttctgtagattattatttggataattatactaaaaatataatttatcatgttggatgtggtagatggttgtttacttgtttagacaggagagaagaaggagattgagccataccattaagtagtggagttaagcccaaatatataattgggttaaaaaggccataccattagtaaacaatcgattccgaagttgatccataccaatagcacacaatcaatttggccataccatttgttgagttcagtgactgctttgaaagaaggcacactaatgctttcgtagatacaaaagttaactaattcaggggaatcaaagtttggtttgcatgtagtttgtttgggttttatttttatattttattttagaactttgtttctttaaattaaagtttgcttgttaagctccgcaatattcactataaaaggcacaaacacatcaaattcatgagaaagacacaaacacattataaaagaaactcgcacatagagtttcaaaaataagagtaaacacagaaacttaatcatttttctcggataccaattcctcttgttccttcccaaacaacttatgctcaatatgttgagcaaaagtccgtggaggaaacttagccggagactcaacactcaccatctccggcaacggcttaagaacaatcttatcctttgggggttcacaaaacacagcccaagaaatcctaaccttctccttattcaccaacccacgatgaagtatactcttatacttcccattactaagaatctccaaagtatccccaatgtgcatcacaatcgaatcaggaacacattttgcagtgacccatttgccctcgtagaaaagctgcaaacccggaaccatgttgtgtagaatgaaagttaaagcgcttacatcggtgtgagcttccacaccgagtgctagctcaggctgaggacattttggatagtaatttatcttcatttgtagaagaagctcttctaaaccaccaacttctttctctagacggtcaggctctaaacctagaccgacagagagagccttgaagactttagtcgctagcaaacgaagacacttcgcgtactcactcgttgcttctctacaatcatcgaaaaacgttaataaaagattctaaaaccaaaacaagattttgttttctttagtaaaacaattcaaagcttacatgtaatcacttggtgtcttaggccaaattgatagatctctcttctcttcaggatacgcaagatgaaagaagtaatcttcccattccaattgtccactcgcgttgttagccaatttacttccatagccttgaatctttccagtggcttgatcgtttgcatacttctccttctcttccacagacaaactgaaaaactcttctccggctttcttgacacgctccattagatcagctggtattccatggttgatcaaatgcatcactccccaatccaaagatgcctttttcagctcctcaatacaattctcacggatcttttcatcgtctgactcgatgttctttagatcgattgtgggaacttgaggaccgtcttctttcttctcttctaggaaaacatcgttgatgctctcgagctcttcttttggacgaatatattcttttggaatcgatatgattccgctttttgctagactctcaactctttcaaccgcaaccatcttctttagtcttctgtttaaagctaaaacagagcagaaaacagagtaagaagtaaataaacttaaaaacaggggaaaaaacagagtaataaaaaaaatggatttgttttgtttttcttcttacactcttttttgtaattggttgcaagtaaatgaaatgtgcaaagactctttcttatatagcaaagtttttactatacttttagttagaagagtttgttaccgaactaagagacattgtagagctaccggtggttagtgctattgttgtgaggtaagtgcgtgactcacttcacggtcaacgggagaggatggttgggttgactgattggtcaaaaagattactactatatgggcttgggtctagactcccagaaaaggcccaatagaattaaacccataatcgctatcaacgtgttcttcgtcgcgtgctttaagcgtgtctccacgtgttcacctctactagttcttctactaaccacattttctttttgtagtttggaaatcaattactaaaaaaacaatttgactggttttcaatttcaaatagacaattgtatgtggatcaataattcttttggaaaactaaattatttatcttgtttgttttttaaaatttggaactcatttttattttaatggtttgtactaaagtatattatcagctgaattcaactacacatactacatgtcaaatttttttaaaaaatcaccatgtttcgaaaaaaaaatcttcttactcatctcacagtattttttttattgtataatcaaagcctaaaattatgtcttttctctattttaagtttttgttttgtttaagaaaaccggatatttaatgctgacgtggatattctgattatgaggatgagaggaaggaaaaaataagagaaatctgcctaggaatttatctccacacttctcttatctcctaatttcttccctccaaatttataataaaaccaaaaaaaaaaaaaaaaaaaaaaatcagaagaaacctgagaagctcacagtaaacacatcttcaaccacaggttcatacttactgaaaaaaacagaggaaaaaaaggagctcccttttctatctctaagggaaaatg

SEQ ID NO: 27486 - DNA, 3003 bp, Unknown; identical to SEQ ID NO: 27485
  misc_feature (1)..( 3003): 2750-1469P.txt file - cDNA_ID_2990417; gDNA_ID_2926181; Annot_ID_140557

SEQ ID NO: 27487 - DNA, 3003 bp, Unknown
  misc_feature (1)..( 3003): 2750-1469P.txt file - cDNA_ID_2990421; gDNA_ID_1620302; Annot_ID_152671
gaaactttgggttggtgagtcaggaaatgaaaatgataaggtaacaacaacacttcaaagtgctgccctaaagttaagttgcaagattttttttgatgaagtttttttttttcttgtcatagggagaagatgtaatagcaatcttaccatgggaggagtggtgggcatttgaacaaacaaaggatgactcgaatcctcagattgcactgctacctttgcatcccgatgttcgtgctaaatttgatgttgctgctgcttggaaatatgctcgcagcatggagggtaaaccatatggttatcacaacttgatttttagttggattgataccgttagtgaaaactacccgcctcctctagatgcccatcttgtaagtttttgtttttcatttctcacaatatagttcttgatgaatgaatacactttcaaatcgttttaacttcgggcttctctttctttcaggttgcatctttcatgactgtttggagccaaatgcagcctgagtatgctgctaacatgtggaatgaagccttgaacaagcgactgggaacagaggtattaacatcttcatgattcatagatgatttttttaattaatgcttatccttattagagatggtcctaatatctgattcttctgtactatcgtatccttcatgttgtatacgattctacatttttctctgctcttatagtttgactctgttccttgttcttcgttttttttctcttcttctctaacatggttaaaattgcagggtcttgatctttctgatgtactggtagaagtagagaagcgtggatcctcatttgacaaattactggcagtacctgaactagacgattggatatacagcgatggtaaatcaacctcatgcatcgctttcattctcgaaatgtacaaagaagctggcctattcggtccacttgctagttctattcaagtcacggaattcacggtaagaatttgtacacagtctctgcttcccttcatgcacgcaagctcatgtgaccattttcatttcttaatctcttgaatctgcagataaaagatgcttacatgctcaactttttcgagaacaacgcaagtcgtcttcctacatggtgcaatgacaatgacagtgtgaagcttccttactgtcagatacttgggaaatacagaatggaacttcctggttacaacactatggaaccatactcgcacatgaacgaacaatgtccaactctgcctccaaagtacaacagaccagataactgctaaaagaattctcctccgatgtctgtttgattttaggaaaaaagttcaaatgtattaccgttgaaaactcaacaattactttatctgtttgtatataactatatatatatcattcaggtttgtagcaactgctcatcatgtaaactgtgtttggatatgatacacacaaatagaaattacaagtttcatcttttggttatgtttcgtcttccggtttagtttggtttatctggattaaaccggtctcatcttcatcgtaaagaaagaaagtagaagcaaagcttgaagcttttggatttctaatgtgtgtgaatcgtgatgttgtcatcaggacagatgatgggccatgtcgtggcccgaactcagatgatcttgtctcgaagtaacttcgccgattgtatacggtgtcagggcgtgagagtttcaaaaaccctaaaaatggggacaaagcgacccacttgcccttcttgcgataaacctagccagctctgtctctgcaagaagatgagatctccatgttttgataatcaggtgagtattactattcttcagcatagtctcgagagaaaacacgcgctaaattctactcgaatcgctagattagggcttaagaatgttggtgtgactactgttttcgatgttcatgatgaggcagagttcttaatcagggttattggatcgggttgcagcaagattgacacgaatcatttggattctgagtatagggtagagaatgttgcttctttggaacttgatgatagctttaagttaggtagtagtggcaatgtggagaacttagaatctgagaagaatgtggtgcttgttgatcatggaagcttggaaattgctgaaagtttgaatctttctcaacatttgagtgaaatttcttatcgggattcgcgggttagggataagataggttcttatgaagaagatttgataaaaatctgtatgaagaaacatggtgtcatcagcaatgtctcacactctttgatgcttgaaaccaatgtgaaggttcttagttttgatcatatattggcttctcctgcagccatggatgtcttggcaaaaggttttatggtaacaaagttttcagaaggaaagcaagagtttgagctcgaggttcctcctggatcagctttgttgttcccgagcgaagaatcggtaaagatcaattatcttaaagagaaagaagagttaaaagtaaggaatctgattgttcttgatgggacttggtcgaaggctagaagaatataccttgagaatccatggctaaagcttttacgttgccatgtgaagctagaaatagaaggtacaagtttatacaaagaagtacgacggcagccaagagcgggatgtttatccacgatagagagtattgtatacgcgatgaaggagatcggtgaagatcctgaaggtttagataatatgttgaatgtttttgaatccatggttgaagatcaacgaagatgtaaagatgagaactttaacaagattatctgaaagacaaaattactctgctgttgtaacttgtaagctgaatgaattagattcttcaattttgataattatgccgaaagttggagtcgtttttggcaatttattaaaacaattgaagatataaatgttggggtgtgaacaagaaaaattcatagttctgggccaatatgtaaattaggaaatataagttttgttgagtaagacttttgttaattttgaactcagagtgtgttttcgtttccgaatg

SEQ ID NO: 27488 - DNA, 3000 bp, Unknown
  misc_feature (1)..( 3000): 2750-1469P.txt file - cDNA_ID_2990429; gDNA_ID_2926151; Annot_ID_198075
gtccccttgctctctccgccgctcctcacccagacgacatcgtttagattcccttcgttcggtaaatccttcttcggtttcgccttctttttatttttggtgatctagaaattgtatcaacttttgattgtacatgccagatttggtgtttcttcaaatgtttatgtgtaaacctgactattattacctgcgtttgattcgatatggtttgtgatttgtgaagtttatttatatatatatgcttgattttgggattttgatttttacatagttagtctgttgaaagattcaactgcgttgatgaatgtgattctgggaatatcttgtgtgtgattcatctttagagaagtttgcttctgtatctttcataatcattggtctcttgtggttgttggtgatgtactgatgtttaacacatgatctggcttcattttggatacaaagataacaagtttgctttgtaggtagattggttcagatatagatagagttttgtttagtagtccaatgatgagttgcaatgagattttacactcatcgttccaattgctaaagcagtttgaagttgctatgttgaagcacaataatgactctgaggactacattaggtttttcttcttgtttttgtttctctccttttctccatctctatatgtgccaagttttagtgaagctgcaattttgggatatgatgtcatctataggtgttggggaaaacaaaagtttctgaaactgttgtgtgtttatgtattgattttgtcatattagtttaccaatgacctttctcaatctttcttcctgaaatttgtggttttgtgtccaaaaacttggcatgatggtttccataaaacctgataaatggcgttttataatttatctctttttgggtactcaacaaagtacatgtgcaaggaggtgtttgcttttgaaaagaggtatcaaattattcattcagcttccatgtttttctgccgcaaagaaatcttgattgggtccatgcattgttgaatgacttttctctttttgtatgaaaattataatacttttgttacggttcaaatcaaagcaagaagaatagttgtacattgcttaatcttcttaggccaaactgatttctctttctcaattcacaaccaatggggttgtcaacgtatcaacaaaagtttggtccttttacttattagcttaaacatagaccgcaccatttatatcatttaatcaggatcaaagttacaagaatcagaagctttatgtcactcctaatacaatctagcattacaacgaagcagcaaatacgcctgaaattatcgggttacctcgcttggggtccactcttaaggcattgtgagtgaactgtgaattgaacaaagctattatccatcttcattcgaccttcgaaaataagcagaccagcttgtaggaagaagaaaagcctggaacttcaaattgcttagctacatcttcatttaaagtttaccgaatctcgaaactgatatacaccattcaatggtcaagatttacaattgcaagtctatcacatctttccaccaatcttctctttgcagacttacttctataacaccaaacctcaaacgcttcacttaaatccggaaacttcacaccttccaacccaatacctctcatccattcaccaaacacttctgcttggtcatttgaaggcaatgtcaaaaccaaagacaccatagatccttctataaattcacaaagatcttcatccattctatactcatactcacatccctctgcatcaaccaaagtctttaatctccttatgaaaggcaaccatatcttcaaaagacaagtcctgcttttagaaggaacaatcacaattccataacctaccgcttctaaaatcttccctgtaacctcaactagcttaaccttcacacccaatatcctagaatccaactcacacttctgagcaatcacaagaatctcactcgatgcatcggtccacttaacgacaagatctttcatcaactccatccttggcaatactttacacaaccactcaatatcatataatgtcttaagaacactaaactcagtacattcaggaagaatcacaagcaatgatgataatctatccaataacatcgatataacatttgagatacctaatctcacaacggatttcacttcctcttcggaaatcagtaaccgtacctcttcgtcttcagataacataaactccacttgttcttgagctgatgttttcagctcatcaacaagctcaggagagttctttagtgtatcaatggacatggcgaaatgaagagctgacaagaagacattctttgtattgagggatacatcaatgacatcgtcctgcatttttcgatgttttaactgcgaattcatcaaatcaagaaacatattttaagtagattatcaataaatcctaaatccaatcaaaagacttaaaacttttctataatcaacaactctaactacataaacaacaaaccaataagaacacaattaccaaatttgtaactgaaatttccttacgttcatcgatttcaagaaccctaattagcatttcatagctctgttttcgtcaatctaatcacattttacagagtaattaacaaaacaaacaaaacagagaaaaatacttactttttccccaaaattttcttcctttaagttaaacaacaatggaggatgataataaacaacattgctttgaatgaagagtgaagaagaaagattgaaactttagcaatccaatggggatcttcacacgctgatttggtttaactaaaccgaatcgaatttggttgataataaaacgacgtcgtataactgaaggatattacggtaatttaagtcaaggccatcgtcattgtcattgaatagatcaaaccattttactaaagaacacagttttctagattctctagagagataagagtgagagaagagaagagaagatccaaaagcgtgggaaaatcgaattagggttttctgaaaatg

SEQ ID NO: 27489 - DNA, 820 bp, Unknown; identical to SEQ ID NO: 7714
  misc_feature (1)..( 820): 2750-1469P.txt file - cDNA_ID_2990429; gDNA_ID_1621158; Annot_ID_173605

SEQ ID NO: 27490 - DNA, 3000 bp, Unknown; identical to SEQ ID NO: 27488
  misc_feature (1)..( 3000): 2750-1469P.txt file - cDNA_ID_2990429; gDNA_ID_2926151; Annot_ID_139310

SEQ ID NO: 27491 - DNA, 3000 bp, Unknown; identical to SEQ ID NO: 6941
  misc_feature (1)..( 3000): 2750-1469P.txt file - cDNA_ID_2990433; gDNA_ID_1621117; Annot_ID_171926

SEQ ID NO: 27492 - DNA, 3003 bp, Unknown
  misc_feature (1)..( 3003): 2750-1469P.txt file - cDNA_ID_2990441; gDNA_ID_1620313; Annot_ID_153061
gtttaccttccaatacttctggaatgaaatcgactctttcagacagcatatttgcgattaaaactccagtagtaacacaagatgttgcaacctacagtgaagttcagtttatgttacattataatttgagatatattcaatggaaagcttcatataaacctaaaattacctcggctttgtcctgaagtttcataagatcacagactaattgaaaaagttctttgctagagcaaatctctttagaatagctatctgaagcagaaagggcttcaatagctcggagaataatttcaaggacggggtacctgaaaacatacacaagggttcattgtacatactacatagtaaagcataacacttgtttttttttgcaagaatagaaatgccattcactaacacttgatgatctttaagatgagtttctgttcttccatacctttctggaattctttctttagtcaacttgctcatttcaaatgaaagaagattgatcaagagactcgtcaaacccagattcattagtggaggaatcaatagctgctcaacctcaggttgaccttctatgatacctaacaatagccctacactctatggtaaaatagaaatgaattagcaaattaagaaaaaccatgataaactaaaacttacagaaaatggtggagggacatgaataggcataaagtagagaatttcagaaaattcattaactcagagttcattaaataaaattcaccacttcgatcaacctttcaacaatcaagtcgtccagtgcaagaatgactaagttacaagaacaaatttcagaagttaccttttcaataagatgaggattcaaggtattttccgcaatccacaaaatatggcgaagtatatcatcagactccaaacaatgggcccaggaagtacacccagcgccagagagtcctgtggtgagtatcctattggagatacatgtcggatagttagataacccaaccaactaatcaagcatgaatctacatttgaggtaacaaatttattgttttacctgcaaacttcacttaggcattgggtatcatcaagaaacaactgccccacaagtgtattgacgattccggctgtagactctatatgtttcaacagaccttcatggcaagcaaggttcctaataatcccgagacagatttcctagcaagccccaaaacgaaaaagaaatgtaaaaattaaagtcaattcaagaagacaacaataattagaaatgacttagacttatcatacatacactgagttacttactcgaatacggggagattttgaaaccataaggtttgcgtgaagcacttctaaaattaggttctgtacctgcaaagccaaagcattacaacttcaggtctcaactccactacatggattcaatagatagagcactgtagtacatttccaaaaccactatacggaaccaagctgctcttttatctacatggaaaccaattagttctttttcaacaactctgccccaaatttcctattggtctaaactcaactttaaaccaacgttactacttggcaattcaaaatccagagtaaagaatatataaaggcattacttcaaagtataaatccatttaccattagctcagcatgagttctactggcggcaagatcccacaaaacacaaccatgatcttcccatgccgatgacccgtcttgcattcccggcgctggacatgaactaaccgtctcccccacctcataagtggattcatcatgattatctccaatgtccatgctctctggatcaccattggaagtctcaacaaccccatttccagatatagctactacaccttgaaccacattatccgtattcatatgatcattatgtcgttcgtcacttcccgaatcaattggaaggagtttccttatcagtgaaataagatagctaggatcaactgtagtcgaaatgtcaaacaactgcacaacacagaaaataagaaacatcactctctacacaaataaaaatcacaactttaaatccaaaaactactcttaaatagccaactaaaaacccctaattgcacaaagtaccattgacgctcaatttcctacaatgaaactacctcaacaacaacgaagagtgagcaaattaagctcaaaatttacctcatcaggcggaggaggaggatgatgtgagggaaactcgttttcactttcttctcttcttccagtaaaattttcttcttcttcttcaagtattcctcgctgtttcgtcgcttcatcgtcttccattttaatctctctggttttttaatttctcctttgcccttatttctcttcttctctcgccagaaaattcgaaacaccgctttacttgttttacaaaatagtccttgtactaaatcatgtcttgttttcacacctacataatttacttctcttataaagtaccttaatcttttcaatagacgattacacccccattttgaatgaaccacaaaaatctgccaactgttaaataagtctcggtgacaggtggcagattattcacaggtgaaaagatcgtgggtaagaaaagcctcagccacaaaattaacggtcaactaccataaattgtttattcattaatccaaaacaaatctctatttaataattttttggaaaaaattaaattttttaagaaataacagaaatatttgtaagaaataaaaacttcgatagagataatttgatatatacagtaaaaattctataaattaatacacacggtaaattattattttgatattttttataaagttttcactttatttattttattgttttgtccaaaaatttattattaaaaacacattaatttgtaaaaatgccaaaaaatgattagatgtttcggaaatatttgagagtgacaagtcatacaaattggatgttgtttttacttttttagttttttggtaaaattatccttaaagctaaaaatctccataaccaaagcttcttcgttccaccagcaccaaaccaacaatg

SEQ ID NO: 27493 - DNA, 3000 bp, Unknown; identical to SEQ ID NO: 12776
  misc_feature (1)..( 3000): 2750-1469P.txt file - cDNA_ID_2990445; gDNA_ID_2214570; Annot_ID_186152

SEQ ID NO: 27494 - DNA, 3000 bp, Unknown
  misc_feature (1)..( 3000): 2750-1469P.txt file - cDNA_ID_2990453; gDNA_ID_1620653; Annot_ID_47800
gtactaaaaatctgggaagtacactgatccgatggaaatgaaggagaagattgtacattttatcgtgatgattcgtcataaactgagactggagagagcgaagctgaacagctttagcagctgaagctgcttcctcttctggcttagaagcattccttggacgaccgtgcattcttctccgacgactgtgagagatgcgacagtgtgattcaacttttccggttaaatctgatcagaaattacgaaaacagttaaaacaaacactagatcgaggaaagaaaaaacgtgatccaaatctagaaacaacagagatgacgaaatggagaataagaagcagatcacctgaaaggagcacgttgcggcgtcgatcgagagagagagacttttgttttcgggcaattgagcgactgagagaaggttctatcggaaaatttaatgggccggtttaatgatttcaatcgcttaaaccagtaaaccgggtttaattgaaaaatacggtcgaacactaacccggttttggaagtcttcgtttatgtagtgaaaggcttcgtcatcatcgttgtttcacagttgaaggttttcacgagaaagtgaagatttttggagaaaccatacttttgtgaaggttcgtttcaccttcaatttcgtttttccaatttgggtatccgataattgtaagaatttggggttttaaggtcagattgattatgtatctaatgcttttacattgtagtagctcgtgttttggattttgaaggattgatttctaaatttccttttgatcttgtagttgaatcacaatggaagattcagagaaaagaaaacagatgttaaaagcaatgcgaatggaagctgcagcgcagaatgatgatgatgctactacaggtactgaaacatctatgagcacaggtcacctctccaatccattggcagagacatccaatcaccagcaggattcatttgaaacgcaaaggtttgattattataccgatcccatggctgcttattctagtttcaagaaaaacaagacccctaagcaacaatacatctcatctcctagtcatcaaggaagctctcctgtaccacctcagtttccaccatcagttcctccaggtgcttgtttctgccttgatagtcaatgactctgtcttaatttttgttttgtctatattcttgtgaggccaaagaaagtagtccactgataaagaagattgcctaatatcatgagagtttaacttacagtatgttagttggtccttggtgagtataggtataggattgaacagaatcaggaattcactttggtatttggttgttgggctttcgtagagttaggtgatgattctcttctacaaatctatatgaaatttttgttctttgtttgggtttagtcatgtgttcttgattataatctacaaatcaagatcaatggaggaagaaatttgtctctcagtctcaggcttcaaacttattagctttagctactttaatttgatatatctctttaagtttcactttctaggaattgacagtatgaaaatcacatcaattatggaattcagttaggtttgtgtcctgtgccttgcaatgaacagtaatccagttctgatccttgcattataactttgaacaggatcattatgtagtgagtatcaggcacagaccaatcatggtggctttcatgcagctcattatgaaccaagagggatggcacatctttcaccctcacacagaggtccacccgccggttggaataacaactttaggcctccaccagttaaccattcaggtccacctcaatgggtacctcgcccttttccattctctcaagaaatgccgaacatggggaataatagatttggtggtcgaggcagctacaacaatactcctccacagttttccaattatggacgacaaaatgcaaactggggtggaaacacgtatcctaactcaggaagaggcagaagtcgaggacgcggtatgaacacaagctttgggagagatggaggaagaagacccatggaaccaggggcagaacgattttactccaactctatggctgaagatccatggaagcatcttaagccagtcttatggaagaattgctcagatgcttcgagcagcagctcaacaggtcaagcctggcttcccaagtctatagcaccaaaaaaatctgtgacctcagaagctacccacaaaactagcagtaatcagcagagccttgctgagtaccttgctgcttctctagatggtgctacatgcgatgagtcaagcaattaatcaggacaactggcctagtgaaaatacaccaagtccaagcatctgaggtacctggaaagatcaccgttgactctttcgaactaggtattgttcagtgacttgtgtttattttcttaacaagacacaacagcgaatgatgaacatctctgagggcgcaattaggagtagattggttggcaatagggatgttctctaccaaaaattttactgttttttcgcaagatttagttatcgtacaattatgtaaaatcattatcaggaaatttgttgcatgattgtgtttgaggtggaaatgaaccgcatccgtattaagatcatttttgctggtggaaacaatgttaccaggaaactgaacttggttttttatagattaatgtgacttgttaggtaccgtaatataatactagttggctacgacacgtacatgtgcgtttattgcttgaagccaataaggacaaggtggacgtaataaagtgtgcttgttgttggatggatctgaatatgatgactcaactgtccaactctaatgttgttgctaaagacccaaatcccacccacatttaatgttgccgtcacggaaacagttttcccaactgtcctaaatcagtgatacccatgcctattctgaactcaactctctttcgaaactcaatccttatataacacatcccatttaagcctataagctacacatatcagctctctcacaaaaataaaatg

SEQ ID NO: 27495 - DNA, 3000 bp, Unknown; identical to SEQ ID NO: 27494
  misc_feature (1)..( 3000): 2750-1469P.txt file - cDNA_ID_2990453; gDNA_ID_1620653; Annot_ID_163560

SEQ ID NO: 27496 - DNA, 3003 bp, Unknown
  misc_feature (1)..( 3003): 2750-1469P.txt file - cDNA_ID_2990453; gDNA_ID_2926185; Annot_ID_140760
atcgtactaaaaatctgggaagtacactgatccgatggaaatgaaggagaagattgtacattttatcgtgatgattcgtcataaactgagactggagagagcgaagctgaacagctttagcagctgaagctgcttcctcttctggcttagaagcattccttggacgaccgtgcattcttctccgacgactgtgagagatgcgacagtgtgattcaacttttccggttaaatctgatcagaaattacgaaaacagttaaaacaaacactagatcgaggaaagaaaaaacgtgatccaaatctagaaacaacagagatgacgaaatggagaataagaagcagatcacctgaaaggagcacgttgcggcgtcgatcgagagagagagacttttgttttcgggcaattgagcgactgagagaaggttctatcggaaaatttaatgggccggtttaatgatttcaatcgcttaaaccagtaaaccgggtttaattgaaaaatacggtcgaacactaacccggttttggaagtcttcgtttatgtagtgaaaggcttcgtcatcatcgttgtttcacagttgaaggttttcacgagaaagtgaagatttttggagaaaccatacttttgtgaaggttcgtttcaccttcaatttcgtttttccaatttgggtatccgataattgtaagaatttggggttttaaggtcagattgattatgtatctaatgcttttacattgtagtagctcgtgttttggattttgaaggattgatttctaaatttccttttgatcttgtagttgaatcacaatggaagattcagagaaaagaaaacagatgttaaaagcaatgcgaatggaagctgcagcgcagaatgatgatgatgctactacaggtactgaaacatctatgagcacaggtcacctctccaatccattggcagagacatccaatcaccagcaggattcatttgaaacgcaaaggtttgattattataccgatcccatggctgcttattctagtttcaagaaaaacaagacccctaagcaacaatacatctcatctcctagtcatcaaggaagctctcctgtaccacctcagtttccaccatcagttcctccaggtgcttgtttctgccttgatagtcaatgactctgtcttaatttttgttttgtctatattcttgtgaggccaaagaaagtagtccactgataaagaagattgcctaatatcatgagagtttaacttacagtatgttagttggtccttggtgagtataggtataggattgaacagaatcaggaattcactttggtatttggttgttgggctttcgtagagttaggtgatgattctcttctacaaatctatatgaaatttttgttctttgtttgggtttagtcatgtgttcttgattataatctacaaatcaagatcaatggaggaagaaatttgtctctcagtctcaggcttcaaacttattagctttagctactttaatttgatatatctctttaagtttcactttctaggaattgacagtatgaaaatcacatcaattatggaattcagttaggtttgtgtcctgtgccttgcaatgaacagtaatccagttctgatccttgcattataactttgaacaggatcattatgtagtgagtatcaggcacagaccaatcatggtggctttcatgcagctcattatgaaccaagagggatggcacatctttcaccctcacacagaggtccacccgccggttggaataacaactttaggcctccaccagttaaccattcaggtccacctcaatgggtacctcgcccttttccattctctcaagaaatgccgaacatggggaataatagatttggtggtcgaggcagctacaacaatactcctccacagttttccaattatggacgacaaaatgcaaactggggtggaaacacgtatcctaactcaggaagaggcagaagtcgaggacgcggtatgaacacaagctttgggagagatggaggaagaagacccatggaaccaggggcagaacgattttactccaactctatggctgaagatccatggaagcatcttaagccagtcttatggaagaattgctcagatgcttcgagcagcagctcaacaggtcaagcctggcttcccaagtctatagcaccaaaaaaatctgtgacctcagaagctacccacaaaactagcagtaatcagcagagccttgctgagtaccttgctgcttctctagatggtgctacatgcgatgagtcaagcaattaatcaggacaactggcctagtgaaaatacaccaagtccaagcatctgaggtacctggaaagatcaccgttgactctttcgaactaggtattgttcagtgacttgtgtttattttcttaacaagacacaacagcgaatgatgaacatctctgagggcgcaattaggagtagattggttggcaatagggatgttctctaccaaaaattttactgttttttcgcaagatttagttatcgtacaattatgtaaaatcattatcaggaaatttgttgcatgattgtgtttgaggtggaaatgaaccgcatccgtattaagatcatttttgctggtggaaacaatgttaccaggaaactgaacttggttttttatagattaatgtgacttgttaggtaccgtaatataatactagttggctacgacacgtacatgtgcgtttattgcttgaagccaataaggacaaggtggacgtaataaagtgtgcttgttgttggatggatctgaatatgatgactcaactgtccaactctaatgttgttgctaaagacccaaatcccacccacatttaatgttgccgtcacggaaacagttttcccaactgtcctaaatcagtgatacccatgcctattctgaactcaactctctttcgaaactcaatccttatataacacatcccatttaagcctataagctacacatatcagctctctcacaaaaataaaatg

SEQ ID NO: 27497 - DNA, 3003 bp, Unknown; identical to SEQ ID NO: 27496
  misc_feature (1)..( 3003): 2750-1469P.txt file - cDNA_ID_2990453; gDNA_ID_2926185; Annot_ID_200565

SEQ ID NO: 27498 - DNA, 3000 bp, Unknown; identical to SEQ ID NO: 9369
  misc_feature (1)..( 3000): 2750-1469P.txt file - cDNA_ID_2990461; gDNA_ID_1972105; Annot_ID_178712

SEQ ID NO: 27499 - DNA, 3003 bp, Unknown
  misc_feature (1)..( 3003): 2750-1469P.txt file - cDNA_ID_2990465; gDNA_ID_1621144; Annot_ID_172965
tagaggagccaatatacgtgttagccagtataacaatctgattcaggccgaccaaatatcatcaagatcactaattttgttcctcaaccaaatttccacaataagaaactcgatgtaaccattcaaaatccttcttctttcatcttaaaaagctacttaatctaacaacaaatctattcccaaactatgtaaacaaggaaaacagaaacttacaatagaacaacactcaccataagccgaaatggcaatggagagaaccggaccacgatgagcttgccatgacaaagcttcttcaataccatgatcacctctcaatctccaacacctaatcctcccatctctatgtccactccaaacaactctactaccttcatcaccaatcatacaaacaacagcagcagacccaaactcattccctaaactctccttatacggcgccgtatcctctacctctaatcccctcccacttccatacaattcactaaactcccaaactctcaacgcaccatcctcaccaccagtccataactgtctctcagtactagtcattgtcctcaaaaacctcccaatttgagtttctctcaatggatgaggtctcacatcaagactaggtggtcgattcggatgaaccgctgacctaatcggaactttgaagatcccagattcaccacacttaccaacaaattccggtaacgaatcggagccgtttccatcaccgatcccgtcgtgattaccgtcttcgcttagtctccggtcgagaaattggatcatgtaatcgatacgtttgttgctgtcgtcgacggaaggctgagattcatcgtcgccggaggaagatgaagaggagtaagctgaacggttgaaaagcgtggacggagttgcggcggagaaggaaggagagaagaaggagaaaacgtcatcgttttgatcgttttgacgatcttccatgagtattggacttgaagcttttacttggagcagagagagacgacgagtttttcggtacaaagcctctcgagatatttctctctcaagctaaatcgcagaaatgcttgaaacgtgttgtttcggatctctcgttttctttgtttttttcagacattcgaaattatttattttataacaacaaaatttgtacttgtaaattggtaaaaacaaacctttataacaaaaaaaaaagtagattggtaaaaagtaaaacttactgatgtcaaattctcttttttggattaacagtccagaaatctgtcacaaattctctgttttggattaatttttttagttcttaaaatcgtatgttaatatatgtcatttgattctctgttttatattactgttttggtctaattcttcttttccgttgttccctttcgattgttcaatgtgttggtttgattttggtttatgataacttacctcaaaaccaagagaatttggaagacaatttcaacaagctgtttgaacttcataaggtacaaaatatccctctcagcaatcgattactacctttttggatgatgtggaggatatggaaatcaaggaatgctttcctctttcaaaagaaaaactatgatcctgcaagtgaagcaagaaaaggtttctatgaagtttaggaatggatagatacgactgggataggttctgaagtaaatcatgattctctctcgccgtttggtcactcacatgagcatttccgtagtcggcaatggataccccctctcccagaatgggttaaatgtaattttgatagcggctatgtgcagggacgttcatttacaaatactggatggatagtcagagacaatagtggttaagttattcgatttggttgggcaaaacttcaggcagcaaattcggcgatacacgcggaggcactgtgatttctccacgctttacagatgatttggactcatggtttccggtgtattgtgtttgaaggagataacttggaactaataaagttggtaaatacaatgggagatcacaacgaaatagatacccttctctttgacattcggttttggatggataaactgccacagatatctttgcgacatgttaattgagaacggaatgcagcagcggatactatcgctaataaggcttgttctttaaatggtttgtatcaaactttcacaacaccaccacaatggttggttaactatctgtatcatccctttacaatctaatgaaagtctagatgttaaaaaaaaaaaacaagagaataaaaataaaatattggctattttaaaaatatttttaaatatacataaaactaatgtttatttttaaatatacataaaattagtgtttatgtagtatttcatatttttcttaaaataaaccgtaaattcaactaatattctaataccatattatataatattgatattttaatgaaatatacaattaaattaaattttaattaaattttcattgattttatgtttatgcatagagacatgttgtcaacacttgagagagtccctttatcaattaaagtttaacacaaatagcatagtcccctatatcaagatcacctgcaactaaccaaattctcaccaaaatcactaacaaatgaaacaaaaaggaaaaaaaaaaaaaacagcatcaatgttcatcttttcccctacatacatatatataaaatctaaaataaacacaattttattacataacatattaagattatatttattggatttcttcctctcttttttaagtgtgatttactgttgtctctaattctttcatcagcaaacaccgattacgtacaaaataatacattattaataacatttcttactcaaaaaaatgcgccaattcaaaggcttgtctaacgtgtgtatataatagtgttacttgcttgcctatactatatataaagagagagagacttctaagattctcctccatttttgctacatttttttttctttgattaaaaacatttttactatttttcgctttttgctatttccttgtaacttaaaagaagaaaaaatg

SEQ ID NO: 27500 - DNA, 3003 bp, Unknown
  misc_feature (1)..( 3003): 2750-1469P.txt file - cDNA_ID_2990469; gDNA_ID_2926157; Annot_ID_198517
taagaatcgagatatatctcgacatcgatgatataaagaaaaaaaaaggtatagtatatatttttaaaaacatacacttattgtttttagtgatgatactggtaaaacactttcatgcaatattattgaaataccacttcaaagactaattttcggtatcgatagagttttagttcgtcgacgtcgagaaattttatatcctcttcgatttctttacagtttttatcgattttttttgtatatacttctaattttcttctctctatatgacttttctctcaatttcttctttttcatatctactttttaagatattttaaagagtcgtgaaagagcatcccttcaatatgctcatgccattggtattgaattcaccaaaagagaagcctctcatcaaataagttcttcaatcccgaaacttgagcttagtctccaaatcctttgagttaagatgtcttatgaccctcgtcatttataaattaaactcaataaaattgatgtctacactttgatcggattgaacaagaacattgtcatgttcacttgcaatattcacataagcctttatcggattcagttgtccgcaaatattttgatatttactcgatgaaagatctgctataagggtgaataaatttgtaattcaagccccatcacaaatcgcggtagatcaactgcatctagcttggaaatcaagagtactatatgctcgttgacgccttcatcaagaccaaaagtaaactgtacattgttgcctctattccccaatcttggaatctaaatatctcttgatcaattttttatgcttggttctatcatatagttactttttaacttgatgaatttccaaacatgttttaggaaaactactttgtgaaaattttatattatataaatagaaaagataatttaacggaaaagaaacattaactttatagcatgtggtatgtggatattatgctcactctcaattagtcaattaagatataccaacaacaacctggttgagatatcacagaaattatcaattaatatcttataaatgaattcgaaatatgctaaatgcaaacatagttttgtaagtacgtaatttataatatattaatactcaaatctaagacttacttttgaaaacaaaagaatatcttgtcaaattgacactttttaatgttcaaaagagatagtaagaaatttcgcctaaccaagaaaacaataaaaacaaggaatttcagtctcaatactatatatatttttctgttattcacttatatatttggatgtgatagaatacttttttaagaacacacatatcttatcttcaccgatatattagctgatacattttttacattcctttttattattattattcttatttattttctattcacatgtacttacaaacaaaaacttaaagactttgcaatttgcgttacgaatatttttcgtcaggctgtaatttgaaaagtcttctagatgatttcaagtctctgcttaatgtgccaactaggctctatgtcactactttgtgttgtctctaattctcattcttcttgacaagaccaaacatatcactaatgatgaagagatgactaatatttgtttatacatttgcttgtaatgaagacatgtagtatagcaaagcaccatataatatagtgatagcattctattaatttgttcttttttacagccgaagaagaagagtataagaaacatgtttaagattcagccttaaacaagtgaagaaaaaacaaaaagaaaggctcaacgaatgggaactttgatccaaccattggcaaaagcaatggctaagatgacgaatggagttgacataccgaatatgataatgtaaggaagaggcgtcttcatcggattctctccttctctttctccaacgctttgccaatacctacaaaattccaatgcaatcctcatccataaccatttcttcaatcacaattgcatgtttatgaaaaatgaacatgcaagaatttaagttctttttctattttaaaagagtttagttcttttgactaaactacaacccaaatatttttattcttttgctaacacggatttgagtctggatattgatacaatactaacacaatgtcacaaaccaccagtctacatgtcattgacacatacaaaaaaaaaaactacttaaattctgcaatggagactaaaatttttgtattaaattggtaacctacatatcgttttgtaattttccatgttttcatcaatttcctaggtttgtttttctgtgattttgcaaaattacattaccattctatgagtttctgttattttctacaatctcatgatgaaaattgagaattaagattaacttactgttcaggttcttcctctttggttataaactttttcttatctttaggcttcacttctccatctcctccaccttatgcaataaccaaagattaacaaaatttacatctacaaacaaataaaagatataagagtacctaatttggcatgaagcttgaattctgggaatcctaatggtgatggtggacaaaagaattgaggtaaagcaagcaatgatgaatatgaagaagatgatgaagttgaggaatcactagccctgtggctaaacgaagaagaagaaattcgaaatttcgctgccatttccaacaactatatggatgtgatagaatatttttacattttatttttctgttattcacttatacatttggatgtgatagaatatttttttctgaacacacagatcttatcttcaccgatatattagctgaagcctgatacatttacattccttatttattttttattcacatgtatgtactaataaacaaaacttaaagactttgtattatgcgttacgaatatttttcgtcaggattgaaaagtcaaccctaggcctttagcttccttcttttatataaacagagaaacaaaacactttctttctcagcctctctgtttcatcttcttctctaaactctcaacatg

SEQ ID NO: 27501 - DNA, 3000 bp, Unknown; identical to SEQ ID NO: 8704
  misc_feature (1)..( 3000): 2750-1469P.txt file - cDNA_ID_2990473; gDNA_ID_1971867; Annot_ID_58422

SEQ ID NO: 27502 - DNA, 3000 bp, Unknown; identical to SEQ ID NO: 8704
  misc_feature (1)..( 3000): 2750-1469P.txt file - cDNA_ID_2990473; gDNA_ID_1971867; Annot_ID_176470

SEQ ID NO: 27503 - DNA, 3000 bp, Unknown; identical to SEQ ID NO: 8704
  misc_feature (1)..( 3000): 2750-1469P.txt file - cDNA_ID_2990473; gDNA_ID_2926155; Annot_ID_139469

SEQ ID NO: 27504 - DNA, 3000 bp, Unknown; identical to SEQ ID NO: 8704
  misc_feature (1)..( 3000): 2750-1469P.txt file - cDNA_ID_2990473; gDNA_ID_2926155; Annot_ID_198330

SEQ ID NO: 27505 - DNA, 3000 bp, Unknown; identical to SEQ ID NO: 7316
  misc_feature (1)..( 3000): 2750-1469P.txt file - cDNA_ID_2990477; gDNA_ID_1621140; Annot_ID_172803

SEQ ID NO: 27506 - DNA, 3003 bp, Unknown
  misc_feature (1)..( 3003): 2750-1469P.txt file - cDNA_ID_2990481; gDNA_ID_2936572; Annot_ID_194789
ccggagcatttggatcaaaacacccaatttcttcaaacatgcctcctcctcccatgaaaaccggtccaaagggctaagaaagatggtttcaaaatcagaaaacattgacacagttttgatttgctagattatatattgaaaactgcaacctaatcttgaacaaatctgttctaaccaacttaaaaatcgtctaagcttagatgaattcttgtaatgtatatctaatgatcaggttattaggaataaaagagtaagagaagggtatattgttaccgacttggctgatgatgattctccgaagaactttttccgaattcacgccaagaagagacttaacattaacaactctttctttttctctctctgtctctctttttgaaatgcctatacgtttgcaatttgagagtaacaaataaaaagagtggaagatgacacatttaactttttttttttgtattaataaaatacgtctgttatttatttgtggtctaacggggaacaaaagtttaatttcaacaactaacatttttttcctttcaatatattttttattttctcaaaacgctagtgtttttttttgttcgtaccgtaatattcaaaaattgaaaactaaagttttttttttatcaataacaattaatggtggtactctggactggactttggttaaagttcagattttttttatgtgtgacaatacctactttgatacatcttactgaattgaaatatttggttaccttattggtaaaagaaatagtaattttatgacctaagttacaaatttgagttctttttctttataagttgcatcttttagagatttttttttttaagttacatcctttttagaaacgagggttttggttggatcatgaaatttttgtttgtggcaagacaggccggtggttagttacagtctgtaagttccatgacgtgtctctcttcgcgtgggtcccgtcacgattctctcaggttttgccgttttggtatatgatctttaggggtatttctgtctattgattatattttctcggtaatattacgcttgatttgaatccttcgactataatagagattttcttaatttcactttcacgttcaaagattttttcgcattgtcttttggaaaaatagcagagttttttaaaaaataaataagaaacgatacattcaaaaaatattatgtgaagttgagtttttttttacatatagaggaaataaaattgatcatagtcatagacatagaaatttgtcagtggaatcttttctattaggtcaaacaagattcaacttttaacattttatctaggacttctgaattctgatatacaatgatcgatgatattataaataagataaaaaggctttatttgtattatttccttgtaaagtaaagtatttcttaatttcatgtttgttgggtcatgcaaaatatgtttccaaggcaaggtagcggattttttgtgaagaatattagctgggtcccacgtgacacaaaagctatgcggaaaagggtgtttccgtaaactcacttgaaaatttctgctaaccagttttgtccggttaagttcatgttatgtatgttacaatttgggaattgggattcagttaaaccggatcagccgaagacattattatattcgttttgtaactttttgtttagagggtgtcgagttaggttatcgagctgagctgtatataaaaacatctcaaacaaaggtgaggaggggatgcatttgcaaaatggaattaaggggtgtttcgtaatcgtgacagttacgtttttggtttctctcctatgaggcttattttgggcctcaacaagaagtaggcgttttaacacgtttcgtcatctagagccagatgagagggcctaaaccctacctgtggctggttatttattgctttaacttacccgacagatgcgactcaatttgaaatatctcttttgggcctactgatcttattgacgagaggattcatcacccttttcttcggccacttggaaagattatatagattgtatgttttctcttttcattttctatcctcgtgaagtttttatttttatttttttattcagattacgaaaatcttgagaaaaagaataagacccggtgagcgaaaggaatgtgtggcgatggcgatgcctacacagccgtgaagccgagtcatcgattataaaatgagatgtgtcgatgataacattgctagtataattcttggtgtggtccattatttgataaatttatggtatgcgtccctcatgggaagtgtgataagattaaacctagtgttcgatataaaatttcaaattttgtgtcttagccattctattgaattttaaactacggtcagattgaagcttacatatatttgatgtaaaacataaaaatatgtggctgttactcgtacacatttatggttatataaatgaatagtctcaatcacagccgtgctctgtagttgtcaggtattcgtgtggtttgaagtataacattgtcaactatttgtataaagtttctctatactattagttccatgatctagttatatatacaagtcatatcagtttacactaaaccactcgacactcattgataatcgcataccgttactacaaaactaaattcaccttcattgcttattaaaatcaaatcatcacaatagctgatagatcgtggccttagcatttcctcggtaagacttatgaaaaaattaagataactattctttgaaaaaggtaaaggaaaagaagttgggaaaactttggcctttgtgtaccaaaagtagaaaaataatttccagcttgtcattttcctacggtcccaattaattatatctctctctataaatatagtaacacacttagccatcgtacacttactagttacttccaacatttggcttcctttgctttcacgaatagaaaccttagcttcttccatttcttctttctctcctcgtttaaattagtttttgacaaggaagaaaaagatg

SEQ ID NO: 27507 - DNA, 3000 bp, Unknown
  misc_feature (1)..( 3000): 2750-1469P.txt file - cDNA_ID_2990483; gDNA_ID_1620317; Annot_ID_153211
ttaatctacttttgagtaaaaatatttaaagtttttagatattttgtgtattttcgagtagtttagatagatttgattataaaaattgatttttgggaacttcgggtactccgaatctaaatccgaaatatctgattcgaacccgatccaaatctgaaatcttgaaatatccgaacgggttctatacttttaaattcgaaaattcaaaaacacaaactatttgatcccaatccaaacggatatccaaacgaccagacctaatggttcataccgttggttaatataatgttttttttttcgagtttagaagtgaaagtcttcatatgaaatttacactgattaaccggcaaaatcaaaccgattaacatgaattaaatatcattttacttcgaatagttcggctcggtcaaaccataaataattacattgataaacaagattcttcaattaacttaaatgtctccacaaacaactatcatctggattatatggagatgttggatgccactaacttgtatttgctccgttaacgtgaattcatatccactacccccacaagtcaccacagctcacaataattcaaaatacaaattttacaactccaccatcgccacaagccattggaatatagaagagagaaaacgaatatagagaggtgttttgaaaattgtattgtaacttgtacgttatcctatctatcatctactccaattggtagctcaaaaattaatttgtgaaatttgtattttggattattgttaaaaggaaaattatgtagtcttcatgcatctagtttaatattaaacatatgatattcaatctcgaattgtagcattaatgttgtttagattagaatgtttggtagacaaagaaaaataggtttgttatcaaaaatatttattaacaaaataataataatctatgatttaataattataatttaacatgctttaactatataaagggtggttttgtgcaaacaaaactctcaaagttgccaatatttgtaattttactctccaccttaaaaaagtacagaatagttttataaaatctaaaataataattattatacccatttcgctattgtcaagtttataaaattttgagaaataatatatttaatcgaagtcctcgagacgaaaagttcaaatctacttttagaattttaaaaatccaatgtatgtgatcctgaaaacatttacaatgtatatatgtataaagactatactacgttttattttggacttatataattattctgtattttttaaagtggaaggtaaaattgtaagaattgacgactaacccttatgtaaagtatacaatatgtaatttaatcatatgatttctattttttgtattaataattatgatataaaaaattataatgaaaaccattacatgactagaaaatatgttacatctatgatttctatgattattagtatataaatataggttaacaaagaatattattatataaatctagatccacagattttgaagatgctattttgttagtcatattttaatgaaaatattagtaatatagtttcttaattataacaccaaaatgacataagcttcaatagtttattactttttcttcttttttcattataactatgttgtttgaaatttgtttaaaaataattatgtttaactatttttattgctaatttatgttattttcgtatatgctattatgtagttaataaagttatattcattttattaattatatttgtatagttagattcacttttgattcaaatatcaattatatttttttcatgtataaatctttttatctatatacccaagtttctaaaattttttaactatcatgaaatacttacatcaacaatatgatacaatggtatgcaattatgctacttatttggtttgaaagttatctaatttgattctaagcaaataatttcttgttccatgtattctctcctaatctagtattccaatcacatcatgataggctcatggctaaatattggattgacataatttgaataacaaatatataaactactcatttgctttaaaagttttcatatgaaaaaaaaaaatcataaattaaatagtcttttgagtcaacacttttaggtttctctctttgcatttgcatatattcatattagagaaaggatcgtatattgaactttttggtatatctaacatctcaaaagatcactatttaacaaaagatacatgtcaatattaatgttaccaatttatcataaacatacaaaaaaaccatatcatgtaaacaaaaaaatataataaaaagaaaagactaagctaaaattactaaactaaagaaggttaagtaacaaacagttaagttgtaatacacgaaaatttttagtcattatcaaataatgactattacaaaaataataaaaataagaaaactaaaatgagagtagtgtttgatacattaacatgatttttgtattttttcttggccaaatttcatatatgatttctcaaatgcgaactcagttgatttttttttttttactcataacttacttaatttcttatgaaaaaaaaaatatttgacaaacaagaaataaaatatcaaaactataagtttttgtttgttttttagaaaagaagtgaaagctccgtttgacaaccgccatttagagagaagcgcgacattttacttttcgactttcgtgtttctccagtggaattcttttcaatatacacgcgccgcttattatccctcacgcgccaccgtcgtgtaaaccataaaaaatctcaaatctaaactctttcattttcaacttttccttttcttcttcttcttctttatctttctcacttctcctttctccatcgttctatcattttctcctttccttcacctcaagatctcaaaaacacaaaaagagaaatcaatcaaaaccttagggttttctactaatttatctgtgtgatgttaagagaatcatcatcatcttcgtcgtcatg

SEQ ID NO: 27508 - DNA, 3000 bp, Unknown; identical to SEQ ID NO: 21280
  misc_feature (1)..( 3000): 2750-1469P.txt file - cDNA_ID_2990489; gDNA_ID_1621138; Annot_ID_172744

SEQ ID NO: 27509 - DNA, 3003 bp, Unknown; identical to SEQ ID NO: 21104
  misc_feature (1)..( 3003): 2750-1469P.txt file - cDNA_ID_2990489; gDNA_ID_1620713; Annot_ID_165530

SEQ ID NO: 27510 - DNA, 3003 bp, Unknown; identical to SEQ ID NO: 21104
  misc_feature (1)..( 3003): 2750-1469P.txt file - cDNA_ID_2990489; gDNA_ID_2926152; Annot_ID_198133

SEQ ID NO: 27511 - DNA, 3003 bp, Unknown
  misc_feature (1)..( 3003): 2750-1469P.txt file - cDNA_ID_2990493; gDNA_ID_1620478; Annot_ID_158237
atacagatagaagcggtatgtgtattataaaccgtaatcaaatagctttcttgttcatcagtttatacttggtaattcaaataagtatctggttccaacaggcttccgcaggactaaattcttcgcactgttatatattacacggtgattctactgttttcacttggtgtggcaatcttacttcctcggaagatcaagaacttatggaaagaatgttggatttgattaaggtaatctgttaattatatttgtttctacatttcggaacttacctctcatttctcacatatggtggaacctctgattcttggtttttctgttttgttcagccaaatgaacccactaaggcacaaaaggaaggctcagagtctgaacagttttgggaattattaggaggcaaatcagaatatccgagccaaaagatcaaaagggatggagagagtgatcctcatctcttttcttgcacatatacaaacggtaaaaccattttgcaacatccgttcccgggatttacacttcaacttttctcatttcaataactgttctgaacttttatttgatggtttttgctggtttggttgtccggtgatactctgtggatatcttaccagaaagtctgaaggtagagtatggatttcataatagtcataagccacattcatgttatgatcccacttctcaggttctaaaattgagactcttctttctttctttctttctattaccatataggctacagagatcttcaacttcactcaagatgatttgatgactgaagatatcttcatacttgattgtcacactgaggtctttgtctgggtgggacaacaagttgacccaaagaagaaacctcaagctttggacattggagaggtacttaaagatccattcaactagattaactaactaaactgaaaactgttcttataaacactctgctttattgtcttcatcaacagaactttcttaagcatgatttcctcctagagaatctagcaagtgaaacaccgatatacattgtaacagagggaaacgaacctccatttttcactcggttcttcacctgggactcttctaaatctggagttggacttctctctctcttcacatttgcttttgaaaatcacacctcatggagctaactcgtactaagcgataaagctgcttcttgcagatgcatggagactctttccagagaaagcttgcgatcctgacaaataaaggaaagccgcttctagatgtaaaagcttgtactcatttggttacatttgtctaaaatcaatctcgatctgtcttgatcttgtgtccttttgttgctcagaaacctaaaaggagagtccctgcatacagtagcaggtccaccgttccagacaaatcgcagcctcggtccagaagtatgacttttagtccagacagggcccgcgtgaggggacggtctccagctttcaacgcacttgcagcaaactttgagaaactaaatataagaaaccaatcaactccaccacctatggttagtccaatggtccggaagctttacccgaaatctcatgccccagacctctcgaagatagctcctaaatccgctatagctgcccgtacagcgctttttgaaaaacctactcctacttctcaagaaccacctactagccccagttcttcagaaggtctgtagcaaaaacaaagctccacttttgaaccccaaactatcaatttggtgaataaagttgagatcttgagcttacccttttttgatcattttttatttatgaagctacaaaccaagcagaagcaccaaaatcgacatcagagacaaacgaggaagaagcaatgagcagcatcaatgaagactcaaaagaagaagaagcagaagaagagagcagcctccctactttcccatatgaacgccttaaaaccgactcagaggatcctgtttcagatgtcgacctcactagaagagaggtcagattcttcaaaactctcaacacatattataacattcgtttattaagtttgtgtttcatgagttcagcttggtattttgcaggcatacttgacttcagtagagttcaaggagaagtttgagatgacaaagaatgagttctacaaactgcctaaatggaaacaaaacaagctcaaaatgtctgtcaatctcttctaaacaacactcttcttcaagaactcagttttcttgttcttcatcttaacccaaagacccgtaagtttttcgccttctactctggtttgtttgatcactttggtgcaatcttacacctactgataggcaaggagtatcgctagacctatttaacatagtcttattgatctttgtttctattgcttttgcagctcaagaaacacacaaagagggcatcatacatttattcctttgagctgcttacaaataaataatcaagcacataaattttttgaaaaatcatatattctctttatataattataacatattcaagtttctgttttgataattaggatttttttgtttgtttgttttatgatctcacataatatgtctggctgtaagattctttctttcctggccttgaaattctctaattgcttttatgttattgaagaaccaatgtaaattaaatcttatctttatcatgtgttatattattctatggtcgtcagtaatcttcactaatccataactttatttctcttgtcactttatgatataaactttttgtcatttaaaagtctgtcagaggtaaaaacaaaaacaaaaacaaaaaatcatagtaaaccaaaacaaaatctagaataaacaaaacggagtcgtaagagagaaccggttcgaacaaaaacggcaaaaaaaaaaaaaggggagcagcaacctttttccaattttgcgtgaagcagcagtgaagaaaaaaaggaaaaaaagtgagtgagagaagaagattagaaacgacgatatatacggagaatctcaggatttcgatcctgtttttgttttttctacttttggtactctccatg

SEQ ID NO: 27512 - DNA, 3003 bp, Unknown
  misc_feature (1)..( 3003): 2750-1469P.txt file - cDNA_ID_2990498; gDNA_ID_2214638; Annot_ID_136192
tctgaggtaatcttcttcctaaccttctcgtttttctgtttcttcgatttgttgaaccgagcatgaagcgtcttaattcttgtgaggtcttggatttgaagatcaacaactgaatgtgttgttctctttgtttcttgtttaatccttgattgaggcttcaccgattctctggtatgttccttggaaggatcatgttccttggaggagaaaccgcaatcgttgcttgttgaagaagaagcagaactgaaacgcatcgtatcttgggaattaaacatgttaagggatgaagagtaatgctcatgtttccctgaaagagttctacagtctccggaaaatggtgagacagagaacaaaatcaggccaagaagaaatatactgagtttggtcgacattaagctgctgctgagattactaatattaataaaaccattcaagaataaggaagaaaagaaaagagaagagagacctatgagtgattttgaattatagcttctaaggacaaaagaggagctaacataaaaaagagtagaggattttgtgaaagtcaatggaatcgaaaatattaaaataagttacaattcgatatctatttgactgagacagaaagccatatcataccagaaagcaagaaaaataaacaagaaaacattttaaaaaataagagaatattgtaggtggtgatggtcttctcttcagtgagactggttcaaacatgtggaatctttagtatttttgtttttctgattcgtagttttcgttgaaatgtgaagttacccgcttaacagtagttggtagtactacaaaagtaaaacttcaggtaagaattacttaatccaacttttactatgataaacaacctaatttccaatacgctctcctctacgtatttttatattcaactagattttgtggtgtatatatatatatatatatatataagctcttgagcaatagtcacataattagctcaaaagccagccacatctataacgggattttttaattaaattaaagatcaaatagatgatatactttaattgactgtagaagagtctttctaagtgtgtttgactgtgactaaccacatatgaacagttaagaaaattctttatttaaaataaataaattaaaagatagaggaaacaagaacggagaacctatgttggaaatgcccccaaatctttggaaaatttgtaagtagaaaagttattattttcctttaatttgcaacactattcttgtattgtaaacaaaaatacttgaatcaattattttgaaagaaatgatctaaagatagtgacataattcaatagatttttattttaatataccagtcaattttgttttcctaccattcatattacacaaatgaggaatttcatgaaaggctgcctttcagaatttctgtgtttatacgaatcaaatagtttgttaaaatctaaaatgattatttataaaatgaaatcaataaaagatcaagttcagaaaaatgtatgttgttttacttagatgtatttttgtaaataaagcaaaagattcgaatttgactttcagagttaatactgtttaagtgtaacgtattcctaactatattgtgatgaacaaactgattagcattcaatttgttataatcccaaccaaacatttcatttttaagtgtgcacgtaattccaatatattcccatgtctatctttcaaatctacttttcaattttcatattcaattaacaaaccctacatgtgtttttctttttcttttttgtcaaacgctacatgtgtttagtagattaatatttcatttcagttttttaaaatatgtagtgttatattataaccgatttgtttgacgtaaaaaatgtggtaaagttgtagccaaattgcttgtttttctaatgtgaagaaaacatcctgaatcactaataagacaactattgagaacaaatcggtaatcaatatcaaataataagtaatcgtatgttaaaagaataaaaaataacaaataaacaccattttcgtacgtcgttagtttttattaggtttggattaaactattaaaacaatatgattgttacgaatcatgcggttcacggggtcagacgaaatcataagtgtggaggtgcaactaccagaactacgtacattattaaaacctaccattatacatctcttctacatgtgccgtttcatttattacctcaccacccacttttctcactataaccaaaatttaatacccttccacactatttcttcgtttttttgtcttccacatatttcacttatttgtgttttctcacctgttatagcaaaattaccaccttgcattcatgtggcgtttcacttatatattactgacacgtctactaaaattcaacataatttgaatgtgctatgaagggttgtaaacaattagagtcaattttatcaatatgatgtatctaatttttatacttgactggttttaggtagatatctgttaatgagcgcactgagcatgcatgcattatatatcatacacccaccaacttctaattcaataaatacttccaactttgtccacttttttggttatttaatcaactttgtgtagagtttatatatgaaaccaaaaaaaaaaaaaaaaaaaatctcaaataaaagatatgaaagatcaaatatcttaaatctaatgttcctaataaaaataattgattcaccgaattcgaataacttaaaaagtacactgaaattaacccaattcatatacaaagaattcgtacatatatatctaaaattttagtttattaaatactacatgttatgtatataactgaatgaaattcctaggtaccatcgccgcatgctaaacaagttgttagcatggcaacacattatttgtcaccatcaatattatgcattattttgaccactcttgtctccatcgccggagcaaaaatcccggcgattatagtcttcggtgactcttccgtagattccggcaataataacttcatatcaacaatg

SEQ ID NO: 27513 - DNA, 3003 bp, Unknown
  misc_feature (1)..( 3003): 2750-1469P.txt file - cDNA_ID_2990498; gDNA_ID_2214638; Annot_ID_188217
tcaagaatcaatgagaagtgttttggtggtgtgcccacaagcacgtccatgaagtattcaccagaaccgagcgtcataccagactcaagtgttgctatcagcttccccggtgaaacctctggagctcccaccaaagaaatatctgaggtaatcttcttcctaaccttctcgtttttctgtttcttcgatttgttgaaccgagcatgaagcgtcttaattcttgtgaggtcttggatttgaagatcaacaactgaatgtgttgttctctttgtttcttgtttaatccttgattgaggcttcaccgattctctggtatgttccttggaaggatcatgttccttggaggagaaaccgcaatcgttgcttgttgaagaagaagcagaactgaaacgcatcgtatcttgggaattaaacatgttaagggatgaagagtaatgctcatgtttccctgaaagagttctacagtctccggaaaatggtgagacagagaacaaaatcaggccaagaagaaatatactgagtttggtcgacattaagctgctgctgagattactaatattaataaaaccattcaagaataaggaagaaaagaaaagagaagagagacctatgagtgattttgaattatagcttctaaggacaaaagaggagctaacataaaaaagagtagaggattttgtgaaagtcaatggaatcgaaaatattaaaataagttacaattcgatatctatttgactgagacagaaagccatatcataccagaaagcaagaaaaataaacaagaaaacattttaaaaaataagagaatattgtaggtggtgatggtcttctcttcagtgagactggttcaaacatgtggaatctttagtatttttgtttttctgattcgtagttttcgttgaaatgtgaagttacccgcttaacagtagttggtagtactacaaaagtaaaacttcaggtaagaattacttaatccaacttttactatgataaacaacctaatttccaatacgctctcctctacgtatttttatattcaactagattttgtggtgtatatatatatatatatatatataagctcttgagcaatagtcacataattagctcaaaagccagccacatctataacgggattttttaattaaattaaagatcaaatagatgatatactttaattgactgtagaagagtctttctaagtgtgtttgactgtgactaaccacatatgaacagttaagaaaattctttatttaaaataaataaattaaaagatagaggaaacaagaacggagaacctatgttggaaatgcccccaaatctttggaaaatttgtaagtagaaaagttattattttcctttaatttgcaacactattcttgtattgtaaacaaaaatacttgaatcaattattttgaaagaaatgatctaaagatagtgacataattcaatagatttttattttaatataccagtcaattttgttttcctaccattcatattacacaaatgaggaatttcatgaaaggctgcctttcagaatttctgtgtttatacgaatcaaatagtttgttaaaatctaaaatgattatttataaaatgaaatcaataaaagatcaagttcagaaaaatgtatgttgttttacttagatgtatttttgtaaataaagcaaaagattcgaatttgactttcagagttaatactgtttaagtgtaacgtattcctaactatattgtgatgaacaaactgattagcattcaatttgttataatcccaaccaaacatttcatttttaagtgtgcacgtaattccaatatattcccatgtctatctttcaaatctacttttcaattttcatattcaattaacaaaccctacatgtgtttttctttttcttttttgtcaaacgctacatgtgtttagtagattaatatttcatttcagttttttaaaatatgtagtgttatattataaccgatttgtttgacgtaaaaaatgtggtaaagttgtagccaaattgcttgtttttctaatgtgaagaaaacatcctgaatcactaataagacaactattgagaacaaatcggtaatcaatatcaaataataagtaatcgtatgttaaaagaataaaaaataacaaataaacaccattttcgtacgtcgttagtttttattaggtttggattaaactattaaaacaatatgattgttacgaatcatgcggttcacggggtcagacgaaatcataagtgtggaggtgcaactaccagaactacgtacattattaaaacctaccattatacatctcttctacatgtgccgtttcatttattacctcaccacccacttttctcactataaccaaaatttaatacccttccacactatttcttcgtttttttgtcttccacatatttcacttatttgtgttttctcacctgttatagcaaaattaccaccttgcattcatgtggcgtttcacttatatattactgacacgtctactaaaattcaacataatttgaatgtgctatgaagggttgtaaacaattagagtcaattttatcaatatgatgtatctaatttttatacttgactggttttaggtagatatctgttaatgagcgcactgagcatgcatgcattatatatcatacacccaccaacttctaattcaataaatacttccaactttgtccacttttttggttatttaatcaactttgtgtagagtttatatatgaaaccaaaaaaaaaaaaaaaaaaaatctcaaataaaagatatgaaagatcaaatatcttaaatctaatgttcctaataaaaataattgattcaccgaattcgaataacttaaaaagtacactgaaattaacccaattcatatacaaagaattcgtacatatatatctaaaattttagtttattaaatactacatgttatgtatataactgaatgaaattcctaggtaccatcgccgcatgctaaacaagttgttagcatg

SEQ ID NO: 27514 - DNA, 3000 bp, Unknown
  misc_feature (1)..( 3000): 2750-1469P.txt file - cDNA_ID_2990502; gDNA_ID_1971814; Annot_ID_175895
aaagtggtataaatgaactaacaagaacaaaaataacaagatttagtcgcttttactggtcactaataactacgaaacgaagtggaccttaaaaatctaaggtggttatgttagcgaggaaagtgactgatcttttctctttatgggcttaataaaaaaggcccaagatgcacatatttttctaatggattagtgttcttctcttagaaagcgacgtcgttttgttagactcaacttcacaattaatttttttttctttgactaccgtccctttaaacgacgacggttttgtttttgacagagatctgttacgacagttatgtctccgtcgacgacgacgattttcatcggtcccatcttagcggtggacgccgccgtatctcacgcgattcacacggcggcgaaaccattcctcccaccatttgtcctcctcctcctcgaaatctcagctgatttccgattctccttccccgtatccctttccttcctcctctcccctccattacgctctttcctcgtccctttcctcctcggcctcctcttcgatctaatcttcgtcggaatcgtaaaattaatcttccgtcgtgctcgtcccgcttacaatcacccttcaatgtccgccgctgtatcagctgatcactactcgttcccctcaggtcacgcttctcgcgttttcttcgttgctgcatctgttcacttcttctctgctgctgctgaagcttccatgactggtccaagctactccttcttagatggatggatcagagatcataacgatggcgatgtgaaggtagaagttgtggtcgttgtatggatctgggcaacagtgactgcaatttcaaggattcttttaggaagacattacgttctcgatgtagctgctggtgcttttttagggattgtagaagctctctttgctcttcgatttctgagatttgatgaaatgatctttgggaggtaacaaatgtatccaaattgttgttgtttttaacaaattgttctgtaatttttgtttcgattacattgagaagaagaattgtattgttcatgaatcaaagattgttccttttgtttcactacaaggctcttgttgtattacataatcgttagtgtgaataatgagagatcttattcacttgcatcgtaatcgagctaggcttgaaaactgaaaggctaaacctttcacattgatgtcattgttacctgaggttgagatcatctgtgagcaatctaattgtttgaaacagtgaacttgtggttgtggatgaatgtaatctactaatcttcttaccttactttgtagtttctagatcttttaccatgttctttctatgtaacttctctacgttgtttggagcttcgaaaagataaggaataaacactggcatgtggaatgttgggaatgagaccttgactgattgattagatgtttttcgttactgtgaacatgctatgcttgccaatatctgtggttcctctgcgtttgggaatatttcgtacctgtaactaggtttctatatctttgctctctttcttagtgtagccagcatgttctgtactatgttatagagtcctttgttgtcagagaagataaccgttgctgaaattgccagaatcaaatgattgattcatccaatgccttgaatatacttttgcaagcttggttacaggttttcactcgaatctctgtctctttatgttgcctttggtttgctaatctcatcttttttctaaggttatgcatctgctaggcataggtttatatttataggtattagtttcaacatgtaatccaagtacatcaaaggttcagtagtaacttagaatgtttaaggttgcaggagatgctgtgaaactggacccacatctgcaatttgtaagagactgtcttctacactcgtggagctaccttgttgagagatagtatttataaaacagctataattgaagcttgagtgagaaaggtccatgattgtttctttcttgatttatcttttttcaccttctacatatgaagttgtgtattattgtgattgattgattgtgacatcataaacttgctcaattatcgctgacagaatttgttatgtgtcagctgtttctacagcagttcctgcagaaaactctgttgattagactgagaaaacacagtcaagcttagatggccaaggaggtgtaaagtccctatctcaaaattcagttgacatgtccttctcacggtaataatctctcttttaaatgtttccatccaccatattgttcccggttcttggtgttaaccaaataaaccagataccagaaccaaccggttatgagtttgtgtcatgaattatgggattggtaagtgttgtcattgttggattggttcttaggcatcatttatgagaattatgggattggtatgtgttgttttctttggtgtaatgtatgctgcaaaagtagaggcacacagagtaggatggtacatgaagaacaatgcccaccattggaaaacttttatattatgagagttcacatggttatctcctgtagatcaaacaaggacataccttgtttcaaccttaatgatcacacttagttttctgtggctaccaaacaaaccctcttttcatatgttagtgtctcctcatcagaccctaccaccatttagagcacgaggcgtcgtagatttttgacgagagcaccagtttttgtgattagcaaaagagagtgattagagaacactaataaaatcacacagttataatataaaaaaagggattgagatttgagttgagaggtggtgatggaacttagtggcagtgtgaatcttctttaacatctgagagtggcagagagttgaaagaggtatggtatggtcatctctttgttaccatatttgaggtgaattattgttgtactagagtttcttatttttgccctaaattttgcaagtcctgtgactgtgacctaactcaggtaaaaagtggatctgaagctatagagagagagggtctgatg

SEQ ID NO: 27515 - DNA, 3000 bp, Unknown; identical to SEQ ID NO: 27514
  misc_feature (1)..( 3000): 2750-1469P.txt file - cDNA_ID_2990502; gDNA_ID_2926180; Annot_ID_200186

SEQ ID NO: 27516 - DNA, 3003 bp, Unknown
  misc_feature (1)..( 3003): 2750-1469P.txt file - cDNA_ID_2990508; gDNA_ID_1620511; Annot_ID_159124
agttatgaaatgataaatctcaaccaattccttgtttatcattctatatcagttgtgattcttcattggttttacgttatctcttgaacaaaaaaacatggcaaacgcagagaagacaagttcaggttccgacatagatgagaagaaaagaaaacgcaagttatcaaaccgcgaatctgcaaggaggtcgcgtttgaagaaacagaagttaatggaagacacgattcatgagatctccagtcttgaacgacgaatcaaagagaacagtgagagatgtcgagctgtaaaacagaggcttgactcggtcgaaacggagaacgcgggtcttagatcggagaagatttggctctcgagttacgttagcgatttagagaatatgattgctacgacgagtttaacgctgacgcagagtggtggtggcgattgtgtcgacgatcagaacgcaaacgcgggaatagcggttggagattgtagacgtacaccgtggaaattgagttgtggttctctacaaccaatggcgtcctttaagacatgagatttgtgtattagtgtgtgttttactttggtcattttatagtttttgtaatctttttatatcgaattgtttcttctcattactttctgaattctgatacaattgcatatcttattgttttcaacattttcatttaacgttatatgattttcggtggttaacccgaaagaaaaaaaaaaagtttttttggtaccttgcatgtaaatggcagaactgatgaagtaatcaaaattgaagcaaaaagtggggaagtagtatatgttctggtcataattgagtattaccgataaaaattgctttggtaacacgataacaattttttgtgtcaaatttttcaattttatgaataattcaaaataatatagggcttgaatggtatgtgtcttatttgcatgttcatgtgtttcaaaacgtgattttgccgagtgtataccattcacaataataaccacggagtgataaaccgtgaaaattaataagctattttccaatctatttcgcatgtgttaaatgtataactaactagtttagacaaagtcatttattaagtagctttttggcgtgttaagtttattccgttttgaattttgtcgtcctggtgattccgctattgtattgttcagttattcaactaatgtaccagtcaagtctttaccccttagtttagagttttctcgttttgatgggtttgattggtatgtgagatggatagctgaacaatagaataactaaataatggttagctgaatgaaatgaactaaagaaagtttatgtagaatgattataaattgctaaaaaaaactagttattgtagattaatcacgtttcttagttataatttttaatacgctagtgctatataatggaatcatttttttaaacatgaaaacgttaaaacttgataaaattttgaaaggtaaaaatagcggaatcacgttttaaaaacgtgaccacgtgaactggtatacggtaaaccattcaagcccatagattaatgaaaatgtgataattataagatttttctatctttttcaacatggagtattctaaacgcgtaggagtttaattgattttaagtgatttatttgtctataaatgttatatatatattcgatgtatagaacaatagatgaactatcataaaccataaaattcaatgatttcaaatatgatcgaggtgattttttagctctagtgatatgtctatcaatttcaagaaaaatcgcctccttaaactgaaacaattcgtagagcatatccgttctttgtaggagtatgaaatatgcaaccacaagtccacagcaatggtcaggaatgaaatatgcgaccacaagtccacagcaatggtcaggaaacctcacaacggcataagtttatcttcccgataattcttttcgctcagaaaatagaccatatgacaagtcacaaaacaaaaagtccgtaagacatagtcttagtatgataacgttctagatcaagcaagagaaagtgacataagtatgcatatattcgtgtagagctcatctatatatgcacaataaatctttatcactttacttcaatatatacgaacataagttttattgcacaattgattaaccactttcacttccataagaaagtataagccaaaaaaagagtcctcctctctttctatcattctctccaagtattcattagtcatgtttctttacatttatttatgtttgtgattaggaagaaattataacacgttctaacttttaaaatacttcaaaaacacattaaacaatgttttgatgaatgcgtgattcacaatcttcaaaaaatattgctgaatcttgaagacaaaacagcctattcattaacaccaccagcaaggacgacatgttaacgaccaaaattgcaataaaataaaacaaaagatgttacaaaaacaaatttgtaataaaaaaaaactgttaggtgtttctctttgtcaatgtaagatagagaaatcaattttgggtagaaagaagttgtgaactaactacctaccaataagccacatgactgtgagaagcttttgtttccctcccatttctctatattaatggtgcttcctctctaaaccattcctctctctttctctctaccaccatttattctctccttaatcactgactcgactcgggtcgtgaccaggtctgttctcttctaacaattcgtaactttttttcttagatctgtcttgattccgattcgtgtttttgataccaaagtttcgatatttacgaggagggttgcgtaaaaatcggaactttttttctttctcaatcccagattcgttaatggagtaatgagatctgtttgttagtgattatcgaattagtgtaatgttgcctaatttcgaattcgacattgagataggaacaatttatagcttgtggatctgatcattgtctctcttttgtttgttgtgattctcagttttttctatctgagctatg

SEQ ID NO: 27517 - DNA, 3003 bp, Unknown
  misc_feature (1)..( 3003): 2750-1469P.txt file - cDNA_ID_2990516; gDNA_ID_1620536; Annot_ID_159873
ttataacgaccaatcaccatcgtccatcgataaaagcttatgcttagaatatgaaaaccagaacaaatttaataaacgtaagaaaagaagataataggagcaatgacgagattcttgttaggttcattgatagtctctcatgcatttttcaataagtcttaagtttcaagacgtcatggaacctttttcgtaacccacacgagtttggtttctattttagacaatttcgtatatatatatatttttttttcataataatatttggccaagatattaaatccattccaatactaaaaatatcaagaaatttcggataacaacaaaaatccaaattataatcctagtattggatttccgattgatgcccagtttagatgagaaccaataagaagaagtaattcaaattattgtatttatcctcacaatcgtgaaatcattatttaaaatggacgggccaatagatttccatcgatcatgataaagcgtttaattatttcaacttttatcctaaaaaaaaacaatagaaatattttatttcatcttatcctttctaaggtgggtggttttgaaatgttatcacacacacatcactgttctacgaaaataatatataatatatttattgagttttacaaatatgtatatctatataatatattgtttgtttattattatttacaattgtaacaaacaaaaaatatcttatcatctataatatataatttattaaattataattctatagtatcagtagctagacaagagaacaacattcgtgctatatgaaatcattagaaaatacacatagcattttgttcctaaaataattaaacatgtaatcaaaatttaaatagttgtttggatttatgttttcaaagtgaaaatagaccaattaacattcaaaagctggttgatgctatttttaacgtatacttaacattaaaatatttgttttagttttgccactctcgataattatccctgtcataggatgaggcccacctgttaggtacatgggcccactgggacccaagatttcttatctccgaacttaacgccgtttacacatttccttccaatatacacacaccgaactagatgccgtcaatccaacgccgtttatggtttatcctcccctagacgttaagattttgacggtttgtttttattatcctacaaaacataactgaaaaagtgtaaaacagagactcatttgacgttagattctgcaagtatctctaccgtccgattggagcaagtgatcagaaatattattactaatcaaaaattgatgaacatgattttgagggcaattttccttaagtaaaaaaatcataaagagacgataatgatgtacaaaattatctaaaactgagtataattatataagctatagattaaggtattaagaaaagaaaaaaaaaggtagatccacctgccacgtgacagaatgtcgtatagttatagtttacagattatctccactaacctaaatattaatttatatatatagaatccatgactatagtctatagttgaacttttagatttaatactatgaaaccaaactcaactcttttaaatacttgaaaatagataattttaaaattaatgagtaaagatatattcttggtaaaaaaattagtgtgtaattataacattccatataaaaaatcttagatttcttcaaagataagaactaggaaaatcaaagtaatttttgtaaattgtttactaaaactgaataagaaaatgaaagttgcatatatttttttcaagaatctgcaagtaaataaagtgtaactttaatgagatgtaattttggtttgacatggaatattctgattgggtagattcaggagtcatgtgatgatacatctatgccacgtggtaagatctgagggattacaagcaatgtaaaagcgtggcgaagaacctggtctaaaaagatgaaggtgtcgaccgataatagccggtgaagagaaagagtataaccggtaggaccggtggggaaaaggtcaatataggcttaaaaagggtttaagcaaaaaatgtggtcgtctttcttaagggtttttgtttttgtggcgtttcacagagagagaaagaaataggagattgtttttgcttgtggtgagagaagatcgcatcgtgtgggtagcgtttcaaacaagtaaaataataaaaagaataaaaagtttccgtcactttctcgaggaagaaggggttttggtgtgagtcctttctttgcgtttgtcttttcattttccgatctcgtaattgtcgtgttattcgccggaaaagttaaagattcagatttaaaggtgagagattttacagtcattttttttttagtcatcctgattctgtctttgaatttcataaaaccaaggagattttcgttaccttggtctgaaaatctctgggtaaatcccaattttacgtttttttaaaaaaaattcgtcgatttttatctttcatcgctttattcttcgatctgtaaaatccgatctgagatttagaacccttttgaacacccgtgatctggtggtcctttgatcttgagatcgaagtttttcgtccatacgattattttcttaaatttttttttatggtttagggttttcctgtggtgaaatatttggaacgacggtttgactctcaatttcagatctcaaagttgtttagggttttagggtggtttaagcttttttcaatgggctttgacccaaaaccttcaaaatcattcctttttttgcttcatgcattatttccagagacaaaacccttttattctgtttttttttttaaatttaaaaccattggctattttatctcgttttcttttgatttcaatgtctctttctaatttgatttctcaattttatctacaggttgggaattacattcacagaatttcgttgattggtgtgataataagccattgatcaacaatcttcttttgtggcaatcacataatcgtgttatgcattctgagaaatg

SEQ ID NO: 27518 - DNA, 3000 bp, Unknown
  misc_feature (1)..( 3000): 2750-1469P.txt file - cDNA_ID_2990520; gDNA_ID_2926264; Annot_ID_143282
tgcagctagtactcaccaagtaaagaagatgaagaagggactttggtctcctgaggaagactcaaagctgatgcaatacatgttaagcaatggacaaggatgttggagtgatgttgcgaaaaacgcaggacttcaaagatgtggcaaaagctgccgtcttcgttggatcaactatcttcgtcctgacctcaagcgtggcgctttctctcctcaagaagaggatctcatcattcgctttcattccatcctcggcaacaggtttacatttttaccatcattttggttttgacataataacaacaactaagagatagaataaaatatggaaactagtggccggaagataaatataaatgttctggcaaactagcttttgtctggtgagtcttgtttttaaacttgtgtagcttaatttgttttcggttaatgggtacaaagttaaagcatagaaaagccagtcaactgattttaaaaaaaaagtccaccctaaaacgaccaaattgtcaaattagatcttgataacgttttcaccatattttatttgattttttttttctaccaaataaataagaagtgcagagctatctatttagaggtataatatctatgtttgttttaaggacgagttttcaattatactattacattaatcagtaaaaagtaatactatatatataagatacgttaacatcgtaaaatgtataatcaaacttacgtggaaggataaagtttggtcgagttttcattggtacgattagtaactgtttaaattcaaagggaagaatgattgtgtacgaagaaaattgacccaaaagaaagttgaattagaataatagtagtaagaatggaaatagacgcataaaaccaaaataggtatgagtacattcacatgtaattatgtgagtggtcaaagttcgttgatcgtgggttttaagacttagagtgcgtcttatgatcttatctaacaacaaacacttattttagtgaaagcggcttttgtcactttacacaccttttcttctcttccttagggttttacttcaactttcatctttgtaattatatatttattagttcctttttttgtcactttctccagaaatatacgttctagtgttttttacgcaggacatgtttcctctctatttatatatatatatatatatatatatatatatatatatatatatatagattcaattcaaaacacgcagtgtgtataatgtcattttattgcttaatatgattgtgcaattttataattgttgatatattgcctctttttcacgtactcaaacataaaaaacatgaagaacggatcactctctaattcccatgcaaaccatgcactggtatacattttacataacatcatctcattaaactattctactctcttattcttcgatttcataggtggtctcagattgcagcacgattgcctggtcggaccgataacgagatcaagaatttctggaactcaacaataaagaaaaggctaaagaagatgtccgatacctccaacttaatcaacaactcatcctcatcacccaacacagcaagcgattcctcttctaattccgcatcttctttggatattaaagacattataggaagcttcatgtccttacaagaacaaggcttcgtcaacccttccttgacccacatacaaaccaacaatccatttccaacgggaaacatgatcagccacccgtgcaatgacgattttaccccttatgtagatggtatctatggagtaaacgcaggggtacaaggggaactctacttcccacctttggaatgtgaagaaggtgattggtacaatgcaaatataaacaaccacttagacgagttgaacactaatggatccggaaacgcacctgagggtatgagaccagtggaagaattttgggaccttgaccagttgatgaacactgaggttccttcgttttacttcaacttcaaacaaagcatatgaatatttttacgtcatcttattcttttttctattgcggtttatactcaagattcttagccacacacacataaatgcaaatatatatacattgttagagagtattttgtatttcgaataatcttttcgtactagggcttgagccttgaggtgccatgtaatgattagtcaatgtaaaacatatatcctataataaataaataaaagaaataataagcacatacattctttaatataacaggggcaaacacttgaagaattttgtaatcaagtagcaatggagaagattgaactaattaaatgaaagtttttctgatgttatatctttggataaaactgaacattttgttttattgaatgtactttaaaacatttggtaactttcttagacattcacattagaaagtatcctcttacataaaagaatcatgtattcaatatttgatgtcacaccttactctaaacaaacaaatcaaaactatgaaccatataacactcaaagaaaaaaaaacgagaggccgcttaagggtttacactagatttaattccaagcgaagccatctcggcccatcttggacaatgtaatgaaagctactattctattgccagttaatctttcattggacgatccactagtaaacgcatagtttaagatctttcaaaaccaaaaaacaaagctaataaatcaatagaaaatttgttgagtgaaggattttgctttgtatgtttcgtcgatctaaaaagaccaaacccaaacccaaaatggcttttcgtaaatatttcagccaataggatgaggtgactgacccaccaaagacggagatctctatttctcacctcacgatctcatctcatcatcactctctctcactcttgtccgtatattccttttcttaatctcaccgtccgattccaatccaacggtcaacatttatccaactctctctttcctcttcttactcatttccttcttcacttccctctcctcttcacacctctctctcgccgacgacgctacaaccatg

SEQ ID NO: 27519 - DNA, 3000 bp, Unknown; identical to SEQ ID NO: 27518
  misc_feature (1)..( 3000): 2750-1469P.txt file - cDNA_ID_2990520; gDNA_ID_2926264; Annot_ID_204856

SEQ ID NO: 27520 - DNA, 3000 bp, Unknown; identical to SEQ ID NO: 9038
  misc_feature (1)..( 3000): 2750-1469P.txt file - cDNA_ID_2990544; gDNA_ID_1971974; Annot_ID_58699

SEQ ID NO: 27521 - DNA, 3003 bp, Unknown
  misc_feature (1)..( 3003): 2750-1469P.txt file - cDNA_ID_2990548; gDNA_ID_1620302; Annot_ID_152653
atgtgacaagagttaatcgtatcacaatgtctcaaatcgtgtaataaatagatcaattcagtgagatcagagtgtgttttttctttcgatatctccaatattttttagtttacctcatgaagaaataagacaaaataaaataacattaaggtgtcgtcatatgattggttcagataaatctgacgtggacatcattggttattaaaaatgattataaatctctttgtcttaatattttctcaccgtcgagaaaacaaaacacaagttgcagactttatccaaatttagggttttctctttttttcttacttagttatcatcagatcttcaaaaccccaaaatttgcaaatcaggtaataactttctccgtatgtatctcttcgatcaccgattgtctgtttctttgtttgcttttctcgatccgttattgaatttttgagttcgtcgttaaattttgattacatcaatttttcttttcgattcgattcagagagattgaattgcaaattatgtgccagatcttcgtgttctgtatctgattccggatcttggttattagttttttttttgttgttggaatgaattcaacaacgatgattttgatttggtcaattgattttttaatgctatagttttaaccttataggaatgtaattgaactggatcagctttacttgaattgtttggatctagattattcagacaacatctttttaactaaattgaaacatatttgtgtttgtgttcttgatgatcatgtgaatttggtagcataattttcttgttgagatgatttctgagatgggtttttgtagtttaattttcttactcgatgaaccatctcgtgcaccttgcaaaatcttttgttctatatctcattgttcgatatcaaactaatgaggttaacgttttttggtgagacgaccagttatgtaacatgttgttaactatcttcatgtttgaatcgattttgattggatgttttcatgttctatcatattctgcggttttgaatcttctgaattctaacgtgaggttatccttcttgtgcagatctcagcttcccggttagtactaccctcaaatcaactaagtttcatgtctgaacttgactcccaggttcccactgcctttggtatgtttctactctaccaaaacttgagattgtattagtcactgatcttcttctacttgttttagatacttgaacatgttatcatttgtaaatacatgttaatcaaagcatcattttttgtttgattatgctgtttatcttacatgggaatctgtttatctctctcaatttgctgttgcttgtttcagatccgtttgctgatgcgaatgttgaggactcaggtgccggaacaaaagaatacgttcatatccgtgtccagcagcgaaatggtaggaaaagcttgacaaccgtccagggcctgaagaaagagtacagctataccaagatacttaaggacctcaagaaagagttttgctgcaacggcactgtggttcaggattcagaactcggacaggtaggttttatcaaaacactctattgatccatgtagtggaaagtggatgataatatttctgtcgttagtgcctgcttgaacaaaccagaatgatttggcctcttatctgaacatttgagcttctctgttttagttttgtttatggtttgtgttgatttgtaggttatacagcttcaaggtgaccaacgtaagaacgtctccacattccttgtccaggtaaatatcaataactctacgagtctctttactgctaaaacatacaaactgtgtaagatgattgtctgatctcactgtttctctgtaatcacaggctggtttggtgaagaaggataacatcaagatccatggtttctaagctatctagtggatcatattattaataaaaccatatctttttctttcatctcttgttgcgaatttcgggtttgattcatcaaaatcgtcttcttcctagtgttcttcttctgtttggtattcgaattttaatggcttatgttcaccatacttcttcccctgttttcgtgttactctgtttcacatcttacttatcttataatatcagtttgttaagataattctgctctaacttgttataatttttctctacaatggttcatagttttaaaattatataaggaccaaccggaagtttatacggtcgatactttccaagtataccaaattgcaggttttagtttggaccacaaaaaagttcaatgatcaaaaaggctgatgtatcttctcactagtaataataattcataagcacacaaataatgataaatgaactgtctctgtcactagtaaagtccaaatgccgtctctatcgtacaaagatatttcaccttcttgttgttcgtgtcaccacacactcactgcaactggctacagatgttcccagataaaagcttcgagatatttttttatacatttattttgatccatatcacaatattaattgcaaagttttttcccttttcttcaagaaatagagcaatccgattcagtcaattctttgaagttataacagtaatcaattcgccattaattttatacatttaatcaatgtataatataagtatttttctttcataaatgggggaaaaaaatagagatagtttttgaccaaaaaaaaaataaaaaaaaatagacatagtcattggagatggttttactaaatttgggcttgttcaagagaagtgtcttttcttcattcaatcagaaccgtgaagaaaggagatcgttactttccattgatggctaaaaattaaaataatcacgataaatattaataatacaaaaaacaattaaaataacaaaaaaagatcaaaaattctctaacccttcattccttatctctgacgtggccatcaatcttcagattttcttcttcttctaatttaaatactcaacaaccactcttcacttcaccatcagcatcactaaactcgaaccctaaagaaaaacaaaaatg

SEQ ID NO: 27522 - DNA, 292 bp, Unknown; identical to SEQ ID NO: 41
  misc_feature (1)..( 292): 2750-1469P.txt file - cDNA_ID_2990552; gDNA_ID_1526; Annot_ID_145143

SEQ ID NO: 27523 - DNA, 3000 bp, Unknown; identical to SEQ ID NO: 4654
  misc_feature (1)..( 3000): 2750-1469P.txt file - cDNA_ID_2990556; gDNA_ID_1620720; Annot_ID_49184

SEQ ID NO: 27524 - DNA, 3000 bp, Unknown; identical to SEQ ID NO: 4654
  misc_feature (1)..( 3000): 2750-1469P.txt file - cDNA_ID_2990556; gDNA_ID_1620720; Annot_ID_165789

SEQ ID NO: 27525 - DNA, 3000 bp, Unknown; identical to SEQ ID NO: 4654
  misc_feature (1)..( 3000): 2750-1469P.txt file - cDNA_ID_2990556; gDNA_ID_2926214; Annot_ID_142127

SEQ ID NO: 27526 - DNA, 3000 bp, Unknown; identical to SEQ ID NO: 4654
  misc_feature (1)..( 3000): 2750-1469P.txt file - cDNA_ID_2990556; gDNA_ID_2926214; Annot_ID_202842

SEQ ID NO: 27527 - DNA, 3003 bp, Unknown
  misc_feature (1)..( 3003): 2750-1469P.txt file - cDNA_ID_2990560; gDNA_ID_1620350; Annot_ID_154284
attcggataatttaggtgttattaagatttgtttttaaagatgaggttaatacagtttcaaactttcaatgtaatagttcaattaaccaaatagaaaaatatacaaacttaatgtaacaaaacgtagtacgttttgagattttttaagctaacgcattagatgtttagaaattaataatatgtgtatacaatagttgtggaattaatctctcaatttcaaatctcttacatatattaattgtaaacatattattttaaagaaaccttattcttacttattataaacgaaattgtcatgacgttatcctataggagaaattttttaactagtttaaataactaccaattcttactagaatattaggaattagtctggactacatccggttttatgttaaaaattgatgtttttgaaatagtttactaagtctttttatttgtttttacgttttttactatgcatagaaaaacgtcatgtgatgtattcttaacattttaatagtataaacttaaatataatattaaattttcacctttatctatctatgtttggtttttttcattgtaatttttttttctttctaatttgtacagattgacaagcctcaatgaacattttttattagtaagagattgtgaaaatcacataaaatactttcaaagtaacaaccacatgcactttcaaccttcatggttttgaactcacacaaaccatcaaaattacgattttgttactttaaaacttcaaatgacttttgtgttcgtggatcaacataaatcagaaaaatttcatcaacacaagtatttgttttccgttataaattaagatgtggttttaataagtaatttttgttttaataaaaaattaattttatttatttatttattagtaatatattttaaaattatggaaaattgaaaaattcagtattatgataaccaattatatattataatagttatggaaaattcaaatttaaaaatttaaaaattattactttctctttggtaatcgatcgctaacaataatattgtatgaagataaccaatcatatattacgtctaatgaatctatatgtgtttattatcttttttgtatcccctaaaataaaccttgaaatacctaagagattttattattttcaatatgcaagggaacatctgctaaaaaggagagacgaccgtgatctttctggtaatttatttgttggtttaaatgtgaaacaatatttttagaacttttattgtttctctttaagactatataactaacatgtcttgtgagcctatatgcaaaaaagtacacaaatgataccttagatatagaacataaaaatactccgacttaaaaataaacaaacaaagaaacttgattatctttgttttttttggagttgtaggctttgatatataacttcatctttactatcactatcatttttatccttttttggcttagtcaacaagaattagatataaaaatccgaaagtaatataatgagggatttaatgtaccttttcaaacatttttgttttttaatttttgttgagataaaatttattgtttaacaaaaactttaatttacaataataaatcaagagtgtgaaaagtttggtcaaaattataatggcgattgctaatttctttcatgaagattcactgttgaaagagatgtcttgtaattgtatttcttcactgaactaacaagataataatattattacaagagatcagcatctttagtttaagtatataacaaaatcataatattaagacttgtaactaaattaacgagattctaacacttgaactcaatggattttaatttttgcaatatgaattattttgaaattataagacatatagcatatatttagatgttatcttacgattttttgtagccaaaaaataagcaatagatagttggaaaaaagctcatataattctttgagtatttgcaattgagagattcattctccaactatcttgtgtgcacattaattctctaatttggtgtccaatcaacaaaaactagacttaaaaaattcaacgttagacaataaaattgaacgttaagtacttcgattacaaatagaataaatccaaagaattcctaaatctttttcctaaattgaaacacaattgaatcctaggcgattttttctcaaaataaagatctataaagttcaaatttgcatagtcttcatcgattttatagtgtgtaaatttataaactgagtaccaaagattcgtagggcgtgcgtattgtagaatgtgtaagcttccaaatcgaaagtccaagttaaatacgaaatagtagaaaccgaaggtgaagagaaagatagtggaatctgatgattatgatgctagtgttaaaagagataattgcctagttatcgtcttttttttttttttaggaaagacttgagaactttaggttttgtttttgtttctaatcaaatcacttaacgtcctaattaattatgcgttgatgtattttaaattttaaatttgttaattcaacaataaatggggatgtgtctttcatcaagtggttaagtccatttgaatccgtttttcctactaaagttgaattctattaaatcacgttactttgcatagtagaaattaattataaatcgaccttctcaaagtaaatatgtcaaaagaaaaaagaattcaacaataagtttgagaattaatatatacacatgttagttatggaattaatctttgaatccgaacataataacaattatgtctccctaaaaattgaaaaattcgggacgaacggtacgggcctaactgggctctaatagacgggccgggccgtttgtacatctatttaccgtttagtttatagcattttctactgtataaagtaaacggcccaaattacaacccggattcaaacccgtacccgatccgagttacaattgccgcctcactgatctctttcttcggccaaatttctgaattctctaatctctctgcaaccaatg

SEQ ID NO: 27528 - DNA, 3003 bp, Unknown
  misc_feature (1)..( 3003): 2750-1469P.txt file - cDNA_ID_2990564; gDNA_ID_2926270; Annot_ID_143404
tctaagaaaagagtaataaatatctttgcacatatactagaaaccaagattgaagtagtagatatttttaaatttataaactccaaatactaacactaactaattttatactgattttaatatctttgcacatatactagaaaccaagattgaagttgcccacaaaatttagtttgtgagaggcccaaggagatgagagaaaatgcgattatcttaaagtgctagtttcacaaagagccatggcaaaggagggcttagggacttgggacttatgaattgagatagttctaacttgtaaggctactatatctgcctaaactgattataggttttaggtatgtatgatcaacctgtaggctgtagcctgtggaccagccccgtcctatcccgcctgctgatcagtttttccattttgcaacttcgaaaaccagtctggcccttttgtacccaaaccccaccacatctggtctagtaaactgtaaacccaatgaatccgtcattttcctatgtagtttctagattaaccaagcactgtccccatcgttcatataccaaaaaccaggatagatcttgaacactcaaaccagagagccgggttcaaactgggcagcttgttcgtcactggcccatcacacgattcacaccatccctgcctgtgaaatttcaaagacgaataatctctctacgtgaagataagagccttgttgagtcatagccaagaaggcacaagagactagacaatagacggttcattcatgaatcagtgaaacgatacagaagaataaatatttcatttctcacacattctatagggttattctggatcttagtttttttccagtacatgcaacagaacgactcaacttcacaagcaatattaatcacaagagaaaagaatgcatcttatcatgctgggagtgcgaaactaggttgcttccactgtggcggatccatcaccaggcagggatctgatttctcaaagtcagcaacctgtaaacaaatcaatcatatgaatgaaacaatcttccatacagagaaaaaaaaaacgcacacgagtagcaggcatgaagaagacatataaaagtaccttgttcccacactgagggcaatggtgctgtttgttccagaggcaatccattgaagggcagagaaagcagaaaccaagcataaacggcatcatgcaagcaacaacagcagctacaccaggtttcgatctgtttcacatccataaaaaaaaatatatatcacaaacaaagaagatgtaaaccacaggttgttacaatgaatattttcacataaaaccacaggttatcacaaaggaatagtacagtctcatgctcttaaaattgtttcggtagaatgaaaaatgtaagccctaaacatgaatgccgagaaacgagaaaacgtaaagcagactaacttcattaaaaccaatcaccgccagtatcaaaatagaagagatactgaagtgaagcaccatctaaataactccactactaaggaaaagatgttgttaccaacagaaagagtcacaaagcaggtagctttatctttgcagcttaagtatatttgttgagaaagcttaacaataacaggctggatcaatggagttctttcagccttccttttaagtgatttaagttttataacagcttgttcatatagaagtatcaaacattctatagctaatgaaacacaccaatcaaaatgaacaagtttgagaatcctgaaaccaaaaatccaatactcaaaaccttaaaccactggcaatgattagaggcgctaatttttctactatattgcttccaagtatgagatcaattgacatggatccgaaattgccgattgcacatttcctcgatgatttcttgtaatcgagtcatagaacgattcgcgaacaataaactctaaaatcgtataagtgaatatacctgagattggtgagaccagtgttgccgcaataaaggcaattgaaaggagcaggagtgtctcgataaatcgtttgctgaatcggagcacccaacggatcaccatagatagcattcggcggcacaattccggcctgatacggattctgccccgcgtaatatggaactccgatcaccgttgttccctctttcgccatctcctttgtttttagtttttacggtcaaactcaacgatttcgaagataaagcaaatcaatcacaacgagagaaacagacgaagctgattcgaagagtatttatttaattccctttccgctatgaaaattcccagggaaattacgcggaagacgatggagattcaaggaaagttccaaatctctgacgattacgcgtgtgtacttaatttgagattaatcgcaattttgatttcaacgattctttgattctttctttcctctagaagatagagactccacacttaatgggccttttgtttataaacttaaatacttaatacagatattgggctcaaaaggcctaataattgtcttagacctgttcgttctagctttcgtctaaattgcaaggttcgtttttaaaagtgaagtttgagtttgacggtaacaaacaagcgatggactacaaaagaagaacgtgttggactacaaaagaagaacgtgttgtttaggcctctttgccgacatagcagagagtccatgtcacaatcaccttatttattatcttcttcattactgtaattacaagaagattcagcaaaatgtaatcattgaatgacacagagacttttctaaaatcttgtatttatcaagaacattctaaaaccattatgtgttcttatcttattggttaaggattaaactaaatgtcaaaattcagcctaaaatagtccaactcttaatcccaaaggtaacatcatcaaaaccgcgttttatatatgtataatccaatcttataaattaaaaaaccaagttcaacacaatccatcacatccatttcaatagaagacgaagaacgtttcagaatcatcaaccaaattcagaaaatttcagccatg

SEQ ID NO: 27529 - DNA, 3003 bp, Unknown; identical to SEQ ID NO: 27528
  misc_feature (1)..( 3003): 2750-1469P.txt file - cDNA_ID_2990564; gDNA_ID_2926270; Annot_ID_205089

SEQ ID NO: 27530 - DNA, 3003 bp, Unknown
  misc_feature (1)..( 3003): 2750-1469P.txt file - cDNA_ID_2990568; gDNA_ID_2926227; Annot_ID_142558
cctgcaaatcacttgacaaatccttcacgttgtcttctgacagcttcttctcctgcaaaaatgaagcttcgacttttaacgaataagatcacaaggaatggccaacaagaaaaaaataaaactaaaatagggttggcaccttctcgagtttatcataagatttcaaggcatctctcctaatgttcctcagtgcaacctataagaatccaaatacgaaaaaagaagggctgaaataaaggaacatgaagttttagcacatccttatgcaccctaaaagtaacaaacttttgtggaaaatcccaaatacttttaagtcacactataggcaaacactactactgaccttcccttcttcagactgtttagcaacaacctttgatagttcctgcagtggtacaattaaaaggtaatacggcagtttagaaaatgcacattgcaaaaaaaatcaactgacagagattatatgccaggaagagatacctttcttctgtcagatgtgaggggaggcaaggacagtcgaataacatctccatcgttattaggggtcacaccaagatcagaattcacaatggctttctctatagccttcaagctgaaagcattggaatgtatcatgaaccgagcaagagaaagcagacatgaaaactcttgtacagaaaaccattagcgcaccattggtcatgtacctggatttgtcatatggttgcagcaaaagagaacttccatccggagtactgatttgggctatgcttttcaaacttactggacttccatagtattccacctgagaacccaaaagatcaaaacatcaacaagttatacatatgaaaccatatttggtagctgtatatcttaatacctcaatcttgtcaagcatcgctgcattggatctcccagtccttatggagttgaaactcgtccgaagcgtttcaatagtcttctccatctttgatttctggattgcacaaaccaaaaaacaagaatcacatccaaatcgtttccactaaacagtaaccaaaaaagatataaagaacgtacaacatcagtctcaatagcagacttctctgcttctatttcttcaatagtagcagaccttatcaccaatctgtggaattttccaaacaaagaacatccggattagagacattcagcaaaccctaaaactcccaaatcatgagtggaacctgcctcttctgtagagagcgcttgacaacggggccaccggagagattgacgccggcaccgagcggaagcttgtctgtcttgaacgaacacgcaattaagcgtgtagagggagatatcgccgaagagattatcctcaaacacgaatctatccaagggtattaaagcaacaacgatttggagccaaatggattatagaggacagtgaagaaacaaaattcgaacctgggagagagaggagaggcttggagtagttggctctgaatcgaagaaccggtgtcgtgggagcagtggaagagaaagaagccgccatggcagtagccgtagaagtgaagtgactagactagaaaagacctttcgttggttcgtctacgaaaattgaaagggagggagacgaagcagaccgaattgttcgggataagaaggaaagcttgctctgtttggatggacagctaactataatcccttcagatatatcttttctgtgggccttaatgggccgtaatatcccatttgctatttacatggtagcccatattgaaatgggtttgagccaacaaaatttgtattgggtcgaagaaggtacggtgatcaatggtctgatttgtaccagaagaaaagtaaaactaaaaggtttaaattctaacatatttatgtcatggtccaaatcaaagggtaaattgtcaaagggtattcaaaaatatatattaaatgaaatggtgcattgatatcatcattcataaactatttatatacttttgccggttcgtcgtcgattccacgtccttcatttatgatggataggagatatataaagaagagttaattagcattaaataaaaagatactagtagattagtaagaagaggcaacaatgtgattagcgggagccgagccggtaaggcagccgaggttcgcgcttactccttgaccttcatactgacatgcctactcacacgtgcgagaacagtcctaccaccccatcaatgtttttttgtttagtaaaattctgattatactttgattttttttcctgtcaagtatactttgatttatgttcttttaattcgtgaattacttatatttatgtgtctagcaatagtttaaggcttttaaaaatagattaattatacatgtataatatacaagtttgggaaaaaaaataagaaaactatctcgtgtcgcattttttgtttagtagaacatataattttttttatcaagcaacaaatattagctgcccaaacaaaagaaaaaaatatgtcaaaaaaaaaggattattcacatcggctaattaaaaaataaaaattgacttgacgagatttagttatttgtgagataataatttgttaccaaaaattatagtatgccctttttcaatttgtgttaattatatttgtaattttcttcagagaaattacaccatttaaaagaagaagaaaaaacaaatactaatatcattgtaaaatatgtaaacgatgggaaataaatagaaaaagaaaacaaaacagtgcatcgtcgtcagtgggagtatataactaccaccacccactcaccattccggaattatctctgaatcactcataaaccctttcttcttccttgttcaaatccactcactcttggagagagacgactcaaacgcatagtctctcctctgtatttactcgttatcgtcactgtgagagagagagagagagcgcgcgcattcccccaattaaagcctctctgctccaaaccgtgatatactctttacgttgtttgtttttgcctttatccttccctagttgtgtataattttgttcttttcttatggagatg

SEQ ID NO: 27531 - DNA, 3003 bp, Unknown; identical to SEQ ID NO: 27530
  misc_feature (1)..( 3003): 2750-1469P.txt file - cDNA_ID_2990568; gDNA_ID_2926227; Annot_ID_203538

SEQ ID NO: 27532 - DNA, 3003 bp, Unknown
  misc_feature (1)..( 3003): 2750-1469P.txt file - cDNA_ID_2990578; gDNA_ID_1620424; Annot_ID_156665
acttaactacgtacgtacgttttagtaaaatacatgttttggttacataccaacgtatgaagtacgtcccacaatacgaaggcatgtggaaggagtgaacttgagattcttcaccagacacgactctattccatcaaatacgggcattgcaaatacctgtttacatcattatactacttatctctaccagtcttgcgaagtttattattcaaagagaatagttggcgttcaagaaaaaactggatttaccataatattggaatgctagaaatcagcttattcaaactaaataagaggttgtaaacgtgaggtgccagacccttgttgagagtgggattataggccaaatgcatcgaaaaccatctctactgtgatctctaaacatttgaccggaaaatgttcaggagtgacgatacaagtttaaaaacaaactgttgatatatacaagggtaactcatatttgaatttgattagattgattaaattattaaaaagagacgtacctataatgccttttttttgccaaaactttagttataataatgttctgaatttgtttttccctttaaagacattgaaatagcagtcttcaagaaaaggaatatccgtgtcgcatatttaagataacttatcatcattgtaaaaacaactttaattagatatgtatccaaataattgccgacaaattagaagaaaacaaaaggaacacgaaggacttgctttcatacactaactggtgtcactagtcgtcgaagactaacgctgtcgtaagaaaatcagttccacgtgttccgtacgctggatccgccaactgtttagatttttatttttcacgttattatataaagtcaaactctaattagagaacatgaaaccaaacttattataagaaagaaaaaaaaaacagaaacaagaacggtggaagagacaaagatgtgtagttccgattctcttcagcttcacaatgtcttcgtctatggtagctttcaagatcccgacgtcatcaacgtcatgcttgatcgtactcctgagatagtctccgcaacactcccgggcttgtacgtacctttctctgtttcttcttcgattgagttatttttctgtatagacttaagatttaatggccggttttggttttgttcatcagtcaaaggtttaggcttaaaggacgtttgtatccatgtattgttccttctgagaaaggagaagttcatggcaaggtttgattcttagatgattctttggttttaatttgtgtatgaaatatgggattttagggttttgatttgggaaatttggtgaattggtttgtgtaggtactaatgggagtaacaagtgatgagcttgagaatttagatgcggttgagggaaatgaatatgagagagtgaccgtcgggattgttagggaggtaaaagtttaaaggttgatgattataaattttggaacatgttggatgattataaattctgattttgcacatgcaggacaattcggagaagatggcagtgaaaacatatatgtggatcaacaaggctgatcctgatatgtttggagaatggaatttcgaggtttgatgatttaaacaatgtatttttagcttttgtgaactcattatgactggaaaaatggtacattgtttcgattcgcttcttaggaatggaaacggttgcacaagaagaaattcatagagactttcaagaaaatcatggaatgtaagaagaaacctcagggacagggaaatgatgatattagccatgtcctacgcgaagatcaataggataagactccatcgtcttggatggacttgtgtttgagtatgttctatatataaccacctttgttaaattatcaacaacaaaaaaccttcgtttttaaaaatctaaaataaataaaacgtagagagtgttgtattgatgtaagatttttgtttttgtataaatttaaaatttatttaacaaaaaaacggttttacaataaatacatcgttactgaaacaagtataaactgaataaaagagctaacgacaacaagtgctaaaccaatatcgtagtccgccttcgtagataggtgaacttgaagtaactaaaataaactaaaatacttaaccgattccgcatattcttatcgaccattttggcaagagagagggctggaatggatgactcgccatgccttcttccatttctctctttctaaagagctgaaacacatatctgaaaacaaacatatgaatttgcgtcaaggccgaatttgtagatagatcaaaatatcatgtggattatattattatatatatgttatacttgcaagtatttagagatttttgcatcttacttagcttgtgtgtgtttggtctatttgaagtatttgcagaaattctatcccacaattttgtttgtccgcctctatccaaaactgatatgcgttcaattattctgataaaaatttagatacatacgcaattaatcatgagtatttaaatccttaaaggttccaccatctaaatgactaaaaccaattagtaatcaataccaattgggttagtgggttttgggaaaatttaaagttttgtactcaagttggtgtgtctaattatttattatttactttatgaattagcataattaagcaaagaacaaagaatattttggtcaaatatataaaaagattaacatccatctgaaaaatcttttacctatagtttttgcaacttgaatatttacctcaatagataaaaactagagttatttttttttttttttgtcggcaaaaaactagagttatttatcaaagccaagttagcaaaataatctactatgatgacaaaaatttgtaactaaagaacataattccacgtcgttcaccgtttcgtgttcctacgtgttattcttttttttggtcacgttataaaacctcaaaaagctctagaggatcagagaaaataacataaccaatcccaagaagaaaaaaaaaacagagtagagattgataaaaaaaaaatg

SEQ ID NO: 27533 - DNA, 3003 bp, Unknown
  misc_feature (1)..( 3003): 2750-1469P.txt file - cDNA_ID_2990585; gDNA_ID_2926088; Annot_ID_196511
cgtaccatatatagtttttcacattttcttgggtaattttttttttgtaacggcttaggtaaaaaaattacatcatcttgctgttgtagcggtaattaaggataaatatatatttttattggactggatataggtaataggtccatgaattttctctaatgaggctagatatcatgattaattttaaaaccagcatttagctttctaatttttttgttcggatcctatcagtcgatgaaaatataacgtgatgtgttgaaattaggatgagctagcattgtgaaatataatccctaactacgaatatttgtattagtatagctctctttaactatgaatattagagcagttttgtggttgactgcagtaataaagatttattgacagagaagctcggatctaaatctacatgaccttcgtcgttatcttctctttctttgtggagctatattattttcttgttgttcttcatagttaatctgaacataagggaatacattaattaggatatatgataataaaattaaaacaaccacccgtacaagattttccttgacggccgtaagatccggaactagaaagtcaaactctgttgcagttcaaattccgtgtactttactcgccgcgcgcgcgtgacaaaaaaataactatgtgagtgggaaaggaataaactaatgaagaagaagagaaagcaaaagaaactcgaacgcggagaaattgttgttgtcgtcgcagttaacgggttttattttctctattgtcttaaattttcttgctcgttccattttcactttaattgctccacgcatctcaaatcaatgacaaaaaaaaaaaatgtaccagtgtgaatgtgtcataagatctctttaccaaacaaaaaaaatgtgtcataagatctaaaacattatacggatctaaataacatacaaaattcagatcgatgcatgcgcagatgccttgtaagcgtgttggttatattttgaggagtataactttggatatgaaaaatgttaactaaacttaaaaccgaaaaaaaatatgttaaactctcttcttcttttttttttttgacaaaatgttaaactctcttattcacaagttttctacaccagttcaatttgttttttttattcaataaaaaactacttcatcggggtatgtgttatcaagtatttcattgtagttgttaattggtctatgtgaaaatatataaatttgaaatctaattaacataatcacgacaaaataaatatgcttttaaaataaagaaaaataaatatgattgttagttatttacattttttaataccggccagtagtatatgctgcggctagctctttgccatatatgatacgtgccggtgcatctttgttttgcttgactactaattttatagttctgtgtttattcataactcgaatatttgtctctatataacagatgatagaaagcatggttttattcaaatgtaatcgattgcgttttactttaatgatgctttacatacacgatatctccctttttcgacacattatctcttcgattagaacaattattgtgtatgtttgcgtgttttgatgagtatcttatagtactacttatttgaaattaataacttatacaaacctttaaccaaacacattttttgttttatcaatattaataaagatttatagttccccaattccataaatatgaatacgacacatcaacgaaaattatgaaaaacagccatatatagtttgcaatgtcgaatctcgatatctccgatggtggtcacagctattgataaacaataattgaacaaatcatgatcatacttaataatataaatggccatttaataagctgttagaagttctatcaattaaatagctagatatttaaattaagcaatttagtaaattttccacaataaaacaagacgaagtttatgtaaagtcttaaacatgtatagttttaggtagagaatcgaagacaattttttttttttttcaaaagtttgcatgtgttcagtggttgagaacttgagataacgattggtttatctaacgaacacgctctttcatatcttacaattaacgtttcaatcagacaaaggaaaagttaaatagatgtgtagtaaaaaaaaaacatattttgtttgtagtctttgtcttgtaaaagtcttagaatttgtggtggctaaacttaacccgtgacactttgcaagtattgttgggccatttactacaacgtgcagcaaaacgcgtgaaaaatcacgtagcattaaaacaaagagccagacaatctggagattattatgaagattttttttttatctcgtaccgatttcagccaaaccaaaaaatcggattccataaaaccaatcagaaaaaggagatgtggcatttgaatttgttgcaaatgttttcactcaatatttattgaaaaagcaaaactccatattaaatcatactctaacatttttttttcctactatgaatgctactacaaatatggtggaaaactagttatttgttttctctagaaacttacactttattcgtctaaatttgcttgcaatagaactatactaatgaacattcaaatcacaaatgaccttttttactacaatcctaaaaaaatcttaaggtattcaattatttaaatgaacaataagaaaaagacacaaacacggtgggacccaaaaaggtctctcaaggtaggtcccacgagaataccctccattgctgagtgctttaaaaacagctgcaaagcatctacgttttagcatccgaacaaaaaaaaaaacaagttttcttctttttacactcaagaatataaattccctgttctccagatcttttctcaagaaaatttaaagctttaacttaagaaagcttgaacctttctcttccaaccacatcttccttctttttatcctctagctcaacttagaaagaatagaataaagtggcaaaaccgaaagtgaaccaacttgtagtaaattaatagttatg

SEQ ID NO: 27534 - DNA, 3003 bp, Unknown; identical to SEQ ID NO: 20828
  misc_feature (1)..( 3003): 2750-1469P.txt file - cDNA_ID_2990593; gDNA_ID_1620814; Annot_ID_169184

SEQ ID NO: 27535 - DNA, 3003 bp, Unknown
  misc_feature (1)..( 3003): 2750-1469P.txt file - cDNA_ID_2990596; gDNA_ID_1620771; Annot_ID_167527
atgaatgacaactcgaacgtaaaattacatcttttgcttttgtcaagtgtttacatcagtaatatccccaatttcaagcttatttttttttttcaattttaaaactaaaaaggttccaaattttttttatcgatgagtcatatttcatttgaacattccaaaagtaaagaaaagagttgaaaactttcctcagcctattacaattgcctttagctgttaatgagttttagagattcgattagttttaaccaacagttcctgaataattggattttactctcttgttgagtttaattattccaatatttcttcatggtgctgttttgctattgctggtgataaacagttgatctaccgacgatttgcattcgacggtggtttcttcaccagaaatcgatatctccgatggcgaaggatgacgatgggaatcttttttggctcatcttacacgtgtattattacgtgtctttggatgatctttcttgatgcaatcttcttctgtaaacggtgtattattgggctcttcttgagcttgcttttgttcgcaatctgtttatgtgtgttgggctgtaattggccttgtagcaaacggtttattgaataaagtccactattgagaaaaaaaaaaaaaaaaactgaaaagggttgtttttaggcattttttgtcggagaaaaatctgggaagaagcttcgtcctttgcgtgacagggaatctctccgttggggttttgtggctgcctacgatttctgcaagcaaaaccacagaactcaatctaattaattagccgagtcgactcaatccgagtttctacagccgcacgagggaatcatgaatcggctgagaggccgaggtacaccgattctgggttccgcactcgtgcctcagctgaagaaaaaagccctaaattcattggtcgccgtccaggattcatatctatccaccaaggtgatcgaagaatttcaattcataccggtttctgaagaattgggattagtaaatgttttttgcatcaggatttttgttaaaatgtcaatctataatctgcttataatgggtttcgtttaatctcttaggacttgttcgagaggcacagggtcgtgtttacagttggaacttctatagcatctgttgctacggcttggattggtatgttacaattccatattttttgcttactttatcttcaattagagaatctttacctcttaccacgtattttgatgtttaagtttctgaattggattgctttgaaaggcgagcaatggctattagtgaagtgattcagattttgggtgttgattggcttcaattcatgagtgtttcattgggatagctttagctctcaggcttgatctctaggggtgaaatccattctgtgataaatttgaggcctttttccggatcagactatagattacggtttagttgatttgatctgccataagtttccaagtgtttggagatcatcttggtcagaattctgtgatgatgttcaataactaatctgtccaaaacttccaataactgaagtttagtactttgagatctctacatgatattctaggtcttttgttattctgctgggacataaaacaagttagaaactgaatttcttgtgtgatactagtgaccgttggaagaggtatctcattggtcttttgtttatgtttgtactgagtcaaatgagttttatgaccgtgttctaccgaatggatgaatgattgtgcaggttactcattacgacattacaatgaaactagaattaatcagaggctggagtccattgagaatgcggttagtgtgtccctcatttgccaaagtttattgcacatagtattgcatatttgctttaaatttagctgctttgcatagttggattcatatagctgctcttcttgcaaatgacttggtgcttcctcttatgatgtctagttattgatcctctatcatgaacttacagcgtagttgtctgaatttagtcctctttccgttaataatatagatttttttgctaatacttacgtggttgactattttacactttaaaatattcagtgttttgtttttgtaccttaatgatccttagttgctctattgtctcagtctgtcacttgaaatgtttgtttttttggtcatgccagatgaaaaacacccaagagttagaacgaggagaactgaagaagctcgttgatccagtcggttccaggttcactacaacaattgccacagcgggaaccactttgatcctcgggtttgtttccggaaagactgttataggttgacaagttagatactgtgtgtcgggtttctcattaatagtttccgtctgtttttcttcaggtatgggttgggttggcgaggcgggatatggtatgcaaataggaagtttagaagggagcaaatgagattggccgggcagttaaaaccgagagaatggaagttactagggaggataaaacctcgagcttggccaacaacaaagtttctcagacgaccattcccaagacagaacaaaacaacagaaaatgctttgaaggcaccagaatgtggaggttgaaaaattgaagaacaatctaaagaagtagctgatcggaacataaaagtgcacatgggttttgtcttgaagccaaaggctcttctgtctttttattcctttatgaggaaattgagataacctaattcgaaaatcaaatagatttgtgttataaattgactctagtagtgtggactatgaaatgtgattcagctaatctttatatcgagatcaaaatttaaggattcctctgttttcgcacataaaaaagaaaaagaaaaaggattcctctgtttatgaacaagataaccaaaaaacatggccaagtagatgagaggagagtgtgctgacgtgtgacaatatcattggtgcgtacacgtaagtccacgtagacaatgtttttagttcgtgtcctaaagagtcacttttttgtgttttggtggagaagaaagagagggaagaaactatg

SEQ ID NO: 27536 - DNA, 3003 bp, Unknown
  misc_feature (1)..( 3003): 2750-1469P.txt file - cDNA_ID_2990616; gDNA_ID_1620304; Annot_ID_152771
aaaaacccagaaattaaaaatcagaaaagcttactcttaagttgttcttcttgttggtagaagcagatcgatcgacattagcgagacgatactcgtgcataatccaattcgttttaatccctttcggagcttttcctgcgtagaagacgagtgctttcttaatccctaacgtcttcggttttccgatcggtttatcagctccagtcgctttccaataaccggttccagctgcccggtttggtctcgacccgtttgggtatttccggtctctatgcgagaagaagtaccattctttctcaccgtacaacgccatttctggaaacaaaaattcgaattctcttcaaaatctcaaagtcaattcacaaaaccatatgtcaatcttgtcgtggactgaagttttacctggaagctcccatggattgaatttgtacaagtcaatctctgcgataaccggaacgttaatcggttctgacgcacatctccggcaaagatagaacttgacaagctcttcgtccgtcggatgaaatcggaatcccgccggcaaattcaactccgccttcatttttggaaaagtaccttgttgttttcttgtggataagattcgattttgagtttttataaaccttcgaatcggaggatctttgtggtttatctcaaagattgaaatcgaggagaagagagcaaagtccatggagcttttataaacgaaggggaggttcatgaaccacacgtgtgtagttttctttcggacacgtgtgataaaaaccaacctttttctttttcaacgttgaccgcgcagccagctgaggtttacacgtggcttggactaattggatgatcgacatacagagtatgtgatgatgtcattgcttccgtcagccgcacgaaccttttcgtggttgtaatctggtacttcacggtgtagcagcttgtgcacgatgttctctggctgatatttatattgtgacttgtaagtggactggtcagagtattactgtgagcttctccgcagcggatttcttctctgttcatgtaattgcatacgtcattgagaatagatgacttcatcttagtcacacgccggcttatatgtatacgtaaagtctgaaagatgcgataatcgaccagtttcgtggaccaaattttccacataaacgacagttactatttaaaatgaaatgtattatagtttgcttattcttttccctaatattttataaaatgttgtttagtaacaagtactaagaccatcttcattggtaatctttaagagtttctaagcacaaatccttatgaaaaaagtttaaaaataattcaaaaatgtgaaattaagcaaggtatgcaccttagcttaggtattctttggtttctaagaaacttatatgtggcagtttttcattgactggagaagaatacaaaacaaaacataaaatctttcacattttttttatatcttctgaagataaatttgaaaataaatctaattgcttttggtttcttttaattgaatagatagcaaaaatattatctgagtcaaatttaaatttaatcgttattccaattttttatttgtctttttatatgtttttatgtcatatatgtttatgatttaagaatttttaataattattatgctttatcaaatcgaaatacttatgatttttcattttaaaactaactttttttctttaaagaaacccacttaaggattccaccattggacaataaaaatagtaaagactcaacaaaatctctaaacttcaaaataatcaaaatttattcttaaaaaaattaaaggattccacattaggactccaccaatgggggtgctctaatgaatgtaagtaaactgatcttatatgttataatttatattggggtatgtttgacaactgtgacaattagaaaaatgggctttttgagaagaaaaagaatgtaaaactcaatggaagatataaaaatggctcccaaaatcataaaacatacgaaaaatatttatgtgtgtttagaaacatatatcatgtttaataaccaaaaaagaagaagaagaagatatttataaactagaaaagaaaaggtaatgcttagctagagcatcaagattgtaaaagcccatatggggcttaactataacttcccttttaaaggcccattttatctttacgtgaaggctgtgttgggtccaagtcttgtcttccaagttccagttgcaatgtcgtatacgcaaaacctcaacacctaggtttcaactttttcccaaattttgcttagacaagtgtatatgcaaaatgaagaactttaatcgaataacttttcttgtcaataatttttttttttttttttgctttaaggttttaattaacctatttaaaatacaatttgatatgttgaaatttaaaacatatattgtaaaaataaatttacaagaaatctttacaaaacaagattggaccattttgttgttttgaaaaatattcaacttgctcatttttagcattgacttgaacttattcaacataagtatcacttaatcactttactaattcaactgatcaaaacttcttttttggtgggatattcaactgatcaaaacagtaaaggttgattattagtttgccttagaagttgaagatcatatagatgctagtcaaattagaaggggcattttggtaattcagttgtagaatcgtaagacaaaggtgaaaagcataatgctattttcaggattatataacacatcaacagaggatccaaacttttcccaattattgcaagtcaatcgatttgtttatctatataaagctcccaaatctcaaatctcaaatctcaaattttttattaaacgcctacatatattactcacacttgttttcagatcataaagttttttcttggatttatatataatgcactaatacatacacacccacatgcttacacacatgttcgaactgtaatcagtaaaagaaacatcagagaggaagagaaggagaagaaaagatg

SEQ ID NO: 27537 - DNA, 3003 bp, Unknown
  misc_feature (1)..( 3003): 2750-1469P.txt file - cDNA_ID_2990620; gDNA_ID_1620414; Annot_ID_156378
gactgatcaactgctaagtaaagaaagcgtcacagggtgtttctagctagtcaaagacgatcccgacttgacatgttttagagattcttgggaattttcggagtttcttgacgatttcatcttttgctgaacaatactgcaaacgtagagctagacgtagagtgagtttcttcagggttgtggaattctctaggaagtactttactaacttcatccttgcaacatatactaagatgctgcttttgatatcgacaaactctagtgacgatagcaaacacttcggtacagatgaaaaattgatatgatagttcccattcaaaagcatcctcttagagttactattagattcctgaggataacaaagagagagacatataataaactcagtaaaaaatgataagcaaaactatatagctcgatagggttaaccaaaagcattaccatgatgagtgatttcaagttcgggcagctctcgagaaaggttggtaaaaattgcaaatcagatactccaagagtaacactcaagcgggacatgtaagaaaatttaggcaggtgagggagcggtattaacgccaagtatcggtacatgagctggaaacaaacagaaaagaatgtgattagtgatagaaacatgtccaagatctctgcattgacatataagataggtgtataccatgaaagctggtgaatgtattgtcatttccataacacttaaaatccctggaagaaatctgtcgatgctacttctcattgatgtaacgcttgtttcatcaaaatgccataaaccaaagaggatagaaagatctaacttgtcattagaacccaaattgtttactatgaagcttttcgatacattatcgttaatcctcaaagagcatagtagaggagcatcaatcacaactcccgaaagagcaacctcatggaggaaagaagagactcgttttaaactgaacctctttagtgactgagagtgcacccgaaagacttttctatccatcccataaatgataaccgttaagtcttccaagacagggcagcaagagataagtttcttgaaagtggattcattgggatacatattatcttctaaatgcatagtcttcatacaagggaaagagacaaacttggcatcgtatcttccttcaatctccgactaaaccctttggaacaatcctgtttcgatttctttctaccaatcatggtgttgatcattctctacgtagcgaaattgaaaaaataaatttcagagaaacaatcaaataaactatcaaacgaagacttgaagaagaagagatctcaccgtgattttggttcatagaggtcaatgaaggttactctttttttttaggggactatctccacaaccacgtagttttttctatgatagttaaggaattaacggcgtcgtttttgtgtagcttccctggtctcaactattgatagaaaacgatgtcgttttaatttgcaatcaatttgaaatttgtttttcttatcgtattcatttatttcgatagtctcttgggaatatgttattttactgtaaactttctagagtaaagatgagattgagagatctaaataaactttttaaaggggttttagatcttctgctcttataccatgacaagatatgaatatcgaatgaattggttgattattgatggacccttaggtctgtatttatacaagttaagaatcggtaaacctaaaccaaaaggaaatctaataaaagacaataatacatagtggaaagaagaaacccttactaaagtgagtctctttagtgattgagagtgcacctgaaagacttttctatccatcccataaatgataaccgttaaatcttccaagacagggcagcaagagataagttccttaaaagtggcttcattgggatacacgttatcttctaaatgcatagtcttcatacaagggaaagagaagatcctgcctttatccaaggacacctcaaagagtcttaaggaaaccagtgcctcacatttataaagattaaaatgaatcttatgaaactgaggcagaaactgaacatctagatgttggatcttacgcttagctgcagcatcaatccatgacttgagataaaagccatcttcttcattttcactaatagttaacttgagcttgtttatgcatagaaccctattggaatcgaaatacctatcacaaaaactcacaaaggtattgaaatcagagaaatctcgggaatccaattccaaactaggaaccaaaagccagagacttctccatcttgtggataaaacgcttgtcttaacaacatcctttgtaggaagataattaagtatttgacataacaaagattcatagaattggcttattctgtcttccttcaacctctgattcaacccttttgaacaagcctgttttgatttctttctcctcaccatgtctaattttttctctagataactttatctgcataactaaaattggaaaacacaagtttcagagagacagtttggttttgaattagatattcattcaagttcgacttaacctaacgtcccaatcaaaattctcagtctagtaatgtaaaagatttcaaatcaactaaggcttaaaacatacatggtgaccaaaagctataaaaagattcaggcttttggacctgtttctgatgggtaagaacaaaacgatatgtagaagaagaagaagaagaagaacttacggtgacttaggtaatacgaaagaggtcaatgaaggtttcttacatttttttttagaggaccagtacaatcataatgacgccgtttctagtaaataaacgccgtggtttcactgctctacgtaattggagtattgaaaaccacgtcgttttgatcagcggactagtctctcaagctattctaagaaacgaggtcgttttgattcgcggttggtctttctctctctctaaagcagaaaattcgtagaatcggagagatttgagaagagaacgaaggaagaagaagaagaggaacgatg

SEQ ID NO: 27538 - DNA, 3003 bp, Unknown
  misc_feature (1)..( 3003): 2750-1469P.txt file - cDNA_ID_2990640; gDNA_ID_1620647; Annot_ID_163278
tcaacgcagatcaagttttgcaatatgaaaaaaaaattataatgtttgtgtaaatgttttttgttatattaatgaaatttcactatttctaacatattaatactaatgtatactgaatcatcttttcaagatgtaaaaaaacatataaatttaacaactgttttgaataatattgacaatcatttttgtagaatgctgagtggaagattagtatgtcattcatttaattacacttaaatatacatggataattaattaggataagttttcttatcaggcgttttcgtgggacaagtacataattaggttaatttcttatgggattctactctctttttttaaaaaaaaaatctagacatttccaaatgtcgatcgaaaacattataaccgaccacctgtataactttccgtcgatgtcccccgtatgtacaaaacttaacaggtcaccttatccgtgtacgtggccggatctcattgcgtttgttagatttctgtgatgacgtggtgttttcctttacactaggaaacttcaatttggcattggaatgtaacatatggctaaagtaactttatctgcttaacatatttttcaaatatctaaaactatttctagaccgaattttagatatgtgactaagaagatttcttgatttacatcaaccaaaacaagagcaccatgtgctgtttcttatatggatataacagttcgaaataagttatcgtcttcatacatccctagaaccccaacgactggactaaaaccctcaacttctaaaataagacttattgtagaataataccaaattgtgaaaaaaaaaacaaatataaattattgactatagtttgaagtaagtcgtaattttttccgcaaggtaaattcattcaaagttaaaatgtggagagtgagagaaagagagtcgcgtggctattgggtaatgagaaacgattggacccatttggtatcattcggaagtgatatgtggcagagggcaatcatacgttttcgtcatagcgttagattttcttacagtttcttagagattatttcgattgtttgtgtcaaacgagtttagtatgttactgctattgaacagtagtattttctcatgtatcgatatgaatacgtttactctttttctttttttcacacaatcagatgaatatagggatgaatatacgtagttttgtctttgtcatatactagattatattcccaccagtcattttcctatgtatttaacaagacaagacgtagaaaaatgagaattttagtacttgagttaacatatttaaagattatattcccatcagtcattgaacatatgtgtacatatatatacgaggagaatctataacttagtaaggagggaaatatgagattttatttctatagagaaaagaaaggataaaacctctctctgccaacactggccaccgtctccaaagtccatcccagttaatttttattttttggaatcttcttatgttattactctttcttttcttatgacaacatgtcaacatgtgacctgtcgtcttctactttcttttcttcagcttttctccttttaagcagaatattcaatctatcttcaaattcatatctgagttttgtactataaaagaaaagcagacattaaaaaagatttgaatataaaacaaatgtattggagtggtaaagcacatcttcatcaaacatttttaaggagcatcaatctaattggtcgatggaaatggaagtaaaggaatagaagattgtttgtgttccatgatgatgtatatatatgcctaattaatgttactgttagttacctttggataacaaagatatttaaagcggtttaatgcttattaacggttgatggatgttaccttttctttttgacatcacggtagatgttacctttcataggtgttgaatagacagattggggacgttaattagtaatgatgtaattagttagagctaaatagtgctaataaatatatgtaagaaattgttcggaaagtaactaaaaaaagttcaattcatgcaagtagacacttcaaatgtgataaatgtataagtatgatgttaagcatgtgacccttgagagtcgattagggcactgtacaagattgacccaaatagttacaaactacaagtgaactctcttccattacatatctacgtgtattgaggggaccattatcgtacgtatacacgtatatatgttttgccctaaattcccaattttaattcagcatgggggacggactcattcaatagcatcgtctttcactttccttcttcggtttaaaatctcattttagtttctgatccaaaaaaaaatgtttgatcaaagatcaaaaacttagatagaaacaaactgtttttttttcttaaatcaagaaagtctaaaaaactaagatacaaaaagggactcgcagcggcagagagataagtatcttacgggccagcagataatttctatgttacgtccctttcatccccattgcatattgcatatgaagacaacggatattaactaaaatcttccaaaattacggtataatgaataataatacacttctgtctcatatagtattctattatattgttcgaaaatgttcttatttacatatctatttatattgttaattgattgcggctattactgtggatattcatcgtaactattttaatcaatacaaatcatgcaaaatagtgaatgacttagaaaagttgaaaccacatatgattgagtttagggggaaaagtataaaagaaagcatgactagtatgttactatgtagtaagcttcaaacatatatttaagaaaatactatatatagatacatatgatataacataacattaaaatatatggtgaaacattttttcttaatatcctaagcttcaaacatatacccaagtagagaagagttggagtattcattctttggttaaacatagacctaatacatagctcatatggacaatttttcgacaaaacaaaaatg

SEQ ID NO: 27539 - DNA, 3003 bp, Unknown
  misc_feature (1)..( 3003): 2750-1469P.txt file - cDNA_ID_2990640; gDNA_ID_1620647; Annot_ID_163279
tatccgtgtacgtggccggatctcattgcgtttgttagatttctgtgatgacgtggtgttttcctttacactaggaaacttcaatttggcattggaatgtaacatatggctaaagtaactttatctgcttaacatatttttcaaatatctaaaactatttctagaccgaattttagatatgtgactaagaagatttcttgatttacatcaaccaaaacaagagcaccatgtgctgtttcttatatggatataacagttcgaaataagttatcgtcttcatacatccctagaaccccaacgactggactaaaaccctcaacttctaaaataagacttattgtagaataataccaaattgtgaaaaaaaaaacaaatataaattattgactatagtttgaagtaagtcgtaattttttccgcaaggtaaattcattcaaagttaaaatgtggagagtgagagaaagagagtcgcgtggctattgggtaatgagaaacgattggacccatttggtatcattcggaagtgatatgtggcagagggcaatcatacgttttcgtcatagcgttagattttcttacagtttcttagagattatttcgattgtttgtgtcaaacgagtttagtatgttactgctattgaacagtagtattttctcatgtatcgatatgaatacgtttactctttttctttttttcacacaatcagatgaatatagggatgaatatacgtagttttgtctttgtcatatactagattatattcccaccagtcattttcctatgtatttaacaagacaagacgtagaaaaatgagaattttagtacttgagttaacatatttaaagattatattcccatcagtcattgaacatatgtgtacatatatatacgaggagaatctataacttagtaaggagggaaatatgagattttatttctatagagaaaagaaaggataaaacctctctctgccaacactggccaccgtctccaaagtccatcccagttaatttttattttttggaatcttcttatgttattactctttcttttcttatgacaacatgtcaacatgtgacctgtcgtcttctactttcttttcttcagcttttctccttttaagcagaatattcaatctatcttcaaattcatatctgagttttgtactataaaagaaaagcagacattaaaaaagatttgaatataaaacaaatgtattggagtggtaaagcacatcttcatcaaacatttttaaggagcatcaatctaattggtcgatggaaatggaagtaaaggaatagaagattgtttgtgttccatgatgatgtatatatatgcctaattaatgttactgttagttacctttggataacaaagatatttaaagcggtttaatgcttattaacggttgatggatgttaccttttctttttgacatcacggtagatgttacctttcataggtgttgaatagacagattggggacgttaattagtaatgatgtaattagttagagctaaatagtgctaataaatatatgtaagaaattgttcggaaagtaactaaaaaaagttcaattcatgcaagtagacacttcaaatgtgataaatgtataagtatgatgttaagcatgtgacccttgagagtcgattagggcactgtacaagattgacccaaatagttacaaactacaagtgaactctcttccattacatatctacgtgtattgaggggaccattatcgtacgtatacacgtatatatgttttgccctaaattcccaattttaattcagcatgggggacggactcattcaatagcatcgtctttcactttccttcttcggtttaaaatctcattttagtttctgatccaaaaaaaaatgtttgatcaaagatcaaaaacttagatagaaacaaactgtttttttttcttaaatcaagaaagtctaaaaaactaagatacaaaaagggactcgcagcggcagagagataagtatcttacgggccagcagataatttctatgttacgtccctttcatccccattgcatattgcatatgaagacaacggatattaactaaaatcttccaaaattacggtataatgaataataatacacttctgtctcatatagtattctattatattgttcgaaaatgttcttatttacatatctatttatattgttaattgattgcggctattactgtggatattcatcgtaactattttaatcaatacaaatcatgcaaaatagtgaatgacttagaaaagttgaaaccacatatgattgagtttagggggaaaagtataaaagaaagcatgactagtatgttactatgtagtaagcttcaaacatatatttaagaaaatactatatatagatacatatgatataacataacattaaaatatatggtgaaacattttttcttaatatcctaagcttcaaacatatacccaagtagagaagagttggagtattcattctttggttaaacatagacctaatacatagctcatatggacaatttttcgacaaaacaaaaatgatagcaaatgggctaaaatggtttcatatcgaaaagcccaaaccattaagccaaaacgacgtcgtacgatatgacagcggcgattcctataaccaccaccagaggttaaaaagtctctctctttagctatcttttttgtgttaccggttcaaatggccgccgtcgcagattccgttgagaacaacggttccataaacctccctgagaatgaaaaccttataccggcgggattcagtgccgccgcattgcttgacgaaaactctggcgctttccctgaattgaatcagcccgatagcttagctgctgctgagactaccttccccgatacgaacgattccgcggaggagaggtggccaggttggcctggtgattgcgtgtttcgtatgatcgttccggtgactaaagtcggagctattattggacgcaaaggtgactttataaagaagatg

SEQ ID NO: 27540 - DNA, 3003 bp, Unknown; identical to SEQ ID NO: 27539
  misc_feature (1)..( 3003): 2750-1469P.txt file - cDNA_ID_2990640; gDNA_ID_2926188; Annot_ID_200795

SEQ ID NO: 27541 - DNA, 3003 bp, Unknown
  misc_feature (1)..( 3003): 2750-1469P.txt file - cDNA_ID_2990644; gDNA_ID_2684121; Annot_ID_190980
ttgataattacagctaattggaaggctctgttgtttaacttacctcggggaagtttgcgagtttggccgggttaggccgtcccatggcaagaatgtaagattttttgccagctgcagatatgagtgcttgcatatggtgaatcatatgaaggtaaccagctgcatatattgccaggtgacattagacatttaatgaacttatcaatcttgacatcacaaaatcaatcttgacaacacaaatgcagaagaataggaacttaccaacaccaagagtccccaccaaaatacctataatattcgcatccttagctttttccaccaagtaatatctgcaacacataactctgaatgaggacttgaaatgtaattcaacagagataataaagaagatcgaaatgattgacaaagtttcatattgtgatgtataatgtctgcttgaaaaaagtgattataccgtcgcttaagtatccttctttgttgataaaattccgtcaccaaagaatcttcttcagcatcatatctgactaacatcaacaaacgaacataaacaagaagataagctactcatgccttagtcaacccattggatatttgtttaagaaaaatggatcaagaaatttccatggatagagccatatacctatgtcacaaccattgaaggtcagtactacattggcaaaagctgaactgtcagaacctatccagaaaagtaaatagtcctcgattttgcttccttctggcaagtcccaagttagccctcctagtctatagctcctagatgaggataagctatcactagaatcactttcgctatatggtctcggatgctccatggattctctaggatctttggatggactaatgaatgaacacaagacattggctacagataattgagaatcagtcttcgataatcctaattcttctcggatttgtggaattacatgcgcgtattctagaccataaagaatctgaaaacaaagcaaagattgagaaaacagaacatgttcatcaatacctataccataaagataaacttatgaaaacaaagcaaagatagagcgataagcctcacataccatgataggcttatcgctctttgacgcataatctatcaaatgcttaacacagctggagacgtttatcgaagctttcccaaaaacgaagaatgctggaagaactgatgtcctgtgaaaacatagaacctcacaataagacattgtttcaacaagggaatttaaagcaattacatagatgaagaaaagggtttatgactcacgggcttagacatgtttgaccgtaatgaacaacacattcagaatcaatatgcaaagctccaacttcatcaatacagcaactaccataagttgtgtcagccattacaaagaacctgacttctctgtcagtaagcaaacgagttttgctcttaagagcactcacgaccttagtcgaatcttttaacaactcatccgggaactatgaaagaaaaaaactaagctttatcatcaaatattcattgaagtaacaatttgaagctaagaaacaaaatcaaacttcttcattcagaaactggagaaaaggtttggtacctgtaaagcaattctggtgaagcttttgctaataatgaactccgccgtacggttaatctcgtactttgattcaaattccaactccatagattaatcacacgaaattatcaacctttccggccgaataactaaaatcgtcgtattcgtcgacttggatttgcggctgaagaaaaacaaaccagacgtagaagaatgatgcttgatgaaacggcgtcgtttctaagtatagttctcatcactggttttccttatttatcaaaccggtttaagatcctaccaaaaaaaatcaaaactcaaaccggtttttaagtatttattttagcggttatgatgaaacgacatcgtgttgattccttaaaagtgcctgaaacatgaagtgagctcagagtgattcaactgatggatttacagaagataacaaagacgagagaagctccaaaaaccctaagagccatttttcacagttacaacttacaacgcaatgaaagctgaatcaacgaagttactttcagaaaaaataacaacagtgtcccttttttttgaattgaatttaagggaagattcgagcttgagttaacgccagaaatccgatcagtggcaaactacaacagtttcatctaaatcaatcaaactataaccaagtcgaagctcaaaagaacaaacactatgagcgcttgtaagaagcagaggataaaccatagagaagagagatcagatgaaatccacatcgcaaagcttgcaattaacgatgacgttcgacaaagaaattttaaaaaaattaacctttttagtttccgattgcattcaaggatctgggttttgtcgcgacgtcgcacagagaacgatggacgtcgagcactatgtttccgtattgattaaaaccggttcaagtatatatttatcggtctatatttgcaaataaatcacacccacaccggccatcgctggtttccttatttattaaacctggttttcatcggataagacgaaacgacatcgttttaatccaccgccgtcaaaaacaatttcttcggtcaattatacctctaagcttcgaagctccgacttcttcggtctgtttcttattaaacacacaaacaagaaaacgcaaaactaatcctctctcgaattagggtttcgtcaaggtattacattatttcacacccttatcatcatcttctgatttctggtaatcttcttttgattagatcttcctatcgattggttcagtcctttcttattttcgaattcttgattggtttaccgtggttgctacgatttaaacctttaacatacctaaaagaacgtttttgtttttgctttttgttgttattgaagtttttttttttttttattgttgttgatgaagatcctggagttgatgtattgagagaagccattgagataagagatg

SEQ ID NO: 27542 - DNA, 2667 bp, Unknown; identical to SEQ ID NO: 4452
  misc_feature (1)..( 2667): 2750-1469P.txt file - cDNA_ID_2990652; gDNA_ID_1620706; Annot_ID_165284

SEQ ID NO: 27543 - DNA, 3000 bp, Unknown
  misc_feature (1)..( 3000): 2750-1469P.txt file - cDNA_ID_2990663; gDNA_ID_2926237; Annot_ID_142782
agtacttccattgttttttaaaaacgtattcttttatgtaatttgggcaccaaagataacccaaaatcacaaactagtctatggtatgttttttttttaccaaaataaaactaatctatggtttataattatttatctttttacgtcgtttaaaaaacttcataaatgtcaggtatctcataaattttctaatgaaaacataacagtaatgcgttagttcgaaatccagataacttacaagtcgatatcacatggctgcaaacgcatcagtggccaatcaaaacgaacttctgtgcagtcagtgtgaggtggcttatatctattggctactgatgactgctgatctatcttctttgtctttgtggtgcttccatttgttttgctttctgtcatcgacttttccgacatgatccactattcgttttagtctttaacaagggacactgataaacaatatttttttactcaagggttatccaacaaaacaagttacgagatcatccagtgagatctcataactgaagattggagcagtatataccaaaactccaaccccctactgtgcaatgatcaataataaatagttagaatcgaatatttttgtcatgttttctggttaagactttaattttcacattggcacatgccgacatcccgatggctagtgcagtgcatataaatgaagatgtggcctgtagggtcggttaaatgttttggggcatacaactatacaagtgaatgttgtagtttaatgcatataaatgagattacgtcgtgctgaatttggttacggcgccgaaatgcatacgcatgcagttttcatattacccttagccacattgttcaattgtttcctttttagaccgtcactgatttgcaaattttcctctaatttatgtggacgtacaataaagtggaggacttaaattatttcttcaaccaattctgctaaaactctacgtacctttactagaatatattataattagtatgcagattttagggctgcagtagaatttttttcatatcactttcatatttgctgcaaaaaaataccaatcagaatttagatttttgtttttgtaaatttttttgctttgataaatcacgtgacaattttttttttatataaaaaaaacagttttacaacctcaacctatcgacccataatgcatattatggattagtaagatccactgggtgggaggaatcaagctcaacgttgcaagctcaaaaagtgaaagaattgtatagatgatgagacgtatatgaagtgaaaatatatgtacggtcaataatatatatataagtttattgttttgatatatatatagaaacttaaaaaataaacaacaacaacatctgcaatcttttatgtagtgggaaatttgaatttcattaaactgcaccaaaatctgtatttaaatgcaggtttttttttttgttggtgttggcattgcttatttaaaatagtctaatacaaaacgtgagaaattaaataaatgtctctcgacaattggcctcgagatttaacgtcgacctcatctagatgcttttatttttctgtggttataaattgatagggttttaagtatctatccattagatctccccgtttgtcgtttatatatatacattgttattcaaaacattgcgtttgtgttttcttattaaaactttatgtttaggctatatatgcatattaatgcacactaattgaattgattagtatatagtatatattttcttgaaaattataaactcagtaatctgggttgaattagtatttagcaaacaatctatatatacatttttgcagccattttaacaaataaatcctagagttggacttatttacaacccaatgccattagcattaattgttttccaaaataattaattttactttaaatacttaatttaaattgtcaatcacattatcaatcaacaaacaaacttcacattaatcccttaaaattagcataaacgtatttgttaacaatattttaaaacaaaattttttgtttaaataaatattattcttactaaacgttttttgtttaaataaataaattctgtatttgaacttatttacaatgtcatgctattgacattaattatttagaaataaaaatatttaattaacgatttaaatcttctaaatctttgcttttagagttattatgtcattacctaaaaggcaaaaaatatatatttttttaaatattattatttatatatttaaactttataaaacattattaatatttaaacttataaaaagtttaatatatcaaaaaatttaacatcattatataatatatagtttaaaaaatctcaaaaaaaattccgtcatattttgtgattcaaaattttaaaaatgaacatatattaaccaattggcgaaaaatgtgtgggttcaacatcccgcatcgactaaaatatttagacaatgattcataaataagatcaacattaataaaataaatagttttttttgcaggatgggttttgcgggacgagtttggcaggacgttacttaataacaattgtaaactataaaataaaaatattttatagatagatacaatttacaaatttttatatatactaactttaaaaaataaattgtccccgcggtgtaccgcgggttaaaatctagttgttttcattttatgagccaatatttttcattaatatatagtcatgtaaaaaacagacaatttttttatttatttttttggcatggatgagatttgatctctggctatatcaagtaagatgatttttcaactgttgtaaaaacgtgtaccactacaaattgttaatttcgcatattattttataagtaaaaaaaaaaaaaaaaaaaaaacctatgcatgccctctgtagctttctcttctctatttatatgacttgctcattactcctagactcatcctcaacctcccgtcctcccccttcatctcttagagccttttaaaagtaaccaacgccatg

SEQ ID NO: 27544 - DNA, 3000 bp, Unknown; identical to SEQ ID NO: 27543
  misc_feature (1)..( 3000): 2750-1469P.txt file - cDNA_ID_2990663; gDNA_ID_2926237; Annot_ID_203917

SEQ ID NO: 27545 - DNA, 3000 bp, Unknown; identical to SEQ ID NO: 11038
  misc_feature (1)..( 3000): 2750-1469P.txt file - cDNA_ID_2990667; gDNA_ID_2214471; Annot_ID_133102

SEQ ID NO: 27546 - DNA, 3003 bp, Unknown
  misc_feature (1)..( 3003): 2750-1469P.txt file - cDNA_ID_2990667; gDNA_ID_2214470; Annot_ID_182999
tttttccttctatcatactttttcttctttaattattttttttttttattgggtatcttattgagatacttcaaatggagatgctctaataattaatgggaatgtgtttctaattaaaaagataacatctttctttctatatttttgtcgtcatataacacacctcaactcttttaagtactcgtgttgaattttgttttttgaaaagacaaaactccttataatcaacgtaattattaataacaaggagaaaaaaagtccaaagaaaaaaaaaagaaagctttttgggaacataaacaccatcgaaggagggtgggaggtgttttatgttcatgggtggagcttcttggccaacctgaccccattcatcatatcattacccactttcttctcctaaattattctctcttatctctctctctctctttttattttctttctttcttaattcatctaaactctctctgcttttgcttttcgtaattccttacatttcactcaatattaatccccagaatctccgatccacccacaaatttagcaattttctgagatttgatcatttgggtcaccaaaaaatcttgtctttttgatctgggtttaacgccaataacatatgggaaacattagcagcagcggtggtgaaggtagacgccgtcgacggcgaaaccatacggcggctccaccaccacctcctcctcctccttcttcttctcttcctccaccacctctacctacagaaatccaagctaatcccatcgttttcgctgccgttactccctatcctaatcctaatcctaatccggtttaccagtaccctgcttcttactaccaccatcctcccccgggagccatgcctcttccgccgtacgaccaccacctccaacatcatccaccgcatccttaccacaaccactcttgggctcccgtggcgatggccagatacccttatgctggtcacatgatggctcaaccgactccttacgttgaacaccagaaagccgtcacgattcgtaacgacgttaatctcaagaaggagtctcttaggcttgaacccgacccggataatccgggtcgctttctcgtctcctttacgtttgatgcaaccgtctccggaaggtagatttcactttctccctttcgttgatttcgtgatccatttgagcagataacacgtgaattttgttgtgttcttcctcgtgactatgtaatttggatcttcttattgcaatttgatcaaatcttcttcatgtgtaattgaattaagcttatgttattatgttggacttgtgaaaaataggattagtgtcattttctttgctaaagaatccgaagattgcaaactcacagcgacaaaggaagatatactgccacctatcactctagatttcgagaaaggacttggtcagaagtttaaacaatcatctggttctggtatagacttttcggtctttgaggacgttgagctgttcaaagcggccgcagacacagagatctatccattagcggttaaggcagaagcagctccctcaggtggtgagaatgaagaagaagaaaggtcggggtcgaagaatgcgcagattactcaagcggtttatgagaaggataaaggagagattaagattagagtggtgaagcagatactatgggttaatggaacgagatatgagttgcaggagatttatgggattgggaatacagttgagggggatgatgattcagctgatgatgctaatgatcctggtaaagaatgtgttatatgtttgtctgaaccacgagacaccactgttcttccatgtcgacatatggtaagtgaaagctgatgatttactactattatgtgatgatggacatatatatagatgttaaaaattgtttgggtttggtggtgcagtgtatgtgtagcggatgtgctaaggtattgaggtttcagacaaatcgatgccccatttgcaggcaacctgttgaaaggcttttggagataaaagttcacggtaacaacggaagcgggaataacaccggacagggagaaacagttgaacaagagtagctaaacacggccgagtatggattgaaatgccatcgaaatattagtagtatatgcatgtttgatccttgtatgttaacaacaaaatgtgtgattgtcaattcataatatagagattacgaaatcatttggagtcataatgacacaatacttgaaacattcttcattagatacaacaacaaagtaggcagtttcttacttagctagttgctcaaccggaagttgcagtggcaggtgaagccattttagttgcaataagacagaaacttaaacatggaaaacacgagatatagtagcggcaacatgacattcaattatatagctgaccccttcgtttcttatttaaaaggggcaatctccaacgttttgtggtcaaatgggcctgcatttctttttatccgcctctactattgggccctaagcccgagttttccggtttcgtaaacaataggttcatcatacttgtgtaatttcaatgttttggaaaattcggttcacagcttcgttaaaacatcaatcatctcatatctgtgactcgtagtttggttaaaaaatgatcccaaaaaagagagagacagatccaaaaaatcatctcatatctgtgtctctctctttgtttaaatttaaaatgcttgccgtagacaaaacatacaaatacgaggctgtaataaacaagtatttaatataataataaggacaaataaacggaccaaatttaggccgagaaaatgggacattgtgatataatctcaaaaagaattgaaatttgtatgatcgatcagatatctcaatttcaggaacccagaaagagggacttgtcttttacctccaaagggttcctgccgtttcttttctacaatttttctcctgctaattatcaaatttttcttctgattttcattgtttgttagagattcttcttctcctctgcttttctattctctgggagctcgatg

SEQ ID NO: 27547 - DNA, 3000 bp, Unknown; identical to SEQ ID NO: 11008
  misc_feature (1)..( 3000): 2750-1469P.txt file - cDNA_ID_2990667; gDNA_ID_2214471; Annot_ID_183042

SEQ ID NO: 27548 - DNA, 3000 bp, Unknown; identical to SEQ ID NO: 2450
  misc_feature (1)..( 3000): 2750-1469P.txt file - cDNA_ID_2990671; gDNA_ID_1620538; Annot_ID_159936

SEQ ID NO: 27549 - DNA, 3000 bp, Unknown; identical to SEQ ID NO: 14225
  misc_feature (1)..( 3000): 2750-1469P.txt file - cDNA_ID_2990679; gDNA_ID_2214712; Annot_ID_136982

SEQ ID NO: 27550 - DNA, 3000 bp, Unknown; identical to SEQ ID NO: 14225
  misc_feature (1)..( 3000): 2750-1469P.txt file - cDNA_ID_2990679; gDNA_ID_2214712; Annot_ID_189919

SEQ ID NO: 27551 - DNA, 3003 bp, Unknown
  misc_feature (1)..( 3003): 2750-1469P.txt file - cDNA_ID_2990683; gDNA_ID_1620354; Annot_ID_154404
gacactgtgaaaatcagatgtccagtagtaattagagattatcctcgcgcttaccaggcaccaagaaacttccataacaaaaacaaatgcaaaaaaatgtatacctctcttctagggacgttatttgctctttgacaactgaaagaatgatcgcctcatctgacttcgcctgcgatgaagcttgctttttttcactcactgcaacacacaagggtaatttcagtaagaaaatgactcgggaaaatgaggcgatgtcttcaggatcatatagcttgtttaccaaagaaaaaatgctttaaagttagaggtgcaaacttaggatgtctcaattagttcatgacttcatgtagacattaacacaggcaaaatgaatttgtacaagataaaaaacgcttttatcctcaccttctactttttcttgaagcctggattcacctccaagatatgaacgttcatccgtttctaagtttagacgttgacggtctgcaaatttctctagcaagcggccgattaggttatgtgcaaccaagcttgtctcatcagaaatttcttggattgctaggtactggtttttatttcttcttcgtggcttctgctcaccatgatcatcagactttatgttttcaacagaaaacaatgaccgagagctaaactgattatctacttccatctcaatatccctctcaaccttgactcgggttttgctcatagctatgtcatgtctatcactgataactattgatttattggacgtgggagtgacatagagagatctaggatagactcttgtaatactctctggcaggtctcttacaaccaccctattgacagaagagctgaaatcatgctggtttgtttcatgtgtagaatcagtcgggtccaaaaccaagcattctgcaccactttcttcatgatccgaatcagaggactccattgcatcgtcttgagtgtctttgacttcaagctttatgtttcggcatctactctcttctttattacctaatttctcgttatcaaataaattacaattctcatcatcatcatcatcatcatcatcatcatcatcattatcatcactgtcttctagatcctccatataagcatcaccgaagtcctgatcgagttcataatttggaatacattggcaaaatatttgcttcacttgagcactcacatttaatatacactctgtctcctcctcaattgcttcccttggacataccttatgctctacattccccgtcctgctgttgaccaatgaaagagcttccattaaagactttggaatggtgtccagatcactgcactcaaacagatattcaatcaacgtttttctgaccgctgatcttaagctgtcattagaaacttcagcttctgggtctaaacaaagatgcaatcttttcagctcacgaaacctaaccttacggagtaaccatactgccttcactatctcgttctgcaggttctttgtttctggtgagaaccgaaaaaaatctgtggcagcagcagttttgtagccaggacttagcttaagtgataaatctactactgacaacgctttagccaattgctcctgcagtttatcccctgcagaaagttctgagagcatcttctcgctagcttgcctcacttggttaatcagatcacttcgacgctgaccacgtctactatttttcaattgaggtatcattcttgaacctttaagtttccttttcattgcacgtagggtctgagtagacaaactatctagctcattaagtaccttcattgcagcatcacgatgggaatgaagagtaggtgttctccccaaattcatcctgcaatcttcccggaaatttgcgggatcactaagaacttgatggagctgattaataatctcttctttaccaataccttctttattctttccgaagtctctcctgaccgaatctctgataatctctttcattttcaatcgagtcttgtcaaaggaagtagagcctcctgtgagtatcattgcaataagataaagacctttattcgtcaaagaatcaagctttctaacaagttcaagatcgcagaactttaactccttctgttgaacatcattgcatactacttgttgattcttgcaaaatccaaatgcctcttctacacgcgactttatcgtctcgtagaatatctagaaacacaaaagagatctcattgaagaaaactctcaacatttatctaaagagaacgtaagtaagagagacatacatcatcttccctaagcaaagattcagggacgaatctgtttcacaacgaaaacaaagaagaagagttcatagtcatataatcaatcagctaaaccaaatggaaactaagtaatgaactcactcagtctttcccggagtatggtccttggtggagtcagacatatcacaacccaaaagccacctacaaggtttgaaagtcacagacaaaacaaaagtctgaaactttttttggagaaatattaaaggttgaaactttcacaaagccctaataagcagagagattgattcgaactcaaagcaatcgtttcctatatctaagttacaattatagtccaaattcacacacacacccatataaaaccaaaaggagagaagtggaagaagaagaaaccttcttttgagacgaatttgctcatcttgatccttaatctgtgaaagtatcgaaccaaaatcagtcttgaagaaaactgaattattatccattgccatcttcttcaaggaattggaatcgactctcctttgaattgatatcgattttggtctgtttagtttgtcttgttcacttgttctcgtaacttaaaccgggttcgaagaatttttattaaatttttgagtaaaccggcttattaggtcaatacaaaaaagcccaatggacttttaagtttatggcccaaaatataacaaacgtatccgttctacttctgaaactaacctaaaacgcagagtgtgttgaagacgacggagacggcgacggcgagaagcaatg

SEQ ID NO: 27552 - DNA, 3000 bp, Unknown; identical to SEQ ID NO: 4621
  misc_feature (1)..( 3000): 2750-1469P.txt file - cDNA_ID_2990691; gDNA_ID_1620718; Annot_ID_165717

SEQ ID NO: 27553 - DNA, 3000 bp, Unknown; identical to SEQ ID NO: 4621
  misc_feature (1)..( 3000): 2750-1469P.txt file - cDNA_ID_2990691; gDNA_ID_2926153; Annot_ID_198235

SEQ ID NO: 27554 - DNA, 3000 bp, Unknown; identical to SEQ ID NO: 12803
  misc_feature (1)..( 3000): 2750-1469P.txt file - cDNA_ID_2990697; gDNA_ID_2214573; Annot_ID_186240

SEQ ID NO: 27555 - DNA, 3000 bp, Unknown
  misc_feature (1)..( 3000): 2750-1469P.txt file - cDNA_ID_2990708; gDNA_ID_2926258; Annot_ID_143168
ggctctgcaatgtcagatcaatgccattaaagttcttactacgtttcttgagcgttgtgagaaaaaagatatgaagtttggaggttgaagattgaacaaacaatttagaattctgaaaatcagaagaaaaaaaaaaacaatttggaattctctctgttttttcatttattttcaccttatattttttttttttatatattgctgtttagttcgggttcataatttagttcttaaaaaaaaaacaatcttatgtgtttttattccaaaatattacgagaaatgaaaattttatctccacaatttctcctttgatatctcaaattcatataagtaatataagtatataactttcggtgctccagccattagatttgataaaacacatgccaataaaatgaaaataattgacatttacaccaaaaaatgaaaatgaaaatggtataaaatttaacatttaatttacatcaaataaagaagtgaaaaataattatttttttctttatctttatatttagtcaccaataatattgtcagaaaaaacatataaactcatgaaacaaggaagccaaaaaaagaactcatcgaacaaagaataaacgaacaataataactctgcaagcgataatagcagacttgggtctgatagagcgcattaccaataaggttcaaaaaaaacatatataaaactcatgaaacaaggaagacaaaatagaactcaccgaacaagaataataataactctgcaagcaacgatttgggcctgatggagcttaactactaatggaccttaaggcccatataacagagatcactgaaaatgatgcagccaagtggacttgctttaaacacgtgggtattcaggaccgcccaatttctcaacgccatttgttgtcactcactctgtaaagtataaaccctaaaaatcgaatctttccgattagccgatccctccaccggaaaatcggaaggtaaacctcaatagaattctcttactatttttttgttattcgtcataccagatttttccgattaacgaaatgtcattatcatcatcatgatgattgatgtgtgagattgctgggaaaaagtcagagtgactgattcttctctaaagcatcaaactttacattttgttgagttattcgtgttattgagtcttaattctgtgttgaattttctctagtagaagcgtaaatggcggatgttgaagatcgtgcggcgaaggggatctctgactacgatcaaggtggtgtaaagacgacggaactggaaaggaagattgaggatatggagaacaagaatcaggagctcacgagagagaatcgtgaattgaaggagaggttagagaggcttacgggagaaattgaagagatgaaagacgtagaagcggagatgaatcagagattcggagagatggagaaagagatcgaggagtacgaggaagagaagaaggctttggaagctatttctactagagctgtggagcttgaaactgaggtgtcgaatcttcatgacgatctgatcacttccttgaacggagtggataagacggcggaagaagtggcggagctgaagaaagcgttggcggagatagtggagaagctggaggggtgtgagaaggaagctgagggtttaaggaaagatagagctgaggttgagaagagggttagggatttggaaaggaagattggggttttggaagtgagggaaatggaggagaagagtaagaaacttagatcagaagaggaaatgagggagatagatgatgagaaaaagagagagattgaggaattgcagaagacagtcattgttttgaatctggaattggtgaagaatgtagaagaattgaagaaatggaagtctaagaagaagctcacggaggaagctttgagtgaaactcaaaaacgagagaaggagctggagttgaagaaggacgagttactgaagaaggttgaggaaggtaacaagacggtttttgctttgaatgagagaaccatgaagcctagtaatggagtcagagacacaaatggtggtgaccaaaagggttccttggaagctgagtatcagtggccagtggttgctgctggatcagttggagctgctggtttggttgcagcgacctttttcgtctgctattctaagctaaggtgattttgatgaatatgttagtgaaagaataactgatgaccaagttcttaagattgatatctgggatggaattatataggttggctacaaatttgttttgggtttggatttgagtttgtgatgtttgttggttgttggctatcatacttttgttgatgagatcagcatttggtaactgttctttatcacttctactctgtcttaagattgatttcaggaatggatttacacaggtttgccacaaatttctttgggtttggatttgagtttgttatgtttgttggtagtttggctagcatggttttgtgaatgggaacagataaaaacttcaccttataatatgccacaaaatgcatttcggaaccgttcgtcatcacttcttcttgtcttctatttactggattttaagagaaacatgattcaaacagaattgcttggccagtatagttctttatcctaagtccacgagtactaactttacattagaaccgttttaaaattgcttcttggaagagcatatcaagggaccgtttttggattcagatacttcaaaatctgcaacacgcatagtggatggagatgccatgaaatgaatgtgttgaaaggtgaccattttaagacaagagggacacatgagcaaaacatacaatttgacttgtcaatttgttaaggttaatttgactagtgtccgtttatatttttggaaatcaaagcgtgtggaaggaaaagagtcatcatatttttctaaaacagctccaagaaatctggaaattctcgataaacaacttacaactacattttagggtcaataaaagtaaaacaacaatatttattataaagaaggctgagatg

SEQ ID NO: 27556 - DNA, 3000 bp, Unknown
  misc_feature (1)..( 3000): 2750-1469P.txt file - cDNA_ID_2990708; gDNA_ID_2926258; Annot_ID_204635
ggaaatgaaaaggtaggttccataaaagatgtcacgtggctcccatgcgagatggaaaatcatgtggatcttcttctgtgcaactgcaactagttaagtagatcatcatggtaccagtaccaccaccacttcactatctacaactgtatctctctattaattcattcctctccctattataaagagagagagagagagagagagagagagagagagagagagagagagagagagagagagagagagagagagtgtatcataatgtgtgtggaagtaagaaagagaggcacatgcgagctaatattaagatagatggagaaactcatgtgagcacatgtgctttccttttctcttttccttttttacggagcttttgtggctcccatctcctctgctcccatgcacctgtcgcaggtgattcctctcctcccttcttctaacgtgcgagagagagagagtatgtgggattagctctttaatttgtgattagtaatataccattcttaactagatttaagtcaagctgagctcaagtttgaaacttgaaatgttaattatgtaacctaatatgataatcaaatcaatatataagttacaagttaagattgattgttttcttaatctcacattctaaggtccatgcatcatcttatatcttcaacacattttttaaaaaatcgcctgatccaaaaaaaatatggattatataagagaatggtcaagctaactctaatacatattttcattcatttttggtttgaaatctggatgaagagcatgtattgcatttgtcgtatgcatgcataattaagttgtaagatacaaataactagcttatctttatggtgaaatattgattcaaacacatcattaatgtttccgaaaagaatacaaaacaaagacccacaagtcaaagtctgggttaagttttaaacacatgtcgataactctattattactaaactaagcatgttacaaatttgttaatgacacgcatattttcaattatgtattaaacttttgtgatgtatagtgttttaaaagacaaataaagatacaatctatctatctgtcaggacctcagggagatccacttgagtaaagtgacgtctccactaaaccacacaacatagcgcgtgacaatcacgatccaaaatctctcttaataaataaaccaacaaaacaaacactccaacacataattcgaaacactcaagaacaaaaaaagaaaagaaaatcacaactggacccagctttgatggcataccggcattacccaatttccaaaattatagccaaaccccaaacctaaatcgcacaaccaaaacatagtactaaactaaagtcttaaccaaacgcactaagattcagctcataatcaaatcattaaaggcaaacaagagtaaaccaaagtaaaacgaaccggaatgactttaaccggtcctacttcaatctactaattcacatcactcatataaatacacacaggtctctttactccttttcttccaacacatcttctctccctccgtcaatggagaaaaccctagccacttcccataccaaacgctcttctcctccgtctccatcctccgccgtgaacacaagctccactggtttcaaccgcagaaccagacagagattgtccgatgcaacggcgagtgtaagcgagaccgacgtagaagatgaagatgaagatgaagaaggagtggaggagaagatcgaggcgcttcagacaatagttcccggaggaacggaacttggtgtcgacgcgctgttcgaagagacagctagttacattttggctctgcaatgtcagatcaatgccattaaagttcttactacgtttcttgagcgttgtgagaaaaaagatatgaagtttggaggttgaagattgaacaaacaatttagaattctgaaaatcagaagaaaaaaaaaaacaatttggaattctctctgttttttcatttattttcaccttatattttttttttttatatattgctgtttagttcgggttcataatttagttcttaaaaaaaaaacaatcttatgtgtttttattccaaaatattacgagaaatgaaaattttatctccacaatttctcctttgatatctcaaattcatataagtaatataagtatataactttcggtgctccagccattagatttgataaaacacatgccaataaaatgaaaataattgacatttacaccaaaaaatgaaaatgaaaatggtataaaatttaacatttaatttacatcaaataaagaagtgaaaaataattatttttttctttatctttatatttagtcaccaataatattgtcagaaaaaacatataaactcatgaaacaaggaagccaaaaaaagaactcatcgaacaaagaataaacgaacaataataactctgcaagcgataatagcagacttgggtctgatagagcgcattaccaataaggttcaaaaaaaacatatataaaactcatgaaacaaggaagacaaaatagaactcaccgaacaagaataataataactctgcaagcaacgatttgggcctgatggagcttaactactaatggaccttaaggcccatataacagagatcactgaaaatgatgcagccaagtggacttgctttaaacacgtgggtattcaggaccgcccaatttctcaacgccatttgttgtcactcactctgtaaagtataaaccctaaaaatcgaatctttccgattagccgatccctccaccggaaaatcggaaggtaaacctcaatagaattctcttactatttttttgttattcgtcataccagatttttccgattaacgaaatgtcattatcatcatcatgatgattgatgtgtgagattgctgggaaaaagtcagagtgactgattcttctctaaagcatcaaactttacattttgttgagttattcgtgttattgagtcttaattctgtgttgaattttctctagtagaagcgtaaatg

SEQ ID NO: 27557 - DNA, 792 bp, Unknown; identical to SEQ ID NO: 13552
  misc_feature (1)..( 792): 2750-1469P.txt file - cDNA_ID_2990712; gDNA_ID_2214636; Annot_ID_188141

SEQ ID NO: 27558 - DNA, 3 bp, Unknown
  misc_feature (1)..( 3): 2750-1469P.txt file - cDNA_ID_2990735; gDNA_ID_1592230; Annot_ID_152137
gga

SEQ ID NO: 27559 - DNA, 3003 bp, Unknown
  misc_feature (1)..( 3003): 2750-1469P.txt file - cDNA_ID_2990735; gDNA_ID_2926241; Annot_ID_142895
actagagaggatacttcaacagtaatcagatgtgttaatgagttattgatgtttcactttgagtaatgttccaaagtttaggtcatataatatagatttgatttgactgaatcataaatcaagcttgtatcatgattttatgatctagtaaaagtagggccacaagaaaggtagtagtagaaagatgtaccaataaaagttaaataaatagaacgcgtaattgtgggacccttcttaaacatgtgtttgattatgacacatctaccatgtgatttcaaatatccctctgaaatcacctgtttttaatcaattttgaaacttgtagatttacaacttacaagacataacaaatatatacgcacatcaaaaacaaaagttaaatatcaaattttcttactatatagctgatcttatttcctatttcctatttaaatatcaaatttcctatttcgtatttttaattcaatgaaaatcgagtgtgttggaatatgcttttttcacacaaactaaatttcaagcaatattcacactctcttcacccattgatctttgcagggaagaacacctttttgttttgtttttgtaacaaatattggtgatataataatttcataattttctagaaaacagaaaaaaaatagagtacaaagagatagaacactagaagtatataaagatgcaataatctcgataagctagcgatacagctttactattgcatgttcagaaatgtaagagacttgtgtcgcaccacgaaatatagtttttagggtttccgacttttgatattctggagcacattcgattgatcagagcgtaaacatgttttaaggtctaaattttgatttacaaggtataattacgctagataggtagagatcgagtaagaaaaacactaatttagaaacagattactgaacagtgatatgcggcataaaaaacttattatcaatttaaagcatgacaaggaaattttttctcaaaaccattattcttatcgaaatctatagactatagtataatatatagatgcttaaaaaagatataacgtatcaagagattctataactataaaaaaatctcgctttgatcgttagcaaaatcagaaatctctaattacgctttcaacctacgtggtggtgcaaaatcatcatgaggaataggtgctggactacgtcttggaatttttggagtcgggctccaagaaccataatccccgtgaaatacttcttcccaaattacatctccctttgctgaatcttgcttcaccgtaaaactttctccggccacgaaagcaaccacaatgaggataagaagaaaccttacatggttcatacgaagcgccatgactcgtggttgattcaactagggctttgtatcttctctagaatatttaaacgtttttttgttaatgtgtgtagtcattgaagttcaactagtagggacttttgatcttctctagagtaattataagtttttttttggtataatgcgtgtattcgaaaaaagaagtagaatatatatatatatatatatatatatatatatatatatatattcgtgtggacatcataaatgcctaaatgataatagttgatttcgagttttattttcgttacttccaatcaaattctccttgcaccatatttatttttttactgtgagaacatatataagtatatattggaattacgtatccgagaggtttttgcatatttcgtttatttattttcgatatccacactactgtattattaaaaatttgaaaaattcaactagggcttttcatcttctctagaattattcgtttatttatgtcgatgtccacactattattaaaataaaacgagaggatatggttggatcatccaagtttcgtttatgactctttgttcatttacaaacgtttagttttccacttaagttttgaaaagagttaatttccaatatattcggcacagtttttcaagtgtattcatctgttttttttttttttggttggctatatggtccaaattttgatttgcaatatgagattgcacagagagaacaatctttcattatgattaattattgtacaagtaacaaacaccaatctccaatatactttggctctttagcacattgttatgctagaagttagcggaaatctatatgttgttaaacgcagcgtttaaattgaacagtgtaatttaccttgaaattttaagactacatgctgtttagaatttcagatgaaaacatcttgatgttttagaaatccacgtgggaatagcgtaaaatcttatccaacgaacttattttggttttgttgtatttgtgcaagtcgtcacgctaatcgaaaaaagaaaagaaaaaaagaagccgtcatgatcggccatttctcggccgagtctgagtctgactctgcgtccgtgtcaccattatcagatcgagcctgtcttatctcgttgcgattccctatgcaaaaatcttcttcttttttttattcccccatttatctctgatctcttctctcttctcaagtaaacctccctgcttcacgtctcttcttttcttgtcgattttccccagataatcaggtaaataaggctactttcttatttgatctggtggtctttgtgttgaaatctctgggttttctctgttgatttcaaagttctctctttttttttttgtttactgggtgctgtgaaaaatgatcttgtcaaagtctcctcttttcatcgaattgaaactctaattagaaaaaagatcataacttttattaaaaaaatgagtttgctttgcttaattttgcgaattgcttcatagattcattgattagcctatttggggtaacaaaaaaaagctgacacggtttcagattccaaaaatagatcatgactctgtttcttctctgcagaggttttaataaatatatgcttcttctcatgagttctcgttttttttgtcaccttcgcagttgaaaacacacccaaattcatcttcgaatcaataatg

SEQ ID NO: 27560 - DNA, 3003 bp, Unknown; identical to SEQ ID NO: 27559
  misc_feature (1)..( 3003): 2750-1469P.txt file - cDNA_ID_2990735; gDNA_ID_2926241; Annot_ID_204095

SEQ ID NO: 27561 - DNA, 3003 bp, Unknown
  misc_feature (1)..( 3003): 2750-1469P.txt file - cDNA_ID_2990739; gDNA_ID_1621125; Annot_ID_172241
gtagacatcgtttttgcttttaagaaaattgtaaaaggtcaaagattacataaatagatagtccgttacgttacatttttaaaattacgtgttttcctagttcctactatcggaccattctttgtgtaatcgtttgacacattttcaagtttatagaaattaaagtcatttatattcaaaaacagattagtcttttattttataagatgtaaaagaaaaaattggaaagatttagaaagaattagtatcttgaatattatggactagttatttttttttcttcaaaaggatgaaaacaaaaaattacgatcaactcatagtcatagtggttcaatagttaaattttctttttgtgattttaaacatcgttgagtactttaaaaacttttcaacatttcctatttgtaaattggaaaattatatatattcttaagtttcaatgtttttcccaaactgactactttaccttacgtttatatgatgatcagaagttcagaactactattcgaatattattttaaaaatatttaagaaaattatagcagaaatatgtgtgataatttattagttaactaaacacatatcaagagttagtttattttgaaacaattaataataaatctaataattcatttagctttaaacagtaaattattttggaaatcaaatctatatttaacgtagacaactcatagcaatttattaagaaatcaatccaaattaaagatttttttaattttaaactgaaacatattgtttttgtaataaaaagtaaacaaaaacggacattaatttagcaaatcagagagagattactcttgaatactcggttaggaaatcccaaacctagctccgaacccccaagaaacaagatttagctccaaaccacaatgactatataaacaccacatcaccatctcatattttattcacagagaaaacaaaaacaaacgagagacaaaactcaatccaaaacaaaacaaaagccaagttttttgtagtaagtaaaaaatccaaattatgggaatcatagttccagttttgacccttgtcttcctcttgtttgctaaagtgagccatggtgcctccaatcctagggtgattctagttggtggatctgtgggatcatggaaggttcctgattctcctaacaacactctcaatcactgggccgagaacaaccgtttcaaagtcggcgacttcatcggtactcgatatatatctctctctatctctttacttctgatatatttatatgctttgattctcttgtgatcatatgttcataaaaatttatatgcatggttgaatatttgatatatatttgttgtgcatgtgaaatagtgtggaagtacgacatgaaagtagattcggtactacaagtgacaaaagaagattacgagagctgtaacacagcaaatcccttgaagcaatacaatgatggaaacactaaggttgcgcttgacaaatctggcccttacttcttcattagtggtgctcctggtaactgcgctaaaggcgaaaagattacccttgttgttttggctgaacgcaaatccggtggtggcagcagcagcggtgacgctcctaaggtttctcctgttagtcctacggctcaaactccagctccagctcccggtccagctgcagcccataacgctgcggtggggttgaaggttgcaagcggttggttcttgaccgcagtcgtggttggtttggctatggcttagagcttagaggggtttggtcgagagaatgtagtttttattgagttcactttttagcaagatttagttttatttttccagattgttgacgtttcttttgttcccttagtttttcattataaaagatctctctttctgttttttgttatgtgtttgggatattatattcactcttaaagcttataatctatagtttgttcttgccattttgaatctaaaatttcaaaacctcaacaaggcaactacttgccgaccatcgatgaactgatcggattaatcaaccaaagtttaacaattttcattttttctatgagatatgttgactcaataattaatacaaagagattcagtcgactctatcttaatggtaataggattcatttgtagaaactaaatatatttatttaccaaaatgaccattgtgaaagtggtaattaaaaaacaaaactatatatggtgtccaagagattcttctatctctaaaataaaagagaatatatatgctacgttatggaaactacattttgaaatctgccttgcatgtactgattgatattctaagattgttcttgattttgttggtaacgccattgtgcgtggtaataaataagacgaggccaagtggataatgtgctaatctaattccattacttacacatatagtacatctttgacttttaagtaatctatcgttactaattaataattatgataattaaattacccgtttcacttatatcatggcaacgtttctgaagaaaactatactacacatttacgctaacagccgtataggagattaaattctaagaattgtacgttcaaagtctgaattaattcagagaattttgtttttgttttcaaaatttaaaagttggtatatattgatgaaattagttcaatgtagaagaaaacagtggtgaatggattttgcgatgaaaggaaaaaatggatttagtgattaatttaattcaacgtataaaaatgcttaagtttgataatgggtcactaaaagaccattagttcaaatgggccattgttcaacgacttcaaaggccttgtacaatagtttgctggcttcacttacaaaaacggcatgcaatctacgtcacaaactagaaaatgcaatccgccgctttttcaaagtaaaacgacacacagttgatgtttagaaagtgaaaacagtagagcagggaacccctgagagataagcctgaagatgacacaaattacatgagcaaatcccacgcatgtttttgctccagattccgccatg

SEQ ID NO: 27562 - DNA, 3000 bp, Unknown
  misc_feature (1)..( 3000): 2750-1469P.txt file - cDNA_ID_2990739; gDNA_ID_2926198; Annot_ID_141371
cgagaacaaccgtttcaaagtcggcgacttcatcggtactcgatatatatctctctctatctctttacttctgatatatttatatgctttgattctcttgtgatcatatgttcataaaaatttatatgcatggttgaatatttgatatatatttgttgtgcatgtgaaatagtgtggaagtacgacatgaaagtagattcggtactacaagtgacaaaagaagattacgagagctgtaacacagcaaatcccttgaagcaatacaatgatggaaacactaaggttgcgcttgacaaatctggcccttacttcttcattagtggtgctcctggtaactgcgctaaaggcgaaaagattacccttgttgttttggctgaacgcaaatccggtggtggcagcagcagcggtgacgctcctaaggtttctcctgttagtcctacggctcaaactccagctccagctcccggtccagctgcagcccataacgctgcggtggggttgaaggttgcaagcggttggttcttgaccgcagtcgtggttggtttggctatggcttagagcttagaggggtttggtcgagagaatgtagtttttattgagttcactttttagcaagatttagttttatttttccagattgttgacgtttcttttgttcccttagtttttcattataaaagatctctctttctgttttttgttatgtgtttgggatattatattcactcttaaagcttataatctatagtttgttcttgccattttgaatctaaaatttcaaaacctcaacaaggcaactacttgccgaccatcgatgaactgatcggattaatcaaccaaagtttaacaattttcattttttctatgagatatgttgactcaataattaatacaaagagattcagtcgactctatcttaatggtaataggattcatttgtagaaactaaatatatttatttaccaaaatgaccattgtgaaagtggtaattaaaaaacaaaactatatatggtgtccaagagattcttctatctctaaaataaaagagaatatatatgctacgttatggaaactacattttgaaatctgccttgcatgtactgattgatattctaagattgttcttgattttgttggtaacgccattgtgcgtggtaataaataagacgaggccaagtggataatgtgctaatctaattccattacttacacatatagtacatctttgacttttaagtaatctatcgttactaattaataattatgataattaaattacccgtttcacttatatcatggcaacgtttctgaagaaaactatactacacatttacgctaacagccgtataggagattaaattctaagaattgtacgttcaaagtctgaattaattcagagaattttgtttttgttttcaaaatttaaaagttggtatatattgatgaaattagttcaatgtagaagaaaacagtggtgaatggattttgcgatgaaaggaaaaaatggatttagtgattaatttaattcaacgtataaaaatgcttaagtttgataatgggtcactaaaagaccattagttcaaatgggccattgttcaacgacttcaaaggccttgtacaatagtttgctggcttcacttacaaaaacggcatgcaatctacgtcacaaactagaaaatgcaatccgccgctttttcaaagtaaaacgacacacagttgatgtttagaaagtgaaaacagtagagcagggaacccctgagagataagcctgaagatgacacaaattacatgagcaaatcccacgcatgtttttgctccagattccgccatggatgtcgcttctgctcggagcatctcttcacatccttcatgtaattgcaagtttcggattgtagcttattttgtcaataaagtaacttcaatatcttcgggataactttttcttaattatgttcgcagattatggaaaaccgatttgttcatcacaatcatcgttgattcgggtaaattttcgttttatttggatttttttactctttattgattgattcgcctttcgtttctgagaaaatgatggaacgtaatctgcaatggaagcttaattagaatttttacttggtgatgttaagtgaagtatcaagcttttagttattttcattaaacatattctggctctgttgagattttgatgtggatttggatagttggacatagttgaacaatgaacatgaagctctcttctaattgttcttattctatgaaatcattggagatgcagatttcgagggataaagtttgttgctttggtcgcatttctaatggcatgacgagctttactacttcccttcatggtaaggcaatcaaactatagttttaattgtcccttgatgcggttttgttgctggtcggggcgttacaatatcatttcaatcattccttgctatatataaagacttgtaattttatataggatctactcattttgtttttgagatctgatcgagttacttatccatatatctatttcgacgtgagatactgagatgaatcttttaaatccttacttgcttcgctttccatgtttcttctttagctgtcccgagtgaaaaatttatgggcgaaacaagacgtactggcattcaatggtctaaccgctctttaagacatgatccttacagatttcttgataagaaatcacctagatcaagtcaattggcaagagatatcactgtgagagcagatctttcaggagctgcaacccctgactcttcttttcctgaaccaggttttttttggctaaacctttgtgaacaaatttcatctgttttggtagattacaacctacatcgttctttttgtttgttagtttctgtctctatacacaatcctttcttgttctttcaactttgaagtgcagagattaagttgagctcaagactcagagggatattcttttgtgttgttgctggcatttcggctacttttctcattgtcctgatg

SEQ ID NO: 27563 - DNA, 3003 bp, Unknown
  misc_feature (1)..( 3003): 2750-1469P.txt file - cDNA_ID_2990750; gDNA_ID_2214471; Annot_ID_183022
aaactacaaagctactaaccatagttcagaccaacaaaaaatgaagttccttactctgatctgtatcgggttctccttcgtcgacactagaagtcacacccactgaaactacagtcttcctgtcctcgttatccttatcaacttcctccctcgttgaatctatagagactctctcagaatcctggtcttccgattctataatcccaccttcctggttgttaatcaagatggcagtttctgcagatattcgtggctgttcatccttacattctgaatcagcattagaatcaacggatatactggattcctggttgttaaacaagatggcagtttctgcagatgtttgttcatccttacattctgaatcagcattagaatcaacggatattctggatccttcggttgttttcacttcttctattgttatttgggttgtagaagattcaaaactatcaacaagagtatctattgattcaatagtaacttcatcttcacttctatcattttccataatggtgcgaagtggaaactcaccttcttttagattccgatcctcaaaagtaggacctggttcctcagacttcacattctcactagttttggtcagctctgactgctccagacagctcccaagaagatctctttcagcatcatgagaatctttttcggcattatcacgagaatgggaatccaaatcattacgctcatcattaatggcatctactttatcagatgcaatattagcagtatcagatgactcctccactttgtcgatatattcagtatcccacggagtctctgatgaagcaaactcagtattaccttcacaaaactcagtcccatcaccaggggccaaatgaaactgaggagtatttaaccgtaaattctcagcctcctgctcagcaactgacacaggggctgttagtatatgtccatcaatactgaccaaaaccacttcagaatctgagccttgagaatccccataactttccacatttagattgtcaaatcgagcacttccatattctgaggttggcgaaggaggatcatcctgaaaatcataaaacctcctattacaatcagactctgtcctctcaagccgactcaaagggtcgaaaccctctcgtaattctccagtaccagagtccgataaactgtgctcaagtcgataagtaacaccgttattctgattaccattgttattctcagacccggaaatcaaattgttggtgtcattagctgcaggatcaacttccctgatgaaatatgcttcaccagaattatcaagatacatgtgaaaatcagcttcggttccattaacagaaatcctgacaaacttctcagcgcctttgagaacaccttggaacttaccaaacctaacataccaaggcgtgctacggaaagaaccatcttgttgttgaacaacgatgacatcaatagcaccaccaaagggatgaaatggtgtcgctacagagtaaaccccttgagaaatcaaactcccaactcttccaaccaaactcatttcatcaaatctttgagaaagtcttcaacttttactgtcctaatcatatacaaaaatctagaaactagagaaagtttagtttcttagacaggttaattccagcctacaggtgaaacaaaacaacccaacaacaagccaaaattagagaacaataacatgtgagagactaaaaacaaaaaactcataaggaggaaaatcaaatcaatcagatacaaaaaaaaaccattcgtaatgttccgattacacaagtatccaaccattttcccaatttcaagcatgcaactttaacagtttctgaactaacacaacccaaagaagaaaaatcaaacagctttcaaattgttggaaagatacaacgagatacgatgatagcccacgaaccaaacatttaaaaatctcagagtcggaaaatcgaaatcaacttacacagattaggaactctgagcggagaatccgagaaaaatcaaaacacggcggaagaaacgacgaatcagtaatcgagattactattgaaaatgaaatggattttaatgaattgtatcctatactaagaatttcattgaaatttctctctcgggggataaaaaaaaaatattgggttgataaaaagattctcggaatttttaatgaaagtcaaaaaggatttgtctttgcttcgacgattgtattttaccgctaccggtgggagagatttataagaaagaggaaaaagatggttgttttggataaccagaacaaattaaatccgccatgaacttaagagactgtaattgcttatataagatgatgagatgactctgtgaagggaggagggagaattacgagaagggtctctcttcgacttttgtcgtaattattgcttctctaagagggtacttttggtatttccatattaaaacctgcgaaagaatatgcttgattttacacaaaagaaaacaaatatgctgaattaatatatttttgaccacaaaaattaagtttccaccttttttttgtttaaatctactttttaaaacaacgtttaaatctattatttttttcacttcttgatgataaatgagaaaatagttttataaaaaattgaaatatagtcttggtaaagacataagtgaaattaatctattaaataaatgttcataaaatagagaaaaagaaaatgggatagtcgtggactcgtgggaatattagtgatccacacaatagcatatctggtatattctttgtctatacgcaaaatcaatttgtttatttagttagccaatttattgtgttcaatctctttataaaaatgtaaaaatttgaaaataagcatcgttcacaagtgtcctatgttgctacgttctcacctaactcgttttcttctaagtcaaatcattttccattaatgttaccgattcacgttggtcgctccgataaatttaatacgctaagccctttttcgcatataaaaatataacagcacagtcatattttaatatatg

SEQ ID NO: 27564 - DNA, 3003 bp, Unknown
  misc_feature (1)..( 3003): 2750-1469P.txt file - cDNA_ID_2990754; gDNA_ID_2214528; Annot_ID_184837
gctcatcattgcgccagcgttgtcaaattccccgcaatagttgggagctgaaaatactgtaacaagttgtctttctgcaaagaactcatacccatcttcaacaacctataaacagagccaatacactcaaattaaggttgcacagttttcataataaactaaatggcagatataactcaagttaaaacctggtgggcacgacagataaggtccatgtcatgtttctccaagaactctgcgactttgtcagctccaaaagtgtatgaaacaccacgatcattcatgccccagcctacgtctccactaggatccgaccatagtaaatcacataccaaaccagactccggaatatccatcggccgtgcaatatttctaatctggtccaaacttttcagctctggggaaatcccaccatgcatacatagtattctgtcatcaattaaggcggccacaggaagacagttaaagcaatcggtgaatattttccagagtctgacattgaacctgcgtttgcactcatcatagaaaccgtaaatacgattaatggaagcagattcatgattccctctcaacaagaagaagttctcagggtacttgattttgtaagctagaagaagacatattgtttccaagctttgcttgccacggtcaacataatcacccaagaacaaataattagcttcgggagggaaccctccatactcaaaaagcctcaatagatctgaatactgcccatgaatatcacctataaagtaaaagacaaaatataaccattacatctaagaaaacatggcatatcagatactactagtcaacgttaaacttttgcaggaaatgttttatcagacccaatcaaaacacataacttgactagtcaacattaagataaaatgaatcaaacctcatagaaccagtcaaaactcctaagcctatctaagacttttagtaataaaaattcaaactttatactacccattagcttgatttcattgttctgaactcaaaagacaatcaaaatctcacattttttcttcagtcacttagatatgtacatagctttaagaattcaactcattactactgaacaaagcttgatactttatctaaacatgcactaaattcgcttctaaaaatcaatcaaaactaaaaccccaatccaaaaaagcactctttctaaactaaagggaacaaaaatctgaccgcagatcttgatgggagcttccaattcaagcagattgggctgttgaagaaatatttctttggagacagcacaaagctgacgaatttcaccttcactgagatgaacttgcttccccgatccaggtctcgtgttccgaaactcaaccaaacgacgaataatatcgtcgagaactgcaggttccatcgctcgcttctgctcttgctcttgcgccggcttctccgccatctccgatctaaacgaggtagaaaacgaacggagattttcaagcgtgaagcttgcgtttcgagccgcgaggaggagagacccgaagactggtgtgtgctctgagattagtcaatattgattggttcattttttatttatttaatttatttacgagacctgagtgaaatcaacctaatgggtatgtacacgttttattgggcctgtaaatgggctatctttctagaagattcctttatacaaatttccaaacggtagaaaactagttcttctagcctctctacgcgatcagtaataacgattggcgatagtaatatagtattcactattcagtagtaatgatgggggatagtgatcaacaatatgttttgttgtttgtttagcagtcatcggtaatgatcagtgaccaattataacaatcaaatgttactatgttagtatgatattcgttttccgtaattaagtggtagattagatcaatcttaattcttaaattcttaattagcgactaataaattaaaacgccaaaaagtttgaattagcaaattagttactgaaaacttagtgttgccatcaaaaactacaaaacaacaatctatttgttaccatgaaactacaaaacaaccaagatttagtgtttgatcggtaatacctaatctaatataatcaccatctggttgatgtgtcaaattaacatgcatatgcgtgtatgcaaataccattcttttgttaaaaatcaccaattcacattcttaattacatgctaagtgctaactaataactatgtagtttgataaaacaagttaatatatcaacaacatttttatcaaaagaaaaaaataaactatatcaacatggacaaattacatcacctaacggtcctaacctaatttaaaataatattgatgtatgtttataattgatttctataatgaaagaaaacaaaaagacgaaaaaaacaacatgctaaagatcaaagaacattagttgaatcaatccttattttgaacaaagaatagtcagtccattttgttcacctgaaacgcaaacgccacctttgtatggtaatacaatcatacaaatctcatacacaccaaaagaaacacaaaatcaccaaaacaaaatctttatatttatttcttttttccttgattctccttattaaagaaaaaagattattcttcttcacccgtcacaagccacaacgacttattttagattcccatacaaaaaagaaaattccacatctataaaacatctcctcccatatttgctggatcatccttaattgcctgtgttcatgtcttcatatctctaaccataagataaaactcaagatttctgaagaggacagctctggaattcatatacgttttgcctctccatctgattctcaggtttgtttcttgtcttaaaagaaacacaaaatgggtttatttgaatcttttaatcataaaaatacttaaagaaagaggatcaaatgttgatttagatctctaatgaaagtttgtgtaacgtataaacagcttatggaattggagcaaatctgcattttgaaacccgatgatgaggaagaaatg

SEQ ID NO: 27565 - DNA, 3003 bp, Unknown
  misc_feature (1)..( 3003): 2750-1469P.txt file - cDNA_ID_2990777; gDNA_ID_2214580; Annot_ID_186462
ggaaaaagttatgtatggagaaattgcagcagagcgattgtgttccatgtcagcagaggaacttgcttcaaaggaactagctgagtggcgacaagcaaaagcagaagagatggctcagatggttgttctgcaggacactgaggtggatatcagaagcctagtaaggaaaacacacaaaggagagttccaagtggaagttgaaccaatggatagtggttctgtagaggtctctgttggaatgagttcgattaactggtctcgaacaaagaattttaagaagaaaaccccttccatcacgaaaactcttggagtcaagaatgaattgaacagctctaatgagagcactgggccaataaacggagtcacaatagatgatgagatgcaggctgccactggatctcttcctccaattgtctctcttgatgaattcatgtcatccatagattctgaatctccgtctggctttttgtcttcagatactgagaaaaaaccttctgtttcagataataatgatgtagaggaggttttagtttcatcacccaaagaaagtgctaatattgatctttgtacatcaccagttaaggctgaggcattgtcaccacttacggctaaggcatcatcacctgttaacgctgaggatgctgacatagtatcgtcaaagcctagttctgatttgaaatccaaaactacatctgttttcatacctgatggtgaacgtttatgggaaggtgtgctccagctgagtccttctactgtgagctctgtcatcggcattctaagaaggtttgtaataaattgtttcatgagtggtagcaaacctatctcagtattttttttttattccacatttccaaatttaggtttgcatatatgaatagctttctttatttagtctacatgttactacttatctatactattctagtgcttatcagctctataaaatgtttttttaatgaatatggcttcgctgttattgataccatgtttaccaacctgatttttacgcttcacagtggcgaaaagactactacaaaagagtggcctattttgctcgagattaagggtagagtcagattagatgcatttgagaagtttgttcgagagctcccaaattccaggagtcgtgctgtaatggtatttgtctacacgtttacctctatcattaatgtacatgttttatatacgcattctgtgtttgagcccctgcaaaagctattaactgtgacgtttaaccaagcttaagtagaagcatttaggaaagaagaggagagattaacggccaatactgatttgtgaatgattgagaaaaatacattacatctgtgaatcacaatggagatagatggacttacaaaaatattttcaccagaacaattgcatagcttatgtttcttgaataggcctccatattccaataaaactaagacctgtttgttctcgattctatatgtatgtgatgaactcgtttatccatcatggtacttctgaaaccttgctttcgtgttacaggttatgtgtttcgtctgcaaagaagagtgctcaaagacagaacaagagaacatttccgaggtatgagcgttggtagttaaccaagattctgtgtatccaaataaacgaaaagatgattaaaaaaacttgagatttatttgaatattaatgatttatttgatcaaaactgaacgcgaatctgtacaaactgaaaacccaaaccgaatttaaattgaaacactcctaaatatctgtagaatgtctaacttggtaacgaaatttgggcatttggttttgttactatacaggtggtggattcatacgctaaagatgggagggtgggttatgcagaaccagcttcaggagttgagctatacctatgcccaacccgtgggagaactgtcgagattctaaacaagattgttccgagaaaccaactcgatttcttgaaatctataaatgatgatggtcttataggtgttgttgtatggagaagacacacaatttaaaaaatcaccactatctaacaactctcacaagaaccaccgtgaaaagggttcttcgttaaccacatataatacttctcgttacagtaacatgctacaggtcaacaatgacgatggtgatgatgtgccaccggggtttggcccaatgaccatggctcgggatgaagatgatgacttgcctgaatttaactatttttccagtggggatgttgtcgtgaaccggacaagccggtctgtatctgtaagagagcttattcaaaaatatggaaaatctgaacctttgaggaaccaaagttataatgataatgacaatgatatactaccagagtggcagcctcaatctaactggactcttggggttactcatgtaaatggtggctcgatggttagaccatgtagtgagtggtggtctcatcaggatggcagaggaggatattaattgttttttgtttcaccttagcaattttgtgtttgttatgcattttctgttgcaggcaacactgctttccaaattttgtgattttctctcaacagtcaccgatatttggcactttattagtaagatgggcttgcgcagcccgctaatatattgctcctttctgtaacaaaaagtacaaaagtaacaaaatccactcctatcgattatactataaaacagaagtgcagagaaaatttcagtcatgatattttttgaccagctcgattcagaaatttggaaagactagcttttttttctctcgggtttcactttttaaaggtcgtgaaaatttgggaatcactgatcaattttgttaatatgatttcctgatttagggtttctctgcatgcctctagaatcagcaagtgtaaagcaattaccatggtgactccgaagcagatcgatttctcttcctgtggtggtggtgataactccgacgataccctctcccatcgagaatctccacggaatccttcctcaaagcgtgctgctgcttccttcgcagcagaagcaggcgaagagactatg

SEQ ID NO: 27566 - DNA, 3000 bp, Unknown
  misc_feature (1)..( 3000): 2750-1469P.txt file - cDNA_ID_2990781; gDNA_ID_2926225; Annot_ID_142514
caacaatacaatgtttgatatatctagtgtgacttttggtagggtagatcatatatatatggttcaaaaaggacatgatcctgattttttctttcttgaaaacatctcaaaacgttgtgaacctaacataatttgatattactggtttggactagaccccactagttcatgtaaaatatggagcatatgatatttgaagggctttctacagctgtattaagaaactatggttgttagaaaacataaataccaaagtttaacatatataacaagaaacaaaaataccaaatacagatagtgtgtgatatgagaaagattttgagttactaagaaatgtctttctttatttgtcaattagaaataatatagtatgtaatttactaatacatggttatttttatgatgacagcaaattaaagaaagaaagcaaaataattatatggtagtatgacataatgtaaaaagcaaaagtagaccacaggaagaaaaaggacaaaaattattattgctctgtagggattatttatatttggtatttaaaccaactgtaattttcattttttttcttgtagattctgacaccataataagtatataatgtcgacataactgggactttgagatagagaaaaaccattatacgtataaaacatatataacccccttattcaacgttagctaaaaacatttatctagcaacatcaacaacataaataatttactctcgagaaaaaaaaaacaagaactgagcatatgataatgaattcacacttcacattccacagataactctaaaatctttgacatgttcttacaaacagtccacggaatttacctaagttaatcttcaaacatctatggaatttgactgattaatattataattctatcatatatatttataaaatatatacataatacacagatgaaagtgacactaaggatccttcgaccaaaaaaaatcactgtgacgtatagggtgagtacaaaaggattaaaggagaatgatattttcacaagaagaaattttttaagttttgataggtaatagtatttcatctgaaatactttattgtaactttacacaaaactaagaaggtactctatattttacaaaaattcgatgtacatttaaataaatgtaaatcttgtgaaaattttgtagttggaaatttacattctaaaatataatagcggatcagtcgcatattttttaaaatcattttaattaatgaacttagtgtagattagctgaaaaaacaagtacatgttagtggtaaatgaattaactgattaatcaacatatttagagcaaaaatacaaaaacatttaacactattttcataattttatcgagcaccataatcttgtaaacaacacactttaaaaataaaaaaaaacatttgaaagcattgataaaaaattgtaaacattcggattcaaatgatgaatatatatatatatatatttttccaatagtcgattatagttttcactaaatgttttcatacattcaaattagaaaagccagaaaatgggtttaattaatatattggtgttctccgatcgatctaaattattaaaatatattttgacggtttacaaaacaaaaataatgtgtactttttatattaatcttttttgtcgatcgatattaatcgcttttgtcgtgaagtttatataacgaaaaactttactttctaaattacaataactatttgcggcgaatcgattttaaaactgtgagattaatgaaacgatcgcgaatcttttttttgtcagaacgatcgtaaatcactaaaataataattttattttattttattgatctactaaaatttgacgtgtactcttaatctatataagttttttgtcgtgtcgtttattagaagattacaaattaaattataataattaattataatgatcgactttttaaatgtttaattaatgaaacgatcgtaaaaaaaactttgtcaaatcggtcgtaaatataacgaaacaacgaagctttctaaaaaaataataatcaaaattaatcaaatacatgtaaaaaaatatagaaaatttctaaattattactcttcacaattcattcatataaacaacatacctaataatatattcttaagtaaagaaaaaaaaagtgtaccgaataaattaactaaaacagccaaatctgccaaacaaaagagtaaagaatttcgtcagagaagtgctatcatttttattctgccacacttcctccgccatttatacaaataaaaatctcctaccattttaaaatcctttataaaatatattttcttataactttaatgcaaattaaatatttcgaagaaaggtaaattgtttttttctactacacttacacatttcagagagaacttaaaacgtgaatccgatagatagagagagactgagaagctcactgcttcgctgattttgaggagagagagagagaagagtacctcacaagacttgcacagatatatacgtaagacttctcattgtctgctttcttctccttctccttctccttccttcttcttcaacttttacctcagaagcaagaacaagtcctgaagaacccaggtctctctttttttccctctgaatttcttctactttgaatcttctttgtaatagcctgagaaatttcccagatttcagcttccaatcgatttatataatttttcagctcttgttgtttttttcgttgttaagtaatctgtctggactggtctgctctggtctggtctgatgatcttccgatgatcctttcctttgtattgacgatttctttgatctttccctttcggattttccttatctaggttccaaagattgttgctttccttattaaaaaatcaaagctttgtttttttatattctcacattgtgaattactatactcttgttttatgctatggaccttggatcattgcttaagctaacattttgctttttgttttttgagggcacagatcatcaatcatg

SEQ ID NO: 27567 - DNA, 3000 bp, Unknown; identical to SEQ ID NO: 27566
  misc_feature (1)..( 3000): 2750-1469P.txt file - cDNA_ID_2990781; gDNA_ID_2926225; Annot_ID_203463

SEQ ID NO: 27568 - DNA, 3003 bp, Unknown
  misc_feature (1)..( 3003): 2750-1469P.txt file - cDNA_ID_2990785; gDNA_ID_1620315; Annot_ID_153156
acttgattttacgcggcacaaatatatattttgcgtgggaggcactaagatgaataatttgatcgttaacattgcgagtgcttctcatgtttctttgtgtatatgttagtatctttctcgttttattttattttaagatcgatcttcctgtttatatgcatcattataattaaagttaataagatttgatttaataatagtagtcattactctttttatattattttctcactaagccattcattcgattgtagaattctgctggtttcaatgaagctttgaaatccatatataatatatgtagaactagaagtgatgaaatatagaaattgtcttctttcgttttttttataaaaaatcttacaatttggcgtgtaagattctctttattttatattttacacatatactcgtcaaacaaaatgatacattttgtttgagaaattcatcataatgaattatttatatatttattatatagtatatatccttccctaggtgggatccaaatcatatatgtatgttccttatagtactttcactcaatattataatggtctatgagttttgtaacgaaagtagtgacgagcacaatgtaaattattggtggtttttcatacatagtctaacgtcaccttaaacgcttaaatctgaaaattctgtctaagagccaatccctctaaaacgaggaacggaattggttttagcaagatccattgtcgatgaagtcctgcaccaagaaaaaaaaaaacaggttatagatcagttaaatatatagagttaaatgatcacttatacttttagcaaaatgttttacgtcatgtatgattttgattaaaggaaactactaatcaccccatagaactctattttatgtaaattgtaaagcgtcaaatattgtttgtgtttggacccgatcctacaaagattcgaacactttgataggtaaggccaccttcaatacgtattaacctaacgttggataccgtgaagacgttatttgatacgaaaaacacttgataagtggtcaatagataacctaatttgtaaaataaatgagcaagatatccttttttttggccttgatactaagttttttttattttttttttattttgttgaaatcgacgtgttggtaaacgtcttgattagtggatgcaaatctttgttctgttgagtgttgaccacttgacaagcacttgttagtttaaaacttactaacacactcattgtttttttcgggtttctgttgtatttatggtttttgagattactataaatagacaaaagaaaaaataaattcaaatagagaaactagtggttgacaaaaataaaaaataatagtagagaaactagtgaaaaataataactaatgtaaactctaaacgtaaacacaaaaacaaaaacaattaatgtaaatgaagacttgtaaccaatatatctttcttttattttggttcaacttcaataaacaagatgtaaccaatacatctaatatcaaaaacagtagggatatcaaaagcaaacgaaacaatcaggatcatgtaaagcatttcaacaagatgtttactgtagtgtgcttgatttgatgtctgaaaacaaaatcgcattttgtttttttaggatcatgtatgtcaacatacgttgagaaggacgtcaaattggctattcattttaagcaagagacactgatatataaatataaatcaatgtatatatgcaacatcaatttattatcaaaacatattccaattaatatgtaggttggaatgatataaaccatgggagtgaacggaattgagattaaatatagcggaagtctagagcccgacggaattccaattgagatttatccccaacaaagcatgggagtgaacggaatctaatattgacgagtgtttctaattcaacgctatataatatgatatcaaactaatcatatttcttataaatatagtatttaatatattatgataaatttccatggtgacttttcaatgttctgagacatgccttaattaattaccatttaccaactctatatacaatacgttatctcgtaatatgaattaacgataatattagaaattatatgaattaagtttttgaggtccgaatagaagagaagtaggagagataagagatcctttgaggcttgtccacatcttgtatacttcgtagccgcaatatggactgttcatggttcgggaagggttatgataacctaattccaggaggctcatataacataccgttcatgatcttataataatgaacgatataactgaaaaaaagttttatgcatattacatgttttattaacattcgcaaatatatggttatccaagtcgtggatcatgccatgtgggtaaaggcttttagtttggaatggttagcacaattatttatgaatgtatgtatttgcagtaatcatgtataacatgttgatttttttttattattttttttgccatattataaaatgttgattatgcaaatagatacttcaaaatatagataaaatactctgtttatcacctgattatatagattatctataatgttagatgcatgcttatattaactgataaataaatcgagatacatcaaaacataacttataagatatatataaaaaaatttgtactgataaataaaacaatcaagttttaaccatctacagtcttaccatttctttatacgtctaaactaagtataaaatttgaatataattatgtgtgtagagaatctagagatcgatgaattgctaatcttaatttgaagttattgcattataaacgagatccaccacttattattcataacgtatatgaatcgaatcattgatagataaataatttcagccaagaattgaccccacgagtgccaataaataacgacccttagcgagggttaaagccacaacacaaaatttgttcaaagtctaaaaaagattattattacttatcttctcccctgaaataacctcatagtgtcgatatg

SEQ ID NO: 27569 - DNA, 3003 bp, Unknown
  misc_feature (1)..( 3003): 2750-1469P.txt file - cDNA_ID_2990797; gDNA_ID_1620834; Annot_ID_57928
tgattttaaaatataaattagcaccaaaataattaatttaaaaaaaaaatatagcgactgtttataacgacaatcaaacgaacaacacatcgacaattattagcgattgtcgctgtaattggtcgttgaatctagcgacagacaaacgaacaatgtatgttgtcgattgttgctgtcgctggatccagcgacagagaaacgaacagggcatatgccttcgaaaatatctcatgttagggttaggccatgcaaatatattggacacttattttattttaatatgtggtctgaacttatttctttttgaacaaaaacaagaatattgttgtttaaaatttccatgaaatgattaagcaatacatatacaccacagaaaacaaactcagcttcttcttagctaagcaggcttaaggggcggctggacttatctataataaaaatttgagtatctaaacgaataaattggagatattcttttagtgttatcctaattatagttataaaacaattataaccttagaaagtttcttggaaatttaatggtaatttcattaccgtaaatagtttttctttcttcttcacgttttttttttttttttgttaaacttcttttctttctctataaaaactaaaaagcaaacttctcctttttggtacacttgccaaatgctctcaagctcaaattagcccaataaagagagaaaaacaaaacaataaaaatattaaaaatcatgaacacgatctttaaaaaattatcctgttttaagaaaaaggttaaatctttacgaatattcgaatccaggtcactctcttcttcgtcttcttcctcattcactcctcaaaagttcgacgtttttctaagcttcagaggcaaagatactcgcaagaacttcgtcagttttctctacaaggcgctagtatcaaaagggattcgaactttcaaagacgacgaggaattggagagaggccgtccgattccgccggagcttcgccaagcaatcaaagggtcgagaatcgccgtggtcgtggtctctgtaacttaccctgcctcgtcctggtgtctcgaagaactcagggagattctgaaacttgagaagctgggtttgctcactgtaatacccattttctatgagattaatccttcagacgtgaggagacagagcggagtagtctcaaaacagttcaagaagcatgagaagagacagagcagagaaagagtcaaatcgtggagggaagcgttgaccaaattggctagtctctccggcgagtgttcaaagaattggtataaatctctgaaactttcttaaagattgatgaatcgggtcgatagtttcagattgaaatctgttgaatagtttctcaaagtttcgattttttctctgtttctcaaatttaaggtctttgtctctgtttctgttttagggaagatctgtcgaatcgtttctcaaagtttcgatttttatctctgtttctcaaagttaggatcattgtttctgtttctcaaagttagggtcttcgtctctgtttctcaaaattaggatcattgtctctgtttctcaaagttagggtcttcgtctctgtttctcaaggttaggtctttttgtctctgtttctcaaggttaggtctttttgtctctgtttctcaaggttaggatcattgtctctgtttcttaaggttagggtctttgtgtctctgtttctcaagcttaggatctttgtctctgtttctgtttcagggaagatgactcgaagctggtcgatggaattactgagaagatatcaacaaagttgttctcggaaaaaccaaggaatgataatatcctaattggtatcgaccaacacatgggggaattgtatccactatttaacctgaattcgaatgaagatgttcaagtcattgggatttggggaagaggaagtaatggtagatcagcactagcaagccacgtttaccaaaacatcaaacatcactttgaagctcattgttttctcgaagacgtgagacggatttcgctacatttccgtgactctcatttacaagatgagcttctttcaaatatgcaaggagaaggtttgacaacaaagaactgtcataggtgtcttaagactatcaaagcaaggctaaggaacaagaaggttcttcttgtggcgaacgatgtagacaaacttgaacaatttgatgcacttgctgaagaatttagctggtttggtcctggaagcagaatcatcataaccacacaagatagacaattgcttatttcatcagtagtgaggagtgtctacgaagttaagctcttgagatgttacgcagttcgtgagctctttaggtcaaatgccttcaaagaaagagaaagagacgatcctgttgggttcgaccagtctacatatcgagccatgtatatatcaggtcatgtgtttttgaccttgagatatattttcactttgttgtgtgatagaggtcaacttagagaaaggataaatgcaatagtacatagtctttagattcattaatccttttagatacaaggtgttgtatttaggtcgaataagttggttagattcaggaatattaacttaatgtgtttgtttgttctatagtgaatgttacgccatttttttacatatggatgtgccacttgtgtatggatttgtgtactatccatttggtaaactattttattcttaagacggttcacaacaaattcatttaaacttgtaattgttttataaattacctatatcaatctcgtccgtcagttgacttagttgtaaccaccagaaaagtaagatgataatttatgtttatccatgttcattttcttattttggcggctcatcttctctttctgagtagtttagtgaaacagaagctgacaaacaaaaaatgaaaatgccaggaaacacacactagagcagaagactcctagttcaacttctcttgtgttaatgtgcctataaatatcctttgagatattcatagagtatcagaaataaaaaaaaatg

SEQ ID NO: 27570 - DNA, 3003 bp, Unknown; identical to SEQ ID NO: 27569
  misc_feature (1)..( 3003): 2750-1469P.txt file - cDNA_ID_2990797; gDNA_ID_1620834; Annot_ID_169790

SEQ ID NO: 27571 - DNA, 3000 bp, Unknown
  misc_feature (1)..( 3000): 2750-1469P.txt file - cDNA_ID_2990805; gDNA_ID_2926259; Annot_ID_143204
gcagagttgaatgatttccaggttcgctttctctgctagacactgattattgcattcctaatccttctataaatatgatgctgcaaatttggttaacaggtaaattgttttggtgccccacttgaccctgttgaacttatgggagttaagaaagtggtacaagaaaggcaaccagatggagtaactgaccttggtcttacacttccgggtttcctttttcttttctctctattcatcgagagaggtcgccctgagacagcatgggctatcctacggaaatgtggttacaatgattctttagaactccatgctgagttactacccgttccagctaagcagtctcctgatcaggtgtgtgttgttttagatagtgtacttaactacgacaatatctctaaattgttatgttattaaaggatatgagaaactggctggttgcttttaaataatgtttgcactctattcctgtatttcacttgcagagcatcgagctaacaaacgaagctatggactttctgagtggaatcttccagttatatgaccttgataatgtgtgtatgatcgtttcttcaattatccaacaatgattctgttgttctctatcacctaaaagcttatttcaccttcaaggagcagtagtagttctctaatgctcttcgttttgctactatttaggatggagcgttacagccagctgagctagatgatttatttcaaacagctccagataggtaatttgctggtgattttttttttttttaattcattgctattctttcctctgtaatcagtggttatcatctgttcttccaatgattgtttagtgagttaaccttctttcttttgaattttcttgccaatttcttcaatgctcttgtacatgaatacgtttattatttccggaatatgtttctttacacgtacaatctgctttacgatttcagtccttggcttgaggatccttataaagaagctgcagagaaaacgccaggcggaagtttgacaatcaatgggtttctgtctgaggtttgtattcttgatgttatgttgacgctgaattagaatcaagctttcattgtcatcatgatcttatcaaattcaatattttttaccattgttaattttgctctgttatatgtgttgatgcagtgggctctaatgacacttctagatcctcgaaaaagtttggcaaacctgacatatatcggttatggtcacgacccagcttcaacattttctgttactaggaaaagatcagtggatcgtaagaaacagcgaacagaaaggaatgtgtttcagtgctttgtatttggccctaaaaaatctggaaagtctgcactcctcgattctttcttaggaaggtatgctagttttaacatttcgaagtatccatattctgtgtcatcttcagtgctttgattgtttctgtggtctactcgtgttatattttataatctgtgtttcaactccaggaaattttcaaacagctataaggcaacaatgggtgaacgatatgcagcaaatgtcattgatcagcctggggttagtagcaaaagtctgaactcttatgttctttgtcacatgtggatatggtttatgtggttttttttgttttgttttcctaattgttggacgcatttttcagggttctaagaaaaccctcatattgcgggaaataccagaggacagagttaaaaagtttctgacaaacaaggaatcgttggcagcatgtgatgttgctgtggttgtctatgacaggttagctcagaaattatttgcacctggtatgtgtggataataagatgacagacttagcaagaaaaaatgatgttttccagttcggacgtatactcatggagaaaggcgagggaaatactgatggaggtagcaaggaggggagaagagagaggttacgggaccccttgtcttctggttgcggccaaagatgatttggatccatatccaatgtcagtgcaggagtctgatagggtaaatgcatcacttaagcctaatatgatttgatgagatgctgctcttggtatgattgatgattctattatcggatgacaacaggtttgcatggaattggggatagacatccctgtgtcattaagcatgaaacttggggagccaaatagtctcttctcaagaatcgtgagtacagcagagaaccctcacatgagcattccagagacagagtcaggaagaagaagcaggaatatccgccaactcgtgaatagctcacttctatttgtctcaggttctttcttcttcttcacaagatctatgcatttccttttttcttgagcaaaaccattaaatcatccaaagctttactattaaattgcagtgggtacagctgttgggtttgccggattagcagcttaccgtgcttattccgcaaggaagaatgcttgaagctttttgcccccaaaaaaaacttagtaataaaacacttgatgtttttctttagcgattcatctgctttgtatagaataaaggtaaccctcgttgatggcttcaaatctccgctccgtcacacctgaattttggagtttttagatacaattattatgtgtgtgggttggatttttttctcatcttcgaggaatctttcttattctttgtttctttttttcattgatgatataccattttatcaagaaaaaaaaaatcatatttctttcctttttttgggatcaaccacagatctttatgaagaagacacaaataggattagatgtagacaaatccaaatcttcatgagaattaaattaaacgacggggaaaaaacagactcatgtattagcataaatgggcccattttaataaatttgggccaatctagaaaatggtagtgaaacgaagatcacataaataaaaggcgaccgttggatgttgttatcttgtacaagagccttacaaaattcttctggttctctgaggatcaaaccaccacaagtcagaacagagtgaggtaatcattaccaacaaaaaatg

SEQ ID NO: 27572 - DNA, 3000 bp, Unknown; identical to SEQ ID NO: 27571
  misc_feature (1)..( 3000): 2750-1469P.txt file - cDNA_ID_2990805; gDNA_ID_2926259; Annot_ID_204684

SEQ ID NO: 27573 - DNA, 3003 bp, Unknown
  misc_feature (1)..( 3003): 2750-1469P.txt file - cDNA_ID_2990809; gDNA_ID_1620530; Annot_ID_159707
tgccgaaccggcgccggtttaagaaactctccggtagttacaacgccggaagggaagagatcttcttccaccagaaaacattacgattctgctatcaaaggcattgagactctccaagtctccgacgaaaggtttcaccaccactgatacatcatccatccatcgcttagcaaagttgtcgtatttgttcagagctttttatttgctttcgactctatattggagaaacgagaaaatttgctgatttttttttgtttgctttggttttttctaatttttattcatctggttcttttactgcggagggaaattaaattcagtgtttggaattggaacatcgtatatatagttttttagtaatactgaaaatgtcttcttcagtagaaattgttcatgttattttcgttcactgcatagtgatggaatgaaaaaacggggtcaaattaatagaagaagtaatataaagggggcaaaatgcaatacacatgaagtattaagattttatccattacttcacacatgacgcccttcgtctttttccttattctttctcctctcagaagagtttacttgttctggaaccctaaatctcgaatctggtaactcggatccgataaatcgttccagagatctgttacttctctattcaaggatctgttatcggtgcgaggatctacggattcttctgttcgcgcataatcggtgagtcttaagaatcttcagcttttcgtttgattttgatttatcgtaagatctgatcggtccttagtgtaatcactttatttttcccctgttaagttcacgcgtaacctaagaacttgaatttgatctgtaagctagatttaaccttggttttgtgtattgagttcgttctcggtggaaattggcttatggtgatttatggatgtgacattttggaagtgtttacaaagacgtatttagaaatgcatttggcgatttgctcgatgttgatctgttgttttctcgaacttagctctataagttttgtaattgtaggaaatggcagataacaattcaccacctggctctgtagaacagaaagcagatcaaattgttgaagctaatccattggtgaaggatgatacttcgctggaaaccatagttcgaaggttccaggattcaatgtcagaggcaaagactcataagttctgggagactcaacctgttgggcagtttaaggatattggggatacgagtttgcctgaaggtccgattgagcctgcaactccattatctgaggttaagcaagagccgtacaaccttccttctgtttacgagtggacgacatgtgatatgaactctgatgatatgtgttcagaggtatacaaccttctcaagaacaactatgttgaggatgatgagaatatgttcaggttcaattactccaaggagtttctaaggtgggcactacgtccaccgggttattaccagagctggcatattggagttcgagccaagacttcgaagaaactcgttgctttcatcagcggcgtgccagcaagaatcagggtgcgtgatgaggttgttaaaatggcagagatcaatttcttgtgtgttcacaagaagctcaggtctaagaggctcgctcctgtcatgatcaaggaggtgactagaagggttcacttggagaacatatggcaagcagcttatactgcaggagttatccttcctacaccaatcaccacctgtcaatactggcacaggtcattgaacccgaagaagctaattgatgttgggttttcaaggcttggtgcgagaatgacaatgagcagaaccatcaaactctacaagttaccagatgcaccgatcactcctggattcaggaaaatggaaccacgcgatgtccctgctgttacacggttgcttaggaactacctcagccagtttggagtcgcgactgactttgatgagaatgatgtcgagcattggctactcccaagagaagatgtcgtggacagttacctagtagaaagccctgaaactcacgatgtcactgacttctgcagcttctacactctcccttcaaccatcctcggtaacccgaactacactacattgaaagctgcgtattcttactacaatgtggccacacagacctcgtttcttcagctgatgaatgatgcgctaattgtctcaaagcaaaagggtttcgatgtgttcaacgcgttggatgtgatgcacaatgagagtttcttgaaagaactgaagtttgggccaggagatggacaacttcattactatctctacaattaccgtttgaaaagtgccttgaagccagcggaactcgggcttgttctcttataagctcaacaacttgatttgatggtatcaacaaacttgaaatttgtctctctttttttttcttcagtctgaactacttctcccatggtttactgaaactgagtttaattattttggcaatgcaattttggattttgcttttagtttcacttgtgttctctgagagagttgaccctgagaagtaaagtcaacactagacgtgtgcgagtttcaatggactgcatttttaggtccaagaagtagctacggcccatctatcgtagaagttgttttttgtactaaagcctgttatagccgaactaggtcgctacgtttcctaacttgtcgtttattaggctacttttaaatcgcacgcaccaatccagttcttacacgcgttttcacaaaaaggaccttacatgggttgttcccccaataagaaaattacacgttgcagaatcgaagcagtggtctatccttgttatcgtcctctcgtctttatggctcttccaagtcattttgagaaattttcgattttgagatttttttccaaatattacaaaaggaaataattagattcctctttctgcttgctataccttgatagaacaatataacaatggtgtaagtcttctcgctgtattcgaaattatttggaggaggaaaatggagtgtgttggggctaggaatttcgcagcaatg

SEQ ID NO: 27574 - DNA, 3003 bp, Unknown
  misc_feature (1)..( 3003): 2750-1469P.txt file - cDNA_ID_2990822; gDNA_ID_2926298; Annot_ID_205579
tgtcctgaaatcaagatatgcattttagaaacagaaaatcaagtcccacaattatcaatcagccatctctacaaagaaagcagaacacgttctctcgaccaaattgagtatatgataaccttagagacggcaaacaaatctacagcaatgactaacctctcttccagggtggaaaggaatgtcagggccaccagtaacttcaacggccacaacaccagcaagctgaatgatcaatttcacaccacaaggatatctagagttagaatccaaaccttacagttatcaccgttaaccaaatagtgctttttaaaatttaaaaccatgtacctgatggaaatcagcaaaagagatggtagggaattgctccctgatggggtccaacaacctaagagcaatgtggataccactgttggctccatgagcttgctcagcgtcaaacctcattgttccgaatggacctccagtccttgattgacaatcgaaagttccagcagagtgccatctgcagtttagccagacagatcagccatgagaaagttcataatcctacatacttcaaaaccacaagcaaatatggttagttacttacgcgagtcggaccatgatgggtgcacagttcttctcagcgatcaaacctctgagcttcctcctgcacttctcaacagccttcttgtaatcttcgctcacggttgggtagttcttcgtcatcttagctaagctctggaacaaatacacagatatatatacatgagcctcactactaaataaacgcacagatcaaatccaaaactcacgaaatccaactatacataacaagctgagaatcataaacaacaacagcctctaaaacagcttcatacgagtggaaaaaaaaaaaacctaaatcaagcaggagtgagctacagaagccaaatctctcaaaaactttcacagattcgtaagattagcctagaaactcagcaatatcgaaccacagaacagaaacgagagagctgacgataataacgccgatcgcagcaacgaatcgtggatctactacgaaaaacacatcattaagcacagatcaagccaagcataacaatgatccgatcgagtcaagatgaaaatggaagcagcaacgacggatcagagagggagagagagagtttccgtcataccttgtttcgaggaaggataataaaatctggagaaatgcgagtggctggcacgagtaagacacgagtactactttttatgagagcgttgaggagaagaaatgcgaaatatatagagtcatgaatgagaacgttctggtagatctgtagatgccgttagatgacggatatcgtgtggtcaaatttgccaatataattgacgatcatgattaaacgcacggctttaaaatggacgttcggatcttagggttggtggtatatagatgggaaaagaataatccttcaatattattaggaaataattggcaatatgcaattggaggatacatgcttcgtgtggagggcccactaactttggggaaattatcaaaaagggcgttgatgttgaattttcttcagtaaattgacgaaattaggcatcagaggacttttattgcgaacacgttgggcagtggtatttccgtgatttcatctgtcgcaggtgtgaacgcgtctcacgcagacgaagatcccaattggactaaggatatgataaagtcacagcagcagtgttattaggtttctcacccatcgctccttgattggtgggtcataaaccaatgcggtttagacctagcaatgcacggtttggttaattgtccacatttattaagtctgcgattcggaattttgaatcggttattagaataggtaacaacgaatgtcctctgtttcatggggaacaaattttcatgcccacctacttttgcttggcttgtcgaaagattcgagaaccggtgttgtttgataggaatctactcgacggaagtcgtgttttctctctactcatgttattaacgcaagccagaaaagaagataagccagttactgcagcaaaacaagtgagccgtatataatatagttcaatgacaagtctgagttagttagtagtaacagacgtctgctgtgctggtccttcccaagtgtatgtatctgttttcttgattcctcaattctattgtgtggcctacttttcttcttctttaatatctcatgaaattcttgtgttactactgatttctgcagacatggtcttatactcttatagggtagttgtttttggttaaggtttggatcataattgcggagaatgcaaaagcaatgtgagagccttttcatgagagaatttgcattgtttcttagtattttgactcataaaatgctgaagctaatttgaaatattcagtgatatgtttttgtggttcctgagccttatatcttagcttcagctacatctacataattatcaggtttgatcaccttctctgatccttaatatgtaagaagatataagatgggagaattggatcgataatgcaggtttgtgagatagtgaaaatgagttcagaggtgttttactttcacacaggttctgtttacttagcacacaagagagagttttgacattgaaatgagacttgagaataatctcgcttttgtatgtttaccactttgctttttacttactattggttcctagggacctattgatccacaatgagatagctttttctatagtatacttctcttttgtttcttttgaatttttctttaatgatgcagaagtcaagttttaaccttgtaataataattctcattcaaatttcgaagttcaacggatcaaataaaaaagtttgtcttcatttggcccaccaaaagcaaaaggtgccaccattttctctcctcttactcactgctttgcctttttaacggcaacaacagctacttgagaaacagtcttttaaaacttgcttccttttttaatcttaaaacctgtcttgatccgagttcttcttccaaagaagagatg

SEQ ID NO: 27575 - DNA, 3003 bp, Unknown
  misc_feature (1)..( 3003): 2750-1469P.txt file - cDNA_ID_2990828; gDNA_ID_2936587; Annot_ID_143889
acaatcgaatcatctaaaaaccagaattgtaccttcttatcgacggaggcggcggaagctgaagggaaaccctgaagagcttgcataccttcacgtctcttcttcatcaaactctcctcacgcttgcttttacggatctcaaccatgttgtcttctctcctccgtcgtccttcctccgcatccactgcaactttgtatcggttccggcgaacctccgtcttagcgttgggtctcagtgacatggctcttgctcgacaaagaaaatccgatgaaaagatataaacccgatcaatgaatgcacacaagcacacgcaaagactggtctgtgtattatatagatcctgccgagagcaaataaattataattataaaaaaaacctaaaaattgatttgggagtggaaaagtgataaagaaagagttaagaagcagaggcagcgagggacaagttgacaacagcgcatccaaagaatgaaagcacttttttatttatttttaatctttgttcttaatttatactgtaattgctaaaatattcacttatttacagttttgccactatttatttatgcaaacaggtgtccacaattaggttatttacataattagccccttactattgtgttctttgaggcaagctaatgtattcttctttatatctcaacaatttgaagatccttttgttttcatgacttacaagtggactgcgattatcttaatattaacgtatatagaccttggttactatataactttttgagttttgaatctacgtttgtgtttatacattttttcctttccaatgaaaagtcgttgtttgtcatatatggattagttatttctctctagcgagatatcctcagtcagattgtccactctttaaccgactacataccgatcatcgaagaccaacctatgaaagtaactgacgagatcataagtttgcttggccatgaaccagaccgcaatcaaggctaacaacgccggccagataaacggctcaatagctgggttggcgctacgggaaaatccaagcagaggtaacaaagacttcaagagcaagtaagggatgcagagtgtggctagaagtgtggttatgatcgaaccaatcacatcttgaagcagccacattgaaggaagcttattgattcccacgtttctgattctcttgaactttccccgccatgccttagtcgcgaaacagttgacaggaaacgagatttttgctcaggaggcaggacagtttctttgttatgaagtgatatcccaaggaaaaccacctgactatggctggaaacgagatttgacgcagagtgaggaaaattcctaagtaggcaaagggaattgacagcgtcatcatgtatccaagaatgacaggtgagttttcgaataaaccgccacctcctacaattgctattgcaatccagcgaaaagaaaacggcagaagaataaagaagaaagacacacatatgctgatggtaagagcctgtagataagataacaaacagaacctgttattcaaaacatgctccatatggtaattaagttacatagggtggacgaaggaagagaactagaagggacattagacttacatcaaaagatttgttatccagaaagaaaagcagccgtccaatggctccaagttcgtgaacagcaacaccaactagcctaggaggttccccgaagaagctttgcaatagagaataataccactcacaaacgatcttgttatatttccataaaacaagcacaaacccatctcctaagacattcttaatcaagatgtcagcctgaaacccagcaggatgtctcgcgataatgggctcgtgtatgggtatcctcatgaaaaacacaagatgaccgttgtataacaggccatttaagaaacatgcggacttggtagacattccataatctctcttgaacccaacaacaacttcttggcccaaaggatgtaaagaaaggcagtatgtgttcaagataaacgccatagcccaaggaacaaccattctcacgtaaggtgatgctctcattaacacaaacacgtattagaaactcgtgaactggaagtctctctggagcgtcctacaatgaaaacagagagcatttcatcaaacatttggtgtgcgagattcttcttaaacccatattacaagaaacagagaagaaatcgaaaatcccaacaccatgacacaaatataatccccaaaaacatcactcataacaaaatactagtaaataactttgatattctttctaaaatcgcagaaattgaagtttaatcgaaaacgaaattgtcacataacgctatagaacaagaacctcattctttagagaaaaagaggtttgtataataacctcgcactgcttgtatccgcggagattgagccagatatgaagacagtcttgatgaacattgatggagcctcgacacgcgcaccggataccataaggggtttcctggttcctccggtgatcggcaaatcctgcacaagtcttcttcttctttatcatcatcgtgtttgtctgtgtcttctaccagagtagcttgatcgtccatttttctgatgaaacagaaaggtttcttctctatctctcgtcttcttcacttccttgagtcaaagaaattccaaattttgaaaaaaatggtttgctgctttatttataccccaatttgtaaaaggccacgactctgggttcattcaatgggcttatatgatttagcaacgagatagattaattagaggcccatatatgatttattagggcacgttggtcatttaaagtccactataaattcaatcagaaattagggttttgtgttgcagacgccgtatttgtatcgcggaaagtaaacctagccgagcagatctacctctctctctcagtactcaggttagcttttcttatatctacggccgatctctggcttcatttccccctgttgtttcgttcgttattcaattgaatagtttgtattgtggtcttgtgtctcagagatg

SEQ ID NO: 27576 - DNA, 3003 bp, Unknown; identical to SEQ ID NO: 27151
  misc_feature (1)..( 3003): 2750-1469P.txt file - cDNA_ID_2990831; gDNA_ID_2684204; Annot_ID_191333

SEQ ID NO: 27577 - DNA, 3000 bp, Unknown; identical to SEQ ID NO: 4851
  misc_feature (1)..( 3000): 2750-1469P.txt file - cDNA_ID_2990835; gDNA_ID_1620736; Annot_ID_166275

SEQ ID NO: 27578 - DNA, 3000 bp, Unknown; identical to SEQ ID NO: 4851
  misc_feature (1)..( 3000): 2750-1469P.txt file - cDNA_ID_2990835; gDNA_ID_2926157; Annot_ID_198505

SEQ ID NO: 27579 - DNA, 3003 bp, Unknown
  misc_feature (1)..( 3003): 2750-1469P.txt file - cDNA_ID_2990839; gDNA_ID_2213667; Annot_ID_182140
aaatatatataaaaaggaaaaaaaattgtatcaaataatttaatagttttgttatgttaaattagataaaatgttatttattatgtattttttattgatatatatatatatatatatttagccaaataaattaatggtgtaatgatcacttgttatatctgttttttttaatagaacgtatttatcagttttttcgtagaccgtatcattccctcatccatctatcataattttacaatatttttcttatcagcaagtgtaatttgtaacatgaaaataaatgaatgaatatggcaaaatttattacaaaattaaaattattacgaatctcaatatataattacaagatacaacaaaaaagaaagaaaaaacaatgggcaaaaaacgatactagttttgccatttatgtcctcatctctcttagctgttatgcatcaatcggtgggtcatgcacctatacgttctctctctatctcactcaatatatatacacgaaccttcctcgttatttcctcccaagaacatctctcaaacattcctctcttcttcttccaatattttgatccccacacacactcacatcaacacatataaatctcctcgtaaaccctaaaccctagctagtttcaacaactctcttgttccaaccccaagaaaaaagttcaatttcgttagcaatggccaaagttgggaagctgacaaagcttaagtcggctatgaagaaatggccttctttcgccaagaaccaccaccactcaacctcctcagccgctgtttccgacgaactctcagaagacaacaatctccatgtggtttacgttggtcaaactcgaagaccttacatgcttagaccagacatcatctctcacccactctttcaagaactcgtggatcggtcttcttctagatccatcgaacaagatcgtgagattgttgtagcttgtgaagtcgttttgttcgagcacttgctgtggatgctcaagtctggtcaagaaggaggatccgttgaagaattggctgagttctatacttattgacatcgaccgattgattttatacatttatttcgtataatatataccttttttgttgttgtttgttgttgctgatttgtattttcattcgatgcggtgtgtgatcaaaacgtgatctcgtaaaccatgtcatttgcttccgtttttctgagcaattttatgatgatgatgagcatatgtagttttcttactttgttaagaccaaccaagaataaatttctactaacaacaatctttatatatattttccttcaaaatgtatttcagtacctatattaattgtaatatacataaaaaaagaatgcaatgatttcaagaaaacaaactaagttttctggtaggttttgtttctatatttattttattatggcggttttgtaaacttttgtttctattttcgtaacgtatctttctcatatgagtcatgagtctcatgacataataaagaaggcctttgatgatgttcgataaacaaaagttggttgaatatgatgagtccaattcatttattttgctttatataaacaaaatatgactagcaatgatttctatcatcgatattcatttttttttttttttgcgtatcatttgtatggtgtcagtttcaaatctatttttgtgtgtgtataaaatagaaaatacgtatgcaatttcttttaaggaaataataatggtcgctctcatgacgcgttggtgacctggtcccaatttcatgtccctactctcctttctagttgcagacattatatatttatcttttaatattcttgaactttcagccatacaaaataaattaaagcttacaggttaattagtcgatatactaataaatttgtagtttgttgtactaattggcattacttacaccaacatatgtgcattaatatacgtttatagacataaattggtagataaaataactgacattaattttccgaggtgggtacgaaaaggacgcgcagaataattattgaagataagtataattagtaagaccaaaataaattaatttcctacgtaggacgaagttctaatcattataatcaaagaaaagaagtttctttgctaagtttaattaagcttgttaattgattccgacacgctaatgattgacaagtcactcggtgtgtcttttcagcaaacttcatgggacttcttcttctacttctgtcttgttccttacattacatcaatcctatgatattatagtgtttatataaactcggttggtagctaaattgttatgggttgctgcttgttttaacgttgattatagaagaaattaataattacatttgattcgaactcaggttagttactagaagaaattgtaacgaccaaaagacagtgttgggccttagtgggccgtgcaaagagatgggagttatgaaacgacaccgtttagttttaacttagtgtcaaacactctaacctgaacagaaggtctcaacaataagagggggactagcaagaagactctcaagggaaggacaacttcatgaaagctcaggtgaagtgaaaccaaactcatcctttgtcttgacgatttgatttctcttgtttttgtttgtgcaattccctatggattcttctttggtcgttggtcttttttgtttttgtctgtgggtcgatgtgattttatcaattcttgtctttcaagtgtttgttgaaatgcctcaatgggaaaatgtaaggtttttcagggaatccattaatgggttctgctcaacccaaggattcaagtaaccctataacttcagctccgaatagggctgcagtaaaattgcttaagtctctcttcattgggttatgcgttgtgctagagtttccaaagagatgatctttcatttctcttttgcaacctcttgttatcaatctatgggatattaaggttattctccattttcattccggaaagaaattaaccagttagtgttgttcccattgatccagcaacttcagaactatg

SEQ ID NO: 27580 - DNA, 3000 bp, Unknown; identical to SEQ ID NO: 1800
  misc_feature (1)..( 3000): 2750-1469P.txt file - cDNA_ID_2990847; gDNA_ID_1620450; Annot_ID_157443

SEQ ID NO: 27581 - DNA, 3000 bp, Unknown; identical to SEQ ID NO: 9176
  misc_feature (1)..( 3000): 2750-1469P.txt file - cDNA_ID_2990851; gDNA_ID_1972017; Annot_ID_177968

SEQ ID NO: 27582 - DNA, 3003 bp, Unknown
  misc_feature (1)..( 3003): 2750-1469P.txt file - cDNA_ID_2990855; gDNA_ID_1972022; Annot_ID_178107
tcctgtagaaaatctgtggacaagaaaattaaagaagaaatgaaatcatcagattcactatacataactctagagaaagaatgtaatgaatatactacaacatgtattgtgtacatatagggttcactggtcttgacgttttcagcattttaaagaataaaacataaacacatgcatacaatgcagtgcttggttctgaagttttaggttactgaccaagttcctgggaaattgactttacgaattcataaactagccaatcaaatctgtattctggaaatatctgcgaagtggaagagaaaaaagaactctaagaaacaatagacggctgcatataatatgcagcctataactatatgaatcagagatgcacaaacagttcatgtaattgcatcattgatctcaactaacactccacagcaacacaggcttaggtcacaatcaccggcaaaactaatgaaattagaaagaagtaaaacaatgaagtcctcataatctaacaatgcatttcgcaaggcagcataaactactgcagcacactggaaatattatccgcaccagcagttccctgccagtacttttaataaaagacgaaactccaaatttaaagcctcaaatatttaatcaaaaaatcatatttccatcaaattcctagatcagttagatatatgatgtcacacgtctgtttcttcgtttcatattttatgaacagcttgtaagaaaacatattttgtttcaatctaacttcatgttctggtacagatataaagcaacaagaaaatgcaggcacctttgcgactgattttgaaaggaatgacattatcattgtatctaacatcatgttctgcttcaatccagggtattgcacctattttaacaccaaaaatgaaaacttggtgattcttgaagttgttgcagaaagaacataggaaattaaaacagttattgttatgaggagttaacctttactgctacttcctggtggttcttcaatacagcatgatgtacttgagcaatagatgctgccgcaattggttcctcatcaaaagataaatatctgacattttaactaatagcaatgtcaaaacctcttccaaaaacagacgtcaaaaaacaaatctgacatttaactctaaaagacttacatctctgtgagattttgacccaagttacttgtcagaacttgctttatttcttgaaagttacaaggaactgcctacaagataaacaaattaggaatagaacaaacaatccgaaaatgtttacagactcaactataacagtattcttaccttgtcctgcaacgaggaaagagccaacgagtactctttcggaacgagcttcaacgtagccacaaactgaccagctttcacatagaaacctttattactttcacacagtttaagaattcgtttagcagaccgtgaatgaacctacacaatcaaaacgaccaaatgttaccatatcacatagtactagtgaagtatactgcaaactttaaacaagcaatcgtatcactactctaataacttgccttcaccaatgacgaataagccgattagaatgtaattcaaactacaagaaaatcggcctaatgccattgataactacaattccatgaaaccaaaacttaaacacgaatgtaagatatgtaattgtacacctctgttaatctctgaagatactcatcggaatctgctggtaatctacgcaaagtatacttgtaatcagcgacagtgagagtgatctacaagtagagaataagagattcaatgaatgaattggaatgaggaaatggtgaaatcaatagagagataaggaagatacgaacggagtagatagcgcgagaagaacggacgacgccttctacagccgtcgctattttattggaaggtgagtctcggaagatggacacggcggtggcgctgccagtgacggcggttagagctaggccggcggtgactgtgaaagcaaagatcggagacttggatctcccgagaattttgaatttgcggagaatctccatttttgtggattctttgggtttcgtattatttttttcgtagtaacgaagaagaggacggagaagctacacattttctaacttacttgcaagtcgggtcggatcggattgatggacaatctaatgggccaggatccggttagactaatcgatgtgattttaatgggctaagtaagctgggcttggcaaatagccaaatataaaaggttaatttagtcaaaaaaatctctcaatttaaaattaactgacgtaaatcccccttcagtatcaatactgtaaaaattggatagacacagtaaaacgcagtgttttacagaatctcttttaatcgatttgacatcacacaaacttcagagaatctcattttgataaattaaagttttttttccactttgtgaattttaaagcctaggtaaattagtgcatatatgtaatttaagtgtacatactgtatctctctgcaacgaatacaaccttcttttttacccactaccacctgttttcgctaggcttgctggactcaaataatgtatttttatacggcaaaattattcattaaatttcaactttacgttatatacaacattttttacaaaaaattactaacatatatggaacctcaaacctcttaatgtagaaatattaataaatttttatttaaccattggactaaggagcttccacaatctactctaatctaataaagtgtatatctcatgggtatcaattttttttttcaataggtaagaaatcaaatcgttctacatatctttacgatcttgtgatattttacgagcgaatatcgtcgacataatataaaactcacaaaaaataaaataataatgatactccatataaaggaaaaagacagcaaatatgtagggtcaatataaacgcagcctcgtcgtctcttcatatattcgtctctttgtgttcttcttcctcctcagattctctttcactaaacagaaacaaagatg

SEQ ID NO: 27583 - DNA, 3000 bp, Unknown; identical to SEQ ID NO: 10969
  misc_feature (1)..( 3000): 2750-1469P.txt file - cDNA_ID_2990859; gDNA_ID_2214468; Annot_ID_182928

SEQ ID NO: 27584 - DNA, 3003 bp, Unknown
  misc_feature (1)..( 3003): 2750-1469P.txt file - cDNA_ID_2990859; gDNA_ID_1972067; Annot_ID_178391
cgaagtagagaaaagtcatatcagcatgcctataggggagaaaccacttactccatctgaagccatgccatctacatcatatatttctaatggtgacgcctctcagggtacttctaatgggtctctggaaactgaaagaaacaagtttgttgctttccccattgaagctgttcagcaaagtaatatggcctctgagccaacttcaaagttcatccaagggactgagaaatcgagtatttcttctggcaagccaacctcagaagagaaacgtatccctctggaagagcctaaaaaacctgctgctgtatttcccaatatctccttttcaccgcctgccacgggcttattaaatcaaaacagtggtgcatctgcagacatcaagttagaaaagactagcaggttggtggcatgatatttttcctctcagcttgataggcttttatatcactacttgtgcctaagtgagcctcatccatattggttatgattttttttttctggtttactcgcttccgactctctttcttgatgttacagcactgcgtttggagtatcagaggcttgggcaaagccaactgaatcaaagaaaacgttcagcaacagtgcttctggagctgagtcatctacctcagctgcaccaaccctcaatggtagtatattctcagctggagcaaacgctgtcactccacctccgagtaatggctctcttacttcaagcccttccttcccaccttctatttcaaatataccttctgataattctgtgggtgatatgccgtccactgttcaatcttttgctgctactcacaattcctctagtatatttggaaagttgcctaccagtaacgacagcaactcacaatcaacttcagcatctcccctctcttccacatcacctttcaagtttgggcaacctgcagctccgttttctgcgccagcagtgtctgaatctagcggtcagatctcaaaggagactgaagtaaaaaacgccacatttggaaatacaagcactttcaagtttggaggtatggcttcagcagaccagagcactggcatcgtttttggtgctaaatctgcggaaaataaaagcagacctggttttgtgtttgggagctcctccgttgttggtggcagcacattaaacccttctactgctgcagcttcagcacctgagagctctggaagtttaatatttggtgtgacatcgtcctcaacccctgggacagagaccagcaaaatttctgcgagttctgcagctactaatactggaaatagtgtatttggcacttcctcttttgcatttacaagctctggtagtagcatggttggtggtgtatctgcaagtactggaagcagtgtttttggattcaatgctgtttcatcagcttctgctactagctctcaatctcaggcctcaaatctttttggtgctggaaatgctcagacgggtaatactgggagcggaaccacaacatcaactcaaagcatcccctttcagtttggttcatctccatcagctccttcatttggtttgtctgggaactcttctcttgcatcaaacagttctccatttggattttctaagtcggaacctgctgtatttacttctgtgtcaactcctcaattgagttcgacaaactcctctgcaagctctagtagtacaatgagctctcccctatttgggacaagctggcaagctcccaactcttctccaaactctggtccagtcttcagttcctcgttcaccacatcttcaactcctaccaccttttcctttggaggatcttctgctgctactgtttcgagcactactactcccatttttggtgcatctaccaacaacaccccgtcaccttcacctatctttggtttcgggtcaacccctcctaccactccccagcagccggtatttggtaactcagggactccatcacagtctctgtttggtaactcaactcctgggtttgcatttggtgcacctaataatggaaatggtatcaacaataaccaacaagtgagcatggaagacagtatggcagaagacacagaccaagctaatagagcatctatggtagccccaatgtttggacaagcagcagtctcgatgcctcaaccaaactttgccttcggtggaggagcagcaacgcagcctccatcaatggcaaaccccttccagtttggaggccaaccaatggcaagcacgttacagaacgcatcacctttccaggcatcacagagtctagagttccaaggaggtgggagcttttcactaggcagcactggaggtggcgataagtcaggccgcagaatcttcaaagcaaagaaatccaccaggaagaaataagaaaaacacattgttcaagagtcattttatcagccttatggtctttttgttcgctatatactccgggaaccttggggattacgagcatatcgtcgtttaatgaaagaggtaaagtatgagaatgtgtatcgtttatgctcttgatcgtctctgtcattttagtatgagtcaggattttgggggtcaaattgttcagggttataaaagttgtaggaaagttttgtaattttcagaaagtactggtgtctgtaagagtaatatagctctgtgcctctgtctttcgcttctttttctttttgtccttataaaaaaacacactttattgtagctgtttgttaaactcttttctctcttcagttctggttttagtggtttaaattaataattgcctcattacaacttggtttacccaaatcaaatcgaaccaaaccaaaattgaataaatccaattcgatgatcttcaaggaagcttcttttagttgaccaattccattaaatccaatccaattcgatcaagtaaataaacaaattctcaatccttttattagagaagccttcttctccaaagtctcgatttctctttattcttccaaattcttttgtctctctgtatcatccaaaattcccagatttattcacggagttagaagaagaagatg

SEQ ID NO: 27585 - DNA, 3003 bp, Unknown; identical to SEQ ID NO: 26279
  misc_feature (1)..( 3003): 2750-1469P.txt file - cDNA_ID_2990871; gDNA_ID_2214553; Annot_ID_185632

SEQ ID NO: 27586 - DNA, 3003 bp, Unknown
  misc_feature (1)..( 3003): 2750-1469P.txt file - cDNA_ID_2990875; gDNA_ID_1620571; Annot_ID_160848
taattaccattacattaagagattttattgtctataggcttatgtataattaataaaaagagtataagaaaaagtggtaaacaaatacatcacatacaaagacagcaagcatactattactattatttaattatatatttgtatactgttattaattctaagttatctttcataaaataattttattataacttattttaagtaatttaatatttaaatcactacgatgtcaccaaatgaattattttaatttctttgtcactaatgctattttaattttctggtcaattatttttaagcccatttttacctttttaaccttctcactaattttgccactaaaagtttattattggctaatgtaacccattgaatatatattcttttgacaaaaaatattttaggtagtatggttttaaaatatgacttttagaagattataaatgttaaattctatttatttaactcttaaaaatcaattcattttctttagtgaaaaataaaggcatctttgaaatcaaaatcccaacattattactttaagaggggtattcaataattgattttaacagaatgaaatggaacgagaaaagttttattataatgattatttctctcccaatttgtgaattagaaaacttttgttttctatttaatataaattataaatattaaaaactccacaaatcctaaactcattgaactaaaaaaagccccaaatcctaactagatcagccaggtgaaatctactacatgccatggagcacatcatatacaagcttttgtcccaaaggagacatatattggcagaatctagagagtactttcaattcctaatcttttgaaaattttgccattctttcggcaagtttgtaatccgtgttgtacacctcgaactcaactcgtatatgaccttgaggttcctcggtctccatatcacccctctatggagtgcctattgttgtagtcgtccttctttatgaagagaacaatatgttttctaccctccttagtccttatccaccttggtctccggttttccaaccgagaaccccccctcattactcctaacctgttttattatctttcgcgtaagaagtaatgtatctcacatgccagtgaaaattgaggtttcgactcatcatcttctcgtttgtggcaatgtatctaatcgctagtgtttttgtcatgaggaatttgatattatttgtgttttaaaggtctttttgtgcctcattacccatgaatatgtattatcatggaaaatatcaatgacgaaagaacttggatcttcttcccattttaattgtgcacatactctaaaattttcatttgatatataatataacattgatattttctcatttatctgtattaagtcttgaagttaatctcttatggatatagagatgctacatcattacgcgattactaggtttctgtattattaaatagaggttgtctgttgtcttttccactatatagtttaacaaattggtgaattgaagcgtccaacatgttcacaaaaaccattggaggcctagtttgcttagcatttgtataagagggactttttaattggttagttatcatcactagactaaattagacggttggatcaaaggttgagtaattgacattacgattgtacctatttttgatgcattagtattatgttgcatcaccgatattatatttctagttgttggagttctatctagtgactacatcaaattgatgtacactcaatatctatctagtaccaccgtgcatatgtccctaatgatagagaagcgttcaaagttgtcagggaaacattttcactcttatagaagtctaactagttttaagtcgtgctagtctttcttccttatatttcatataaataggtcagtggtgcttgtcgttaaatatacaacattgtctgaaaatatattacctcctacatggacatttctagtatctcctacacaagtataatctcatatagttacaacacaactatttgagcaaatgtttactattttggattcatatagttcttaaaaccaacatgcataatattctttattaataaataaccttcaaataacacaactttaatttacagtcaattagaagtgttgatgattgatttttagagattagacattcaggtatcaaattcaaacacctctctaactgatccaaatgatcaaatttaagctaaaattgtagctactgatcagaaaaatagaagcaacatttgttgaatagaaaaaaatagaagcaacatctgttttaaaaaacacattgcttcaaaataataggaaagtacaaaatattagatttaactaaagatattttaaattaattaaaaaagatatttggattatatgataataaatccaataaaaaataataaaatccagaatacagaaaaaaattgcaagaggggaagcagaagaagaaagaacaaaaatcaggagttggcattttgaagacgaaactcatcatcatcttcttcctcagacaacaaaaaaagcttttcactttctctccacccttctctctctccttctgaaagtctctctctttgccgtcgttagcctcttcctacacttggggctgcgattcttccaatcctccgatttcaatttcatcctctcaatcatagtttgaaatcatcgagcttttacggtgctgttggtgtttgacgccgtaaaattcgatccttttttatacatttgatgttgattttatcgatagttttgtgagatcgattttttagggtttcgagtttggcgctgacttgagggtttgattggatgagaataaggggttatgggacttgagtcaattgggtttgtctccctaatcatcgcaaattcctgatttctcagctctttggaaggaattaggattcgttgatttcgagttttgtgttgtgttggttgatgagagagttgggtttggtcaattgaggggtttaggtgttgttttactgttttgattctgatcatg

SEQ ID NO: 27587 - DNA, 14 bp, Unknown
  misc_feature (1)..( 14): 2750-1469P.txt file - cDNA_ID_2990879; gDNA_ID_1563705; Annot_ID_148157
attgaaggcacatg

SEQ ID NO: 27588 - DNA, 3003 bp, Unknown; identical to SEQ ID NO: 22432
  misc_feature (1)..( 3003): 2750-1469P.txt file - cDNA_ID_2990883; gDNA_ID_1620748; Annot_ID_166721

SEQ ID NO: 27589 - DNA, 3003 bp, Unknown
  misc_feature (1)..( 3003): 2750-1469P.txt file - cDNA_ID_2990891; gDNA_ID_1620383; Annot_ID_155379
atcgaagatggtaacaccgttcagattacaaatagtttttggtggttcatatttagttgtaaatctcttattaacatgaagcattgcctctctttttttttttggtaaaagatgaacttgtgtttgagattttatgtaaataaagtatccaagtatattcatataaatcaccaacttttgattcaaagcataatgtgtgtgtatacagtttttattgtttcacatgtctaaaagcatgcctttccatagtttaatcataaagttttataagccagcaataagaatacttttggatcttgtgattcgtgtatcatatgattaccaaactcaagatgccaaaaaaggttggtaaacaagtattttattgatccaataatttgttatactaatacacatacgatttagttcaataattcctaaagaaaagtttttttgtttgtttttcatttggattgttaaagtattcaattctttatgtcgtacaacaagtaaatagaaagaaaaaaatagagtgcgagtttcactttcaataaatgcttgtgtgattatctttatttgtgtacatactagatctacatccaccgacaaaccagtgtcgaggaagcatatgcaactgtcctgcagatttaaagtctcatgtaattaaatgttgttcaatttgtttgttgtgtgattaccagtttgatgtatagttaaagttaccaagtaataaaatcatcaaacatacatatagtactaattttttgtttatcacataaacattttgttgactttttggtgttgtttgcaatagcatcttcttgataaattcctagtgaactcaaaattgacctacaccagttccatacaaatagaaagatactccaaaactagttgtggaagtggttgaatataattttatattccaaacttagaaaattcatgttaaattccgcaaaagagcttataacgtagtttatgcacgatatggttaaacttcctcagttgctatagagttaaaaaaaaacaaatattttgaaattggtaactagtacgtgaaattttttaatgcagactgaaagaacaaaataaaacttaaaatatgtttacaaaaaaatattctttcatgatttacgcaaaccaaaagttacatttaaggttaggaaagaaaaaatgacctaggaaattaaaacaatgaggttcgttgataaaggtcaagaatcaaagtttggtagccaaattaccagcaaacaaaaaaagattaagaccattaatccatcgcgtatactcattgtcttatgaatcttaaacaataatattatattatatacagtaggtccataatttatgtttctttacctactctatttaccaaaaacatacatagtttttatctgacttacacaagtgtactaatggccagacaagattgttacttgttcaagtaaaattgtgttaccagatattcaactttctatatatacatatagatttgacaactattcgactttctatatttaactgaaagagttgtatcactgaaatttggagtattgttccctgtaaataattcgatttgtttccaaaacgctatggaacaggccttgattttgatactctttcgtgctgacacttgaaacggcgtcgtatcaataatagaagaaaaccttactgtggaaataatcaaattgtgaatctccaccaacctcaatgggtcccattgccacccactaatctccccacgtacaccaactccccttcacgttttaatctcttaatatacttttattataagttaattaaatgatttcaaccttagtaatactaaccattaattattcatttctaatctccaatattttttttgaaaaacctttctgttcagatattttcgtcaattaatcaagatctcattcataaattaaaaaaaaaaacaaaattcaagctaaaaatacatacccaacaaaaattccttaaaaaaattacttatggggcatctggtaatttaattttcctataaaagatggcaatattaattcagtttttttttttaatttaccaatatgatactttaattatatttcttacttgttagctctactaatgcacacatacttatttctacgaatataagaaaaaaatactgaactcaaacaatagacaaaaaagaaataatcctacactcaagtgtgttgaaaaataacatcaaattcagagaaaatgcacatacaccaataatataaataaatagggatatttaaaataataaataaaattgcgaaaatatcgagcaccaccagatctacagaaatgacacagagcccaacgatgatgtatctcgtttattttcgctataaataaactcacacagcccactcttcttcctcgctctctctttcgccttctcttagcctaccctttttccttcctcctctccgattcttcctccgtcaggttcgtctccgactttctatgtcttccttacgtctctcttatttagctccctttccttccttctccacgttattattactacttcgcttttagtgtgattcgtttcattctcgtttttttatattcctcgatctgtttgctcatttgttgagatctattcgctatgtgagttcatttgactcagatctggatatttcgtgttgttcgatttatagatctggtttctggatctgtttacgatctatcgtcatctttcctttgaaaatgattggtgtttctgtgttcgtattcgtttagatctaaagtttttgatcgatgaatgtcgcatgtgtttttatctgaaagttttcgattacagtatcaagtggtggtagtagtagtagtagactcaaaaagctgcacaaactttttatacacgtgaattgtgattgctttacggttttcttggagtttgttaattaaatcatttaatattaagaagtttatgaattaagagaacgttattttatactatgattttgattttgatttggtttgtgtgttttaatgcagtaaaagaaaatcaaaatg

SEQ ID NO: 27590 - DNA, 3000 bp, Unknown; identical to SEQ ID NO: 14459
  misc_feature (1)..( 3000): 2750-1469P.txt file - cDNA_ID_2990899; gDNA_ID_2684120; Annot_ID_190932

SEQ ID NO: 27591 - DNA, 3000 bp, Unknown; identical to SEQ ID NO: 13917
  misc_feature (1)..( 3000): 2750-1469P.txt file - cDNA_ID_2990903; gDNA_ID_2214670; Annot_ID_189100

SEQ ID NO: 27592 - DNA, 3000 bp, Unknown; identical to SEQ ID NO: 10011
  misc_feature (1)..( 3000): 2750-1469P.txt file - cDNA_ID_2990908; gDNA_ID_2213359; Annot_ID_180730

SEQ ID NO: 27593 - DNA, 3003 bp, Unknown
  misc_feature (1)..( 3003): 2750-1469P.txt file - cDNA_ID_2990916; gDNA_ID_1620813; Annot_ID_169145
tacacggtacacataaaacagagcattaagcacaaaacgtgtatttgagtggtttctttagccacaagttttttttgttatttgcaggaagaaaagctttggattgggcgtcgagatatagaatcgcagtaggagcggctagagggatttcgtaccttcaccatgattgcattcctcacattatccatagagacatcaaatctagcaacatacttcttgatcacaacatggaagctagggtttctgatttcggtttagccactttgatggagccagacaagactcatgtttcgacttttgtggctggaacattcggatatttagctcctggttggtacacaactgatagattcaaatatataaaccaaaatttggattgcatttcgattttgttcatgtttgtttttgttataaacagagtatttcgatactggaaaagcgacaatgaaaggagatgtttacagtttcggagttgttctgttggagcttttaactggaagaaaaccaacagatgacgagtttttcgaagaaggaacaaagcttgttacttgggtataaagttatctatctattttccttgtataagttattaatcttgtttggtttcaagcgacgtcgttgtggtgtgtaattgtatacaggttaaaggagtggtaagagaccaaagagaagaggtggtgatagataaccgattaagaggatcatcggttcaagagaatgaagagatgaacgatgtgtttggtatagcgatgatgtgtcttgaacccgaaccagcaattagaccagccatgactgaggttgtcaaattgctcgaatacatcaaactttccacacgttcctctttttgatgtttctcttgtcaagaaaaataatcaaattcagttccaaaataaagttttgctgaagaaaaagatttcgagatctgcttctttgaaaagctaaattgtaatttaatactccatattagtatagtaaagattatttataattgatttgttttagtatggaataaaggattattacacacaaaaaagccttatatcaactattcttttttaagattctcgtacaaagtgggcattggatctttaatttttccctaatttacagctcagctcacgttttgatgtcttgttatttgatcccaaatgttctcactactacattaaaccttttgaagcaattagcaaccttttttttttgttacttagcaaaaccaaaccaaacattacgtttatataacgacacttttgctaaaacggttacttttcctagaagcaatttgctggattattcacctcaaaatcctaaaaacattaattagcattagatatctaaaaaaagtgaaatacaaatctttgtttctttttaaattgttttattttataaaattgattcacttgctcatcatttatatacaccaaagagtgtagaagagttctctcactcaaacaaaaatcaaacaatggctaaagcatggatctgcctttccttcctcatcttcctctaccttgtctcaggtatataaattaccagtttaccactaatcagccatcctagtttaattaatttaataatcctaattaacagtatcatcctcatgttctttccttttaacagaacgaaacttcatcaacgtcaacgcagaggtatttgcttagaccaactatcaaattgctatctgatttttttttcttactcaatgagtttttgttctaagttgttgttatagaccaagacttggtgtgtggctaaaccttcttccgatcaagtagcacttcaagataacataaacttcgcatgttctcatgttgattgtcgtgttcttttgagtggatgtccatgttactcccctagtaacctcatcaaccatgcatctatcgccatgaatctttattaccaagccaatggaagaaactattggaactgcaatttcaagaactccggactcattaccataactaatccgagtgagtttgctctttctctttaattatgctatcgaaaaacacttctctatctatatatagagagaagtggttttaaaggtaatttcatttttacctttaagtatctggttaattatattaaaggtaatttcattttttctatatgtgtaggctatggaaactgctactatgaataaacatgagcaagaaaggaaaaaaaaaaaccatatttcttacaagcaaacagaagaggaatgtgttttcttgttgttgcaatgtttatgagttataatttaaatttccaaagttcgcagattttgattaatcaaatttgataacataaaagcaaaaaagaaagtatccaacacttatcaaaatttgatcacaattattccatctcattttcagtaatgacccttattacgtactgaccgtaaacatagaacttaccgtaattaagcttttaaaattgaattcttcaccacatgaacatttggaaatatgtagaacaacgtaacgttttcttttcttttttctttggtgtcagaaactaacgcatttctaaagattttttttttttataaaggtaacgtatttcgatatactcgaatgttagtatgttaaaccattggataaatgacacgtggtgaaatcttagcctcaagattagataagcgtagactaatcaatcgtttccctcttctccttggtattgaacaaaaacacagtcgtcactttcgtgcctcccgaatgatctcatgtgggcttgtctcgtccacccaacaaactatagaaaaaaaactcgatcggctgatacttaatcacccacttgattttgtatttttgtacctttttttgttgtaatttttccatacacccaatttcccgtggaagaaaaggagtcagctttttcgtttgctttaaagcttgaatctttacatagttccagttactttctatagagcttcataatccctagttgcccaaaaggattctgggttttgtgagaatgatgacgtcatgtcggaatatagatttaggtacgatgatgatg

SEQ ID NO: 27594 - DNA, 3000 bp, Unknown; identical to SEQ ID NO: 10594
  misc_feature (1)..( 3000): 2750-1469P.txt file - cDNA_ID_2990920; gDNA_ID_2213664; Annot_ID_182018

SEQ ID NO: 27595 - DNA, 3000 bp, Unknown; identical to SEQ ID NO: 4034
  misc_feature (1)..( 3000): 2750-1469P.txt file - cDNA_ID_2990924; gDNA_ID_1620680; Annot_ID_164402

SEQ ID NO: 27596 - DNA, 3000 bp, Unknown
  misc_feature (1)..( 3000): 2750-1469P.txt file - cDNA_ID_2990940; gDNA_ID_2926240; Annot_ID_204062
tgtttaaatagaactccggaggattcattttctttggcagaatcggcccaaggcttagaagctgactggaggactgaagcaatggcacttgaatggtttagtcagaacttaagagagcataacaatccccaccctgcaaagttagaagaggaagagcctcaggttgatcacccactagaaaaacctggacaaaccaaatttcgacaaaccttgcgagacaataactcatataatcagaatcagaaagctggaaagcttaaaagagacgaggatacgcttgttattggcattgacagaagcatggttagtacttcaatggcttatttttctcttctctctctcacgcgttaatcatgagactcaatttgtgtttgattacagttgaggaaagtatctgaagggaacaggacacacgttggagctcgagtggacgagaatgattcactactagagatcatacggagcaaggtcaaatcaccatttcatcttttccttttcactttattcagttttctattatagaacatttaacttgaaaaaaactttagcagtcgttcaacctgagaccagcagatgcctcagggagaccaaactttcaagtagctgttcccaaaaccaacttgaaggtggctgcaattctagagaaagccaacactcttcgccaggtctctccctctctccttcttggttaaatttggacacttgatataataatctgttgcacaaagaaaaagatataataatcttggggatcgataaagtggttttgtgacatacatataaataggcaatggcgggaagtgacgacgagcacgattcagatagctggagcgagtgagtcgttgaatcaaatctgcaggtaacaaacatatagatcacactctgtatagaagaattctcacattgtatgtattctcacaagtaatgtttttattgctgtatttttgacacattgtaagtcactctgtttttttcccctttatatgtacacccaattttaccctcttttaaagggaatcaatccagttgatgtttcagcatatttgcatgtttgatcttttcacataaacaaatactttacataagtaaaagtaagtgttataggacttgtaatttacatcaagatacattttaaattcaaccttcatcagtgcatatgcacaaatcaacaagtatgataaatactgatagtagatgaaaaacgatgttggagagcaaagtatttttaaaagtcaagaaacgctaagtttttgttatgacttctctgatttgttcaaactttttgaaatttgaagtgtgaactggaatgctactagtcgtcgttggaatatttagccacgtagtgtatgtctgagtctccttgaacaatcgtttccaagttgaaaaaagaaaagaagtgataataaaaagtcaagtctaagagttgaattgtcatcaaagtacgattagtggaagtggtacggtatacgtgtaaacgatcctaggaatattccgtacgatatccggcctaacacggtcaagagtcataacgtctcgtgaattctgtacttttttgtgcctggtagagttgacacgtctcttactatgacgacgttctgtttcgcaaagggtagtttggtcatttcaaaaaaatagccgtagtttggagtcgtccaaatcccaccgtcgccggctatactcgttatcctaattatatacgctctctgttttctaattggtgaaaaaagctttgtttaaactctttttttttataggagttcaattgtagttgcgctggagatgagtcggattcaattttgaaaggattttggcattgaagtttctataaaactccttgtttgaacttggaaattcactaaatctgttgaccaaaaaaagattattagcaaatgttttaggtgtttggcatataacttttctctaactttaagactaatatttaatcatgacgtaacttgattcaaatttggatttacagctaaaagaaataacacatctcatgagtcctcctttttagctgatttctattgctgttgtagaaccccatgataactcaggtttcctcttacacgtctgtttcaatatcaattttgttttagactaaaccatcttcttctttctttcctttttctctttcctgtccacgttagtttccagaatttggtatttgtagtatgtgttgaaaaatggtttgttttggagaaacggccagaaatattctagaaattcacagccttgttttcttatttgatgataacacgtattataacgctataagacacatgtatgcgtgacagaaagattattaaatatgaaattgtgcgtactgatatatatcatgccccttataataaaacttataaagaattggatcgttacctagaatagttttaggttattataagtacggtcacacaccttggagtttgaaataatatttcccagtctacatttactgttttgtctttgctgcgcactctcgttgtccattcaataatatttttgttggtttgtcaacttgtccatacaataattattttatctgacttttaactccttttcttttcttttctttttcatatgtataattaagctaaaaaatataatcaaaaattaggtcgggacaaaagaaaaggcacttactggttttttacaattatgtggttgtgacataatacacacagaaaactaataaaacgtgaaaaagaaaagttttagatatggaatatatcattggcaatggagaatcactagttttttttaaaaaaagttgggagacaagaataagattacacatttgatgaaaaagaacatatatctcccgaatattttcttggtcggcttgtctaattttttttttttttttatttacatgatatcaagtatatgttttgtgaagacgtcaaaagagtatttgtaaagattagatggtgttggaaaataagtaaaataatttagccgattattaaaggttaagaatataataattaaagtagaatg

SEQ ID NO: 27597 - DNA, 3003 bp, Unknown
  misc_feature (1)..( 3003): 2750-1469P.txt file - cDNA_ID_2990944; gDNA_ID_1620477; Annot_ID_158196
aaaaacgaacaaaagtaagtaccaagctagaagcagaggaggctatagaggtaacggcgagagatggtccaccgcgagaggaggaaggagttagggttttggagcagacaccttgccggacgtgccatattccgaccttctccaacgccggagcaagcacatacttccccgtcgaatcgtaagctatgttcgaatctacagatgaaatcacaccgaaagaggtcgctgcatcgtatctttggtaagccttcaccattctccaaaagctttggttttgattttctcttcttcttcttcttctagcttttgatggcgggatttagggttttagagtggttaaggcagcagggttctaacatccaatgttacttttgataaattgcgatatagtcttaaaccttttgtctattcaatatttaacccctaactttatttcaatagatttgaagcccttactcttcggacccaaacttttgttttctcaatttgcaactatgttgtgtaatcattggtactaagaacgaaacagaacaaacaaaaagaaaaatggctcacgacatccatgaccaatattagtaattttttatcattttcttaaaaatcaatgtataataattgaatgattatcatctaaagaaaatcaagaacgtacactttttatcttattcatactctaggcttacctttttaacatccacattaattttttttattttttttgttaaagggcccatccacattaatttttcctagctaatttctttcaaaataaaaggatatatagaaatatttgtgtgtatatacattagttcatataagtgtctcttaagtttcaactccttaacatctagtgatttcaataatgctgattcactcactatgagcataaaaagagatatgttattacttttgagtttatcaacaaacatatggaaaaaataccaaaaaacaaacacacaacatatgatcagcattcaaatacataaataaaaataacaaaaaaaaagatcacaattataaaactttcgtatttaccattccacgaataaacacatgccattacattttaatgttttatgcatataaatagtataaaatcatatactatcatttcatctcggaagcatcatcctcactgtggtccgagggattcccaattccgtgacgtctactagggaacaccgtgaaaacagcaccggagataactccgatcaccggaggcaaaaccatgagaaagatcttcccagcggagccaaagccaggatagaaacaattcacggtgtttgcatccaacaaggaaataacactgaacacgataagagagaagaaagcgtgaacgaaatctccaactctaagccttttcgaagacaaatccactgaagatgaatctggccaaagacccttcacggtggcaactccataatgaacgtaaccgtctcttgttcggtaactatcggtgaagcaagtgaagcaacaagagaaggcacaaataacgatgagaactccggttaagtatttgttgatgaggaggcaatgtccattgttggttaggacagggtttaaaaattggaacaagaagacggttccggtcgggaggagcttgatgaggtctcctacgcctgaatatgtccggtctcttatggctttgaatgttttcgacatttttttgttcttcttttgtaaattatatttttagttgtcgtttatagtgttcttgaatgtgaattcataaaagtgttgtttgtcgagtgtttataggatgagagagagacattgcttctacgtaaaaacgggtttggtgttgcttatactctttagaaaaagttgggggaaaatttaattataacttttttatttgtttaggttaccctttttagtattttaggcttgtactagaaaacgtggcttggaggattagattcgttatgtttctctttgtattagatacatagaagtgtgaagtcatttttaatgctccattccatttgttgtcacacatatcgtcatacggtcgttgaaagatctggtagtccaaaacgtatcgagtgtgaaacaatatgtttggcaagtagaccggaacatgtataaatttatttatatatttgaatcttgttaaaaacatttttgtgtatttagagactacacataggaaactactgatttatacatatggtttactcgacttaatagtttgttaaaaccggttaagtttatgaacgttttgtagaacctgtgaatactctgtttttaaataaaaataaataacataacatttctaaagtagtatgatagtatcacagccgtttcatttgtgtgaatgtcgcgaaaatcaatatgctctcggagtttcattggttgtcacacactatagattcagttcattcaaccttagtgatcatcatgatttgacgctcgtcttaattcatcttgatacatcgaattataattcgtcatattacattcgtacacaagtcaggtccagatggggtggacagagatgcgctggcttttgggtcattgtcttttcaaaaaactttcaatatagatgacacgaaaagcccaagagcccaaattggagttgcaacggggccgtccgtacactaaaaatctttgttcacgtgactgatcattgttttgctcttgtcggattagtaatctaacgtaattcattgtttgatcaggacttgcatttgtccaaaacaaaaaaaaaaagtcaaaagaagctaaaagatactgtgaacggaaaaaatggcagctttttagtgctaattgccagagagattcacatgtacccattgttcagaactgtgttacatactaaatggttcaaaagagaggtgattcgagcaagagacatgtgacctagtgaaaaaagcaaaataaagagaatataaaattgtgtggcaagacatgagtggccattcttcagcctgttttgatatgtgtgacttcatttgtcttcagaatagttatgacaccattctctttcgtcatccacaaatg

SEQ ID NO: 27598 - DNA, 3003 bp, Unknown
  misc_feature (1)..( 3003): 2750-1469P.txt file - cDNA_ID_2990948; gDNA_ID_2936573; Annot_ID_194837
tcattatttctttttcttaacagaaattatatatgtataattgattctgataattatacaagaatttggagattcagtgtggtctcatagcataataatgtctttttgcaccattcctctatggtgcagcaaaaacaccacataacgtttattgtgaaaagttttaagacacgtcgtactacaatctcttccaatataagttagaagattacacgactcatctaaattatgtggtttttactccatattgactagagtgagagtgatgaccacaccattcaccatatcctactctctataggtttttgttagctatgagagaaatagtttcggtcactatggcaaatttaatcccgacatgaatgaattatgatgttttggtgaaggacatttttgagaacaactaattgagtcttcatagataatacatgatccgagtttggatattggatgcacgagtttttgatgtagtcacctttgttatcactcattcttactcaagtactaggtaatttgtttttagtttttagtattagttactagttagaccattttattttgtgtggattgtatattactatatttgtatgtatcatttttgtgcttactatatcaaagaattgccatgattaccgcaactatacgaaacctttatctacttctgacttagaaacactagttacaatttggaaagaacgcaaacttatttagaaaaatgcactcacgccgcctaactttgacatacagtaaaacctctataaattaataatatttggaccaataaaatttattaatttagagaggtattaatttatcgataaataaataaaattgtacaaattttgtaaattcttacaaaaattcgatataaaatatagtttttttccctataatcaatagtatttctaaaaccaattacaagtagaaagcaattattaagtttgaaaaacaatacaattttttcgatattgtaaaatattagaattgaacactacaaagaattaacaaaaattgaagaaaaacattactagactcatattttacatatgatatttataatatatattgataaatttatataattattaatttatactattgatggaccatataattatataagattttcaaaaatattattatcttattaatttatcgatttttatcaatttttacattggtcccaacttgctcagaatctgtgctcattcttatgcattctaaagaacttgctcagactctctgctcattacagcaaaacttctataaattaatacttgaaaaatttattaatttttcaagtattaatttatagaagttttgctgtatatgtttggcttatgatgtgtaatttgtttgaaattggagggaaatgatgggactctgagcacagggtcaaaagagaaactttagaatgcataagaatgatttaagtattatttctaaacttgagggttctttttgaaaattacaaataaacggcaagccaaccctaattcgagtcccatttctgtgatcttgacctcttcctttctcactcaatttctgagctaaagttagggttttgccgagatttatcgtccttctgttaaactcttcggagaaagatgaaatctttcctcctctctagacaagcgatccaccgtatttcactattatcttcaaaaaccccaactttctgcagaaacttctccgccattacatccaccatttctcactctgatcgtcatctaagaagctacgacgaacaaaccccattccaaaatgtcgaaatccctagacccatttcatcattcaatcgatatttccactttactcgcgagtcccgactcagtgaatccagtgccgccattgacgactcaaatgaccaagaggaagatgacgaagatggaacaacaaacgagttcctctcacgattcgtttggataatgcgtgggaaagtctcagaagcttacccagattgtgacaagaagatgattgatggtatgcttctgcttattgttgagaaagtcgtggaagaaatcgaaagaggtggattcaataaagttggatcagctccaccttcaccgtcatcggagtttagcgatgatctatgggctactatctgggaagttagtaatacagtgttgaaagatatggagaaagagaggaagaaggagaagatgaagcaatacgttcaatctcctgaagtgatggagatgtgtaggtttgctggagagattggtattcgtggtgatttgcttagagaacttagatttaaatgggcaagagagaaaatggacgacgctgagttttatgagagtttggaacagcaacgtgatttggataattcgattagggaatctgaaactgtggatggagaagtagaagaagaagggtttgttccttctgatgaagttgaatctaggagtatctcccttcctaaacgaaaggggaagttgaagtacaagatctacgggcttgagttgtcggatccgaaatgggttgaaatggctgataaaattcatgaagctgaggaagaggctgattggagagagcctaaacctgtaactggaaagtgcaaattggttatggagaagcttgagtctttgcaggagggagatgatccttcagggttgcttgctgaatgggctgagttattggagcctaaccgtgtggattggattgctttaattaatcagttgcgagaaggaaacactcatgcatacttaaaggttagactttagtttcaatcattaaaatgacttccgctagattgttcttctgaaattcataatcaaatcaaactttgatgcatatttgtttgttgtattggcctacttctatagtgttggttcttgactgatttccccaattgttcgatttaagcttttttgctaattggattgctatggaggtcatttgatggggtggaagttctgtggtttgatttcgttacttcttttaatgggattcttgttgttgttttatttgttactctaggtagtttgttcaatcaagatg

SEQ ID NO: 27599 - DNA, 3000 bp, Unknown; identical to SEQ ID NO: 1318
  misc_feature (1)..( 3000): 2750-1469P.txt file - cDNA_ID_2990960; gDNA_ID_1620386; Annot_ID_155456

SEQ ID NO: 27600 - DNA, 3003 bp, Unknown
  misc_feature (1)..( 3003): 2750-1469P.txt file - cDNA_ID_2990967; gDNA_ID_1620481; Annot_ID_158331
gttaccttagtattatgaaagtaaagaatgctgtgaaaaagattttcgtctgattcagaattgaaaatgtcaaggaatcaagactcctgtatgagatctgcagcaaactgttctgcagtgcatatatggctgcaggaagtcctgatgctgtcaaggatcccatcaacgtccactcttttgctaatcccttcaaactaccatttcttgccatgagaatcagagcacatatgacctataaaaaagaacatacagcagaagcatgaaacagtatttcataaatgcaaaattttcgaaagtagaaaggaaaaaaaaagatccagtaccttaacaatctcgcacgtcaaaacagatgaagttacaataacatcctttctgcaaaaacaataatgcggtaaagtgaccaaaccatgatagagacaatctattaactgtttaagaagaaacaaacaaatggactagtgaacacaagtctactagttctaaatatccatggcattttgccgcaaaattaggcaaagtgactcgatatcgagtactagataacgcgaaaggttacacggtaccctacaaaaccaagatgaacaactaaaacactatgatgaaaagctatattcaaggcatcaatgtagcaaactagtagattcaaattcatctctctaacactttagaaaatggcttagtttaacagtgaccatgtctttttccacaggaacaacgagaatacatcacaatcgtcgcatataacttcgaaattgtaagtttacaacactattctcaaccacaattcgcagaaagccaacaaaacagatgcccagaaatcgaactccatctctactcgctacataagactaattacaaccaaatctcgcaattcccgataaaagcgcacgaaatcagcgaatatgaacaaggctatcactaacatcagagatttaagaggcataggttgttgcaagagaccgtacctgatgcagcgtttggagatcagaggctgggctccgtactgaagtgtgagcaatatggaataaaacaaaaccttagggcccatactcgacggactctttgctccgttagccgtcgccatgaatctccggccgtcgagaatccagaaaatccgccttcgctttgttctgatcttttggtcgagaattggtttgtgctttgaagaacgctttttcactttttctacattggacgtcgttttctcaagagatgaactacaaaacgccgtcgtatttgtttgacaagtgtaaaaacaataatccttgctaagtaaacactttttgggaaattttgcaagaatttatccatattaaatttgtcaaatctagattacaaaaaaaaaaaaaaaatccccaccaaattttgtaattataaatgtaaaaatattatgaagtattgatagttactacaatctagtagacattaaaaaatcataacaccaaagttaaaacattttctctggcgatatgcatcccgggctattggtattgccgaaaatctacgacgtcggaacataaacgtggacccgtattgttcgcgatgttgcacggagctggaaacaaatgaccatacaatcttctcatgtcctcgggttgaaatgatatggagagctgcaggctttcaaacttcccaattatgtgacaatggaataccaccggaagagaagttgcgtatcatctttcaaatgcataatgattcaagggtggatcgagttacaagatttatgcccttttggttaatgtggagaatatggaagagcggaaacgacctagtctttaaccacacgcgaacaaaattccaaactacagtggagatggctctcaatgacaccaaggaatggttggacaatacaatgacaaacgagcagcaaaatgggaacaggaatgcagatccgtctcgtaataccaagtggtcgccgccgggaagagacaaattaaaatgcaactatgatgcatcgcaccatgaaagaaacacagtttcaggacttggttggatccttcggaactctcaaggtactgtgatcgagtgtggtatggggaaatttcaaggtcgtatgacgacggaggaggcagagtgttcaacacttatttgggctatacaagcttcctatggcttcgggcataagaaggttatttttgagggagataaccaaaccatcacccgaatgataaacacaaagtcatctaatccaaggctacaacactttctcgataccatccaaagttggataccaagttttgaatcgatagaattctctttcaaacatcgagaacagaacggatgtgcggatttcttagccaaacaagccatcaaagagaatacccaatggtctctgtttcattcttgtccttattttctgagtccatatgtaaacaacgattactcttaagttctaaataaagttataagttgaaaaaaaaaaaaaaaatcataagaaaatctacaagttatgttttctcaatcacatccacttcttaagaagacataacatgtaacatgttgatatgaaaccatgtgattagtggaaatgaaaagcagaatgtaaggaggttacaatgtcagaacatagcaaatcatatataacttgattgttcctttcttcaaagcaacaatggaattggaatatagcatccactaaaagccttcaaaccaatcatacgagataataatgcgatttcaaaactgatcaagccataaagatgaataatgagccatagttgcattcgttcaatccgtgatttcgtaacgcgaaaggccaaaacgttattaagttccaatccaaagtaattgacaaaaaaacaaatggacctcgtgacaatgatgatatgaatctctcccaatcacaaaaatgagtaacaaacaaacactaaaaagattagggttaaaaatcataaatagtcaaaatcaacggccgtgattgaaagccaccctataaattctaataatcagtttctgagtgaagccattgttatttgttttcgttgccactctaacacaatg

SEQ ID NO: 27601 - DNA, 3000 bp, Unknown
  misc_feature (1)..( 3000): 2750-1469P.txt file - cDNA_ID_2990971; gDNA_ID_2936570; Annot_ID_194749
tgggatattgaatctggacgcaataccctggtgaactttgaaactggacgcatccagacagacagagcgattcaattagatacaagcgatgatccagctctcgtatttgttccgtgcatgaagactgtgaaggtagtcaccaccttactattgtatcagcaaatctttccattccagtacttgcattatttgatgaattgttgctgcaactgtatataagggttttggcatgtggtcgggtagaacaacactgatgcttcgtggacactacgaaagcgtgaacacttgctgctttaattccaatgatcaggtataaactcaatcctcagaatcttcccgaatttcgcgagtgatttgagtttgtaagtttgcttgaacacacctctaaatccgaattacttgttatacttgctcataggaactatacacaagtggcgcagatagacaaataattgtgtggtcaccaggcggatccgtggaagatgaaatggttgagctaaattctagtactacttcaaattttcataatttagaggttaggcagtcttgttgtggatgtctctttaatcaagatttgtctatttgcaggcgcaaggtgaagtagctgaagataaagacaactggagcgactgagagaaaacaagacttctttctcaatctgtgaatttctatgtcttcacaattacttgaccgcagcttctgcagtgaaagatgtgttcccatcgcagccatagttaaatcggtatttagaaatttcttctggtctctctttcaagcgttttcagttattggatacattatatttgatcaatgtgtaaagtttcagaaacttagggaatagatggtggagatgtttcataggaatgttatatttggattgatcaagaaaagggttttactagattgcctctatgatcaaagaatagtctaataatgcaactatgcaagtatcgttcttaatacaaaatctttgcgtctcaagttggcattgtcattgaaagcctgtcgaaatgctctctaaagaaattttgcttaattggagtttcaatgccaaatccttctttgtttctatgaccataggaaaatttagctggattgattaagaattgggttttactttattgcctttgtgattaaggaataatgtagtgatacaagtaaggttcttagtactaaatccatgcttgttgagttggcattttcattgaaaggtatttctaaagaagtttccttaatcggtgttgcaatgccaaatcattggttgcctctatgatcatcggatcatatgactggattggtcaaacagaatggttttactttattggctctattatcatagaataatgtagtgatgcaagttaaggcttttaataccaaatcctcacttctcgagttgtggcatgttcattgaaaagcctgtggaaatgctatctaaagaaattttgttgatcagagtttcattgccccatagcgttttagtactgaaactataacaaaagtctaaaactggtatagatgatgatatgccgaaatgtataatccatgaaggttagtaatagttgctttgtctgtgtgaattcaattaacacatgacagattatgcctacttaagctggacaactgtggctaggctgcctcaagttgatttggtgatatgctgtgttctttaattatgggtccagtgtagttgatagcttttatgcctatgggtcatatgggtgttctaatgggtgttctatttaagaagtttgcgtgatcacagtttcaaattcaatgccccatagcgttttagttctgaaactattgtaccgatgatgaaccggggaattcaaaacacatgtctagaacttatatagatgagtaatccatgaaggtttagtaatagttgttttgcctttgtgaatctattaacacagtaataggttatgcctacttgagctattgctctggacaactttggctgcttcagtctcttggtcaagacatgctaatttgttaagtattaaaatgttattttaattacgggtccagtgtatatttgagagcatgtatgcctatgggtcataatgggtatagcgtcgtggaaacagtgtgaggacgtttatatagtcaaacgaggcaattgtgtacatagagattttgtatgattcttaagtaaaatgtgtcaaatgagcaccaaggaaattgcctttgtttgttacccttaatctcttattttgtaaaatccaaactttcgaagctcatttggttgaaaaatgatcaatgttacgttgaacaacattgaatctgagttcaaaatttgtttagttattgcaaacaatttgattcgaagttcaagttcattctaatcttgcacctttgggattatatcttgagcattataaaatgtcatataccaaaatccttacatgaagtatgatattctaagatgaagtcataagaagacacgcatttaagagagtatcatattacaagtagtgagctgccaagtgggcatcgtgttagttcaaaatttccgaaacgtaggatgttggataatcccaaaggtcaaacccccaaaacaaacaaagtcaatataacttaaacttaactataccatttccttatataaccttcgaaccataaatccaattcggaatattcgttgatagaaaacaatcaagattcaaaacctcaaatatttctcatcatcttttgtcgattattgcttggattttgtaaagacaagaataagttacttctaagtgttgtttacacacttttttggatgacgaaacaacccggaacaagttgaaaacgacgacgcgtagacatgaggctcgcttgattgaccattacgccgccagggtagacttttcgtgcccatatataataaacccttctctttcctttatcccacaacatcatccactccaaatatcacatattaccaaatctaatcgccgacatacattgaactcaaatccgctcagaatctccgacaatcagttccaatccatg

SEQ ID NO: 27602 - DNA, 3000 bp, Unknown; identical to SEQ ID NO: 954
  misc_feature (1)..( 3000): 2750-1469P.txt file - cDNA_ID_2990975; gDNA_ID_1620341; Annot_ID_153989

SEQ ID NO: 27603 - DNA, 3003 bp, Unknown
  misc_feature (1)..( 3003): 2750-1469P.txt file - cDNA_ID_2990982; gDNA_ID_2598; Annot_ID_145809
  misc_feature (38)..(38): n is a, c, g, or t
tctctcgccacgttctcatcaatctattcaccaaaagnaaaaccagaaaaaaaggattgaaaatcacataatcaacctttgatcttataagacaatgaaccagtactatgctcacaaaagtaagaattccagataaacaaagcagaagaacactccaacttgcaaaattacacacataaaaggaagtaatttgagagttagaagaagaaccttagggccacgctcgatgtacttcatagcaacaagttccttggagtttttgactctcatgagcctcgccactccaaaattcccagcaccgatgtctttaacaagctcgtacttgtccattttctcgtagcgaaatcaaacaacaagcctaatttccactacacaaagtcacaaacccagaaaatcaagggatgcgattcagaggtttttcgcgatggctaaaaaaggcacaaagtgatagaatgagattttgaaagcaaaagcgaaattgtcgatatccttttttcttatccgtgaagaaattccaaaagaagatatgattacgaattacaatgatgatgatgatgatgatgatgccgtaataatctccatcgttccttgctggcttcttctctcgaagtcacgatggctcttatttttttattatttaagtaatagtttacttattgaattatttttggttaatttaagaggtatattaataaatgcgggacctacaaattccaattctatcggttctttagtgactgagacgtcgctatatgtgaaaaggatattttagttgtcacagaattgcgtctatttcttattttttcatctttttgcaatttaccgattctacgagaacatcatttgtttattggatatgctttttttaaagaatcaagagaatacgaaaacaacttgtactcaagaatgtttactataattctctagtggatctttataagagctggagattagtttggattttatcttaaagtatccagttatcaaaaaatgagattgttaggactttttttacccgagagtatttagttacaaaaaagaaagttagtttaatattagataaactataattgcaactaacggtcagtagaaagctatataagttatataacgaatctgaatatgacttagttatcttgttggattgtctagatatgtttttgccttttacggaaagattcgatttggaacaacttctgaattaacctgaaaaacgtaattaaacattgacttgttggttgtttgtagaatggttggtttatactttccgaatgtggctatgtgaaatcacattttgattatatgtataaagttgagatataattttaaaatttgcaaaaaattattagttttgttaaaataataggagatgcaaactaaataaattctcttcttaactaaaaaagcaatagatttgttaacattgaatgatggatagatttgtgagttgtgactttgcttaagctaccccaacagataacggatatatcatatagatgttgagtaagaaagaaaaaaaaaacatttacgattgcattctcgtaatgggctttatgattttaaggcccaatagatgaagtaaggctaatgcacaactttaagaaacgtaattctaggaagtgtttatcgactgcgttgtaggtttcttgtgttcgtggcactatggattaggttttaatatggtttctaatttcgttgatttcagtggcataagtccagttgttgcttgtggcaaactgtttcatgtacaaaaacacttacatcattactaaattatgtcatgggtttggtttcgttaacaataagtcaatctccttgatgagttttatctatatgattatctatttgtctatttgcaacatgtagtagattgaactggggctgcaaaatatgctcttgcaattcctagttagatctagcttttgataatacgattatctaatttgtcatttcgatatgatagatagattgtttttaaaagagatctcaaccacttttctttaactaaaataaaaaatttagtcactttttattaaaaataactaaaaagttttaaacctatcaggacacttccatcaacagtatttaaaagagatatttattattaaaataatacaaagtggtgaaaagaagagagaagtgagaatcgtctctgttttcagaaactctgaaaaacgtttatggccacgtgtttttccagaaatgattgattttattctttttattaaaatttaatactttatctaaattcaattaaaataagcaatatttttttcatgagaaactcttttttgagaatcaaccgatgtagatggtctcatactctactctgttgattgtgtttaagtttctgaggatttttctactttccgacgttatgccaagaggctggtcttcactagaaaactacttccacccaattcaagcaagtatgacctcttctccccacaatttattcatgtactgaaaggccattagaagttgactgaattgtgaaggtggagattatgtattcacttgttgatttggtatacattctatgtaaggttcaattatttacgttatataattataatggagtaatttacagtaattgggttaaaatggtttgattcggtcaggttgatacggtttggaagttaaacccggcctagatatgatgttacaaccagtccacatcttttatgattttagtggaacaaacgaagagttatttagacgatacaaacaaggtccgaataagtgtgagctgtcccaagtaagaccacgtaatactcacctcaacaagatagtgttcttaaagtgtgtcaaacacaatcacacacacacaaatcataaaacacaaagacgataatccatcgatccacagaatagacgccacgtggtagataggattctcactaaaaagttctcaccttttaatctttctccacgccatttccacaagccataatcctcaaaaatctcaactttatctcccaaaacacaaaacaaaaaaaaatg

SEQ ID NO: 27604 - DNA, 3003 bp, Unknown
  misc_feature (1)..( 3003): 2750-1469P.txt file - cDNA_ID_2990986; gDNA_ID_1620517; Annot_ID_159337
ttccgaacaaagtccaagtttccaagttcgagtagtagaatctttcggttaaatttcttttgtttctttttctttcgttctttctttttcaatatgtaaaatttccattactaatgtgggggtttgactggtgtaactcttttcttcttcgaatgtaatataaatgcgttttaaatttgggaaaatatttttattaggattatgtaagaaaaataacatcttgcatggatgctgttaatgactatggtaatggaacaaaataacatttgcatagatgttaatggtacaaaagaagtttcaacgtaacaaagattggttacgaaaaaaaaaaaaaagtaacaaattggttaaaaaaagcaatagtatattgggctgagtatgaagccaaaaagcccaataggcttaaaaccgccataaacacgaaatagaatctaccaaacgcaacgctattttcgagtatgcgattgcaaacgcgataacgaacttgaaatcaaattttggaaagttaacaagatttttatcttcgttgtctccgtttaacgaactggcgaataacaaagagaggatgaattgttcaatcggaaactggaaacacactgttctctacttaaccctaatcgtatctcttctctacttcatcgaatccctaatctcacacaaattacacatcaactacaacaaaatccgcctgaaaagatctccgaatcttcctctacgattccgtgacgatggcacattcaaaatcctccaggtcatgatttgtttcatcctctatcatcataaattgtgcaattcgctgctcattgatatgattaatttgatatctaacaggtcgcggatatgcatttcggaatggggatgattactcgatgtagagatgtgttggattcagaattcgaatattgttctgatctcaacactactcggtttcttcgtaggatgattgaatctgagagacctgatttgattgctttcactggtaaaaattcatgaactaattgatatgttcagagaaggtttaaagactaaattgattctgtttgttgattatgaattaggggataatatatttggatcaagtactactgatgcagctgaatctcttcttgaagctattggtccagctattgaatatggaatcccatgggctgctgttttaggaaatcatgaccatgaatctactttgaaccgtttagaattgatgactttcctttctcttatggatttttctgtttctcaaatcaatccacttgttgaagatgaaactaaaggagatacaatgaggttaatcgatggatttgggaattaccgagtgagagtttacggtgctcctggttctgtgttggcgaatagtaccgtctttgatctcttcttttttgatagtggagatagagaaatagtacaaggtaaacgaacttatggatggatcaaggaatcacaacttcgttggcttcaagatacttctatacaggtaatgaggttaagcatctgtcaatatatttagtggaaacctcacatagattcattacctctaagtagactcactgactagtgactaaacagggtcatagccagaggattcatgttaatccgccagcgttagccttcttccacatcccaatattggaagttcgggaactgtggtacacgccctttatcggtcagtttcaggaaggagtggcatgctctattgttcagtctggagtcttacagacatttgtgtcaatgggaaatgtaaaagctgcgttcatgggacacgaccatgttaatgatttctgtggaactctaaaaggggtatggttttgttacggtggaggattcggataccatgcttatggacgaccaaattggcatagaagagcaagagtgatagaagctaagcttgggaaaggaagagacacatgggaaggaatcaaacttatcaagacttggaaacgtcttgacgacgaatacttgagcaaaatagacgaacaagtcttatgggaaacttccgactcatttctgaagtgaatctaaggacaaaacatataaggtattaatctcgttctttcataaatggccaccttttgatgttttgtgtgagaattttctgagtctctggaatctattgttgtgaaaaacgtttttctaatggtcatcacaatcacaaattcgttatacgatttaacgtcaatttcattaggacaaaaccctgtcgaaacatatgtgaaatgaaggaccgtattttcgttttgggatgcttttgaaatggtctcttcgttgctgtttcggtgtgttctctttgactatttggcattttttttttttttttttttttgctgctctttaattagctaatatgcaatcataagattctcgttacaaatatttccagcgtcaaatcatttcttatttttatctttatgctttttgtttgtatcattattttgccattttttcgcttttttatatttatgtagtcatatttctgaacttttcttttgtttttctttgggtctcggttctaaactttgattgttcactattctaatatttttcaggccaatttttttcagtgtcttcactgttttatattgacaagtgtgaaaatataataaagtttccttggtaatcagaaatccgttagactaatcaaaaagacctcgtgtcgaatatcatcataaattaataaaataatattctgctggagctggtcattttttttttttttttttaattaggaaatatctagatttttatattgaccaattagtcaattactgatttactctagatcttatttttatatatatctaagaatagacattataattattttcttgcagtaagatacaacggcggtgtcgtgtgtgtataactggaaaattacgttgttgtctcccgagactttggtttgtctcattccccattcgcgttcttatataaagctcacagttcgagagagacaagagaccaacgaaacgaactagagacagtttgattcgaaaatcttgtcggaaaatg

SEQ ID NO: 27605 - DNA, 146 bp, Unknown
  misc_feature (1)..( 146): 2750-1469P.txt file - cDNA_ID_2990986; gDNA_ID_1564508; Annot_ID_149573
ctggaaaattacgttgttgtctcccgagactttggtttgtctcattccccattcgcgttcttatataaagctcacagttcgagagagacaagagaccaacgaaacgaactagagacagtttgattcgaaaatcttgtcggaaaatg

SEQ ID NO: 27606 - DNA, 3000 bp, Unknown; identical to SEQ ID NO: 14932
  misc_feature (1)..( 3000): 2750-1469P.txt file - cDNA_ID_2990990; gDNA_ID_2684234; Annot_ID_192366

SEQ ID NO: 27607 - DNA, 3003 bp, Unknown
  misc_feature (1)..( 3003): 2750-1469P.txt file - cDNA_ID_2990998; gDNA_ID_1620547; Annot_ID_160194
gatttgagtgtttcttgaagcatagagatatactgcaacattatgtcatctaatgcaagtatcagctcgtctgcctctgaccctccagtaaagccaatacacctttcaactgcagcttcaagaagaacaacaacttggggaatagactcttccatcctacgcactgtttcactgagttcaattccttgagccccaacaccacgagtaacagcccctctcagatccaccactgcaatctcagaggataaaatagcacgttccatcttcccatacctaaagcatgatcaaaccttatgtcacaaacagccttgaagaaccacgacccaaaaaagtttcatcaaaaaaatgggacaatccataaatactagaaatggatacaagacatgggggaagagaagtacacaacatgaaaacttacttttgcttaaacgattcaaagggtgagtacacggccttcagcgtatctattaagatcctaagttcagattccgcaaacaggtgctgaatatttcttgcaaaggaaccagttacgttgtgcagttcaatcagagcctcaagatgcttggtctgaatattaatacccttgggcaagtctccagataatagatccatcacacctgttcaaggaaaacatcagaattgtcagtattctcctaaatacacaaaatacagatataagtcaattgaagataatcgtgcattgtctggaaaatttccagtgactaaatgaaaaatgtaacaaataagttgttgttcaaacttcctgcaagtctctcttgcatattgacagattcatgacatcggccactatgcacaaaaattacaaacttaacaagaacagccaaaaactttagctcatgtaaaggcagaaaaaagtgatactcttcttacatctatctacccaaacatgaggatggtagagtagaaccactaaagaagcaacgcaatcccaattcagctgggtaaaaagactagactaagaaggaaacctaataatcaaactgtactgacatcatatctaacctttggcgagtgcttttgtttcaggaacagcatctccagttgcaaggttaagacgagaaacaaaactagcccccagtactcccatggtctcaaccaacagctttgggacgagagtcatgtagtcatcagggaaggcaaccatacacctaaacaatcatgaaagcaaaaacgtacaacagtgattgatacttaaagctgcaatcacctaaagatctgacatactgtcactggaagggcccggaaaatatatacagtttactgtaaataaaagtaaaacatttaccatttccactcttgctcaagatagagtagcaactcgtcgtaaaagcttgtcagccaactggcaaatgatgtctgagatgatgtcgactgaaactcatcgccgctagacaacctttgactttcacttctctcattggcaagcttgtttgccctttgctttgtgtcaaaatcttcccagagttgtttaatcggctttagacggacttttgaatattgcaactccagagacttgaatctcccaatccggatgagaattactcgcaaatcttgggcgacatcaacctgccaaatttggggaaaggcttttcagtccaataatggcaacagagacattacaacctaaagtagttgggttctctagatatacaggttccaaccttgtgatatgttaatgcatcagtaagacgtggctgcaccatcgcctccagcctatcttccaatacctctagttgctttctcacattagcaaattctgcaacctgttgacaaaaattggactttaagtggtgacggaaaaagacttaaatcctcagagtactgaagctgacataaaactacctctccaacagcagacaggcaatttcgcatgctagcaagagtttctgcagcacgaggaagatcgccactagcaaatacatcctcaaccgtcgagcttaactgagttaaccctgcagcatcctgtacatataccaaaaagaagagaatcaattgcagatctacccccaagtgtccacataatggatcacaaaatcactatgaatactaacctgtagtgttttgtaggcagcctccattctctgtttgacattgtccactctagcaagcgcagctatacaatctgctgaagaaccctctgcctgcagagtaccgaattcgataagagcacaagtttcaggaatttgatataatctaattttcgagaagagatccaaacaaaatctcaggaatcagcacaaatgcgtaccttcttgagcttctggaggattccagcaacagaaccacgcagagacacagcatcatcacggagacgcaacacgtctcgtgtggcacgaggaacacggaggagagcaccaccgctctgctcttcaagagaagctccgatctcctcggaggcaatctgaagcttcatttccagatccacaagatgtttctcgagtgaatcctgtgggtgacgcgcctggcacgacgagttaacccatcgcttcgcatcgaacttctcatctgagaatggacctagatccagcatcatccttgatccgatcacccgatttaccttagattctcttcagcttcgacgatgatgatgttgaagagaagaagatcctctgatttcgcagatacactgaagaagaaactaaaccaaatcgatctaaaccgactttcaaattcgactttaaaaccaaaccaaagtaaacggaagataaatttacaaatctgggccccaaagtgatgggccgtcacggaaaaagttttcttctttctttttctttatttttctttattttacttggagaccacgcagttctagaaccatccttaagcgactctctagcctctagcagcttcttctactctctgttctatataaacctttctctaacagcttttttttcgttcaaagagtataaaaaatatctcatcgagcttgaaaataattaatcacttgctaattctaagcttcttctctttccaaaaatg

SEQ ID NO: 27608 - DNA, 3003 bp, Unknown
  misc_feature (1)..( 3003): 2750-1469P.txt file - cDNA_ID_2991006; gDNA_ID_1620355; Annot_ID_154471
cctgtccttgtggatttcggctctgtctgttctgccacaagaccatttgcgatggagatgggcgttgtccaggctgcaggaaaccctatgaacggaatatggtcaaggctgagactagtattcaaggtggtggtctaacaattcggttggctcgttcgtctagcatgttttgcaagttttaaaaggagaggtgcggttttctcaaccatgttgtcttttggaactcgagaacttaagctctgttttctatgtcatctatggttctaagtctgaaacactgtggtgatgatgtagaatgtgatgtgtgaatacataaaaggtggtacagaaaatgattcaaatacatttagatagtttcaataatgaatgctatgttctcttttctaattccatatgtttggtctgcatttattccttgtcaaacattattgaaggtttaagagttattttgttgctatggtgaatcctcttgacaagttactcatgaaccaaagcttgttttttagaatcaccattcaccagagatcaactctcattacttcaaattcttttaggaaacttctgattgtttatgattagctaacaaaatcatttattcacataaagtgaggcttcttaacaacttctattaagccagcttacaaatctcttgtaaggaaaaaagctatgacccctctaatgaatataatatataatatagcttttgctcatctctataccatttacattactactatatgaataaacccactgaattcaatcagcgaaaaaggccataggggttggaaaattgtataggtcattaagctggcgagaatcatcagtgtaggctcaagtgcattgagtcttgaagcttctgtatatgaaaaggctttttctaagatccagtcacggaatttgcatcggagagctcagatctttgcgcgtttgagctgcgagtgaacagggtagacattctctgtttctagctctctcttctgaatactctttgtgaaagacaaatcttcaaccttcattagagaatctcttaatctttttacatccgagagttttaccggcttcagtaagaaatcttcagccccttcttcaagacatctgaatgacaaaataataatcacaagaaaatcagtttgagtaaactccaatttcaataaagttgatgatagctttggatcaataagttttttttttgttgtatatgtagcaaacaatcataaaatggccagttcgtaattgagttggccattgtgtgtaacacaaatacatattcctttttattttatttggtctagaggtttcctaatattgtatgcaaagtgaaaaagcatgtgaggtggctttcacaataccctaccaaatattaggcaagcaagatcatgtacttattttattgtaatatcacatcaccagaaatagaatcaaatcccaaagtaaagattttgctggttagaaacatctttatacacaaaatcatcttgggacccattaaagatcaccaaatctcaacatttgtttaattatgcaatatccaccaccaaaaatggtttaaggaaattaacttttaaccatatgagcaggaactttactttgtgatctaatccctttttgttttatctaattctttttttgatcatctaagacaaagatattcaccaaatttactatagtttgacttaagattatgatgaagttttatacctatcaatacgaggcaaaatgttctcggaggacataattaccaccggtacttctctaaaagctgaggattcctgtggaaaatcacgtaaaaaaggattagataaacataaaactcaaattccattgactaattatatcattatatgtttgtttgcttactttgatcttcttcaagagttcatatccagtcataccgggcattgagtaatcagtcataattaaattaaccttcaaatcctgaagcacaaatcacgatttaacatattgcttgagagctacggcaaaattttgttttctcttggaaattgttttatacctcaaaaccgactgatttttcctcaacatccaaaccaaggtattggagagctcttgttgcactatcaacaacagtaactgaacaaccaaaacagagctttttactcagataacttgcccgaattcagagactgatttttcaaaatatgagtaataattacctttgcaagaagatactctgagcaaacgctcgatgaatttacgatcaacgtgactgtcgtcgacggcaagaacatgaagaggatccggtgatccaaactttgaagaatggttgagaatctccatcttcctcggtagcataacttcagccattgatcaacgaatgttggaggatttggaagaaaaaggaagagaaagatatgatgtgaaaccatggtggcagtggttgggccatttatataagtagaaagaaagaaagaaagaaataaaagagggaaaaaatatgaatgaaatcgagagattttgcatatctttaagattttgtcaatttgctttcaaaatctttattttatattttatataaataatagttcggtggatttttattattaaataagttaaaacaaaaaaccgaaataaagtcaaaccaatcggttcaagtttagtcaaaacgaagaacaaaccagaaaatttggaatgggatgcaagatttaaccgacccaaaccgatattcaataacttgtagaattctttttttatttttaaattatttgtgtgtgtttgtagttttttttggtaaaagtgtgtttgtagttgaattgtggaagttcacgcatttaacttctacacttcaatacttcatctacgtagaagttcactttgaggttttgacttaagctcaagacagaaaaatgtgaaatcaagaaatcataaactaatactaaaacattacacgcatccttaatctacaattagtaaaacctctttagattaccaccttttcattcaccaaaaatataacaaattaatactaaaggcccggcccatatg

SEQ ID NO: 27609 - DNA, 3000 bp, Unknown; identical to SEQ ID NO: 9684
  misc_feature (1)..( 3000): 2750-1469P.txt file - cDNA_ID_2991013; gDNA_ID_1972172; Annot_ID_179852

SEQ ID NO: 27610 - DNA, 1757 bp, Unknown; identical to SEQ ID NO: 3171
  misc_feature (1)..( 1757): 2750-1469P.txt file - cDNA_ID_2991013; gDNA_ID_1620629; Annot_ID_162599

SEQ ID NO: 27611 - DNA, 3000 bp, Unknown
  misc_feature (1)..( 3000): 2750-1469P.txt file - cDNA_ID_2991021; gDNA_ID_2926300; Annot_ID_205652
caaacacatctgcataaatcaccagaaagaaagaaaaagagaagtaaggaacatgaaaacaactaaccaaataacagattattctttttattttcttaccagggatgagtttgatccttgtgtattggatgctttcacgagatgggactttccctgagctgctgctgaacgtaaattgtcgatcttctcatctatatcatctgcaataaaataaaatttaactcaagtgtcgttagctcaattgataaagatattaggtgaagcttagaggtcgtcggttcgacgttaggacgaaactaatattacatgctgtactttcgggcctaagagggattatagaattcggtcatgaacctactagtattaaaagaataataataataaaaaaataaaaaaataaaaaataaaaaaataaaaagtaaagaggattgagaattggactcaaagcattctaggtcttgactgttttttttattctaggtcttgactgttgcttttttcgtttcagagatttaccgatcgttccttgatggtctaccatcaccgccagatctttgaacatctccattacttcactgatttgatgcttaacttcctgtatcccctgttcccttgcctctatccgtgcttcgtttaaggaaatttcgttgtcaagcaacacaatttcttgcctacaaatgaagaaagagagagttcaccagtatgaaggtggtagttatttaccgagatatgcggcatatatagaacttacttaccttctagattccatgaggacacgctgctcttgtgatctatcatagccaatgtctacctcactggtatataagaaaaaagaggcatcaaagtaaaatcaagtcaagataaaactatagtttaattggactcaaagtcaacaacttatgtgcttgaaccagtttgtttccaaccacacaagtatagcaatcatgtaacaaagaacatagtggttatctctactgatgaagtaaccgtaactaggtttttcataccttgaagaaaagctaccttttggatcaaaaggaatataagaagtttctctttcaactgtaatatgctgtgctttctgaaactctttcaacgctgcttcaaaatcctttgcaagtttagcatctgcaatcttcttactttgctgcatcagcaaataccaattcataaaagagaaccatcaatagtaaataaatttcacagaatgtgatgttttcatgaaaacaaatctcacatctttctaagttattcctattgagaaacacacacttacagcaacatctcgacgatgatcggtttcactagcttccctaagatttgcagaagtatcttttaccagttgaccaataagtaacattttcttgtgcctgatcaatcaatagataattacaccaacatagaatagcacttactttaggcattttgaagaaaaggcaaaaatctttctgtcgccatagttgggtattgcaaaatttatgtcgccatagttgggtattgcaaaattttgggttcaaatcggattcgggtcggatatttcggattcgaattacccgaaattccccaaaatcaatttttataaccaaatttatccaaactactcgaaaatacacaaaatatctaaatattttgaatatcttttactcaaatttactcaaaagtagattaaatacttaaaaatatttaaaacttcagaagccaacgtggcatctggttgactggaaatcaaaccctccggttgagttagaggaacctaatgctaatggtatcttaagatgacaacgaacaactggtttcatcggccacgtgactaaatgcaaaaccataaccctaaaattaatactcagcttcacgtcaattctataaacaccagtcttctgatcatcttcaaactttttgcgttcattaccctttagtaaaactagagtttggccttcaaacaatgctctgagaagcatcgtgttcttgcttccaaggtagaacaacggcatgggaacagctcctaaccgctgattcatgtagtaaacggttgcttcaaacctatcgtaatggattccgatactactcttcgagtttcggatggagagattcaaagagagactgtactggaggttattgttgctttcgagatcgaaatgtgtcagctcagcgtcgtagacttggaatttcacatcgttggatctaaccatgatccaagcaatgaatgacgcaaagcagatgagaaataacagtgatacacagaaatttatcagacaagtacaaggccaacataaatagtatccaaggctagatttgtctgtcatgttaagagaatgatttgtgaaaacgaagtaacaatcactagtaatttataaaaaaaattataacactcgttggcctctgcttttttcaagtgaaaaaaaaaatcaaacgaacggtttgatttagttaattaatcttatgttttgaaaaattattctcctagattataagtgttgatcttttatttaggttatgtttcattagtttccgtagttatctccttattagttccaacaatccatgtaaattttaactctggactatctttttaatgagactttcataagctttgttattagaatattagaaacatttaaataaatttaattattatgttaatttattatgtaaatttaaatttgagttaatttatagaaaaaatctgtgattattaataaatttaattattatgttattagtttatgattttctacatttttcttcacaaaataaagttgtatcatcaaaacaaagatattgtttgggaaactttacaaaattatgaaaaaacagacggcccatatatctactccgttaaagtgggccaacagacggcccacaatgacttcttcgaacaaggaaatagacggtgaggatcgcatcaccgttaaccagccaaaaggtcagtgactgacgaaaatggcgatcatgcgataatcgtgtagccgaagaagaagaagaagaagaagaaagaagatg

SEQ ID NO: 27612 - DNA, 3003 bp, Unknown
  misc_feature (1)..( 3003): 2750-1469P.txt file - cDNA_ID_2991029; gDNA_ID_2214672; Annot_ID_189132
tattacaaatgtgaaaactgaaaaaaagaaggaaatttgtattatcatttttagtttaatacttttaaaatcgaggtaaatattacaaatgtgaaagttcaaaaaaattatatgtattatagtattttgtttaacattttttaaaagttgagataaatattaaaaaaaaagtttaaaaggggaacttatatcgtcgtacattagtttaaatcttttaaatatcttttcttccgttttttattaaaaacatattgcaccgaatatttcaaatatgttaaaatacccgaatatgtttagtgagcttatcttcggaaaaaaacaaattggcccggtataatttacaccgtcatatgtaaaaccctaaaactatatgttacaaatctctataaatataggttgtcattcatgaaaaacaaacataacagtttattttatgcatattcgttatgatttatagttttgatttgtaccataaagttggttctttctatgatgcatcatctcatagatctttgcttattgttgatcgacgacctcttaaacgaggattatagcctttttatttgattcacccataaatattgaacctaatttgtggtatattttaagcaaatgaatatttttttaactttttagtttttttttaattactaattagtttaagttatattttgatctgataaaaagtatttgtgggtcttcccacgcgtcagacccaaaaagtattaaaggggtcagctgacccctctaaaattctatatttgcattgtagccctttaaaattattttgttttttccctttttaaattacaaattagtatgtaaaccttttaagttttatagtatttttcttctactttgtcttttgacactatttcttactttttttttttttttttgattcatccataaacattgaacctaatttctggtatttttttaaagagatgaagttttttttttaggtttttagttgtttttaattacttattattttaagttatattttgattctataagaagtatttatgggtccaccgcataggcagacccaaagaagattaacatttgcattataaccctttaaagtttatgatatcatttatattttaagttatattttaatcttcttaaaattacaaattcgtatgtaatccttttacgttttatcgtatttttcttctactttgtgttttgacactatttcttacatgtttttaaatttttttgtttgtttcacccataaacatttaacctaatttctggtattttttttaaagagatgaagatttttttttgagttttttagttgtttttaattacttattattttaaattatattttgattctgtaaaaagtatttatgggtccgccgcataggtagacccaaagaagattaaaggaggtcaattggtccccaaagttcaacatttgcattataaccctttaaagtcttttaaaatattattttatatttcttctattttgatcttcttgaaattacaaattcgtttgtaaatccttttttttttttttgggcatttgttaaccctttaaattacaaatttgtatgtaaaatccttaaatacttcaaaagatgatcaaagttaaagttattttaaaatttatttgcattatttcgttgaatgatgtggtagaattagtctttgatcttaaagatttggtcttgaagaatacacatatataatttgcaagtttatatgggattattttgtagatatatttatgtaaatataaaaaaatgttggaaacttattttttcctatgattccagtcggatgattgagtggttatggatagcgccaccaaaatatttcataactttgatgtttttatgagttacaattgatgtataaatcatttataataagtacgttatgtttcatcgtttgtaataaattaggcacacattaaattctctaagctatgtctaatattagtaaattacttttcgttttgaaaatcgtgaattagatgattgagttgttatggagatcgaaagtgttgagctattttggtgttttaagtgtaataatttatggataaaatgtttgtaataagtttggcaacttttaactatgtctaagattggtgattttactagcagtataaataagcgagatattatcataaaaaatcgctctagcggtttgcatagtataagcgagcttcatctggcttatttacctttgcaatatcctcttttgtttccgtacggggaggatggtttctggttagtgatggaaatcggatttgttgatacgagaggaaggaagagaaaaatggtcactatgagagagttttgatgaatagagacgatgcagattttatgctaaaatattcacaaaaagtgtgtgatgatgatataatttagttgctctagtttctaactttatttgttgaatattttgtgactatacgatctattgtattactgctccaacttagccaatttaaattcgtttgtactgattgccaagagaaggtattttagtattaaaaattttcatatgtgattagtaataatgtaatatcttcgtaaaaatactcttttcatattgatttctttaccattttgaatttcttgatttcattttaatatacgctaaaaaccgatttcggttttgtattactaatcaaacacgaaatacaaggcataaactaaacgtgaatattttgttacggagtcaacaacaaaattggagttaattcagttttgacgacttaccaaaaccaggattaaattgttcaatacgcaaacgtcattcttaaaactctcatactaaataaatagtgggcgtttttgtaaacccgaaaaagtagaggggttcttttccgaagtcttgtaatttcccagaccgtcgacgacaaaactctacacatgtccattaacgtctggatttcgattgtcaagaagttttgtaaaacgcaaactccgataatctttctctaatctccgatcgtgttttcttagtgagatg

SEQ ID NO: 27613 - DNA, 3003 bp, Unknown
  misc_feature (1)..( 3003): 2750-1469P.txt file - cDNA_ID_2991033; gDNA_ID_1620758; Annot_ID_167073
ctctgtttggttgtcgatagtcacacagtgcctgatcgtcggtcaatttgctaatccttgtgtgatttagagttggaatgatcatttggtgaaatctcgtggatcttttcttgttgaaagcttgttgacttgctcgtcatatatattcgacgatctatgggtactgtatctagttgataatgttcaaaggcttgatcgattttagccttgggatctgctaccgatgctttcaatttctgacgcttttctatgcgatcttttcgaattcgtttttctctccagtttttgccatgtcaattgattctcttagtaacactacttctttgtttgctctcttggattttttgtttcttctgaaatggaggcttgtgcattgattgttctatgtgtgtgatttcttatgcggtgttaagtcctttggatcttcgtataatgatgtttttaatctgctgacaaacgaatttatccctgcggcgttttagtttgctacatataaagttcttagctgtgaactgtttctcctgggtatctcattgcggtttgaattctgttttgctatcaggaaatgagtttcaacaaagttcccaacattcctggagctcctgctctctctgcccttcttaaggtcagcgttattggtgggctcggtgtctatgcccttactaatagtctctacaatgtcgatggaggacaccgtgctgtcatgttcaaccgattaactggtatcaaggaaaaggtttgtatttctcaaactaacaagatgtacttttatatctgaggctttgaattctaagaaagcgttacttttacttggatttgtgttttcaggtgtacccagaaggcacacattttatggtgccatggtttgaaaggccaatcatctatgacgttcgtgcacgaccttaccttgtagagagcaccactggtagtcatgatcttcagatggtgcgttttggtttcttcttcttttggcttcttttctgtgtgtgtttgtacaatatttagcccagggatttaattttaaatgatgttactgaatgtggtgctatatagatcatactagatattccttcttttgacgttatgttaagacccttcaatgcagcattaagagcatgttttagaaaattttgggtgtggtttgaggttatggagctgtagattaaatatcacttactcttttaggatattacacgatcaatgttgatccttatatgaactgtgtgagtgtatggataagtggaaaaacaagagacaagttacacttgctttcagtagacttaggtagagcaagaaagaacttagtctccattttctttcttaaaggagttgctgtgtttctgatatttttcttgggtgttgcacaggtgaaaattggattaagggttctcacacgtcccatgggtgaccgtttgcctcagatttaccgaacccttggcgagaactacagcgaaagggttcttccttccatcatccatgaaaccctaaaagcagtggtagctcagtacaatgcaagccagctcattacccagagagaagtacgtatctcaacattctttttctacaacttttctgctcttttgtttctaatggtggactctgtttactctctcctctaggctgtgagcagagagatacgcaagattctgacagagcgggcttctaactttgacattgctcttgatgatgtctccatcacgactctgacattcggcaaagagttcaccgcagctatcgaggcaaaacaagttgctgctcaggaagctgaacgggctaagttcattgtggagaaagccgaacaagacaggagaagtgcggttatccgtgcgcaggtatagcattggtgatcttgattgcaaatctaatgacatgagattagtggttttggcctgaagcattagctctttttgaatctttgtgcagggagaagctaaaagtgctcagcttatcggacaagcaattgcgaacaatcaggcattcatcactctgagaaagattgaagctgcgagagagattgcacagaccattgcacaatctgctaacaaggtttacctgagctccaacgatctgttgcttaaccttcaagaaatgaacttggagcctaagaagtaaaagagaaggaacgagtaagtttcttcatttcatattcatttcatttaaaagatctctccgccttggaagtaaaggatgggttggtgtttgaccaaatgaccctttctcgtgactgattctgaaaatagtctttaagaggacatattgagagagacgcagattggctttggtcagtattattcatcattttcaatgaaactttttgttgatattttcctgtgtttccccggacaattgatgaagttgaatttaaaactcaataatattcatatgatctgatctatgccaatagttctttttagtatatgttacatacgacatgcttatataaatatccgaatataagatccgtaccaatcctttcataaaacttaaatataaatatttcttgttagcttgctattcaaattttcttttttccactagttgccaaccttatctacctataaggatttgtattggagagcagagaaaataaaatattgcatacgtataataagattttgtatgagcagagcaacatggaccctttgtatttaatgacgtcttgccggcgccaccatgatagagacgtctttttctttctttcaccggtgaggagttttatgggggtgacgaaactccggcgaattttccggtgacgtcaaattttaaaattttgaccaagtaaactcttatttcaatatttgtatataaccgacggctgctttttatgatgtcatgtataattaaaattagctggaaacgagtgatgaccgttaaccaagataataaaatgttttgagcaataaataattccaaaaaaataaaagcgttgtggattaacaaaagacggaacgacttgctgtttcgtaaagttaaagggagacgtcatgtcgttttgtcaccatg

SEQ ID NO: 27614 - DNA, 3000 bp, Unknown; identical to SEQ ID NO: 3440
  misc_feature (1)..( 3000): 2750-1469P.txt file - cDNA_ID_2991037; gDNA_ID_1620646; Annot_ID_163247

SEQ ID NO: 27615 - DNA, 3000 bp, Unknown; identical to SEQ ID NO: 3440
  misc_feature (1)..( 3000): 2750-1469P.txt file - cDNA_ID_2991037; gDNA_ID_2926179; Annot_ID_200089

SEQ ID NO: 27616 - DNA, 3000 bp, Unknown; identical to SEQ ID NO: 2440
  misc_feature (1)..( 3000): 2750-1469P.txt file - cDNA_ID_2991041; gDNA_ID_1620536; Annot_ID_159886

SEQ ID NO: 27617 - DNA, 3000 bp, Unknown
  misc_feature (1)..( 3000): 2750-1469P.txt file - cDNA_ID_2991045; gDNA_ID_2936554; Annot_ID_194149
tagatgttgttcttttatatattctagaaaaattgtagttatatggcaaattgccaataaggctgagttatctttgatattttcaaactgaactgagacatgatcagatggtggcaatatataaaatgccaagtcaacacgcaaacagtttttatatatttattcatacctttcatattgatataaattgataaatattttggtatatgggtttggggcatttatctagtaatagaaagaaaattcatgtaaattagggataacccactttttgatctctcggttccatagtaatgaggttttgtaaccataagattcttgcaactccattaagaacatgagtttattctttacagaaaaaacataaatgttagtgtttataaaaaacgacacataaatcgtaggaaaattgttctatgtaactatattttgttagatgtctacttttcaggtataattctgctttcctaaatgtgtgaattgtggggttttttttgttttttttttttctttttgagcaaaggtgtgaattgtggtttattggatcattttaaacaaagtttcttccttggattaggatggatacacgctagtgacgaaagtggaaaagtcgttttgcttcctctataacttgtgttagtactaacatgttaatatacataatatatcgtattaaactgtatttctaataacttcttgctacatattcatatgaataatatgatatatcatacactaatttatttaagacgatacaggaaaaaactttaacatgttttatctatgtttattgatatcgatgaaacgaaatagttaattatccacaaatatgcacatgctttcatttcgccgagatcaatatcattattgtcacatttttaccaacgtcataaccaccgtcgccgcatttttctcgagtataaaattttgatgaaaatataattttttaaaatattgtaaatatcttttaacttcattaatatatattccttccatttcataatataaactattttataaacttttttgttttacaatataagttgttttcaatttttttatgtaaattatatattattttaatatttttaaaagaaaaacttattttagtgctatttttgtcaatctcccatatttatattatgcattatcttttatgattggctgaacttttaagagtatatattaatatgtggttttttagctaaaacaacttgtattgaattataggaagtataatttgtagttcttctactaataatattcacttaattcactttttgacaatatgttgtactgaaaaatctatagctaaagaagaaaatctaaatctacctttctagtctcttttgattaaaaatagaaaatcctaggatcgatatgaactttttttattgaaatagacaataatatctcggtatgttgtacaaagtaatctctaaagaaaagacaaataaaacaaccctgataatcatattaaatacgtacgattgactgtatggatgttacagtttccttatgttccatttttattgtctctaaattgagatcagagaaaaactataggttgaagaaagggtaaactgtgatcagtaaacgataagcatcattaataaagaagattatctctttgattagcaacacgatttcttattaaatccaacatgataactatataatatatgggtactgtcatcagctgacaaattatgatgttgcttttggtgaaggaaaaggtcataagaaaaattgatttaatattgtatttatagttttagctcgtacttttggagtgcaacttattcagagtgtttgggattatttgtacacaaatttatacatacatatatatatatatatatataggctaatactgtaatacatgatggccaaatttccataaagtgggaatgcatgatatgcatctatgcatgagataagtggtagctcttttatagcaatatacccttttcagttttcattatacatcatacatgttactgttgtacatgcaacgtaaagtaatagcttatactcaaaacaagatattaagataatcgttaactttatgtctggaatttaatagctcagaaatcacggtatagcccattcaaatgggtaaatagatatatatatatatatatggtgaataagattaagatgacatgcatcattagtcattacatattataatacatatgttaatctgagtttagtgaaagacctaatccaagtttcatagatgagagagacaccaataaactttttgtgcatggaaaagttcttgaaaaagatacaaataaactctcttttttgtgtgtgtgcaccagatacaaataaactttagatgtacctttaagcggatgataataaagtttgatcacatatgttagttaccatgcactacatttccttgttcacacgcactacaccagccaataaacttacctaatcattttccaatcatttaattacattgtaagagaaaaaagaagaagggtgtttgattgtttgaacaatgggtggacaaagacaaaaaaaaactaactagtgtatactaataatacctaaccccatctattcaaacaaaacgcaataaaattattataaattgtaaacaaagggtgtgatcatatgtaaccatcgccttatggacaaataattatctattaaaatagtaatcaatcgaggtccctctcttaaatgataaggatataaagcattattttaaaacaagtagagattaaattgacatatgctcgcacgtcctcattcatacacaacccctcttcttctccaccttctctccattttctctttctctcatatctctctgtctacttctactcctctttctccatctgcaactcatatatttccaaaaagtgatcaagatcaacaaaatatccgaatcttgatccgacctttctttcttagcttaacttcttgtaaatatatataactatagtctatactctatagagcatatatataaacatg

SEQ ID NO: 27618 - DNA, 3003 bp, Unknown
  misc_feature (1)..( 3003): 2750-1469P.txt file - cDNA_ID_2991053; gDNA_ID_1972132; Annot_ID_179099
ctatatagttttcagtcattcaatcattcattgctcaactaaagatccgttttttggtgaaatgaaaatctaaccacgagggtattttcggtatttctcactgtgaagtatctagtttcttacaagttaattaacgactatgtatataaaataagttgacattgtgagctttgatatttagggtcgttgctaaattagcttggttggtacttgtgcaagacgtgatcctcgtattttcggaatgacgaaaataccatttgatccctaaccacgtgcttgaaaatacagcaaaaatgtggctcggttacccttaatttgggatattatttaaatcttcgaggattcctatatctcaagttgcatttatttatttagaggatggattttttcgttgatgaccaatagtttctctgctgagatggcgaaatatcattggttgtgatgaagattattcaaatagaaagcgatgtagatctagttggtggatctgatctgtccacttttatattattttttccttggtcctgatgattcgtgctttgcttcgttgttatctaatcataatatcttccaccaagcctggatgtgacttcccacacctaaccggtcaccggcctgaaccggaattcaactatccatattatccaaaaatccctctttatttacttacattatatggtttctaatattttggatgtgaatgtgaattatttttaaaaataattttcacgtaatgtcattataatatagtttactttgtaaatcagatttctcgttgaaccaaccaaccagtgattatagtccgcaaggagggtctaatgggggacgaggacattccagattgaagtctcagctaagcttcacgaatcacgactctctggctcggatcaacgaggtcaatgagaccccagtccacgacggttcaggccattcgttttctgcggctagctttggtgcagccactactgattcttgggatgacggttccggttcgatagggtttaccgtgactaggcccagtaaacgatccaaggacatggactctggtctcttttcgcaggtacaatttatttgtttccatgtgggattcctttttttttttcttcatgtgttattactataaacatgctactttagtcaaattatatgaaatttcaaaatttctagaaaaggacaaaaaaatgtaaaatatttgttttaggatagacataaaaaaaaaaattaactagtaaaggtaaatgcagcaaaactctttagtggccatacatttttgttggtggccaattcttaccgaatatttttatcactggttttgcagtatagtcttccttcagacacttcaatgaactacatggataacttcatgcagcttccagaagattctgtaccctgcaaaatccgggccaaacgcggctgcgccacccatcctagaagcatcgctgagcgggtcagttataaacactttttaatttatttagcgatggataattaattcactaaatttagcaacaaatttgatcgtccctaatcatgtagaccctattctttttgccatcctcctatcttaacctatacaatatgtttatattataggagaggagaacgagaataagtgggaagctaaagaagctacaagatcttgtccccaacatggataaggttactttatatcaaatatatatagtatatatggtaacatcattttgaaaaagtgttcattacctcacacacttgttgctgattttcttagcaaacaagctattcagacatgctggatttagctgtacaacacatcaaaggccttcagcatcaacttcaggttcccttatcttactttttctgtttaggtcagctgaatccatttccagagttctctctagttcatgatccatattgatacataaacacattttcatatacaaacgcagaatttgaaaaaagatcaagagaattgcacgtgtgggtgcagtgagaaaccaagctagctcaaacccaaaggtagggtcatcctaattttatttgcattgttccgattttatcatatgagagaattagagaagatgtaaataaaatagattatattaaatgtctaatcctcttataattaagctcctcattcgttatcattataagatagaacagtgacaattgtccattatgtttttgtttcaagtttatgttttgagtgtcgcctattttgtaaggattatgctatgaattctgaaactaattcgagttatgatcataagcaaagcaagctagcatccattatatatatgactttctaatttgatctctcttttctttatacttcttcataaatagttcctgaattgaatattgaaattaaaggtacgctaatttttcttatttttaaaattgaagaaatggaccaaataccaaagttacttgaaccaatgaaaacattaataagcagaattcacgtaccaaagaccaaagtgaatctcgttgatcatataatgaattatgatatatttagtagtagttagaaacatgcaaatagatataggttgatatgaaaattggcataaaatgtatgaaccggaatactattagtagcattaactttcctattattaacaaaactagcgtgtatgcacgttacagagaaagatttattctttattagagatgaaatttctttagttatacatacactttggttttgtaagttaaaaaaatataactccctcctacgttaccaagaagtccaccaacgtggtggattttaaaataactaaccaaaaacacaaatcagggaaaagtcgtaaattaaaactgataatttggaggaaaatatagaaaaagaaaaaggtaacgacattaaagaaggtgcacttaatgcgcagtatgtcctcttgtgccagcttgttgcaccgtcttccgtctcctcctctttccctctctctctctctccaaaccagtcctacttctctctctagaaacctagggaagaagaagaagacggtgaagcgagcgatg

SEQ ID NO: 27619 - DNA, 3003 bp, Unknown
  misc_feature (1)..( 3003): 2750-1469P.txt file - cDNA_ID_2991065; gDNA_ID_2213635; Annot_ID_132147
atctgtatatggagaaaatgaaacctttagagttttgtctatctaatcacaagttcagagaaataggcttgtattttggaattgtacagaagataagctctcagtagcaaacaatccaaactttgatcagtcacattacttataaaacgatctttgtgtatggtaaaaaagattataagtttaaatcaacccgcagcttggaaatctccaaagtcatcatctggtgcatcttcaacccctccatctttggcttttaggtcttctttcttctcttcttcttcttcttctcgctttgtatctaaatcttgttgttcagacgatctttggaggctgaggcttggcggcagacttgacggggacttctgagcagttgtgacaggggaaagcggtcccggaggtggaggtggcaggatgattgaaggaatggtggtttctattgacttgcctttatcctccaacgagagattgcccagactcttctctaccgtttttgacttgctgtctttatcgcttctctgtttcaatcattttgatgtgaaaaacaaaaagaaaccttgtgggaaatgtatccagacaataactgtaaatcttacatttttgagttggagaacaatggtttctccttcctttaagctgtaatcaacggatgaagtgttctgatagtgttgttccatttcttctgctgttttcttcttgttcaaatacctttagcaaagagagagaaagagagggtggtcagattcaaacatgatttagtttttcgaaagaacacttagaaatctggaagtggaatgttacttcatatggtcatgtagtgctgcttggaaatcatatgcttctgttctttcccggaatccgagtccgataaaagcatgtcgaacacgaccatctgcattgcatcaaagaactaaactcaaataacaactacaagttaacatctctatatctatatggaaagtacgtacctatcttttcttcaacacggagaacaaaatatcttcaagacaaaacagattattttttgttagactagctgcacatcatgagaagagcaagttaagttatgtggtcaactttttgttacctgctactgtcgattactgcttctacaggatgaagttccccctctcttagaaatgcctgagcgtaaagttcccctgtggttttatctactagttttataatgcattcttctcctttgctcaccactttcaaagctccttcccatgcccatttgttcacgtcccactcatctgctctgcaaggataaaatttatacaaaaaaagtatcagctgatgtctatctccatcttccaatggattacttgatgcactttttcaagtatcttttaccaaagaagccaagttgagttgatacaaagcgaatgtaactagataatgaccatcttgatgcaaattaaggttaagctaccattcatagtcatacatacttcacgattggttcaataagattcgttccgagtttctgatcatttgctaagccgaagggtttatcgggaaaaggggttttgtaaaaatctcctaactacatatatcagaatgactgtttctatcataaaggtaagaaagaacctgtacgaagctgcggttttccttggaggtatctgcatacacaaacaaaaagacaatgaagaggttactttgcctagcatccccgtaaagtaacagacacagaagaaagcataaacgataaaataacattgatacatcaagctccaatgttgtccattacgaatgagaattttatagttaaacctaaataacaacagttcacaatgtctatgatttcatcaaggtagccaatttggaatctcatacatcctataacacaatgaccatgtaacaatttcacgagtatctcaaaagctagtatgatttcagagagaccccatcaagatatcacttagcatgatattggttaaaattaatgtactcttttatcacaagccttgaatctatcatacgaaatctccttgaaaagatttttcgctgatagttacatgtgcaatcgatcaccattgcaaatccaaacaaaatttcgagtgatcaagactcaacgtcaagttttcaacatatgcaaattaagacaacttcctcaataccattgcaagaaatctataacaccagattgaatttacgttataactaattatcagatccaaaacatctcctaaaatcaccaagtgaacttgcaaagaaaggatgtaacttgagcataaaagacacaaaactcatcaaaaattataaaatcacatctcatgataagccaagaaaagttaccaaataaacatagcattcaggcacttggaacagagcaatctctatagcttctctctcctcgttatcatcgacattcacaggatcagtggaagacttcttgtcttcctccatagtcgaagaagacgaagcttgatccatctcagaaacaaagaatttaacttggagaaaaacccagatgagactaatcgatcaaacaaacccgtaaatcttaaatgttaagtctttcccgaactgtgattacaacaatctcacgagtcgcgaagacgaagaaacgtagaggtttcgcgttaggtgtgtgtagtgtataccattacttcaatctgagctacttcaaaaccatcagatctaagctacctctgttaaatctgaaccgtctattacgttgactttgaaaccctgatatagactagacacctatgtatcctccaccgctgggaagtcaacattgaagcagttgatggaccaacaccaaccaatagaaagaacgtccacatttactttaatgggccttttaaactaataggcctaggcccattataaatacatggatttgttttattttatttttctcatatctgtctcttggtggtgatgagtaggtaaactgtgtgcgcttattaacttctctcacactgactctgcgaccctaatttgtgagctctcttctctttgcgcagtcaatttgctacaacttagaaaatg

SEQ ID NO: 27620 - DNA, 3003 bp, Unknown; identical to SEQ ID NO: 27619
  misc_feature (1)..( 3003): 2750-1469P.txt file - cDNA_ID_2991065; gDNA_ID_2213635; Annot_ID_181017

SEQ ID NO: 27621 - DNA, 3000 bp, Unknown; identical to SEQ ID NO: 8339
  misc_feature (1)..( 3000): 2750-1469P.txt file - cDNA_ID_2991072; gDNA_ID_2926195; Annot_ID_141242

SEQ ID NO: 27622 - DNA, 3000 bp, Unknown; identical to SEQ ID NO: 13909
  misc_feature (1)..( 3000): 2750-1469P.txt file - cDNA_ID_2991074; gDNA_ID_2214667; Annot_ID_189039

SEQ ID NO: 27623 - DNA, 3000 bp, Unknown; identical to SEQ ID NO: 14369
  misc_feature (1)..( 3000): 2750-1469P.txt file - cDNA_ID_2991077; gDNA_ID_2684112; Annot_ID_190665

SEQ ID NO: 27624 - DNA, 3000 bp, Unknown; identical to SEQ ID NO: 12961
  misc_feature (1)..( 3000): 2750-1469P.txt file - cDNA_ID_2991081; gDNA_ID_2214583; Annot_ID_186554

SEQ ID NO: 27625 - DNA, 3003 bp, Unknown
  misc_feature (1)..( 3003): 2750-1469P.txt file - cDNA_ID_2991085; gDNA_ID_1620771; Annot_ID_167550
tctgctttttctttacctttattactgttccccggcagcacaaaggagttatgatcacctcgtaaaggagaacaaccattacttgtgcgcaactctcttatatcttcagatggttggtatctcgatgcagcaacatgaacatgtccgttacgctgattcagatttaaaaccggatttttctctacacgaggcgcacatggatcagtggagatggatttccctttatccttctcaacaacagttctcctaaacaaagcattgcctacagaagcacgagggcgatgtccactctcagttcgtgtatcagaactttcccggttgtccccaatttcagggactggtctggctcttccgtgaagatgatgattacggtattcctctctttgatatcttaatggtgctactggagaatgtggccttctcttaacctctctatggtgtaccgatctatctggagtatcaggtatgattaccatgtcaatatcagaattctccatcctgaaacaattaaacaagaaagaaactgaagcaatgcacacatgatgttatatattagcaatagatttttctgattagagagatttaaattcgtgttttgagactttcgaaaacataaaccctaaattataacttaacacaatttccccaaaggttaagatcacaaaagtggcaatcaacaacaacaacgacaaagattgacatgccttaataatcatctaaaactgaggatcagactagtgaaaattcatgggcatttcagatacaccaaaatgagaacagatattcctctccagaaacaattatcgtagaggagaaatctatcacaaatacaaatacgaaaggacagaataaattacccgattgaatttgattcaaatgtgggaatcgaaaccctagttgttcgatgagaagcaactgcatcgaacaatctatctcctcttgctcgggtgcaacgattggacctcagattattccgggtcgggtaagggattactgggtcgggttctgggtccaatattaatgatgttggcttagacaattatattgggctaagatccaataataatgggccttttaaaaacagggcctctttttatttaaattggctttcacaatttaaaactgcaatcaaatgcttagtcaaagtttaaacagagaagttagacagaatcagaaacccaaaccaacaagacaaatagttcgtgaaagttttgattatagcaaaatccaaaacgtgcatttattcactagctctttttacaaatggttcctctattttttgccaactttactaatttaaaaaatggattttcaaaaatcaaaaaccaaaaccattctagatctacaaaaaaatcaaggccttaaagtgtcttgaattttgaattaagaacacttaatagttgaaacttatcgttgtcgcagatgattacaaaacgatcatgaatttagtcgtttttttccgctcctacgatacaaaaatgacatatagtatagctatgttttccaaattttaaaagtcaaactcttctaatttttaataattctaaatttctattcactttttaataacactaaatatagttcttatttcgacgcattacgtttcctagaaatatttaaaatttcagctgaaaataaacaaatgcaaactgatgttaacaatatgattacttaatattaggttgaaacttgaaattcatggcattgtttccatttcaacgataaatatacttttctaagtctaattattttaaatttaatacctaaaatttttcgaaatcaatatagtcacatagaacgctctcatcacgtaactttgacaaataagtataggacaacgtacttgttagggatttgtttaatagcaaaactatgaaaacaaaaacatagtacaataatcatttattgggataatcaagtcaccaattgcctcaaaaccaattattttggcggtttcttaatgatttattcgagaaaatatcctctctcttttttcctacattttggctttttctgcattcaatttttttaaaaaaaacattactcttcgttgggtatataaaacaacaattcaccaaactaattactactagtacttgttttgttttaaataatgctattttttttctgtgacttttattttcaaatctgactatttaataatttcatttactacaataattatatgaattatttattgtcgtaatattttttaacggttatcgtatctaaaatagttattcccagaatccatgtaagcttctcgaccggactttgaaccttccccattggacacagccaaaaggaaccgtgtccatcttcggttcctctccctctgaaaacttattcctttcttttcaacttcctagtcttcttacttcacatatcatctctctttgtttagatctcttcttcccacgattacaaaatcctgtccggtgggttttccccgatcggggtcggatctgattcctcggaagcaacgaatctcgaggcttctttttggttttggctttcggggaaaggctggaatcatttctctttacggagattaaacataaagttccttacttcagctgattagcttcattcgtgcttggtctgctccttcttgatctgggtttacaaacaaatttccttttttggcaaattatttctgtgtttggggtttcgaatttcgatctgctctcgggtgttttagtgattgaatttcgattcgtactgtcttatatctgttcaaagttgtcggctttactctaggcatttggggattttgcttgggttttgggttttatctccaatttttcagatttgtttactctaatcatatatcggagagttgcaattaggtttttatgaattggaggaaatttgcaatcttttgtgtttcccagttgagagggttttaggttttaagatgatggaacttgagttgtgtttctccttgtgaaagattgagtctttgtaaagcttttgtttgttatatccaacttctgagatatg

SEQ ID NO: 27626 - DNA, 3003 bp, Unknown
  misc_feature (1)..( 3003): 2750-1469P.txt file - cDNA_ID_2991120; gDNA_ID_2926274; Annot_ID_143521
ctttaatggcaatcgaaatcttcaattttttacgatacgattgattctatactgcagatgatttttccagttttggctcattccttgtcataaatctcgtcaaaattctttaccttgtcgtcttatttttttccattgataatgcttttctctcagaatgatggaggccaaaccaaaaaggaggattgttacagagaatggagatacaggtgaagatttagttcttgcaacattgattggaaacggtgatgatgtaggtcctctcgttaggcatgctttcgaaatggggaggcctgagcctctcgttcatcagctcaaaaatgtggcgaggaagaaggaagctgaaattgaggatctatgcaagactcactatgaagaatttattgttgcagttgatgagcttcgtggtgtgttagttgacgctgaagagcttaagagtgatcttgcaagtgacaatttccgtttgcaagaggttggtagtgccttattggttaaactggaagagcttctcgagtcttatgcagtcaagaagaatgtaaccgaagctattaaaatgtcgaagatctgcgttcaagcactggagttgtgtgttaaatgtaatagttacatatctgaaggacagttttaccatgccctgaaaaccatggatttgattgagaagagttacctgaagcttatcccacttaaggttctaaagttggttatagagagaagaattccagtgatcaagactcacattgagaaaaaagtgtgtagccaatttaatgaatggcttgttcacattaggagttcctctaaaaatattggacagactgctattggcctcaccgcttcagctcgccagagggaagaagaaatgctggaacgtcagaggagagcagaggaacagaatacaggtggtttgggagaattggcatacactttagatgttgaagactcggaacaagactctgtattgaagtttgatctgacacctctgtatcgagcttatcacatccacactattcttggagtcccagaacggttccgtgactattactatgagaataggctactacagctccaatcagatctgcagatcacttatacacagccatttgtggaatcataccaaacatttctagcccaggttgcaggatatttcattgtggaggatcgggtgattaggacagctggagatttcttgttggctgatcaagttgagacaatgtgggaaacagccatttccaaaattgtagccatattggagaaccaatttgccagaatggattcgcctactcatctgcttttggtgaaagattatgtaactctccttggcacaacccttagacagtacggttatgaagtgggtccagttcttgatgcccttgacaagagccgagataaataccacgagcttcttcttgaagagtgtcgaaagcaaattgtgactgctattacagaggacacttatcagcagatggtaatcaagaaggaagctgactatgaaaacaatgtcttgtcgtttaatcttcagacctcagacattatgccggctttcacttacattgcgcccttctcttctatggtgccagatgtttgccgcatcatcaggtcatacataaaaggatctgttgattacttgtcctatggagtgaacactaattttttcagtgttctgaggaagtacctcgacaaaatcttgattgatgtattgaacgaagttatcctcgagacgattagcaacaattcaattggtgtatctcaagctatgcagattgcagcaaacatatctttcctcgaaaaggccagtgattattttctccgacatgcagctcaactttgtggcatcccaagccgatcagttgagaggcctcaagctagtttagctgcaaaggttgtcctcaaaacatcaagagacgcagcctatcttgctttgttgaatgtggttaacaccaagttggacgagttcatgaagctcacagaaaatgttaactggactacagaggaaatgccacaagggccgcacgagtacataaacgaggttgttatatacctcgagactgttatgtcaacggcacaacagatcctcccaatggatgccttatacaaagttggagttggggctatcgaacatatctcaaactccatcgtctctacattcctcagcgatagcatcaagagattcaatgctaatgcagtctcggccattaaccacgatctgagagtgatagaaaactttgctgatgagagatatcactcaagcgggttaaatgagatctacaaagaaggaagctttagaagctatctggttgaagctaggcagttgataaacctgttgtcgagtagccaacccgagaacttcatgaacccggtgattagagagaggaactacaacactttggattacaagaaagtggctacgatctgcgagaagtttaaggattctgcagacgggatattcggaagcctggctaatagaaacacaaagctgacagccaagaagaaatcgatggacatgctcaagaagagactcaaggaatttaactgattctcaataaacactagtaggtcctgaccttcccactcacatcatcatcatcgtcatcattatcctttagctttactattcccttaatttgcttcttctggttaacctctaatcttgtttatgtctttcttcttcttttctctgtttttgttctatgatccaattcattaatcaatttcagttttgtcctaatcgacaaaattcatctttatggctcacaggctcaggattaatctttagtgtagaatgaattgataatctaagttaaagagcttctagcttttagattcaaattattgatgaaagttgcacaacaagcctggattgggaggatatttacgtattttctctatctgtgtggaccggagactccatttgtcttccaagtcaccttatccaaagtgtcaccaaaacctgaaaactttcaacctcaaaaaatccaaacttgagctttgtattccgacaaaaaaatg

SEQ ID NO: 27627 - DNA, 3003 bp, Unknown; identical to SEQ ID NO: 27626
  misc_feature (1)..( 3003): 2750-1469P.txt file - cDNA_ID_2991120; gDNA_ID_2926274; Annot_ID_205269

SEQ ID NO: 27628 - DNA, 3003 bp, Unknown
  misc_feature (1)..( 3003): 2750-1469P.txt file - cDNA_ID_2991125; gDNA_ID_2213619; Annot_ID_180908
caatctccattcgttgttggattgattgttattaatttcctctttggtctctccctaatttggatccttaatatatatatagacagaaaattgtttttttttgtgtgtgtgtgtagttgttgttccagagtagagaagaggaaaacagaaagtaaaacaaaaaccaaaaaggagttgactttggaaattggacagagagattttgttgagttattatataatgggattgaaaaatctcagatttaacaaacggacatttgcggtggtgggaaaggatattccttaagatccatgttccgatgccgaatttaatacaaacaagttaggtcacatcgtgcttccgtaatctatagcagactttcccattggtgtcaatctcgttgtttaaaaaaaaaagtaatattagaaaagattgaacgtaatctgaatattaagaaaaaggataaatatgaaaagatatgatgtaaatatgtaatcgatgcatactcttaattatgcaatgtaattctttttttgtgacattaatacattatatatcctttatcttataaaacacaagtcacttggcaaatcatgttttgacatgtggcaaatttatcaaaaacaaaatccacaatgtaaaacaaaaatgaatttttcgacaaaactcaaaataaaattaaatgtgaaaacagtgtacaaaattaaaacattatcgtcaattttcccacgatcactctcaaaagaaaataaaaatcaacccacatattctccatactcccacaatttctttttcttctattcaaactatgtaactcttttttttcaattaaaacattcaaactaactattgggaaacaaagacagatacgatctcaaacctatatatacaaatctcggtatcatctttctattgttgatattggtttttaaaagaaggttgagagtaaaatcatttaggagcgagaccttctttgtaacaagagtcttcaatctctaatcagttcatataaggcaatatggccagcgtatgttatatttcttttattttattgattgcgtttagatgagtatattaatgctttctgtttttgaattatcttttattatgtatgtttaatatctttttgcttcatagatcaaccactaaaaataaacaagcaaacttgatcgatagaggataaaacacaaacaaagtagaagacttgagcaagaaaaacaccaatggcaaagtagtaggaggttgaagacgaagtagaagtgtacaacattaagacataaatgatatcatctatgtattgagtcaacttcactctggtaacttttttttgtctatgactataatctatgtttgtattgagtctttgaataccatatgtaattttttattttatagcttttgtatgtattctagaaagcattgaagttggaagctaattctctatatttggaagactaataattttgtgatatcaacttcaattctccattatatatcaaattatcatctgaaaaaataaaatccacaaatacatgaaacgatatatttttccctacacgattatatactaatctatttataaaattaatttttcatgtataaatatcgataatatgtaacatatcataacatttaaattcaaaaaaagaatgtatcataacattaattttcggtgctatgcaccgggtataatactagttacaaataaagtataaaaggaattaaacttttatatagataattaacacaaacaaaatattagagacgatttcaaataaattatgaggatatagatgagaaaaatactatatagaataacaatagtaagaaattaaaaataaataaatcaatttgtacatataaattagaaagaaaaatatagataaataattaaacaatattaatagtatcacataggtcaattaaaattttatatacaatagttaaagagtattatatctcaaaactaagttttgatactgcgtagaacaaatcatgtttcaagcaaaaatgatcaaattcctatgatgctggaaatgcttgacgatccacatgagactggctatgtgcatgtatggagaaaaacgtgttgttcgacaacgcgtgcatgccttcttccacctaagtgacgacgcatcacaaaaagttatctagtagtgttaatagttcatgttccatctgccgaaattacacacaatataacgtattcgattatttgttatccaacaacttaaacgattcgaccaactcactcaaccttttgtcactagttccagtcatatatttcttataaatactcgttcactacatctgtacagatcgaaagaatctcttgatatattacaacacacccataattcataaagactagctcatatacctttgatatatgagatttgatctatatgtcgttctccttaactagatatcgctaattgggcttgcattcaacaagcaacatatatcgcttattacattcgacgatactcagcttctacatcttaagtctctctttttttctgagctcaccatcaagtataagaacacaattctacctcttatttgtctactcccaattttttgtttttggtttttcactattctgacatcttatcgtattatgattaacgttaagaatgtcgtctcgaaaatcacctacctagctattgtttcaagattcgactcccatgcgcgtcccatcaagaacaaaccatccagaagcatcaacctccaactattagagaataatgtcccattcgcccctcgctggtcaaatcgcttccatttgattcacataagtccaacaacaacgatgatctctggtgtactactaccaaaactcaaccttgagacagattctcaaaatactatatgttctattaactattttaacttgaatcaagttgataattgtagagagaaattttttgttcacttcttattaatttgtaaaacatttattttaaaacccattaccgttaagctttgatacaatgatacatgttattttctgattaaaaatg

SEQ ID NO: 27629 - DNA, 2661 bp, Unknown
  misc_feature (1)..( 2661): 2750-1469P.txt file - cDNA_ID_2991137; gDNA_ID_2926296; Annot_ID_143684
aaatacaaattgataaataagttttttttttagaggaccataccttttggaaagttcacaaaataccacaaataaagagttttttaaaagtaaaatttatttatggctgactttaaaaatacaatcacattgatggtcattatgatacattgtttctttagacattcaaataaaaataaaaatatattttttttatgaaattttgataatgaaaatgatatcagataattaaatgaaagatttttttactctaaattgtggcttgtaattagtataacatatatacatatgttttactgcatcatcatatgtttgcttcttagagacttgaatccaaaaaataaattctcaattaataactatattaatgtgataattaatttattttcatttaaaatattaggtattgcatattatattaataagctaagttatggtgtattgatgcttgtttgttttccaatcaaaaatatactttttgaacagttttcagttttcacacacacacacacacacataaaaagacattttaagtgatgatttattgtttacattgctaattgtattgataagataagttatggtcaattcactattcattatttacatgcatggatatatatgattttaaatgtgtaatatagaaaaattaatgtctttatgtatgttatttttatgaatgggaaatccttatatatcttatatatagtttaaaaatttagttgttgtaagtttttaaatttaatgaaaataaaacaaaagaaaaatagaaaaaaatatgtataatttaatattaaagaaaaccatttaaaaagtaggtaaaaaaactaaagctatactaatgtttattgttttaacaagcataactggtttttcttcaattattcgccttagaaaccgttttggggaaatcaaaagcaaaacatgaatctaatattgtttcaactacaaccgagtatgtaacgtaatccaccaataaagaatattaaataaattaacaaaatgatctaaattacaaataagttcatacacattatgacccaaacaatgatgttgtgaacatatattcgatatcgaatataaaagaacataattaagactaaaatgtgtaagaaatttaaaacaaaaaatgaaagaattgacctaaatcgtagggctttgaagactcatatcctgaacttattcatcacctagacaacctacttcttttttttacagccaactcttccccttcataccaacgcaatatcttactcatcatcgtgtaatatggtcatatattcactactcccaacactgcaacacatggtatctaataggctataagcagtttgaaaaccatgtggatgaaaaacctttcaaccacaaaataaaataaccaaaggtgatataaacatcaaatttaattgtaaatatacattcaaaatcaaaaataaaacaatttgtgtagtatgatgtgacataagtaaaatgtttactatttactatttataatagaagaaggtggagtaattaattttgtaaattaaacatgcttgtacacactaatttagagtaaatgcaattaccaaaattaaggatttaaagggttttagtcatttatatgcatcatagttgggtaatacaaaccaaattgaacaatagaaacgtccactaatttattattgataattaatagcataagtttcaactgagccaaaaagtaaaaagtaaaacggttattaaataaaagtattggacatcaatcttataatgtgtatgtttaaatgatgaattttgtagtcaaataagtttcgtatatctttatttttttcttttaattatattaagaaaataaagatctaaataataaaaaatgtatcaaaataatgaaaatatttttgcccaaaaaaataataatgaaaaatataattgtgtaaattgtctttgttaaagtcaatgcatttaaatttattaattgttataaataaatagattggactaaaatttaaaaagtgacaaatgtcgaaagaattattttgtaatcacacagctttatatattttattttttgctttaaataatattagcaaaataaatatctatataatgaaaaatgttttgcccaaaaactaagaataatgtatacgatgtaaattgtcttattaaaatcaatgcatttaaatttattaattgcgataataaatagattggactaaaaattttaaaatgacaaatgtcgaaagaatagaatgccaagtaaccatttatcagagataattttggagaaaccttactttattatataagataagattcacatatttagcaaaaagaaagaaagaagaaaaaagtaaacacaatacaagatattgagatatcatcatcacaaagaatccaattaaaaatcagtgtcacttattacaaaccacaagatcttcaactgccagatggcaccaccacagccactaccaatcttctattaggaccaaggaaatcttcgaaatctcgattaaactctctcaaccaatcagaattcactgacatgtacatttgataaccctctaacatgaacgccttctctgttataaaaccatattggtttcaccatctcatccataactcacactctctcttatctcctttcctttcattgtagttaacgaaaagattacgataatg

SEQ ID NO: 27630 - DNA, 2661 bp, Unknown; identical to SEQ ID NO: 27629
  misc_feature (1)..( 2661): 2750-1469P.txt file - cDNA_ID_2991137; gDNA_ID_2926296; Annot_ID_205567

SEQ ID NO: 27631 - DNA, 3003 bp, Unknown
  misc_feature (1)..( 3003): 2750-1469P.txt file - cDNA_ID_2991145; gDNA_ID_2096292; Annot_ID_195438
catcatatacatatgcagcaaaattctcacaaaaagaagtgtatgatcaatagaaggaattaatttacatggtaatgtatgatcatacaattatataaacaattatttaactgtttttaaacatttatacacaaagtacaatacattacggaatacataataataatatacttctttttgtttaaaatatgttgttaattattttgttattaatgtgttgttgaataattaagatatatataaagttttgtttgctgcgatatgataagtttccctttgaggggaaaatgttattcttcaaaaacaaaatgaatttatcgaccgttttttgttttttgctagcttatatgggaaaataagtaaataaccataaatgaattaataccctatgataatggcaaaggtaaagttgatatagtgctaatgtttctttttcttggtaaataatacattgacatatagtaagaatggttaacacataatgcaagatttgtagctgatatgtagattatctaacaaatcatataggaaaaagatgatatttagagagaagacgtacctgcatgttattgtacctattgaatgttttgctgcaaatagagcaagcaaattgcattggaccgacatgaatctgagccggacttggtatccaaaacctcttcccacatacttccacatcagaatcaattatctcctcatcaaacttcatcttcctcctcttcttcatcatcaccacaccatcttctattatctctctcttgatgggtttcttctgatgatcgaaagttatatcagagccatcctccgagctaccacggtggtatttaggaaatccgatttggagggtaaccacatcatccttattctcttctttgatatccgaggcttgactattattttccatgagcttgtttagaagaggcaagcattgaatagacgtgttgagtggttcttgtggttggtacaagaatagagatcgttccaacatgttcatctgactctggtggtgatttgatcttgatatagcatctcttgtcttcccacgatataacacagatttagaagaagtagtagaagattgaggtttaagccattcaataaagcttggggattcgaaacttaagcctttcgtctcataagaattcatctctcgctttctctcctctctttcactctccctctctctctctctctctacctccacacgaagaagggtaagactagtagtatgaaaagtttatatattaatatcaacctacctggtgtgtatcgtagccgttcgtcaaaataggttctctctttatttttctccaatacaaaatcttcttctttaaagttttgttttcttttcctcctaccccccaaaacgtatagtgcagaaatgtcgcacgtgtctgtctacgcgtttacatcaagaggaaaagagtgaaattttcttcacaaaaatgtggtgggtcttacttcacatagtgaaaaggaaacgcacaagcgcaaggcttttcaatgaaagagaatcctaagaatcatagtctttttttttttcttctttaccctcatttcctttcccattattaaaattttgtaacatcttaaaccaacaaatacgatatcctttcatcatattatagtcatgattgtcatttaagtgcatatagaccggcgaagacaaaattcatcattacatatcaaaacaacaattccaacatcattttagccgtctttttagggacaaatgataaaaaaaggtaaattgttataaaatcacgcgttcacttttattgacgttggatgatccaagtagcagattacacgatattgatgatacatacactgtttttcatacgcaagacttttctagctagtactctaatccatgatttgcactttatttaaagatatatgaaaatatttattagctttggaaatgagttcactgatattctttgatgcatgattgggttcacgggtctatagttgatatggcagcccacacacgtatatgtttgcaaatggtactatagaaaactgaatccaaaaagtgtgaaactactttggttgtatttcattcccgttttaaatctgtcgaagctatattcattcagaagtaataaagcttaacattaatccaaaaagcagtcgcattagacattcccatcctcacggtagcgttagaaagactggaatggagcacaacaagcagatgagatgacctacacgaaggagtacgttgacccaaaaactgtaatgaatttacgttaatttttgtgttatagacgaggttttaggacgttgtaagattttgaatacaaagaggtagtggagttttgacccattaagcacaagatttttcttagaaaacaaaaaggttaccgcaagtaagtcaatacctgaagaataaaatacttgaaagaaaaacctaagaagagtgagtattcattttaagacgaaaatagaagctgattcaatgtatgtgtcatgttgtggtggaccctaaaacaatattaaccgcgcaaaatttccgaatggtagtatagctaaccgttgaaccgtatgctactatgctttcattcactaaagaattatggtttacgtcccatgcggttcaaacacggtatatacatatctggtcatattttgtgaaaccgggtttgaacaactcaccaatacaatagtactacaattcaaattaaatttttctttttgtaattaaacttcattttggtataattaaagaaaaaaaatgtttccttttgttgaccgatacaatgactgtatattcaaaaaattacttttagacatccaaattatattttcatctatcaattacaatattatgaaaattatatatttacagatgctaaatcaaaaacggtacgtttcaccttaaaccctaaccctccgaatgagctagagagacaccagcccttctattaaaagttaaaacccttccctctttacttctccgatagctttttattttcctcgtttttgcgccgaccaatg

SEQ ID NO: 27632 - DNA, 1189 bp, Unknown; identical to SEQ ID NO: 8
  misc_feature (1)..( 1189): 2750-1469P.txt file - cDNA_ID_2991145; gDNA_ID_371; Annot_ID_144333

SEQ ID NO: 27633 - DNA, 3003 bp, Unknown
  misc_feature (1)..( 3003): 2750-1469P.txt file - cDNA_ID_2991164; gDNA_ID_1620617; Annot_ID_46915
gactgcttcaagaggtgtcctttgtgctttgtgatgatttctccaagagagttatacactgtttatattgagaacgtcaagcagtattctgttggagatcccatcgagtttgtacttttgactcgcaagaaagattcttttgctcctacccggaaaaatgagcatgacttggctgttcctaatggtgaaaatgagatatatgatccgttctcaaagttcactttcacccaagatgttgatctctctgtcagacaagcagtttcagagttagacagttggattgcaagagcagatcctcagctcgttgaagacttggagaagcatctttatgtaaatgccgctttagagcgtttggagcagagaaaattgtactggaatgagcataagctctctatttacagcaaagtgtgcacaacggctagaaatcagactcaatcattgtcacctcctgatgtttctcgagttggttatcaagcacccatggggggccatggagcgccagatagcggctccaatgatcaagataaatcaactgaagattcttcagcggataagtcagatggagaatctcaatcaagtttggaaaagggttgtgataatgatcttggtcatcctctagaagatcaagacgcaccgtcatcttcctcatgcaatggaagtaaaggtttcctgtctcaccaaattgacaccaaagacctgaaggacaacgacgcgtacaacttttatcaggtaatcagtttctgatgcatactgttgtgttttcataaagtactaatgagctgcatgatgattgttttattgctatgggctggtcaatctctataatctgaaataaatgttattatctgttttcgataatctaggtgggtttattaaataattgtggtggttctatccatatatgcttaatttgtcttacctttgtgctcttgttgtgtacctatacagtctgttgatggtcagcacattatccttcacactttgaatgtgaagtgccttctgcatcactatggaagctatgactttcttccaccaaggtaagattccaggtcgtttatgcatcacaattctcatttttcaaagactatggaataagttccaatgggatcttcttcgttatctaatcatttctgcatgtatttgggatgctgattcaaagtgtgatatatggcacttttcgttgattaatcaagaaccgttcgtataaagatccaactcttatttagtatgaaaatcagaacggacaatacattcaagtaaaaacggttcagtacaagatgttatcatctctagtttgttgttctaatagacttctgattttgatccattaaacggcagattgagtggaaagatactggaaatggaaaccattacccaatcagaagcgataaggagacgctaccgctttttaagtcatttttctttatcaactacacttcaggtatattttctctttgttgctcctatcttctgcatgtgttgctatatcttgacattttctcatgaggttatccttggtttggtaatcttttcagatatgtgagattgatatgaaggaatccttgcctcctgatgcatttgctccatttatacatgaaattaagaagcgtgagaagcagcggaaagaacgtgcttggaaggtattctcgttctaaccataaaacacaaccccacggtctacttcatctaatatctttcagattccaactcctattggctttgtttgctttgtgtcttattctcctatgtattcctttgtttaaggaaaaatcaggacttaagatcatatgatgttcatatttcaggatcgaaaaaataaaatcaaagctgaagtagctgcagctgcagagcttgtaccattgatggccagttttgggcagtcgtcttctagtgatgactttcccccattttccttggatgactttgaaggtaaacaagaggaatctctcgtctcgtaattggattttaggtttattgatctaataagaagcttttgttgtgtctctcttaagctctgggaaactctgccccaatatcatcaagccctccaaacattggagagagaagttccttctcacatgtgacaaggctcggtttcgcagctggtcacgactccccaaacctgaataacgagccaacaaacgttcaaagcagcagcagcagcagtgaagtctcaaacgcaaccacaggtaaccactgtttttagctctgcaaattctaaataggattctcggatgacctctaaacatggtttcaggtgcaagaaacacaaacataacatcctttgcgagtgtagcttcaagaacaacaacaccaatggcaccaaccgtcaaagagcccggtaagagagggaagaaacagagccgagtacttctatcgacaactagtgtacgccgttactgaaaaggcctatggatttgtgtatgtataataatcttttcatctaagaaaaactgagtaaagaaagaaccagagattatggtgagtgagtaagtgtaaaactcaaacttgggctttgtttctttttgcaacccatgtgactgataatgaaggtgtctctcattactactagtctactatgccatttaggacaattattgagactcaatcatatgatcctcttgactcagagaactagaaaaaaaaagattggataaaatttcttccaagagtgattttcattctcacatgttacaacaaagcatgaaccttatcctttaaaaaatatcttcttccttttgttcaaacttttatcttctttgtcatagaaagtttggaccactgattttagtccgttggattatcaattattgacctcaataatatcaaaatttacttcaatgagaataagattacaattttttatttttttttgaacaccaacaaatctgcttcttctctggctataaataaagcataaactgttccaaaaacagaaccaaaaaatatctaaaatcactaaacctatcttcttaaccaaaagatcaatagattacaaaaatg

SEQ ID NO: 27634 - DNA, 3003 bp, Unknown; identical to SEQ ID NO: 27633
  misc_feature (1)..( 3003): 2750-1469P.txt file - cDNA_ID_2991164; gDNA_ID_1620617; Annot_ID_162083

SEQ ID NO: 27635 - DNA, 3003 bp, Unknown
  misc_feature (1)..( 3003): 2750-1469P.txt file - cDNA_ID_2991166; gDNA_ID_2926232; Annot_ID_142697
gggacttttgcatcataacatgactagtaagtacagcttcgacttctcggatggaggcaaagtcagaagattcaaagagattttggttggattctttgtgcaagtggtgatgctttacctgttgatgtagaagtgagaggtactgtctctgtttcctctgcttcttctttctttggaattagatcatttgtttggttgatgattggcttaggttatgataggttacggctatgtttgcagatattttgagactatcatttggtatgtggtaaacttcatgaacaactatgagtgtcttgatacaagaaaaactcttatctgtgatgattatagctcagggaatggcattttgggtctcacacatagaaactatagaagctgaagcaatagtgtagtgtgtgtgaatactgaaattgattgatgacatgtctgttcaatcgtttttaacagtaatcaggtgtataaaagagtcaaggtacattgaagatggagaagtagcaggacaccaagaatcatttgacatggcagcatgacccaataagcaagatcgttctcatcctttaccatgtcttgtgatctttgcttgtgttttgctatgtattgatgatttttgaacagactccaaaaatcctgtcttgtgtcagtttttaggtagatcatatggatggaccaatagtgcattcattacattttttttccaacatagctcttttgccacatatatggatctttgtgaatatctcttacgagttacgacctcttcaactgaatctcgctttctgatgcccaaaaatcagaaagttacaatgggtttgtgcacaaaactctactatagcgctatactgctattagttataccatactagatataataagtcaacgtcaatggtcagagaatcaatatccttagttgctctattaataagtatgtactaccagttccataagatcttcgacgaaccttacaaaatctggtatgtaatgtgaacttccttaaacatagttcaaatagaaaccaaattccataaatcaactaatacgttaaatgtgaatgcattttacatttttcctgggttacgttagccaacactactacaagagttgatcaacattataaaacctagattgaatagtcaaggcacgaaacttgtgcgtcttaccaaacaacattagtattaatttaaaatgtttgggaaaaacaaaagattcaagtattcaacctttgacatacacaaacaaaattgaatttatacgaaaaaaaaaaaacaatttcgtatgaaactcaatgaagaaagtttcattcaaaacataatgaagaaagtttcaaaatccacatctgatatgtgaagattgacgtatatttgatttgtggtttctatttctaatttgccatttcaataaaacgattggatatgcaaggataagtttgacttcaacatcttgcttcggtccggaccattttccatttctttttctcagaggtaaactagaatagttcttgaaagttatcataatataatagtaataataaaagtaaaagattgagacgttggcgggatgaaattcgtataaatagagatgtctataggtgaataacacaaacacatcttgttctttttgaagataaacggaaaaaaaaaatggttatacacaaatcaattaccccaatcgctctgatgttactattactactagcgatccatgcacatattcaagtcgttggttcaaccactgtaacctctgtctcactagccaatctgaaacatgaaacgtcttctgagatcaattttccagtttggcgtcgggagcttcgcggtggcggaggaggaggccgtggtggcggtggaggtcatggtggaggaggtggtgaggattttggtaacggatgtagaagcgatgttctacaaagtttcttgttcatggtttttataagttattggcttttagtgtaatataactgaatattgtatatagattttgattatgttttcagtgttactgtttgatttgctgtaatattggtttcactttttctttcatatccttttgtattgtgtattagggtttattctgtgtcttgcacggacgtttgtggattttattgttatatttgtcaatgcttatttaatatgtaaaattatgtaataaactaaaattatttatggtaaaccaaatagcttttttgtgtttagtagggattctagatctttctcaaagttttgaatttaaagatctcttggttcaaatccattgtggaaaggtttatgataaatgttggtaaagttatagccgtatgagaggctattgagagctattagccattaatcaaactaatgaaaatcaatttacaataaccaaaaactgaacaaatgatttttttttctaagttaacaaaaactaaaatgaaaaatatgtaacaaaatcttataatattccctgtcattccttagatattaatgaggaatcttatgacattccaaaaatgtatatttaataatctttataaatttaaaattattatttaaatcaaaaaatcaaagtggtgcagcggaagcgtgatgggcccataacccacaggtcacaggatcgaaacctgtctttgatataatcttttttttttggcagatatattttatacaaaaataaacaaccaaatgtaatgttaacttctacttgcatagccacacaaatataatttggtttgtatgtcattggtgatgtaaactgaaattgaagataatagaatctcataaccacacaaaaaatgaatgaacgcaaatcaaagcctctcaacacatctctttgcctcggtctctctctcgcccaattgcccatcaccagagcttaatcatatcttcttcagttactgccacgtgtcactctgaccgtgaacagcctttatctcttccaagtccacttgtgttcttgattattttgtcttcaccattctctctactcaaagctcttcttcttcgatcaaaaaacctcgagcttctaacaatg

SEQ ID NO: 27636 - DNA, 3003 bp, Unknown; identical to SEQ ID NO: 27635
  misc_feature (1)..( 3003): 2750-1469P.txt file - cDNA_ID_2991166; gDNA_ID_2926232; Annot_ID_203749

SEQ ID NO: 27637 - DNA, 3003 bp, Unknown
  misc_feature (1)..( 3003): 2750-1469P.txt file - cDNA_ID_2991177; gDNA_ID_2926222; Annot_ID_142462
ttcatcaaatccataaatcaaaacaaaatagataaatccaacacacaatcacaaaacaaactcaagcaacttgaacttgaattgtctttggtttctttggttccggaggaggaagtttctgaacagtaaccttcaacacaccgtcatgacaaacagcagagatcttgtccaaatctgcattttcaggcaactgaaacttcctcatgaacttacccattcttctctccatcctcacatacttcacaccttcgttttctttgttctctctctgcctctctccactcaccacaagcacattgtcgttctcgacctgaaccttgatctcatctcctttgattccaggcatgtccacgacgaatgcatatgcgttagggtgctcgatgacgtcagcaggtgtagcagccattgccttagcgtctcgcatgtaaactcgtgaagggttgttgcgggtcttctcgttgttgtggtcttcggggacttcaagcatgtcttcgaggattgagattattggaaaccttcctaaatccattgttagttgtgttgtgtttgctttcctgattctttgattcttggctttttgttttctttgatgagtttgatgtgagaaatgtggggacttaaataggagtggagatggatatttctagaggattgtcgagagagcgattgtcgcggtctttagaagttcttccgtattgttcgagaaacgtcttggtcgttctggtttttgtgaactctgtaactcaggtttgataaaatatgagccataactttacagaatttttaatatctatatgggcttttaaattaggaatatatcaaggcccattccatatgtgaaaatagttcatgattcataagattagtgttttagcaaattaaagaacaaattttgtgatttaaggaatccgaacaatattgctcattttaaagaatacattcaactggaaagtacatacaattgctgaagacttggattacaagtgtacaacatgcacctcaagatcagaagttcaaagtcttaatgatggaaacaagactaaattagtatatgctctggtttctggtcagaaaaattaatgaaagaccatatttattttagtgaccaaagaaaaatactatatatgtggtagcactaactcactgaataccactaaatcgtgtataacgacattaatataagctattaaagacggttacaaatctgcacaaaacttgatttgtcttaaaactcagttgatgttatttgcattcgcaaatgcaaatttcatttaaaaaataatgtagcagattgagatatcagacttcgtattatactacagatgtagtagctgaagattcagttacgttatccaacatgaaaaaagtacaaagagttgtttggattttaaaatcagaataacaaaattgtttcctttcatctaatacttaaaggataaaattgaatatgtaagagtttttgcagatataataacactgtgttactgatctcatacccataaattacttcaagggacataactccaaaaatatattttgctgactgcagagataagggtgaaatgcaaatgtggatttgatggccaatgtgctaaatagcaccaatgatattaggaaaggatgaacagtaataatttctgcaaaaacagaggaatgaccattcggtgtcttttttgttgtggtcctatttttgcctcataagcatggatggttcaagagagcaaaaacttcattgatttgaagattgaacacaaagacaaatatgaacagagaaaactatttttatttcattttacaacgaacaccaagaggtagttgcttatcgattacattcattaaaacacaaaaacacgatcacaaacaaactcaagcgacttgaacttgtatagtctttggtttctttggctcaggaggaggaagtttcggaatagtcactttcaacacaccgtcattacaagccgcagagatcttctccaaatctgcattatcaggtaactgaaacttcctcataaacttccccatcctcctctccatcctcacaaacttcacaccttcattctccttgttgtccctctgtcttttgccactcaccacaagcacgttctcgttctctatctggacctgaatctcatctcctttgattccaggcatgtccacggcgaaaacgtacgcatccgggtgctcgataacgtcagctggtgtagcagccattgcctttgcgtctcgcatgtaagctcttgaagggttgttacgagtcttctcggtttgttcttcaggggcttcaagcatgtcttcgaggattgaaaatattggaaaccttccaaactccaaatccattcttagctgttgtgttaactttcttgcttcttggctttttctttggtttgattgattttgattttgatgtaagaaagtattaaatagaagttgagttggatagttctagagcaatgtagagagagcgattgtttcggtgttatagaacttaaaagcgcttctctaacgttcgagaaacgtcttgatcgttggagaagtgtagatggatatttctagacgaatgtagagaaaagcgattgattcggtcaggcccaagaccaattcgttttcaggcccatatgtattctgttttggatttagtaaggatgttaaatttatccggtttggtacgatttcattcgaatttagtgtataaaattgattgaaccgcgtcaatacggttgaaacgcaaacgcagaggattcatgagtcatggcttttgtgaggtgaagtatcaatatcatctacctacctatatgatcatcggactaaagtgaaatgaagtcagcaatttcatcgtcactcttcttcaattcgaagaatcttttaaaccctaatcctctttctcgcttcatttctctcaaatctaacttcctccctaaattatctccgagatcgatcactagtcacaccttgaagctcccatcttcgtcaacctcagctttaagatccatttcctcttccatg

SEQ ID NO: 27638 - DNA, 3000 bp, Unknown; identical to SEQ ID NO: 14066
  misc_feature (1)..( 3000): 2750-1469P.txt file - cDNA_ID_2991191; gDNA_ID_2214695; Annot_ID_189516

SEQ ID NO: 27639 - DNA, 3000 bp, Unknown; identical to SEQ ID NO: 6961
  misc_feature (1)..( 3000): 2750-1469P.txt file - cDNA_ID_2991195; gDNA_ID_1621119; Annot_ID_56242

SEQ ID NO: 27640 - DNA, 3000 bp, Unknown
  misc_feature (1)..( 3000): 2750-1469P.txt file - cDNA_ID_2991209; gDNA_ID_2926261; Annot_ID_143223
tgttttccttttgggatatgggaagtgacttctccgacccttgcaaactaacaacggccattacacactaattacaagccaaaggtcctcactaagcaacctctcgtgtttatcataagacaccgctctatctcttattattttattcattgttttctaatttcagactgattaatcatacattagagaaagtttattaaaaccatctgatgtaaaaaatcacatttatctaaattaaataaatttgttatctagtatataactatttattgttttaacatttggataaattgtaagaaattagaatgtaaaataagacagaaaatggtcaactatgagcatctatcgccatcatgatatagtttcgtcgtttgcgttcccgacctaactcaaaacttcaccaaccccatttttaagcccctttctttgtttttatcctccgatcgatcaaaccaagaaaaaacactttcgtatttccctcgacgaaaaaaatggcaaccatttcgaatctcgctaatcttccccgcgccacctgcgtcgactccaaatcttcttcctcttcctccgtcttacctagatccttcgtcaatttccgcgctttgaatgcaaagctttcctcttctcagctttctcttcgttataaccaacgatcaataccttccctctcgtaagtctttatatccatttgatgcatgtcttttgtctctgtttctcgctcttggggttcaccaaaaattgaatctttttagctggaaacgtaccacgaatctcaaagtaacattttttataagatggattaggaaaagcaactgtatttcccctttttggttggtaaaagtctgatttttttgtttaatttgcagtgtgaggtgttcagtgtctggtggaaatggaactgctggaaagagaacgactcttcatgatctatatgagaaggaaggtcagagtccttggtatgataatctttgccgtccagtcacagatcttctcccgttgattgctcgtggtgttagaggtgttactagcaaccctgcggtaattttatcatctctctttgtgtgtttggttttgcttttgctctgtgtttgttcatttgtctttacttcttcactttttatacatttgcagatcttccaaaaagccatttccacttcaaatgcttataatgatcaattcaggtatctttttgtgattgtcttagacttgtggttgttaacaacatgctattaaaactttagagttcttctttatatgaaaagttgtctgatatgttaatggtatacctgacatgcactattaggacacttgtggaatcgggaaaggacattgaaagtgcgtattgggaacttgtggtgaaggatattcaggatgcctgcaaactttttgagccaatctatgaccagacagaaggtgcggatggctatgtctctgttgaagtttcacctaggcttgctgatgatacccaaggaactgttgaagctgctaaatatcttagcaaggttgtcaaccgtcgtaatgtctacattaagattcctgctactgctccatgcattccttccatcagggatgtcattgcagctggaataagtgtcaatgtcacggtaagttatcctagtatgtttcattattcaagtttcttattgcaagttttaaagaacttcaaaataaaataagtcataatacttcaaattcatgtattgtgtgatgatgtgctagatcactggatttcttgggcgttttaaacctgaaactagattagttcaagggtgttccaaggatgcactgatgttaccttttctaaatcgtttctcatatgttctgttctgtttcagcttatattctcaatcgccagatatgaagcagtgatcgatgcatatttggatggcctcgaggcgtctggacttgatgacctctcaagagttaccagtgttgcttccttctttgtcagtcgggtggatactctcatggacaagatgcttgagcaaattggtacccctgaagccttagatctccgtgggaaggtaaagctctattcatcgctgagatcttacaccagccactgtgagtagagtattagcttatgacacatgatatgtttactcttgcaggcggctgtggctcaagctgcattagcatacaagctataccagcagaaattctctggcccaagatgggaagctctggtaaagaaaggtgccaagaaacagagacttctctgggcatcaacaagtgtaaagaacccagcttactctgacaccttatatgtcgctcctctcatcggacctgacactgtaagtcatctttttgtttgtgttgaagtcaataggctgtattaacgctttggaagtatattcatagtttttgtgggtgtgatttaggtatcaaccatgccggatcaagccctggaagcattcgcagatcatggaatagtgaagaggacaatagatgcgaatgtgtcagaagcagaagggatttacagtgcactagagaagctgggaatagactggaacaaagtaggagaacagttggaagacgaaggagtagattccttcaagaagagtttcgagagtctgctcggtacactgcaagacaaggccaacactctcaaactagccagccattgaggaaatgagtcatcattatgtttttggttacgctaaaataaaaagaagaacctttggcttttgttcttcaatccttatgcatgctttctaaagtggttatgatggattttgcttgatgttccacattatgggttattctattttctttgttcttgtaagatgatgcttcagaagagtttgttactttttaccgtatttgtaatttacattttcactgaaaacaattggcgagtaaaaaagtgtccttgtcttcttctttgttcggattatatgaacaattgttcctagaagcctctctacataaaaagctgagactttatctctcatctctctttagacgtacaaaaaaatcagttttttaagtttcactctaatg

SEQ ID NO: 27641 - DNA, 3000 bp, Unknown; identical to SEQ ID NO: 27640
  misc_feature (1)..( 3000): 2750-1469P.txt file - cDNA_ID_2991209; gDNA_ID_2926261; Annot_ID_204741

SEQ ID NO: 27642 - DNA, 3003 bp, Unknown; identical to SEQ ID NO: 26065
  misc_feature (1)..( 3003): 2750-1469P.txt file - cDNA_ID_2991219; gDNA_ID_2214590; Annot_ID_186767

SEQ ID NO: 27643 - DNA, 3003 bp, Unknown
  misc_feature (1)..( 3003): 2750-1469P.txt file - cDNA_ID_2991235; gDNA_ID_2213650; Annot_ID_181593
tcgctgcctatggcgtgaatagtggtttaagtgctggtcttggtgttggtattggtggtggtcctggaggaggatctggttacggaggtggaagcggtgaaggcggtggagctggtgggcatggcgagggacatattggtgggggcggaggtggtggacatggtggtggtgctggcggaggaggaggtggtggccctggaggaggctacggaggtggaagcggtgaaggtggtggagctggatacggaggcggagaagctggtgggcatggcggaggtggaggaggcggagcaggcggcggtggaggtggtggtggtggtgcacatggtggaggatacggtggtggacaaggtgctggtgctggaggaggatatggaggtggaggtgccgggggacatggaggtggtggaggcggtggaaatggtgggggtggaggaggaggttctggcgaaggaggagctcatggtggtggttacggagcaggaggtggagctggagagggatacggtggtggtgctggagctggtggacatggtggtggaggaggaggcggtggtggttccggaggtggaggaggaggaggtggaggttatgctgctgcttctggatacggtcacggtgggggtgctggtggtggagaaggaagcggtggctatgtaccatgaaaaattatctatatggagtgtaacggcaattgagtgaagtgtcatatctcgtaagggactatatagtttcacgatttatatgtggcaataaatagagtaatccttcgtataataagccgtagaaaggcggctattgttgaagtttttaaattgtaccacgaccaatattgttgtaagctactactacgtgtgtatcaagtttttataaatggaaatcatagttgttcctacgcgtgacgtagaatctatattaaataaattttacggagtatgcaaagtaaggtacatgagtgaattaggacacatacaactttgatttggtacatgacaacaagtgacaatatgaagaacattaaaaacatcaataatgcccaaaggtttaattgacattaatttaattgggccgaacttaattttccaatagtttcaacctctataataaacactcttaatattatttacactaaaaggcccaaaggttatagaaaattagagccgacccataaaaccgataataaaggatcagatccgacccgataaaggtaagcagtgtagcgtcgcatcatacactccttcggttcccgacgaatcgctgcttttttctctctctctctccgtcgctgaaaaatgtcggcaagacctgaaggaagtccgccggaggttacgctcgagacctccatgggtcctttcaccgtcgaggtttctctctctcactttttcgcttatcggatcaacgataacacattccggccatgacattcatatatagagcttacacgaacttgagatctagatttcattctctataattctacattccaattgtatttttctcgaatcgagcttaaactttaggattttagaacggggttttagggtttacaatgttttgatctgtgtgtcaatttttactcagatgtattacaaacactccccgagaacttgccggaacttccttgagctatcccggagaggttactatgacaacgttctgtttcacagaatcgtcaaggtatgttttctgtgtgtttcagtctacttttcgttgtacttaagatcatcattgtgatgaagttttaaggaaattgttttgctttgctattgatctgtttcaggatttcattgtgcaaggtggggatcctacaggaactggaagaggtggtgaatccatttatgggtacgttatcatcgtttttctttaatcaatgctagctttgcttgttgattctttgtcagtaatcaaatttgaatatggggacacaagcaagctctgatgtagttagttttggtgggggatagaagcaagctctgatgtagttagttttgaagtgataatattcaaagctctgatgaagtaagcttcattatggactaggctctgtgactagaagtctcaagttaattgacactactcaagttgctttattcattgtccattccattcttgttttgtttaggtccagtcatgtgttccagaggcttgatcttaatcttagcatttgtcttattttattttattttttgccttgctccttttcctagttcgaagtttgaggatgagataaacaaagagttgaagcacacaggagccggaattttatcaatggcgaacgctggtcctaatacaaatgggagtcaatttttcatcaccttagccccacaaccgtccttggatggtaaacacagaatacactcttttaatagcttacaatgttttgagatcattttccatgtttactaagagaacttgcattgactgttgtgttcttcttttcacatctctatgcaacttctaggaaaacacacaatatttggtagagtgtgccgaggcatggaggtgatcaagaggctcggtagtgtccaaaccgataacaccgacaggtaaagttgattattcatttggaatcaacaagaattaaccaccgagtgaaaaaacccaactaatcgaaggaatctcttttctattctcaatttccaggccgatccatgaagtgaagattctaaggaccaaagtgatcgattgattggggcagaggagtttttgtcaaggagaagaagaagcatttagtaaaccgtttatgacatgaagaactataactctgtgtactgatcccttgatactattgtagactggtttttgtctaagtcttgactctactttgatggaaaaaaatgattgaaatacgttaaatcactctctatttctttttgtaatttgcctcgttcatatcaattcaacggcttaaaaaagaacacgtcatcaagattttcatgtttcaactcatatcctctaaaaagctatctctcactatgtgaaggacgcgacagtaggaaaatg

SEQ ID NO: 27644 - DNA, 3003 bp, Unknown
  misc_feature (1)..( 3003): 2750-1469P.txt file - cDNA_ID_2991239; gDNA_ID_2214608; Annot_ID_135709
atctttttttttttgcaacatcacaaccatccattaattattttagttacttaataagaacttctcatctgaatgcatatattattggagaatgaaagaaaccaacgtaaatattttcattaattaatagtatgtaagtatatgtatgtaaaaaatgtgtagaaaaaaggaaaaaagcaagcaagtgtaaggcatcgaccacccgaccacccttataatctagtgtaaggttgccaattgagctaaaagagtaacaataaccaatagttactaaatagttgttcataatcagtgtggggcacgtgccccaccctcttatacactagatccgcccctgaacctaacagtcactgacttagaagtacgaagcttacatgtacacttgtgaatggagactttccgatctcattgcataaatgacagtgatgttctggttttataataaatcaagtattcaaccgaatagacaagaggaaatacaacaatgccattatctctaacatttctcgtcaaaaaacttgtcacccggggttgttttccggaagaccatttaactcttaagtcttaagtggtcgcgcaaaagagacggtacaaaaagaaatgtaacaatagagcattgtatatgacatatttagagtaatttaagtgtttgtatgtatatgttctctacaatgttagagaaatattctcagatctaatgcaaccctagcatcattatcatcaacttcatgacatgcaactttttctttaaaaaatgtagtcgtccacggtttctcaagacattgtacactttaacaaatcattttttgcagagtggtcatgtaccttttgagaaaatgtacttgagctacaagcctacaacacatcgttaatgaatttttcagtgagttctttagaaagtcccatgactgtatcaacacctcccaccacggaatcaataaaaggtgaaataaggggatgctcaagcatcaaacctccagcaaccttgaaagttattgcatcatcaataagatcatcgatgacatgttctggtatctcatggaaataaacctctgctttgtcccatcctattcttccaactccagttttcaagtttctcacaaaaacagattgcacaacgccaccgtgtgaccccgaatagcctttgataaactcgcgagcttcttctttactagttggttattctctaataacacctttgtacacaacaacagtatctgcagtaatcaatagagttggttgagaatcttgtgtaaactggttttcacctcctaatttcaatataatctcatttgcttttgcttcagcaatagtcacaaccaaatcttcaggcttctctttcctaatagctttctcatcaatatctgcagttacaatagtgaaatcatatcccatttcagccagaatctgctttctcgccatcgactgagaacctagaatcagcttatatccgttctccatcgccttctttgccattctcgtgttgtactgtaagcggaaagagtaaagaagaaaaatcaacaaacaaaaagaagattgaacaaagaatgttgccatcttgtaacttcaaaattttgtatagcgtacattatccaacaacaagatgtcacatactataattatattgtcatcataatatagaatgctaattaatcaatagagaacaatagattactcttatctgtcagcagaacaatatcatttctaataaccattaactgtctgtaattaatggtattctgtttctcctattagctattacaccaaacctggcacacagtggacaagtcctctccatggtagtctaagagaaagattataaaccttgaggccataaacaaagaaagtagaaaattttccatgggctatcagataaattactagcaaaagcttccactaaaaccatcacacttggctaaaagctaaaatgttaacgtttgacacatctacagattttgataagtgtagtcctaaattgttcgttgatttcatacgtataaacacaatagaagaaacacgtttcttccagaagaagtaagaaaactctaaatatgcaaactacacaaggaacagaacaatcagaaaagcaaaaacaaaatgcatttacagtgaagaaattaatatgtgaagattccattagacgcgtcaatggacaaacagttcatgatgctaattgtacatatatatgatatatcaatgatccaataaaaactgctgaggcaaaactctaggaacagagaattagggttttgagattcagcagattcaaactcaccaaaagagattccttaattataggtaaacatacgattttcgaatgtagaagaagattgatacgagggaatgaagctggaacgagagctggagagaaaacaacagatggctgtaattttgcctcctcaagtttcctggtgttcggcctcgtttgccgattagtttggtttggcccatttctttatttcggttatcatctgtatttgggccttagcctttgtttttgtattcattaaaaatcaaaacgaataataagtctaatattaaaaaaggttattattattttagatatcataataatttaatacataatcacaaacaaatattattttataatataacacgtaaatacaaaaatttgttaaaaatgagttctctgcaatatcgggttcttaacccagtataattagtaatacaaatatgaaaataaggaatataaaatgatcttttaaaatcatatggcgaattggctattgaagacttttcaccaaataatacaacaaaaacttcgagactcataaaataagtgatccaactaagtcgtcgatgactataagcttttaagtctctcgctagactgtccacagatttcttcatcttctttgtctcttagcctttctatattatccaccatatctttaaatttcttttataatttgctgtatagcctatataaatgcataaccatgagtgacactaataagcaaaataagagggaatattaagatg

SEQ ID NO: 27645 - DNA, 3003 bp, Unknown; identical to SEQ ID NO: 27644
  misc_feature (1)..( 3003): 2750-1469P.txt file - cDNA_ID_2991239; gDNA_ID_2214608; Annot_ID_187287

SEQ ID NO: 27646 - DNA, 3003 bp, Unknown
  misc_feature (1)..( 3003): 2750-1469P.txt file - cDNA_ID_2991244; gDNA_ID_1620844; Annot_ID_50918
gataaccatgtttcttgtaacaagtgtcttcaacatgaccagggcgactacagtaagtacaaactggcctctcctttttctgataggtgtctccattaagaacagattgtgaagactgattggagactgcaaacactgatgaagtcattcctggagtagtagaaatccttgcagaacgttgaatttcatcctgatcaatcatgttgaatacctcagacaaagaaggcaaagttttcttcatgagaatctgacttctaacagcatcataacaatcattgagtcccataagaaaatcaatgactctattagtctctctttcaatcagaagatcttctacagtccgtggaatagcctgaagactcgtcaattcttcccaaagagtttgtttacgagtatgatacgatgacaaatccagattgccttgacgaagagagtgaatctgttgacgcagcttgtaaagtcgagggaggctagatttgtgaaatcgagtatagagatctttccagattgcagcggctgtgggaaaatacaagatgcttgtatagatctccttcgatacactattcagaagccaagacttaaccatactgttacaacgacgccagattttgcaataaggatcatcatcatcaggttttggaatagatccatccacaaatccaagcttattcttagcttcaatgctagtagtcatggctataatccaggtaccatagctgtttccatctaacagttctggagctaagactaaaccaggatgatcggagctaacaagatgataaggactgtgactattatcaggagaatccgatacctcaaagtgacgcgatgagctgtattgagctggttgatgaatcgcagcatgaatcgaggatcctggagctcttgctgatgaaccagaagactgctcatgaatcttcgatgaagcaatgacaagtagatccggtgaactactccgacgaacactctttccatttcgtttacccatggagaatcgaaacagctaacaaatgagactggatcgcaaaggaaacgaagagaaaacgtgtagaagttcaagagaagaaaaaaaatgagaagatgaacaaactccggtgagattccagtgaaatcaaatcggaaaagtttgttacgagactgagatcgagatattttgctctgataccatattagtaaaacaatctcattctcattaattagcaaaagagtacaattgggggtttatatacaaactgatattggcctaaaccataagcctctaaaccaaaattaagattggtttatagaataccaacctgtacagactctatatgaaatctatactaaccaaactaagcttatatacaacaatctaagctatatacattaatagacgaaatttttaaacaaaacccaggattcgaacatcaaataacccatccccaacgcaacaaatattatcaaccaacttttcatttcatcaatgacactgtgaatcatataaaagagatatgatgtcggtgttgaagataacttctttattgtaagattattttgatcgaataagctgcctcaaatcttctaatttcgacaactctttatctgtgaggacactatgaacacgtttgtaaaaatccatcacttggtctctagctaccaccattttctttcttcgcatagggctggggaataatgagttcttacagtgaaaacataagtggtgaccggacgcattgaacctaacatcgtagaaaacattgaggaaatttttgtaacataataaaaagagacatgtggaaagagaaaacaaaaataaaacaaaatattgagaagaaaccaagaaaggaggaatttctttagtagagagatctaccgagattataaagaaattgaggagtagaagagatgtcagcgagctaaagtgacatcagaggaaagactttgaagtggttcctcaatactagaggtatataagaaaaagaaaaagaggcagatccaaaatgttggttttgaaagttttatagatttttaagattttgtttttgttttcatttttcaagagctaattgtcataccattaccaatcaagttttaaaatgttggttttccaagaaaatacttttgctataatctttttttttgtcatcagatattatttaggattcaacgaaccaattttgaagaaaattgttaacaaaagcgaatttttcatgccaaatagttttttattcaaaattttagacttttagttatcttataagcaagcgttataatttatttatttttttaaagaaaattttgagaaaaacaattgcgaaaaaatgtcaggagatcttcaaatgttcaaaaatacaaaaaaaaaaaaaaaaaaaaaaaaattagtgtggggtaaaataatacgtttaaattttattgacttttcatttcaatagtcaacttttagtgacttcttatttcagtcgctaactttttgttgatgttgccaaaatagtcattaaattgacccgagatcacaaattgcgggtaacggaactttgttaaaatttctgttaaatccacaagtgactggattaaaaaaaaaaagtgcaactggcctaatatgagcccaataaaaaatatctcaaaagttttatgggcttattacagatgggcttagtcagagcactatcttacccaaacaattaaaaaaacaatttacaatatgttttcgttttctacttttttcggttattttgggcaaatgatatctacagctcaacaaatcaaaaaaattcaaaaatatttcaatttattatttctcgatttttttcacaactgtattttaattgtatttttagtagaaatacttatttttccaaaaatatttgtttgtgttgatgtatatataaaaaatctgcatcagtgttttgtctacattttctcttccattagtttcgttatctttttattttctctatctatctggatattattttttcacttggggatttggagaaacctctcctctctctatctatagccatg

SEQ ID NO: 27647 - DNA, 3000 bp, Unknown; identical to SEQ ID NO: 5213
  misc_feature (1)..( 3000): 2750-1469P.txt file - cDNA_ID_2991244; gDNA_ID_1620773; Annot_ID_50210

SEQ ID NO: 27648 - DNA, 3003 bp, Unknown; identical to SEQ ID NO: 27646
  misc_feature (1)..( 3003): 2750-1469P.txt file - cDNA_ID_2991244; gDNA_ID_1620844; Annot_ID_170140

SEQ ID NO: 27649 - DNA, 3000 bp, Unknown; identical to SEQ ID NO: 5213
  misc_feature (1)..( 3000): 2750-1469P.txt file - cDNA_ID_2991244; gDNA_ID_1620773; Annot_ID_167572

SEQ ID NO: 27650 - DNA, 3000 bp, Unknown; identical to SEQ ID NO: 5213
  misc_feature (1)..( 3000): 2750-1469P.txt file - cDNA_ID_2991244; gDNA_ID_2926216; Annot_ID_142218

SEQ ID NO: 27651 - DNA, 3000 bp, Unknown; identical to SEQ ID NO: 5213
  misc_feature (1)..( 3000): 2750-1469P.txt file - cDNA_ID_2991244; gDNA_ID_2926216; Annot_ID_202984

SEQ ID NO: 27652 - DNA, 3000 bp, Unknown
  misc_feature (1)..( 3000): 2750-1469P.txt file - cDNA_ID_2991253; gDNA_ID_2684112; Annot_ID_190673
tcacagatcgattaagagaagaaggtacaggattgttgaaaactttaagatgagttctacaagaaagtgttggaaactgatctgagccgttagatttaggtttctcctgaatgttgatgattccttctttctcataacaggctgatatgccgcttagttggagaagtctcgttgcagttggtaatctttgttggcttagccgtgatctagacggtggaggaggaaccattggtgtaggagtttcgagccggtgagaattctcgttgagcggcttcaagtgacttggtttcgatgattttcggctttgtgagagtgtaaaaggcgagtctaggctacgcgccgccgtctctgatgagcgattctcatctccgtctgccatttttaactgacgtctaagtctctgagcagaaacagagcgttgaatctggtggtgttgaaggtggtgctgctttggagaattacaagtcaaagagtggagatctccggcggaggaagaggatgaagtaaccggagacatgaatctggaacttacttctctaactcttggccgccgcgttgaaggcggaggagccggtgttgatggctgaatttgcttaggtccgctggttttcgcctccataactttttcgaaatagtcggagattcaagtggccacgaggattcgtcacggtcttcaagagattataattggatttttgaatttaagccaacactcggagaagaagatacgttacggtttttttttttttgagaaaatgagccgttggcttttggtcacaatctctttgtctctgtaacgccacattaattttgttttttcatagttattaaattaattaatttgtcaattagtgtaatagaaaaccaagctcttaagaaacttgttatagtacattgaacacgttctttgaagacaatgaacaggaatttcaaagagtttgtagagatgaaattgttgcaactggttactatatttatgttttatgtgtcgggtgaagatttcgaaggcaatgaaaaggctgtttgttgaacgattttgaagatctcagtttttttttttgtttttttttgtttttgaagaagactaatttgttttttttttattggtttggttttgttgcgtgatgtgataatgtgactgagaagagtaacaaacaattctgtagatttcagaacacaatgatcaaataactgagaaaacatttcatagggttacaatatcacaagaaaaaacgaaaaaataacataattatgaaataaaaaaataactatatgtctatagcgatgtgacattattggggtcctctccatttttattgcgggtatataaaatccaaaaccaaagctagatagatgcgacaataacaattcctaacattacggaagttgtgattaccattgaaagaccgaactccatattgtctatctttttttctcttgtgtcttttgaacaagcttcttccgttcttcgtatatatacaagtcgtaatttccttatctccgcaacttggcaatgaatgtgaacacaagttaaaaagttaacttaacaaaaaaatcaaaagcaaaaaagaatatttaacataacagtaacatagcaaataaatcctttaaacgtgtggtagccgcaaatcatttagagaatatgtgcaagaaaccaagcccgacccataaataaattttggtaaggcaagctaaatatgaggcggtttaatatagtctaattgtctcattctggaaattctcaaaaaatctcaagttcaaaatgaacaatctaatgaaaacttttttaaaggttggatcaattgattctggtgggagtgataatcttatttgacgtgtggcgcaaggcaataaggtccagaagttagtctaagtcttggtattgagcgagtatttaccataagcaacaaaaaaataacattgaagttcaagtcaacaaaaaaaagttcttagtgcttagatccgattactatattttatgttttatgtgtcggatgaagttttttaggcaaaggctctcaagtttgatagttttttttatgaagatctttgtttgttcgggttgtttgtgaagaagaacaagggtttggttaatttatgttgaaccacgagagtctaatttgtttgcttgattggtttggttttgttgcgtgatgtgaatatgtgcatgattgagaggagtaacaaaaaaatctatagaattcagaacacaatgatgataaaatataactattacttaggatatcattaaatatgaaagaaacaaaaccaaaaatctgaaagaaactaacaaaaggaaaaaattcaaataattgtgaaatggcaaatcaacttagatgcctctgacatcaacaaactgggcgtcctctcgtgctttcttgttggccttgtaaacaaaaagaccaaccaagaaaactaccacaaccataatgcctaaaactacggccaatgcgattatcattggaagagtgaacatcatcttattattcaccacaccaaaacttgttctttctcttttttctttttctttcttgtgtcattttaccaaggttttctactagtatatatacaattcataatttccttatctccacaacttggcaatcaaagcgaacataagtaaaaagttaacttaacaaaaacttcaaaagcaaaaaagaaaattaacataagaataagatataggcaccgccaatcgtttagagaatatttacaagaaaccaagcccgacccattaagaaattttggtaaggcccattaattaacgaaacactatacggggggttttaacataaataatatagttttaattgtctcattttgcaaattctcaaaaatctatcaagggtttgccgtacaaaggtatcggaggagagagtaaagggtaaacaaaagagagactggtttacttcttcttcgtgtgcgagtagctttttcctgcgattctcatcgagttttggttagtgctttgttatcaaggtgaaaatcgatttgaagatg

SEQ ID NO: 27653 - DNA, 3003 bp, Unknown
  misc_feature (1)..( 3003): 2750-1469P.txt file - cDNA_ID_2991265; gDNA_ID_1972049; Annot_ID_178331
tacttcgcagtagcaggctgaagcattatataagaaagagacttagaaaaagctcaaaatcgtgtaaaacaaagagaactttcgtatcgatgacaaatgtatacctgagaaccaatcttgaacccatcaacgttattcgctgcaagcaaatcaaaaaaggattagagaggaagataagtaattatcagaaataagcaagaactgtaatggttaggagtaagagcatacaatgtaactgcaagcgagaatcagcttcccaactcggtttctctggattaacattgtccgtatgagcaacaaatgtagaagtgaagtaattgataccgacaaaatcataagaacccttcagtttctccttctgctcgggcgtaaaagatggtaatcgactaccaacaacatctttcatggcctgagggtaatctccatgtgttattggctccatatgcctgtaaacagcaagtatccacactcaaaacactaagcttaataagtttgctcaaacaatatttcttaaagactactcaccagcctagagtgaaatccatagctctcttcactatctcctctgaaggactcgaggtggatttcttatcataaggctcaaaccacattggactttgaacaattccgatctttccacctgtgcactgtttgttttaaatccatggattagctcaactgaaattcgagtccaaatctgttgtgattatcctaacattcttacctttccacatttcctgaattcttccacagcttcggcatgagccaacagcagattgtgactaacagtgtaaacttcatggccactcttgcctgcaacacatttctcattgacatatttagaacatcttcctggtgctttctctccagtctcgtatccaccacgactaaattcataaggttcgtttatagtaacccaatgcttcactctatcaccatatttattgaaagcaaactgtgcaaaatcacggaaatcctccctatatatgagtttcagaacatattaagtaactgcaaaaagataggagacataactgagataacatagatcaatatttggcttagaggacttacaaaatacggtcactcaagaaaccgccgtattcatcttcaagagcctgaggtacatcccattgaaacaatgtgacaagaggcgttacacctgcaaaactcaatcaagattgccattttagccacaaggttaaaggaaaaaaaaaaggagatttcatatgaaataaagatgtgggggaatgtgtaacaaccatttgcaatgagctcgttgataagatcattgtagaatttaactcctgtttcactcactcccttgtcttttttcccatctgattgttttcaacaacaaaatgttgttagaaagtgcatctcataataaactgcaaaagaatcattaaccaaagaatagatctttgtcttacggggaaatattcttgaccaagatatagagaacctaaaggcatccatattcagttttttcaatagttgaacatcttcctgcaacattttcaaaaagttagattagatcaacatcttcagtgggaaggattgctcgtagaacaatatataccttgtaatgatgatagaaatcaactccgagcctgccgtcaagattgttgttgctttctgcagattcaaataacatgctcatgagttaataatcacaggacgagatcgaattctaaactcataacaatggctcagttttataatcttctgacctgaatgttgtttaagagtgaatgagtcccaaatgctggaacctcggcctccttcttctgctgcaccttcatgctatacaaacaaatgaaccaaattagaaacgtttggcagtagaagaggactatcaataagtcaatcatgaaacttgaagcatcatcaacagaattcaaaagtgaatgtgaaaaagaaactacccttaggcattaaaactagagacttgaaaatgaccaatgactgccttgaattggaaaaagctttaaacttttccctttcaagctatttggtttggctaaagataccaaatttgatttctttaaactagatttgagattaaagactttcttaatcgtacttacaaagctgctagagctgatattagagtaaatccggcaacgaaatattaaaactcgccggacaaaaagaatccagtcaacggcgattcaacaatgtttggacttataaatcccaaattcgatatacctggaaagcagaagttgtagcaccgaacaagaaaccatcaggaaagcttccacgaccaaacgtggaactcgccggacacacagctccaccgtagacggtgatcggagaaactatcacgacgagaaataaacccaaaaagagaatcgctttgagtgccatttttcaagtaagttttttttatgcttaacgtggttgtcgtgttccattatttataagagtcgagatcacaaagaagaagaatttaaaagatagttgtttttgagatccaatacttcgtctcgaagattaaagcaaggtgagagcgacgtgtgtgttaaaataaactatctttgatattgtacatttaattttcgatagcttagccttgtcttgtcgacgacgatggtagtagtagaagaaacaacgttaaggttccttcttaccacggtaaaaaataaataacaacaaccaataattgtaattctataacttaatttttgaaaaacagtttttaatttgaaacaacataattttaccttttatacggactaatatatacctacgacaaaaaaaggactaaatttatagctaatttttttgttttttttttcaatttatattagttagttggaccgacatgaaatatttatttaccttcaattaaagaataataaaacaaaattatctcagcaaaattaattgaatttttttagctgacacgtcaccatctttatgtttttttaattcatttatttccatttggataaaacagaaacctaatcccttaaacctcgccggcgacggaaaatg

SEQ ID NO: 27654 - DNA, 3003 bp, Unknown
  misc_feature (1)..( 3003): 2750-1469P.txt file - cDNA_ID_2991273; gDNA_ID_2936564; Annot_ID_194577
tcattgaatttgtaagtaacatttgcggttatgtgggaaatatgtgaatttaaatatacaaaaaaaagtagataagaaaactagagatcacaaagaatatataagaatctattacactttcttgtccaatatggtatatggaagttgggcttaaaaaattaactcttttttagtaaaataaatatttttaaaacagtattttaatacattaaaatttataaattatattaaatataggcatgggtcaattaagaaatatgcaaataaacaaccaacacagaaaccaaaccctaattccccattccctgtcttctttattcttttaggcgaatttcaattgcgtccaagcaaagcaccacctcttaccccgttgatttattcgtcgatttgcctttcggtgaaattcgcaatcggatctactccatttgattattaaccaagtcatgattttgagtcaaacaatggttgctgaagctgagatcagggttcttgacgttaagtgccatatctccgctcctaaagatcagaagaattttcagatcgacgaagttcgtgtttctgagtctgtccgtgctgagatttcgggttccgctgaaacgcctcgattcggatcggtatgtgtttttggtttcttgttctaaaaatcgctcatttttattaattgggtttcttagaaatttcccttagaaattagatcatgtggattcttctttctcgtaattgagtttgttggtttagattaggagttataatttgattttgagattagaccgttgcttgaaattctgataatgatccgattctgcatcagggcttatattagttttgggtttctttttgttctctattgcataataatgttgaatcctacataccctcttcgattaggttcgtgtagacaatggaaaatgataagattagtgttgtgctttggaaagtttatacctttgcatgaagaattagtttaggtgttcatgaatcaattttacattgttagcggaacgactctgatgctctgttctggctgttctgtttctttaattgtgccaagttcaggaatcttaaacaaaccttcttatgtacatttgttgtaacagggcatgagttgtgtaactactaccattggagaatccgccagtgactttatcccaactatacgttcagggagctttgctgacattcgaagtcgagaaaccatggaggatgaacacatttgcatagatgatttgtcagctcaccttggatcctacaacttctcggtaccaagtgctttttatggtgtgtttgatggtcatggtgggcctgaggcagcaattttcatgaaggagaacttgactagattgtttttccaagatgctgtgtttccagagatgccctccattgtggacgcgtttttcttagaagaactggagaattctcaccgaaaggcttttgctttggctgatcttgccatggctgatgaaaccattgtcagtggttcatgcgggacaaccgctttgaccgctctcataatcggacgacatcttcttgttgctaatgctggagattgtcgtgcagtgctatgtaggagaggagtggctgttgatatgtctttcgatcacagatcaacatatgagccagaaagaaggcggattgaagatttaggaggatactttgaggatggatacctcaacggagtcctagctgtcacgcgtgccattggagattgggaactgaagaatcctttcactgactcctcttcaccactgatttcagacccagagattggacagatcattctaacagaggacgacgagttcttgattttggcatgtgatggtatatgggatgtgttgtcaagccagaatgcagtgagtaatgtaaggcaaggattgaggaggcatggtgacccgagacaatgtgcgatggaactaggaaaagaagcagcgaggcttcagtcatcagataatatgacggttatagtgatctgcttctcctcagttccgtcttcacctaaacaaccgcaaagaagaagattaagattctgtgtttctgacgaagcccgagctcggttacaagcaatgcttgcaggcgagtgaaagcagtgtttttggcagtatgtacaaacaacagggatcgggtgttaccgatcaaaccattatttctctaatttgagattcgattcgatgagataaaataagagacgtagagagtgatagagagttaaggtcttgtttgtaatgtggtttctcatttttgattgatctgtttttttggtttgtttcagagagagatagagagaaaaaccagcctgaagttttggtaggattattgaaactgattaagaggatttcatttttgttcttgaggattagtgatgttgtacccattattgattgttttaaggaattttaattttaactattttgaatctagattttggaggttggtttaagaatctctctcccatatatgtggaattcagagagtttctttctgactgtgaaaggttttggaggtttatctcaaaagcctcaaatcctgtccttacttgcttctcatcatctctatctttatctctttatcttcttctcctccaacaatcttcatgtccatatatttctgatgagtatattttttgataatttttacaatacagtatttttcattacatatacataaatattttttggtgtatttctttacatatgaattagaagtctagaacttataaaagtaattcaaatgttgacaagaaaataataataaatcaagtgtgcattaaggtaactttgtaatcaatttcaaatatttagtgtacataattgagattagaaattcaagtattcattcatataaatgatttatttacttatctatatttttggtcaattaaggaaatattaaaatatttgtgattaaaaagagaaaaagggttctaagagagcctctcctctttacatttgccggctctgttcatctctacaaggagccaagtctctctttctctctaaaacaacaatg

SEQ ID NO: 27655 - DNA, 3003 bp, Unknown
  misc_feature (1)..( 3003): 2750-1469P.txt file - cDNA_ID_2991281; gDNA_ID_2926080; Annot_ID_196351
ccgtaattttcccttctgaaaccaacgatcctacacatcttcgtaaccttgctgcaaggtgttcatcactggtaatgcatcgcatgataaaacttttgtaccatgatgttccatttcttgttttcgctttataattttccaactgtttttcaggcacgagtccgggttttgtcgttgatagtgaagcttttttcgatttctcgacttgtagcttcagaagttaagaaatcggggcttcttgatttactggaggcagaaatgaagggtacaaaagacactcttgtgatcttaaatgttctggaactctactatgaggttggcctctgatgtctgatattattattcaatctgtttcctttgttgccctcttttgaaaggaaaagatagaattatattgaataattgtgtatgaacgctgaagttaatggaagtggagcacagttcagagttcgtgccacaaacatcacttattcagctgttgtgttctatcatcaggtacaaactgttgaaccttacccttaactattaagcttgcatcagctcatccttcagttttttttctctgggtcttatgttttgtatagtggtacatcgacgggaccctatgaaaagttaagagcaatgatgataagtggcagactactctcaaaggaaaatatctacaaagtcgtggaagaagctagtaagattttcattgtttttagcctttattggttaggaaatgagattgttttgttttctttctatgtgctttcacaacagggagtttttagggactatgttatgttaggaccagttgttccctgtctcaaagcctctgtttgttgtgcccataaaacgagtgacgaagttgaaaagttaactacgaattgctttgtttctgaatgtaatctaaggaagagaaaatagctttaataataatagacttaaatttgtaggctgtactgtagctggcaataaacaactttcaacttgtcctgaatacaggtgtgaaggcgttaatttcagctattgatgggagtctggagtcagttgagatgaatgatactgatgcacaggaagctgccattgatgcacttggtcagatgggatcaagtaagtgggtcacttttctttgaaactttgtttgttgcagtcgtcttctaaaagagatagctagagaggccatacatttagaattatgaattataagagcatccgacaagatattcgtttcccatgcaatgatcttgtaacttatatggatatttttacaataatcttagcaacgaagggagcggatcttgtcctttcaacttcacctccagctgcaagacatgttgtagcttctgcctttgatcgtaatgcacatggaaaacagttggttagtgtgtttttgcttctcatcaattgaaattctgccgattatatgctcttactacatttttgaagatccaatttttccagttttaggatttctaattctaactattgagggttgaaattttgcttcattagtagagacattcatgaaattatatgattgtttcgtaaatggcatgtgcaggctgcactgcatgcactggcaaacatcgcaggtgaaacacgacctaagagcaacagaatagttgatggaaaagctgaagaaagccttagatgtttgatatacgacgctgcagcacagagcacaaaactaaccccatccgtaagttcgtttcctcttttacttattcttctctcagaagtgtgcagattacatatttttgtttgatccgtagcatgagctaatttaagcatgtcgcacaaattgcagggtttattcctctcagttcttcaacaaagctcagagattcgtcttgcggtaaacctttaactcagcatctgatctatcatatcttctccccctttgtttctctagttggaaatttcaaaatgacacactacatttcattcaaaattaagaaatctcttttgtccttctacacaaaactcggatacatgtcactcatttgatctcacataagaccttcacgcattgcctagaggtaactatgttttttgcttatagtatattgtttacaatgttgtttgcagggttatcgaacgttaacagcattagtggctcggccatggtgcctggtggaaatcttggccaaagaagagataataaacatagttacggatgcaaccactgaaactgcaaaaataggtaaaccaagtaacattcctcgcatcacccacactccagccattgtattggcttcttcctccctcaacctctttgatctacgagtctaaatctcattttttttttactcagcaatggaagcaaggtataactgctgcaaagcaattcacgaagcgttcttgtgtagtaactttgttgatgaccctcgtcgtctaaaaaccggtgacaaggttccatacttttcctctgcgctctttaagatggaagtttcgaaaaggcttttctttgatgttgtacttttacttgctgatgacatgtttgacatttgttgcagttgcaagaagctgttcgaagtggaccatatatgtcgaagaagcacagaggcgcacgaccagaagtaatgacaggcgaaggattttaaagacaactaaagaaaaaaagttaaaacttctttgttaaccaaagttttttatatcttctctggctgttcgataagtaaactttagttctttctataaacaacgaaggctaggagtaaacgttttggcggttgaaatttgtgttctttaatttttagtgttgaacttaatcaaagaaaaaaaggaataacgagtttggtccgtttctcatcgtttgccattagcccacgcgggagatccaaaacactgggctaaactggagttaagacgataaaccaagggtaatatagtaattgcgtttccagacatcatctcttcctttatggataacactggttcgaaatggagccattactctttactaacagagggagaaagagcagagaagagagaagaggaagcttgtagaaatcgatg

SEQ ID NO: 27656 - DNA, 3000 bp, Unknown; identical to SEQ ID NO: 13103
  misc_feature (1)..( 3000): 2750-1469P.txt file - cDNA_ID_2991287; gDNA_ID_2214598; Annot_ID_186956

SEQ ID NO: 27657 - DNA, 3003 bp, Unknown
  misc_feature (1)..( 3003): 2750-1469P.txt file - cDNA_ID_2991329; gDNA_ID_1620511; Annot_ID_159118
aaataaggtctgatggttatagttgcacgtaacaattagcagaagaaaaataataaaaaatgtttctcacagagtaagtttttcttgccttgtattgatagttcttcgatacatatctgctagaatggttggtataagatccgtaattcttctttttattgaactacaatacatcttgatttctattaagagttctttgataaatttttcaatttcgcagcaaaggatcatttgggatattttctgtgagaagcatctacctgaattagttgatttcataatggcctcatgtcctgaaagacctggcgatacatctgaaggtgcattcgtaagagttggcagccatcgtggaacaaagccgggaatcctattgcgcatttgtgaattgctgtgctcttgcgttcagctggatccatccaggacaaagtaacctttatgatgattatcacattatttctgttttagtgtatcactacagtagccatctaatattcttgtgcatttacttctcttgtctgctacgtgcagttttctccataacagtgtgatagaaaaggttttgcttctcactcgaagaaaggaaaaaaccctagtggctgcagctgttcgatttgtccgcactctcctctctgtccatgtaagtaaagtagtcttcgatcagcattttttcttataggctcatctgtgcattctctcttgagaatgaattagacaattgattctataatggctagaaaatgttctcggatgacaataagtctttaggtaagttatgcaatttctaaaatattgttctatttcagaatgataatgtccagagttacattgttgagaacaacacgctgaaaccgattatcgaagtttttgttgctaatcgtcatcgggacaacctgatgactgctgctgtgttggagcttcttgagcacatacgcaaggttcctattatttcatccttttcttcactgtttctttggggtgttcctctgtacataatacatattactgttttgtgtgcaggaatatgcagtgttggtcaaatacgtaggtgatacattttgggaccagctagctccatttgagaacctgcgttccatcaaggatttgaaaacgaaatatgagaaggtatcattcttcgatctaacttctactttgaaaagttttcctaaactattctttgtttaacaatgtgtcaatgttgtcttagggaccaaagagcaccactgatgatgaatctgatatgagacaagatgggcgtgctctggatgaaaaaaagccagcttctgcttccagtacacagatggaagaagctgatccccataattccaatgccacagctgcaagttctgcttctagcacacagatggaagatgctgagccctataatcctgatgtcacagctgcaagttctacttgtagcacacagatggaagtagctgagccctataatcctggtgtcaccgctgcaagttctacttctagcacacagatggaagaagctgatccctataatcctgatgtcacagctgcaagttctacttctatcacaccgatggaagtagctgagccctataatcctgatgtcacagctgcaagttctacttctatcacaccgatggaagtagctgagccctataatcctggtgtcacagctgcaagttctgtttctccgaggtatttgtttctggtttctctcgatagaaattcattagaagcaacaaatatagttaatagatttgctttctgttttctattaatcatatagcaagaggtctggaggtttggttgattatgaggatgacgaagatgagctagagaagagtaaaagacagaagctcagttcaacaagtgaaggaaataagaacaccccagaacaaggtggtgaagctaaggaacctggagaactctaaggagctaatgacgatagcaatagtttagatgaagaaattgacagcaagcagatgtaaagagatgttgagattaacattcttgacaatagataggatttttgaagaatagaagaaactgtgtatagagggttaaaatgatgcttttgaagacaactcgatgatccgtgtaaatgactatgcaattgcattttgtaaatgaatcttgtgtgaaaatgaaattacaatttcttaaagagagacttggaggatttcatcatacacccgaggatttaagataatttcaggcaggtgtttctgtgtatatatatcagatttttttgaaacaggtaatgggttgtttttgtttgtagatgtcttgataatttccgtttctcttgatgtccacatttaccatttacctctaattgatatcatcaactcaagcgtttttacaaacaccaaaaagcgcctatttgcatcatacagtataattaaataattcaaagttcaaacgatgaaatttcacacatattcatattatttaattcaatttgatatatcttcatagagaaacaatttgtaattttaggaaaaaaaggaaataaaaaaggagtgaaggacttgagagaaaataagaaaagagtttgtgaataatcttttgtctttctctttcgtcttcctcgctctaacgccgccttctcacactctcaaattggctcatccattccaagcacgctccttcgatcttcctcttggtacgctcgtttctaattgtaagttttcttcaactcctattccaacgtttgtgtagatcttgtattcgagcaattagatcgataaaccctagtttctccgtggatattctagcaacttcccctagatttctccgtatataatcgtaaggatttagaaatcgaattatattgtgatgtttagttaacgaaaacccagtttattgaatcgtctccatcaagtagaatccctaatcttagatcccctgcttagggtttcgaaatttgtctattttgttcagctttatactgattctatttgtccaattttgaagatttgattctaagtctctagtatattctttgttatgcaatgcagaaacatg

SEQ ID NO: 27658 - DNA, 3003 bp, Unknown
  misc_feature (1)..( 3003): 2750-1469P.txt file - cDNA_ID_2991329; gDNA_ID_1620511; Annot_ID_159119
ctattaatcatatagcaagaggtctggaggtttggttgattatgaggatgacgaagatgagctagagaagagtaaaagacagaagctcagttcaacaagtgaaggaaataagaacaccccagaacaaggtggtgaagctaaggaacctggagaactctaaggagctaatgacgatagcaatagtttagatgaagaaattgacagcaagcagatgtaaagagatgttgagattaacattcttgacaatagataggatttttgaagaatagaagaaactgtgtatagagggttaaaatgatgcttttgaagacaactcgatgatccgtgtaaatgactatgcaattgcattttgtaaatgaatcttgtgtgaaaatgaaattacaatttcttaaagagagacttggaggatttcatcatacacccgaggatttaagataatttcaggcaggtgtttctgtgtatatatatcagatttttttgaaacaggtaatgggttgtttttgtttgtagatgtcttgataatttccgtttctcttgatgtccacatttaccatttacctctaattgatatcatcaactcaagcgtttttacaaacaccaaaaagcgcctatttgcatcatacagtataattaaataattcaaagttcaaacgatgaaatttcacacatattcatattatttaattcaatttgatatatcttcatagagaaacaatttgtaattttaggaaaaaaaggaaataaaaaaggagtgaaggacttgagagaaaataagaaaagagtttgtgaataatcttttgtctttctctttcgtcttcctcgctctaacgccgccttctcacactctcaaattggctcatccattccaagcacgctccttcgatcttcctcttggtacgctcgtttctaattgtaagttttcttcaactcctattccaacgtttgtgtagatcttgtattcgagcaattagatcgataaaccctagtttctccgtggatattctagcaacttcccctagatttctccgtatataatcgtaaggatttagaaatcgaattatattgtgatgtttagttaacgaaaacccagtttattgaatcgtctccatcaagtagaatccctaatcttagatcccctgcttagggtttcgaaatttgtctattttgttcagctttatactgattctatttgtccaattttgaagatttgattctaagtctctagtatattctttgttatgcaatgcagaaacatgtctaattcaaaggacgagaaatcacaagatgcagctgatagaatcaaggctgcaacactcactgctgctaaaggtctaagccgtacacaagcggagagagcagcggctgcagcagcgagaaacgttaacgcttatggccagaaagaagaaggtccgagtagatggcaggagaaaagagaattaaagaggcagatgtatttgatgagtactgagaaagctgtcaggcttggtgaaaggaaagataaaacaatgtcagcttcagccgtgggaagcagtgcttcggcggcttcacagtgtcagaaatgtttccaagctgggcattggacttatgagtgtaagaatgaaagggtttatatctcgaggccttcgagaactcagcagcttaagaatcctaaactgagaacgaagccttctgttgatgatcttgatggtagtgatgatgatgatgaagaagaaaggcctgatgcaactaatgggaaagcagaagttgagaagcgatctaagaagagtaagcgaaagcataggtcaaagtctgattctgaaagtgatagtgaagcctctgtgtttgaaacagatagtgatggctcatctggagagagtagttcagaatacagttcatcgtcggactcagaggacgaaaggaggaggagaagaaaggccaagaagagcaagaagaagcaaaagcagaggaaagaaaggcgaagaaggtacagctcttcttcatcggagtcatctgagtcagaatcagcttcggactcagattctgatgaagatagaagcagaagaaagaagaagagcaagaggcacagcaacaagcgtcgttgaattggttttaggaaatcgataagtggatgaaaattttcatgccttagaatcattttaagcttcttaaaggaaactcactgctatgttacttctttttcttcaagttcgattttttctttttgtcagccatttatggctttatgttgtaacaaactgataaatctttagaatctcctcaagttttcatagctcaatagctccttggagaatgttgtaaacctaaacgaaatacctttgtgttgttatgatagagagattttagtgactgttggttatagcatgcatatattcgaaggatggaggaggttttttggcattcaatggaaattatctatgtactagatactctgtaacaaaaaaataataaccacatcaatccaatactaattggaaagtaatcagttcaaacaaaattaaaatcatcccctgaaacatacaaatatgtgtaataaagtcaagggcttcttttgtaaatatccgtaatttatcttccagaaatagttgcattaattatctctgtgactctgtccccagtctccttcctcacagactgatccctctctctcccaaagttgcattaagttttaaactagtacaaagtctaagcttggagcttccactttgtgttctccttgaaaagtttttaccttttttcaatctctgttgttgatacacctgtaaagctcatattgcacacaaagtgttcgataaaatgcctagccgaaacaaaaattgcatataactggtttgtttctcactctctatccctcaacttcttgaattttttttcgtaggaattctctagaggtgttatttaggaacataacggtttaatcgtctccatttcgttggtactttaatcataacagttttggttttgtgatcttcatttatagcttctgagaaaacaagtgaaagtatg

SEQ ID NO: 27659 - DNA, 3000 bp, Unknown
  misc_feature (1)..( 3000): 2750-1469P.txt file - cDNA_ID_2991352; gDNA_ID_2926242; Annot_ID_142908
agtttgctccgtactcaatcgagtggcagtttaataatgtaatcagcagttatgcatggttatgatgaatgggagttattccttgtgtaggtttttctttgtcagagccgggatgatgggatggctgcttatcaatctctctattctggcaaaaagtgtgcaggatggttccttgagtcagtcgatgattctttaccagatcttctgtgcggtaaatttggtttttacttacaaatcttgcttcttgaagttatgatcatctgtgttttgttagttttgattagttttataattgcagttatatatattggactactttgttcatgaagaatacatgacctctacgtaagttcatggcgtgttaaggaaacacatttgtcttaccaaaaaatgaccatttgcattattacatctactttgattttactcttttcaggtgggacataattgcagagagactaggcttcatgctagtgtttggagatctcctgtggattcctttcacttttagcattcaggcatgtaactgtgagcctgaacacaaacaagatattaatttatcttattgacagtatcttcttggcatgttacagttattctcggaaacaatattgttctagaatgcttgatcactctgtgactgaattgtcttctctctggtacagggctggtggcttttgcacaacaaagtagaactaacagttcctgcgattgtagtcaattgccttgtcttcttgatagggtaagttctgagacattgggttattttccattcttacatatctacactaagaaacccactatttcttctttggcaggtacatggtttttcgaggagctaacaaacaaaaacatatctttaagaagaacccaaaaacaccaatatggggcaagcctccagtggtagttggtggaaagttactggtttcaggctattggtatgttatatttatcttctcttgtttctttgcttggtttcgccatctctgtgtttgattgttcatcatgctgggaataaagagttgaaagttccgcaatgacacatttccgataacttaggtgctgttttgtatatatgacaggggaattgcaaggcactgtaattaccttggcgacttgatgcttgctctgtccttcagtttgccatgtggaataaggtaacttcttctgcttgagttcatcttacagctaccaaaagtcatgtagaaactaataccaatatcaaaacgttcgaagttgatttggctgacttaaagatattgatctctaaccatcatttgaaaagtctaaagctttcaagttcatttcccaaagctgtttttatgatattttgtcttgtgtattctcagttctccggttccatatttctacccgatataccttctgatactattgatatggagagaacgaagagacgaggttcgatgtgcagagaagtacaaggagatatgggcagagtatcttagacttgtcccctggagaatacttccttatgtttattagatgtgccaagagccaagtcatgaatcctttcagattcatcctcttgtgtcttattttttcataatcttgttttattttagcaatgctcgagtgaaactttgtagtacacgtttgagaataacttcagtccttattattattttagcattgatatcagcattttcggattttattttttgggttgtttaaaaaccagagattttacaaaagacatttgtttgatgtaaaatgtcatgataaagtaatattgtacttatgtaaaactgagaaaaatactaatagaggaacagagtggtgttgataaatgataatgctgatggatatgtttataggagaaaatggaaaattatcacaaaaatagaaattgacgattacgaagtttctagatgtaccatcttaatcgacttggagacaatttaaatggaccatacacatccgtgtttctatttacatgtcaatatacatatattctttgtctttttagtatatttccttcttttcccctattttctttttaaatattgtatgttctatatcagtttctttcttaagatattatggcatatcgtaacagttgtttccatttataatcatattttatttttagtatgtcatagagttttttaaaatttatttatttgtcaacgaggttttattaaaaaattatatacacatattaaaaaaatgttgaaaatacgtgtaaaaatctcataatttgttataataataagatgtttcattttataatcacttgaacctaaaagataagaaacaataaaaccattgaagatcctaaaagacacctttaaaacttcaaaatgtatacaacaacaatagcaacaaaaaagttctagactacatacatactgtgtcggtagaaagcaaaagactttgatagtttttgattattcatgcgtttgaagagtcgcagctgttttccggttatatgtctctatctaaatctaagatcttaattttctatgttcggagatatcaaagtcgcactttttctgtgaatctagaaacacataacatttccaataagaatattctattgagattcgtagtcaactattaagtgtttattacgattaaaaaactactataatcaatgattaatgtaatttattatcttacgatctcaattatacaattcgtctgacggtttgggccgtcgtaaggccgaagtcatgcttttccttaaataacactacgagttaccaaattacccctcagctaatttgctgagaatccacgctattaaggggtagaattaagattagccaacattgccaattagagatccaacggctgaaaaagctatttcttggggaacatgcaaagatctgacccttaattaatattttcaccaaccaatagactctcatccgcagctataaaaccaacccttttcctctactggtccaccactcgtctgccttcttccgcatctcttttcatttctctctgatttctcgatctctccgtccaactatg

SEQ ID NO: 27660 - DNA, 3000 bp, Unknown; identical to SEQ ID NO: 27659
  misc_feature (1)..( 3000): 2750-1469P.txt file - cDNA_ID_2991352; gDNA_ID_2926242; Annot_ID_204122

SEQ ID NO: 27661 - DNA, 3000 bp, Unknown; identical to SEQ ID NO: 8340
  misc_feature (1)..( 3000): 2750-1469P.txt file - cDNA_ID_2991356; gDNA_ID_1971748; Annot_ID_175229

SEQ ID NO: 27662 - DNA, 3000 bp, Unknown; identical to SEQ ID NO: 8340
  misc_feature (1)..( 3000): 2750-1469P.txt file - cDNA_ID_2991356; gDNA_ID_2926195; Annot_ID_141238

SEQ ID NO: 27663 - DNA, 3000 bp, Unknown; identical to SEQ ID NO: 8340
  misc_feature (1)..( 3000): 2750-1469P.txt file - cDNA_ID_2991356; gDNA_ID_2926195; Annot_ID_201383

SEQ ID NO: 27664 - DNA, 3003 bp, Unknown
  misc_feature (1)..( 3003): 2750-1469P.txt file - cDNA_ID_2991367; gDNA_ID_1621142; Annot_ID_56670
aagtaattgcataaaacaactacttgagacttcattttgttttaccttcctgttcaaactgcttcttcagctcctctgctggtaacagtgtttgagaggaatcaaacatctacataagaatatgttatcatatatctggtttcaaagagcagatataacggtaagcccttcaagttagacggtggcttactaggggaaaagggacacacttgctaccgggtatatgaccactcggtaaacccttccaaggttctggagcaataccgtcaaatctgtgaaacagagtaaattctatatcagatcctatgagcggaatcaacttaaaaccattagcatattatagtgaaattacaatccagaacaagcaataattttggcatgatacctagcctttgaacgcgcatcgatgtgctgataagtcttatcctcgatgttttccttcacctgtcaattatccagttagctcccctagtttactagcaactatgtataaacttcatttaagaaacggtaacctgatcaagtgccaatacaagatgtggccggaacttcgtctgaaaagttattgggctaatctgtgcaaatggcaaagatgtgaataaaccatatgtagcaggtaaaccaactaaatatgcaattttcagatacatcagattggcaaaaacttttcgatgaatgaatcaacttactgtttgtccttgatagatcttctctatagcctcagttgctgcactggctttcaaaatggcatcatttgaaacactggattcaacgtcatagcctgaagcacgccatttcggcaagcctccatcaagtacccatactttgtcatgtccaaagactctaaacatcctgttttaacaaaaggaggactcatcgatttgataataccagagaaaacatattgaggaatgataaaaaggctaatggacatgagattcataactcaccaccatacacgagctgcactaaagagccccattccatcatacacaaccactccatcgttgttctcgattccaagagcagaacaaccagcagcaaaagcttcctcagatggtagcatgtgtcgtaactgcacatgtaattcaaataatatacaatactttttggttgttgcgcatacagacacatagaagctcacagccagaaggcttgccaaagctattaatgggaatctctgaacagaaaagagtccagatttttgcgtcaaagaaacaacaatatgttcaaatgactgcaatgaagaatagttactgataatatttcatttatacatataagcgatggcagtgtaaactgtaaagtcaataagttagaaataaacaacacaataacatcttctcaagaaaaaagacagtgattctcacatttgtttttcgatctgctattccattcaaatcaaagaagagagcacctggaatatgagcaacctgtagacgaggacaacatacaagtcaatcaacattcagtcgtgtagtgaccctgatgaaaagtttcatagcgctcattcagaacaaaggcttatagcttatttacgtagttatttacaaaagtgtaaatcttctcacttgatactcttggattggatttctttgctcatgtgccatgtaccatgaggcatccaaaacctgaccatgaaacaaacaagttacataagaatcatggcagaaaaaggctacaatctcaacaagtgcaaactataagcattctgagacgaaaataaacacagcaagaacgtcaggttacctttatatcagcatctccaagattagagtggagccaatcaacagacacaacaggttcattggtagatatgggtgcgtaattagcttttgcctcagatccagaagaagccatgactcgaccaaagtgagtagatttagaagctggataggcagagcgtaactgtgagctgaatgctctcttctgcaagtaatcatttacaatctcggaattacaaaacagaagatataaaaaaatcgaaactttgaacacaattcagtagagtgaattatacaagagaaagttaaactcagatttgaatcatgtgactcagatattatcggatatctacacacagctaactataactcccaatgtgaaacctttctaaactcgaaagcccactactagtagtacccaaattatacaaacaatttaaacagtaactagaagtgaatatctaagctcagagaaggtcgaaatcgaattaagaaacaacttaaattcaaaaaggttgcgcaattacgagtcttgtgatgaggaacagcagatagagagggattaatctggcagtgaccagaaaccaataaagttgttgagaaaagtgtcgaagccaaatcacctcaaaataccatgtacagaacaaattgctgagttaaagccgccaaattttgctacttccagattctctgagctcgcaactttttcaagcttcttcgttctcaacgatgctgcttctgccacctagatgattaatagattatcactgatcactagtgatcaggataagtgacgcgactaacgcatgtttaattatataaaattcacgtttgccttctctttgatataattcgcgttcgcgttctctttattaaaaatcgcgtttctgataaaacgcagtcgtttggttttacttcccttttcttcttccagaaaagaattcgtaaaatctcacttcaaccttctcttctctgcaagaaacctaaaagcctatttatttcacctctctctctctctctctgcaactaatcacttgttcgatctcgaagctgaagctaaaggtaagctattctcttcacagcgctagttcttttccgaagattcgtgtcgatctcaaaaatcccattctatcaaattgtttttaagactctaatgatttaaccaaaccaaaacctgaatcgtttgatcccggtgacgttgaaaccctgaattccggggaaattgatcctactcgtttgtgttgttcacagctttcgctaatttgcttaaggagctatg

SEQ ID NO: 27665 - DNA, 678 bp, Unknown
  misc_feature (1)..( 678): 2750-1469P.txt file - cDNA_ID_2991371; gDNA_ID_2926272; Annot_ID_143436
cttgaagcgcaaattgatgcgttggatagaaaaattgatcatcctcataaataaaaattatatgaatgagatctatatgtatatagttaattttgcttaagattaacaactttaaaatgtatatatttagtaattttatgatcatttcaaaggcattgtgtatttgaaattcattagtattattttgtagttagtgagagatccctataattatgtcaacgaaataaatagattgaaaaaacagatttgccttgcattcctaacgacctccacatgttggttagaaccttctagaatcagaaacagtagctagggtgttgacgtgtcacctaactagataccgtcactaataaaaatatcaccgcaccgtcaccgaaaacttatatccaatctctcaccttcgtggaagattttaaaacctgtactcgctgcgtaatttctttcttttgctttaaatcctttttctttttttctcttttatctttttttcttttccacggttgcttaattccaatgccatcgtgatcgattcatctctctctctctcttccaattttcccaattcttttttaaaaccctaatttttcagatatctgattatctcttgtatttcttctactcgatttgctcccataaaaacccttactttcttcaagttctggttttcaccgattgatg

SEQ ID NO: 27666 - DNA, 678 bp, Unknown; identical to SEQ ID NO: 27665
  misc_feature (1)..( 678): 2750-1469P.txt file - cDNA_ID_2991371; gDNA_ID_2926272; Annot_ID_205154

SEQ ID NO: 27667 - DNA, 3003 bp, Unknown
  misc_feature (1)..( 3003): 2750-1469P.txt file - cDNA_ID_2991377; gDNA_ID_2926236; Annot_ID_203876
tttccaacaaaaaggactttttccttctccgcacactcctatgcaagtgatgcacaaagccgagagaaaataccaagtggggacaattgcagatgaagaacaagcaaaacaaaggcagttaaagagcatcctgaacaagttgaccccacaaaactttgagaaactgtttgagcaagttaaaagtgtcaacattgacaacgctgttacactttctggtgtcatttcacagatatttgacaaagccttgatggagccaacattctgtgagatgtatgcagatttctgttttcatctctctggggcgttacctgattttaatgagaatggtgaaaagattaccttcaaaagattgcttctcaataaatgtcaggaagaattcgagaggggggagaaagaagaggaggaagccagtagagttgccgaagaaggtcaagtagaacaaaccgaggaggaaagggaagagaaaagacttcaggtgcgaaggagaatgcttggtaacatcagacttattggtgagttatacaagaaaaggatgttgactgagaaaatcatgcacgcatgcatccagaagttgctcgggtataatcaagatccacatgaagagaatattgaagctctgtgtaaactaatgagtacgataggagttatgatcgatcacaacaaagctaagttccagatggatggatattttgagaaaatgaaaatgctatcatgcaaacaagaattgtcttctagggtgaggttcatgttgatcaatgccatcgatctgagaaagaacaaatggcaggagagaatgaaggtcgaagggccgaaaaaaattgaggaagtgcacagagatgctgcacaagaacgccaaactcaagcgaataggctttcacgtggaccctcaatgaattcgtcaggaagaagggggcatatggagtttagtagtcctaggggaggaggaggaatgctatcacctccagctgcccaaatgggtagttaccatggaccacctcaaggtcgtggctttagtaatcaggacattcgatttgatgacaggccatcttatgagcctaggatggttccaatgccgcaaaggtcagtatgtgaggagcctattaccttgggtccgcaaggtggtcttggtcagggaatgtctattagaaggcctgcagtagcatcaaacacttatcagtctgatgctactcaggccggtggtggagattctaggcgaccggccggtggtttgaatggttttggctcacatagacctgcaagtcctgttactcacggacggtcaagtcctcaagagcggggaacagcttatgttcatagggaatttgcaagtctgtcgcgtgcttctgatctgtcaccagaagtttcgtccgctaggcaagtactacaagggccatcagctacagtaaacagtcctcgagaaaatgctttgtctgaagaacagttagagaatctgtcattgtccgcaattaaggaatattacaggtactatatctctcctttcttgctggtcatttgtttcattcttcgcaaagtcatcagatactgccacatttaggaaattattctgtgggaacctgtgtaggtataattggatcaaattacagttcattcgtttacagttagagcgtttgtttacaacgacagatcatctgataaagtgtatatttcttgaagtatgtaaattagaatttgctccaaacaaaacggcttaaaaatacatatgagagactttgttctttgactttaatagaatctctaatacaggggtaaactctgttttttttactgactgtgcgttttatgtatgatgttagtttctattcgtttaccctctttattattgataagcactctggtgcgttccaatgtgttcttgtgcagtgcccgagatgagaatgagattggtatgtgcatgaaagatatgaattcaccagcttaccacccaacaatgatttctctctgggtaactgattcgtttgagagaaaagacaaagaaagggatctcttagcaaagctccttgtgaacctcgtgaaatctgctgacaacgccttaaacgaagtccagctagtgaaagggtaagtaaacaaagcccataaatcttgaagccctagtctaatcaaacgtctgttgcttaaatcttttactgctttttttttcacaggtttgaatcggttttgaaaaccctggaggatgcagtaaatgatgctccaaaagcagcagagtttcttggtagaatatttgggaaaagtgtgacagagaaagtagtgacattgacagagattggtcggttaatccaggaaggaggagaagaaccaggaagtctgatagagtttggattaggcggcgatgttcttgggagtgttttggagatgataaaaacagaagctggagaagaaacgttggttgagattcgccggagctcaggtctgaggattgaaaatttcaaacctcatgcacctaaccggtctaagatattagagaaatttacttaggaaaaaaaaatggaaccatcttttgggttcctttcttcttctctttttttgtttctctcttaaaagtcttttctcttttcaagtgcttcaaacaaaactaatttgttataaagggagtttctctattttattatatagcaaaaaacttccaaaatttctcatttctgtgtttaaccttttcgtacatcagttttaaagcacagagagctcaatgttcttccaatatcgttattaataaattttgattaaattcaatcaaatcggagttatattaccacatgaggttaaagggccatattaaaaagtctgcacttcatatgagcaacaaggcttttatgtctttatggttgatttgatggcccatatatgatagttcaaaggcccatattaaaaaatgccctaacatgattcgattcgtatataaagacgcttaatgtgacaagcgaacttgctcattagggtttctcatctacgacggcgtggtgttcctccttcctgctctgaaaaatg

SEQ ID NO: 27668 - DNA, 3000 bp, Unknown; identical to SEQ ID NO: 14849
  misc_feature (1)..( 3000): 2750-1469P.txt file - cDNA_ID_2991381; gDNA_ID_2684229; Annot_ID_192175

SEQ ID NO: 27669 - DNA, 3000 bp, Unknown; identical to SEQ ID NO: 11280
  misc_feature (1)..( 3000): 2750-1469P.txt file - cDNA_ID_2991385; gDNA_ID_2214487; Annot_ID_183539

SEQ ID NO: 27670 - DNA, 80 bp, Unknown; identical to SEQ ID NO: 3346
  misc_feature (1)..( 80): 2750-1469P.txt file - cDNA_ID_2991393; gDNA_ID_1620642; Annot_ID_47504

SEQ ID NO: 27671 - DNA, 2814 bp, Unknown; identical to SEQ ID NO: 3347
  misc_feature (1)..( 2814): 2750-1469P.txt file - cDNA_ID_2991393; gDNA_ID_1620642; Annot_ID_47505

SEQ ID NO: 27672 - DNA, 3003 bp, Unknown
  misc_feature (1)..( 3003): 2750-1469P.txt file - cDNA_ID_2991393; gDNA_ID_1971821; Annot_ID_176173
ccgtagatggttgtatccgcatttctcccttccttgcgggcgaggtgccttgctgcggccatagcatggacacacgggatcttgtctatatcaaaacatttgcatgaacaacttttcattttcaaatccaccagaaaacttaccgagttgagatcaatcacgttgtattcttggttgtaactgttaagctcaaacacagttaatttggctgcaacttgacatctaatgtgcaatatgttctccacagtaggcacaacttgtgctgtgattggacaagaacctgaagcttgcctatgctcgttgaaccattcagaaaacttagaaatcatcacatcaatcattggtaacaagtggtattttctcgcttttttaaacacaccattaatggactccgcagaattactagtgtcaatgttatacttgtctcctttaaaatggcacctcgaccatttctcaaaccctactttcacaagaaagtcagcagctttaggccataaacttgtaaaatgaccaaactctttctcgaactcactctcagtatatgcatgagcacaatccctgaacttgacagcagctccatccttgtcaattgtcacacgatctctcatgttttgacacaaatgccatatacaagctgcatgaagcgcattcgggtacaccgtcttgacagccttctttatgctttgatgcctatcactaataaagaccaatccgggaacatccgaatatacagttttcagcttttctaagaaccaaatccaacttacatccttctcgctatcaatgattccaaacgcaagtggataatgatgatgattaggatcttgtgctgttgcaataaccaacatcccaccatacacagttttaagatgagttgcatccacaactatcactttccgcattgccctaaaaccttcaatgcaagcgcctaatgcaatgaagaggtacttgaactttttctctccttccaactccacataagttactgtccctggatttaccttctctaacatgtaaagataagaaaataacatcgtgtagcttctttccggagtccctcgcacatcactaacatgtagcattttgcctcttaaggcagtggagtatgaacaatgcaccccaagtcttcctcttacaatcgacataatgttttttggagttggggtctctaaatttccgggataatcacaatgtaaaaccgatgctattaatcttggtgtgcctcgctgtatactgttgcttgtagtctcaacactccgagagcatgtatgcatctttctatgcactctaacactccaaaaatgagattttttagttctcgcaactcttagataccaagtacaccctttagaagcttggcggcatcgtagcataagtctcaacgggtctgacttaatagtatagactccaaaaacttctttctttgcagctctgttaaccaattcccacacagcctcccttgaacaaaattcttgaccaatttcaatacccgtaccatcatcccattctataacctgcggagtaacttctacacttcgtggaatatcgtgaatatcatcataatcaatcctatcatcctcatcttgttcctcaacagaattcaccggcctttccatcggcctttcgatagccacgatctccgtacctactacattctcacaatcattcacatcattatcatatccatcatgcaccatctcacatacttcatttaaaacatcatcctctattacatttacaccaactgaacttcgacgctccggtacagaaatttcctctctcctctcaactcctataccatttaattcctccacatgcaaaacaggaatccgactctcttcatcagattctgttaaaaatatgaagacatcctcatcatttacaatatatgtctctctcctaactttagacagattgtaactcagtttcaacttgacagaagcttcatcaatcgcaaccttcttcatgatcttgtcaactaacatcgaatagctaatcttctccaaactactcgtcttaaacgatataacatatagtgaatttttaccaatccactcattcacttcagaatagtatcctccaaagtcaaaatgtaccttagtgtggatcttcttcttcatcgctcctgaaaatacaaccagttcaactccaatcaaacattttaatagttataccacatgtactcttatcatacgttgaaatcaatctctcgtcgcactcgtctctactgaacctaattcgttacctttcaattgatttccaatgttaatacatacctattcgttaaactaattggttaatctaaactttgcaaacacaaaccccccaaatctttaatatgaaatctcggaattcaaattcaactcacattcaacctacattcctttgctcatcacctcaaataacgtttcggcaacctctaatcgattactctttactttgcaaaccaatcatcaaactatcaaattgaatcgagctgggaattatatagaattcaaaatcccaatctaaaatcacaatgcaccaatgtcaaaggaaatatgagaagaaactgacctaattcgtggcttttacgccggatttcaagtcggcggcatgaggaaatcgatggtggccgacgaagaagatgaacgtcgaccaaagaagaagaacacgacgacgaagaggagaatctccgaactcgattttctttatttagcttttgaatttctttttcatttttttaatcaactcattaagggtacaactggtatatcacattttcggtggcattcagattaacttatggcagtccagatcagttttttcaaaaaagtggcataagtgataaaagtccccccctgcggtttggtttcttgtccgctccaaaacttgtgagggcattttagtcattacaacatgggaactggatttttaaactggtgaattcgttagcgtttatgtgaataatcatccatcatcaggaaagatccgaagaaaagcgacgccgttttaaaggagatg

SEQ ID NO: 27673 - DNA, 3003 bp, Unknown
  misc_feature (1)..( 3003): 2750-1469P.txt file - cDNA_ID_2991393; gDNA_ID_1971821; Annot_ID_176174
tatgaagacatcctcatcatttacaatatatgtctctctcctaactttagacagattgtaactcagtttcaacttgacagaagcttcatcaatcgcaaccttcttcatgatcttgtcaactaacatcgaatagctaatcttctccaaactactcgtcttaaacgatataacatatagtgaatttttaccaatccactcattcacttcagaatagtatcctccaaagtcaaaatgtaccttagtgtggatcttcttcttcatcgctcctgaaaatacaaccagttcaactccaatcaaacattttaatagttataccacatgtactcttatcatacgttgaaatcaatctctcgtcgcactcgtctctactgaacctaattcgttacctttcaattgatttccaatgttaatacatacctattcgttaaactaattggttaatctaaactttgcaaacacaaaccccccaaatctttaatatgaaatctcggaattcaaattcaactcacattcaacctacattcctttgctcatcacctcaaataacgtttcggcaacctctaatcgattactctttactttgcaaaccaatcatcaaactatcaaattgaatcgagctgggaattatatagaattcaaaatcccaatctaaaatcacaatgcaccaatgtcaaaggaaatatgagaagaaactgacctaattcgtggcttttacgccggatttcaagtcggcggcatgaggaaatcgatggtggccgacgaagaagatgaacgtcgaccaaagaagaagaacacgacgacgaagaggagaatctccgaactcgattttctttatttagcttttgaatttctttttcatttttttaatcaactcattaagggtacaactggtatatcacattttcggtggcattcagattaacttatggcagtccagatcagttttttcaaaaaagtggcataagtgataaaagtccccccctgcggtttggtttcttgtccgctccaaaacttgtgagggcattttagtcattacaacatgggaactggatttttaaactggtgaattcgttagcgtttatgtgaataatcatccatcatcaggaaagatccgaagaaaagcgacgccgttttaaaggagatggataaacaaccggcgaccagttggagtatccatacccggccggagataatcgccaagtacgagatcttcgagcgagtcggatccggagcttacgccgacgtttacagagctcgccgtctctccgacggtctaatcgtcgcgctcaaggagattttcgattaccaatctgcgttccgggagattgacgcgctcaccatcctcaatggatctcctaatgtagttgttatgcacgaatacttctggcgtgaggaagagaacgctgtgcttgtgcttgagtttcttaggtcggatctcgctgcggtgatccgagatggtaagaggaagaagaaggtagaaggaggggatggattctcggttggggagattaagagatggatgattcagattttaaccggtgttgatgcttgtcatcggaatttgattgtacatagagatttgaagcctgggaatatgttgatttctgatgatggagttcttaagcttgctgattttggtcaggtgagattatgattgttactgattgtgttagttatttcattgtttgatgcacaaatatgagaaacctctgaatgaaaaatgcttggtttgcttgaaatttggaagagttagtgtaatcaagtggctagaccttatcatttagtgtaatctatgagtttctaaatgtgtgttggcttcttggttcatatacaggctaggatactcatggagcatgatattgtagcttcagatgaaaaccaacaagcttacaaactggaagacaaagatggagaaaccagcgaaccaccagaagttattcctgattatgagaactcacctaggcaagggtctgatggtcaggaacgggaagcgatgagtaaagacgagtacttccgacaggtggaagagctcaaggctaaacaggttgttagagatgatactgataaggactcgaatgtgcatgatggagacatatcttgccttgcaacgtgcactgttagtgaaatggatgatgatctcggtaggaactcgttttcttacgatgctgacgaagcagtggatgatacacagggtttgatgacatcttgtgtgggaacccgatggtttaggccaccagaactgctctatggatctacgatgtatgggttagaggtcgatctatggtcgcttggttgtgtgtttgcagaactcttgtctcttgagcctttgttcccaggaatttcagatattgatcagatcagcagagtgaccaatgtgctgggaaatttaaatgaagaggtctggcctggttgtgttgatcttccagactacaagtcaatctcatttgctaaagtagaatctcctcttggtattgaaggatgccttcccaaccattcaggggatgtgatatcgctgctcaagaagcttatctgttatgatccagctagtagagctactactatggagatgctgaatgacaaatatttaagtgaagagcctcttccagttccagtttcagagctctatgtgcctccgacaatgagtggaccagatgaggattctccgagaaagtggaatgattacagagaaatggattcagattcagattttgatggctttggacccatgaatgtaaagcctaccagtagtggatttacaatagaattcccctgaccttggcatttaaggtacgcagtcaaaagctctggctcgcttaaacacataaatcagtctcttctctctctctctttcttcttcaaagagaatgggtatataccaaaacctgacatgtgtttctttaggtcttgattgatgcaacactctttgttgtttgaagatcttgttacagaataccgcttagaaaattgttaacttttcgttaggacattgtttaggtatcaatg

SEQ ID NO: 27674 - DNA, 80 bp, Unknown; identical to SEQ ID NO: 3346
  misc_feature (1)..( 80): 2750-1469P.txt file - cDNA_ID_2991393; gDNA_ID_1620642; Annot_ID_163051

SEQ ID NO: 27675 - DNA, 1939 bp, Unknown; identical to SEQ ID NO: 3362
  misc_feature (1)..( 1939): 2750-1469P.txt file - cDNA_ID_2991393; gDNA_ID_1620642; Annot_ID_163052

SEQ ID NO: 27676 - DNA, 3003 bp, Unknown; identical to SEQ ID NO: 27672
  misc_feature (1)..( 3003): 2750-1469P.txt file - cDNA_ID_2991393; gDNA_ID_2926195; Annot_ID_141214

SEQ ID NO: 27677 - DNA, 3003 bp, Unknown
  misc_feature (1)..( 3003): 2750-1469P.txt file - cDNA_ID_2991393; gDNA_ID_2926195; Annot_ID_141215
ttaagggtacaactggtatatcacattttcggtggcattcagattaacttatggcagtccagatcagttttttcaaaaaagtggcataagtgataaaagtccccccctgcggtttggtttcttgtccgctccaaaacttgtgagggcattttagtcattacaacatgggaactggatttttaaactggtgaattcgttagcgtttatgtgaataatcatccatcatcaggaaagatccgaagaaaagcgacgccgttttaaaggagatggataaacaaccggcgaccagttggagtatccatacccggccggagataatcgccaagtacgagatcttcgagcgagtcggatccggagcttacgccgacgtttacagagctcgccgtctctccgacggtctaatcgtcgcgctcaaggagattttcgattaccaatctgcgttccgggagattgacgcgctcaccatcctcaatggatctcctaatgtagttgttatgcacgaatacttctggcgtgaggaagagaacgctgtgcttgtgcttgagtttcttaggtcggatctcgctgcggtgatccgagatggtaagaggaagaagaaggtagaaggaggggatggattctcggttggggagattaagagatggatgattcagattttaaccggtgttgatgcttgtcatcggaatttgattgtacatagagatttgaagcctgggaatatgttgatttctgatgatggagttcttaagcttgctgattttggtcaggtgagattatgattgttactgattgtgttagttatttcattgtttgatgcacaaatatgagaaacctctgaatgaaaaatgcttggtttgcttgaaatttggaagagttagtgtaatcaagtggctagaccttatcatttagtgtaatctatgagtttctaaatgtgtgttggcttcttggttcatatacaggctaggatactcatggagcatgatattgtagcttcagatgaaaaccaacaagcttacaaactggaagacaaagatggagaaaccagcgaaccaccagaagttattcctgattatgagaactcacctaggcaagggtctgatggtcaggaacgggaagcgatgagtaaagacgagtacttccgacaggtggaagagctcaaggctaaacaggttgttagagatgatactgataaggactcgaatgtgcatgatggagacatatcttgccttgcaacgtgcactgttagtgaaatggatgatgatctcggtaggaactcgttttcttacgatgctgacgaagcagtggatgatacacagggtttgatgacatcttgtgtgggaacccgatggtttaggccaccagaactgctctatggatctacgatgtatgggttagaggtcgatctatggtcgcttggttgtgtgtttgcagaactcttgtctcttgagcctttgttcccaggaatttcagatattgatcagatcagcagagtgaccaatgtgctgggaaatttaaatgaagaggtctggcctggttgtgttgatcttccagactacaagtcaatctcatttgctaaagtagaatctcctcttggtattgaaggatgccttcccaaccattcaggggatgtgatatcgctgctcaagaagcttatctgttatgatccagctagtagagctactactatggagatgctgaatgacaaatatttaagtgaagagcctcttccagttccagtttcagagctctatgtgcctccgacaatgagtggaccagatgaggattctccgagaaagtggaatgattacagagaaatggattcagattcagattttgatggctttggacccatgaatgtaaagcctaccagtagtggatttacaatagaattcccctgaccttggcatttaaggtacgcagtcaaaagctctggctcgcttaaacacataaatcagtctcttctctctctctctttcttcttcaaagagaatgggtatataccaaaacctgacatgtgtttctttaggtcttgattgatgcaacactctttgttgtttgaagatcttgttacagaataccgcttagaaaattgttaacttttcgttaggacattgtttaggtatcaatggcggcaaaaacttttgaaattcgtttgctcattgatctcacaacttttttttgcgctttgtttctctcatcgatctcagttttatgtgtttatctctccttggcagagtccatggttgagcatcttgatcatcccgacttcccctgaattcgcctactttgtcaaaaatgtgttgtgtgtgtgtgtgtgttgttcctctctctctgcctccctcgtatgaaaatggtaacatttacaattggaaagtcggtgttagcctttagctattagctgaagagctagttttcttgttgcccaggccattctttaccctatttttcatctgaagtaacaatgaaacaaaatctatatatactcgagttttgctttctaggatctgtatttcttaattgtttctatattttgatcaattttgaacttttcatatcaagttatcaacatgtgtagtagcaacccttcaataatgagaccatggaataaaagcctatcctatatgtcatccagtttttgctaagataaattattttcagttacccaaattacataatcaaaactgatatcataaacaacaaaaatagcacacacaaaaatcataactgaatctgattcttccagaaatgtgaactgttgtttactataaaaagaagaaaaccagaaccacaatacatttgactccatgaatcagtcatactagtccaacatactaaatataaaacttaaggggcaatattgaaaattagacaaaagttgatagaccaaaagataaattaataacagttaccagtatctatcgccaagtctcccctagggttttttttctctgaaacggacatcgagaaattccaggagtgagttttgacaatcggagagaaatg

SEQ ID NO: 27678 - DNA, 3003 bp, Unknown; identical to SEQ ID NO: 27672
  misc_feature (1)..( 3003): 2750-1469P.txt file - cDNA_ID_2991393; gDNA_ID_2926195; Annot_ID_201355

SEQ ID NO: 27679 - DNA, 3003 bp, Unknown; identical to SEQ ID NO: 27677
  misc_feature (1)..( 3003): 2750-1469P.txt file - cDNA_ID_2991393; gDNA_ID_2926195; Annot_ID_201356

SEQ ID NO: 27680 - DNA, 3000 bp, Unknown; identical to SEQ ID NO: 2411
  misc_feature (1)..( 3000): 2750-1469P.txt file - cDNA_ID_2991397; gDNA_ID_1620531; Annot_ID_159737

SEQ ID NO: 27681 - DNA, 3000 bp, Unknown; identical to SEQ ID NO: 11661
  misc_feature (1)..( 3000): 2750-1469P.txt file - cDNA_ID_2991401; gDNA_ID_2214508; Annot_ID_133793

SEQ ID NO: 27682 - DNA, 3000 bp, Unknown; identical to SEQ ID NO: 11661
  misc_feature (1)..( 3000): 2750-1469P.txt file - cDNA_ID_2991401; gDNA_ID_2214508; Annot_ID_184179

SEQ ID NO: 27683 - DNA, 3000 bp, Unknown; identical to SEQ ID NO: 10380
  misc_feature (1)..( 3000): 2750-1469P.txt file - cDNA_ID_2991409; gDNA_ID_2213646; Annot_ID_132381

SEQ ID NO: 27684 - DNA, 3000 bp, Unknown; identical to SEQ ID NO: 10380
  misc_feature (1)..( 3000): 2750-1469P.txt file - cDNA_ID_2991409; gDNA_ID_2213646; Annot_ID_181439

SEQ ID NO: 27685 - DNA, 3000 bp, Unknown; identical to SEQ ID NO: 1427
  misc_feature (1)..( 3000): 2750-1469P.txt file - cDNA_ID_2991424; gDNA_ID_1620400; Annot_ID_155918

SEQ ID NO: 27686 - DNA, 19 bp, Unknown
  misc_feature (1)..( 19): 2750-1469P.txt file - cDNA_ID_2991447; gDNA_ID_2926237; Annot_ID_142768
gaattcgtgattttagatg

SEQ ID NO: 27687 - DNA, 3000 bp, Unknown; identical to SEQ ID NO: 2765
  misc_feature (1)..( 3000): 2750-1469P.txt file - cDNA_ID_2991451; gDNA_ID_1620589; Annot_ID_161380

SEQ ID NO: 27688 - DNA, 3000 bp, Unknown
  misc_feature (1)..( 3000): 2750-1469P.txt file - cDNA_ID_2991455; gDNA_ID_2936587; Annot_ID_143883
taacaccaccggagcttgaaggaggaggaggagagtaataataagatccaccgccaccggagcttgatggcggaggaggaggaggagagtaagaagatgggacaggattacatggattgtcgcaagaggaacacattgtgcaagaaacagtttcgtcctttgaagtcactaaaagaggcagtgacattaagagaataagaagacctgacaaattagagaatctgattgcttccattgtcagaaatttgttgtctgacaaatgagctagagatttggactaaagtcaagtgataaggaagagagaagatgaaagaagaaaagagagagagaagaagcacattcagaggctagaataaaagtgttcctctctttattgacgaatttaagatttttaaattattaaattgtttattgaaaaataattatttgttttcgttattattaaagatttaaaggttatgcacaatttgttttgtccaaaaaaaaaaaaagttatgcacatttgccatatatattcgtatacttagacagtatcttgaaaatgttactttcaatatctgtaaatttactttcagatataattctttagttttgttggaaaatttgatcgcatgaaataattcatcagctaacaaatgaaataacaaatttacaggcactaaaaagtaaagaacacacggagccaacacgtttgacttctagccgaaggtttgtgtaataaaagcaccgaaaaaacgcggtaaatgtcaaatggtaatgtgttcaacctaaagtttgagatcatcattcctttttatatatgaagtcgtatagatgacttttaatataatctttttaatttaattttagatatgattttgtacaatcgtaatgcacgtcgcatacaaaagatgagccgctcgaaatgtcattttttgcattgttttatttcacgctcttcttcatcaaaatggatatatataatacggatatacctgaggcttgagagaactagctgtacgatttttggaactaagtaaaaaatcgtgtaatacaatgtttgttgctagacccgtttgtttttgttaggtgaggaagagtgtacacgtggcacttaaagattggtgagcaaagagaagacacgtggatatgagaaagctgatgtcatgtcattatctcttgtggtctagagtacgagctatctagagataagatttttgcgttatttcgttgacacaaaagcagtaaaactgttaacctaactgccaagtaagataattttgatcgtattcaagcgttagcaacacatccattattcttattttcgatcaagtcagcgaaattgttacatttttagaagaataagtcagtgattacattgcaacttaggtttatttacagtactgttgtaactgaggtttttccgacgacaacacacattatgcttcaacatcgtttgtaatcactgttaacaacattttcgccacatatttcggtcccaaacaacttttataaaaaaaaatgtgtctaactctcttatatatgtcgctaacgtcggagtttcaaacaaggccgacatactgtatgttattattctttcaaaataatttttcattagtcgttatgtcttatttgttctatcaaacgaggtagacatataaaacagatttgggcttcgtttaaaacagtttagcaaattcagtgatgaaagaatgagaacactgtaaatcgatgctgtggttaagactccgtttgcaatattatatatcgatcgatgcaaataatctgtcattcgtcctttgttcgagtatgtgtgtatatacatagttgcattgatgcaaaaggaccagtctcatcatcatgaaacaaaataccattgcattgaataaatcgtctttcaaatatgcataagtgatagagacaaaaagaaaaaaaatgttgtctgtgattgattacattaatgcacccaatgtgaatgaaagtggggtgaagtaagttgcactatgaaaatgaaagaaagagaagatcaaacaaaatcacaagggaaaaaggaaagaaagctctatatttgttggttgccaaatattaattggattcttccttgtttgttgataaaagatattaaattcataccacaactttattcccttccctcacatgcaacttcttttctttacttttgtttcttattacaaattgagatgactcatgtcgctctcgagcttttatttgtaataaaaagaataattcgtacgttaatctgtcgaatcatttgttacaataatacaacgttcttaagctaattattctccttcaatcaaacaattatcaaccaaactattagacataatgctgatcatgacttacgaaattatcaacttgaaatgaattgactataagtagacaggctcatatcctaagtatagataacgattgtatcaactatcaaccataccaatttagggtcataccggtttaggtttggagtggactagtgtttgttggttttttgatactccattttagtattttactaaccttttaattcaagggacaaatcaactttaagattcctaaaattgttgaaaaaaataaaaaagattcctaaaattaattagaaataaatgcgggcagtttcaattctcaggcaggaacggacttgtggtagaccaacgttacacgtgtgaagcatagcaacgaaaccacttcctctgttcggtccaatcgaaaccaaaccgcgtgaaacgactgaaaatcaaaggtgcaaaactataaataaacataaaactcgagggtataacaggtagaaacaaaacgttgtcttcttgtgtccttgtccgaagttgtagttcggtaacaagtctttcgcttccatttcttcttcccaccttttctctctctctctctctctctctctctctctctctctctctctctctctctaccgtccttctagggtttctttgatcacattcaaatttgtcgcctttaatctcaatcctgtaagaatcagaggatatg

SEQ ID NO: 27689 - DNA, 3000 bp, Unknown; identical to SEQ ID NO: 6487
  misc_feature (1)..( 3000): 2750-1469P.txt file - cDNA_ID_2991458; gDNA_ID_1621095; Annot_ID_170933

SEQ ID NO: 27690 - DNA, 3000 bp, Unknown; identical to SEQ ID NO: 6487
  misc_feature (1)..( 3000): 2750-1469P.txt file - cDNA_ID_2991458; gDNA_ID_2926162; Annot_ID_198860

SEQ ID NO: 27691 - DNA, 988 bp, Unknown; identical to SEQ ID NO: 229
  misc_feature (1)..( 988): 2750-1469P.txt file - cDNA_ID_2991466; gDNA_ID_33017; Annot_ID_146960

SEQ ID NO: 27692 - DNA, 3003 bp, Unknown
  misc_feature (1)..( 3003): 2750-1469P.txt file - cDNA_ID_2991470; gDNA_ID_2214611; Annot_ID_135746
tccctccagttacagtgctctcttttccactatcgccatgattgctcaaacgtgaattgaatgatctgatccataatctaaaaaattgagctttcatcagtaaccgaagcaatggcacggaggtctggaaattgcatgagatgtctagtgatattctcggtggtttcagcattattagtgtgtggacctgctctttactggaaattgaataagggtttcgttggatctgctcgtagcaccaactccatttgtcctccttgtgtctgcgattttcctcctcctttgtctctcctccagattgctcccggtactgttgttacatctgggttttcaatttgattcataaaataggagactttataaatctggaaatgcttagatcgtgcttggaacaatcttgtggtttctgtgatggatctttctatcaaagctacggcttttaaattgtatacataagaagagtctcaatttctaatgaagtttcattcttttgcagggcttgcaaacctctctattacaggttagatctcgttcccaagctttgaaactctgtatgtattgtttcttcagtttctctagtatctctactgatttagtatgaatgagaatgcctatctgatgatttctcactgagaacccttactgaatcgtttgaaaacctaggaatttgtgaatcagtaaccaatgggtgcaactatatctcttaaagttagactttatttgggtttcttgatcagacataggagcctaagattctcttatctgttgccaattgcattaggaatacttttaacaaatagtttttttagttatctgttgagaagatgttcctcttttagtccatggaaaagtagaatatgatatatctgttgacttgtgttatgtatcaggttgtggcagcgatgatccagagctcaaagaggagatggagaagccgtttgtggatcttctcacagaagagctgaagcttcaagaagcagtggcagacgagcatagtcgtcatatgaatgttacacttgccgaagctaaaagagttgcttcacagtaccaaaaggaggctgagaagtgtaacgctgccactgaaatttgcgaatcagctagagagagagctcaagcattgttgctcaaagagcggaagatcacttttttgtgggagcgcagagctcggcaattaggttgggaaggtgagtaagtaattcactgtttagtgacttcttcacagtctactctgacgagtttctcaatggaagcaaactagattttctcttccgtatacaactcgtgagaacatgggaatcgcttaattcgcaaggcaatgtttttgtctcacatgttctctatatatgtagttcttttttgttttgctcttggctctagacactgctaaagaaagggttggccttgtattgacttttttcttcagatatatatttgtcagtcacactggacaaagtcaccgacttctgtattttattgttcatgtttattggcaaacgcaaccatcattttctcaccaggcaaaagcaaaatatataattatgatcttattgaacttggatattgtgttttttgagatgtgcatctgattgagacagcaagcctgatttgatttgtaagaggatttgttttgcagctaatgttggatgcatctgtgattatggtttaagcataagtgtgggtcaagagtcactaacaaagacttttgagatgtttaactaacactagaatttgtgaagagggacaagagcagaggaagagacaaaattagagaaaagtcaagaaagggttgacataatgcagcatatgatctctccaggtattacacagcaccaactttcaatactcattcatgcacaaaaacagctgcttttttctgtttatttgatttgtttatttttactagtgtcagccattaataatactctctttctctcgttgcattattctaatgctcacatggacagattccttaaaggtttttattaacactttagatctaccattaaagaacagatctcggttcagtgacttctgcaaaccgtctagacccatgtgggttgtccaaactctatagcttgaggctatttgttctatattcaacttattatgtggttatgtttcttttatgttcttctctgaagcttcctttgtggacttctgctgtttttttcctaactttggaatagtttttgtttatctctggacacagagatcgcaaattcttttttcttaaatggaaggttccatgaacaagcgaggatacgaatgcagtcaagaggatactgacaagctgccagaatcaaagagacaaaaagtgcctgctttagcaaggtaacttccttaaggattttctgtcattttctagttcaaagtagctcaatggttaaacatcacaactattgaggaagaacatgctttgttgtaagattcatggaggagaatgtgttccatttgaaactaagattctttactctttctgagtgagatttgttctttgttgagaggttcttttgtaagctctcaaattttagtttttatgtttccagacctcttgattatcttgcaagtttgttgattttctcatatgaaacaaactttttctagtgttattgtggaagctgtcaaagtagatagtctgcagaggctttgctcgtctttggagccgttgtttcgcagaattgtgagtttctattctacccctgatctagccacgtaatgctattatagtaaattgtgagatgcttgtggaggtgtttactgggtatggtgtggacaaacacacaggttagcgaagaagtggaacgagccttatcaaggttgggaaacgcaaagttaacctcgaggtatttgctccattataccttttcctcttgaaatggctctatgatctttgtagcgcttagtttctgattaacccaacataaaatctccaggtcaccagaaccaaagaggatccaagaccgcaatggaagaaacctgcaacttcactttaggacgcgaatg

SEQ ID NO: 27693 - DNA, 3003 bp, Unknown
  misc_feature (1)..( 3003): 2750-1469P.txt file - cDNA_ID_2991470; gDNA_ID_2214611; Annot_ID_187364
aatattcagccagagattggttaagtggagcatttgtttatacagccatggttaattatccaactgcagctaatttcatggcgccactgcctggttatcccgtagagcaggtgagatattcattcgttaaagtgtgtcatcgagtattttctttttcccgaccgtcattttctcttgcatcagatgtgcaagatcatcgacgggttccctcgaggatccagtaatcttgaccgtgcctttgctgctgcaagcttatactacaactattcgggatcagaaaaatgcttcgagatggaacaacaaactgatgatcatggacttgatggttggcaatatcaggtaaactcatttagaccgtcatttagatatttgaacatattctaatagatttgacgatttgcagtcgctagagcaagaaatggttttatgttatgaaacttaaaacttataaatgacacaaaatgattattgaatggaaacaggcgtgtacagagatggtgatgccaatgagctgctcgaaccagagcatgctccctccgtacgaaaatgactctgaggcattccaagaacaatgcatgactagatacggagtcaagcctcgaccccattggatcaccacagaatttggtggaatggtcagtttttttcttcccctccattggatcagtttcttcggctgtaagattcaatatcctgctctttggtcatcttttgcagaggatagagacagtactgaagagatttggaagcaacatcatattctccaatggaatgcaggacccttggagccgtggagggtaagtggtactacacagtactattcggttttggttcttaaacagatggattattttcatcaaattttcagggttctgaagaacatttcaagtagcatcgttgcgcttgtgaccaagaaaggtaaacacttctgttatgtttatgaatgttggggaaagttagacagagatagatttgagtgaaaaatcgaaacctaacattgttttgtgtggaacaggagctcaccatgcagatctcagggctgctacaaaagatgacccagagtggctgaaagagcagaggaggcaagaggttgccattatagagaaatggatcagtgagtattacagagatttaagagaagagcaatagaggagccaaacaaaagtttattgcactaaaaatcaacaaataaagaaactaggtgtttttgattcggttcgtgtaacaaagtaaaagcttcaccaggaatttgtattccctcaaacaaaataatctgatgtttgtttctctatggagtgaattctgtaactaatatctgattatatcgtggcattcatgaaaatgttatggaacaaagagggtatcatcgcaaatagtcaaaaatgtcacgcgtatttaaaccctaattagacaccgagaacataagtaacgtacgacacattcttcatgaaacaaatgcgaattcaattagattcctattcttcttcttcgctctcttggtccaaatctgttgtcgaggtaggagagttacaagtcccgaaagtgtatcccttctgtgtcaacttgacggagaccatcatgaataaaggttcttgtggcaagtcagatttttgacttcttatcccgtttggcttggacaatctgatcagctatatgttcggacaagacatgatcgtggaattggcttaggagaagttgatagacgtagtttggttcgaagtttctgaagtctagaaagattagtgggtcgggacctcgagaaggattctggtaagatccgagactcgtgacgctaccatccctgtcgtttatgataaattcctcgaagtctctgtctcgactgatcattaccgagtttaagaaacctgacgatgatggagtacgagaccaagcggttacatgaacatcgagtttcattaattcagtatccattgtcgaatttttattcgacaaaatcagagagaaaatatgattcgtggagaattaaagtgtaatgttatgtttttataagcatagatctgattataatttgttctaacttctaacgcgtttatggaatttccttttttgtctccattttttttcttttttcgttcttattttctttttgtttaaattgtttaatattatttgcgggtttacgatgtgtttatagataagatattttataaaacaaagaaaaaaagaaaatctttctaaaaactgtaattaatatttgctataatacaataaaaagtaaagtttggtagtggatcatgctgaaatttaaccttgaaataactaagttaatgaaatttgatcattttataaaaagttaaactaaattttaggatttaagtgttttttcgaaagttcataattttttcgttcaaaatttaaaagttttttttttttttggttcagactatgaatgatcatttgatcgataacttgttttttattgggttttgttggatttctcatagtaatttcattgttcctccttgtctttgcgattgtcctctttgacttcatggtactgaaatcttttttggatctttctattttttggaaattgcttggatagctcccgatcgtttatctttcaatcaaactacggtttcatttttctaagcccaaataatctcgatttccgaaatttcatttcacaaggcttcaaactaactccgaaagatgtggaaaaatttagtgaatacgaaaagatgtgggacgcttcataaataaagatgtgcggcaattttgtaattacgcaaagatgtaggcaattacgtaactacccaaagatgtgaggggatttcgtaaataggggaaaggtatgggataatgtcgtaattaccaaacgatgtgggggtgatagagttactagtgccaatcttggaatagatagtctccctccagttacagtgctctcttttccactatcgccatgattgctcaaacgtgaattgaatgatctgatccataatctaaaaaattgagctttcatcagtaaccgaagcaatg

SEQ ID NO: 27694 - DNA, 3003 bp, Unknown
  misc_feature (1)..( 3003): 2750-1469P.txt file - cDNA_ID_2991474; gDNA_ID_2214701; Annot_ID_136875
aggaggagcagaattctgttgcgcttctcattcatatgttatataatgatgacccagaagagatgtttaaggtgcattgagctcttgcacattcagattcattaatgtgtgtcatatctttatgctgactttaggctttctagttattggcttacattaatatttttaatgtttaatggcatttattcccagttgcctttattctttgtttgtaattttcaactgagacatagattatacttatccccaggagtcatcatttccttcaaaattctattaaggttttggctttcagtgtttgaagctgtttaattgaatttcagatagtcaatgtcctgaagaagcatttcctgacaggagggccaaagcgcttaaaattcaccattcctccccttgttgtttctactctaaaggtttgatttcttaagcgaagttattctttaaagcccctcataatttatgttgagcttaatttgcgatgacatggtttggttgtttctatttatgtgccataccgcatagaagagtatctgatatagtttgttaattttgttcttcttcaaattctgtaatttttgttgtctgttttgtttaaattgtagctaatcaggcgattgccagtggaaggagacaatccttttggaaaagaggcttccgttactgctactaaaatattccaatttctaaatcaggtaagtttcataacttttcactgccttgtgtgttcagatctgtttttaggtagaacaatgtgtctcagagctacattacttttttaaaacttagccaaagttagttcatacaagctgattgacaacgttgaaaattctcaatcaacagtttgtagatattagctaaagagactgctgttattgctctgtctccactacagtcatcagttcttgtatttattgttggatttttttgcttgttgcagattatcgaagcgctacctaatgttccatcacctgacctggcattccggttgtacttgcaatgtgctgaggtaaaactacgtacctgtttatttagtatgcacttgctcggtaaaatgctcacagatctttcctatttcatcaggctgcggataagtgtgatgaagaaccaattgcatacgaatttttcacccaggcatacatcttatacgaagaagaaatttcggttagttatgttttcgcggacgttcatatgtctcgtgtctaaaccaaagcaagtaggtgagtttaactctctctcgtgcgtcaaaaacttgccttttgaacaggactcaaaggcccaggtgactgcgttacaacttataattggaactctgcagaggatgcaagtatttggtgttgagaatagagatacattaacgcacaaggctacgggggtatttcatcatgatatgataattagtctcttaccatattcaattgtctctgcttaaaggctgacaagggaaaacttatactcttgcagtatgcagcgaaacttctaaagaaacctgatcaatgtcgagctgtttatgcctgttctcatttgttctggctggaagatcgtgagaccatacaagatggagaaaggtaatactttcttctgtgcgatagaacacagtgtgtttaaaatagctcattaggtttcttacttgaaatcagggttctactttgtctgaaacgagcgcttaaaattgcaaattcggctcaacaagtggccaacacagctcggggtagtacagggtctgttaccctcttcatcgagatactaaacaagtaagcgctttttattgtttgttttacttctcattttcccagatcagcaagcagcattatgtaatgtgaattatggcaggtacctctatttctatgagaaaggggttccacagataacagttgaatcagtagaaagcctgataaaactgatcaagaacgaagaatcgatgccctctgatccatctgctgaatcattctttgcaactacgcttgagttcatggagttccaaaagcagaaagagggtgccattggtgagagataccaggcgatcaaagtatagaatctcatgttggtcaaaagaagtcggtttgtttttattaaaaaaaaaaaaagctttgctttgagtcgtttgagaatcggaaagggactgatattgtgttgcttgctgctcgaaatgtaaacccgggtttaggtctagttttattcctcggattttcaaggcggttcatggtctgtaacttgtggagtttgatgtgtgtttatacgaatctttagtattctgagtttaacattggatattacatattagataatgtccttcatgaaaaaagtattcattttatgtattctgttgaatgattattgacgcataaaaacattttcaataccattgtataacgcataattaacaacctttgtgaggcttcagccttcaaatatatcaatagaaattcagtttacgaaatcaacttaaaaaattttgaaaaaataataaaatttaaaaaaaaaacaaattgtaggttaaatttttttaaaaacaaaataaaacagaaaagaaacgagaaaaaaaaaaagcaaaacaatcggagaaagttgatggaggagattgttcgttttgtgaacgcttcaatggcataaatttccggccatcacatttcttctactttctctttctctctcccttgttgttgttctctagaattcgattcatcgttgttaacgtcgtccattcttcttctttgatcccttctttgatctctcacatttccgattccaatttagggtttcctctcttttcacatttctagggtttttcttgttccctttgtaccggagatggtgaattgaaaggaaaaataaaacgcttttgagagcttatatttgaggttgtttcctcaggttttgtagatctgaggttgctatttttgaattagagattcttttttttttttttcaaaattttgtttgttgtgatcatacatagacgtacgtagctccatttctggtggagaaggaagaagaagagaaatg

SEQ ID NO: 27695 - DNA, 3003 bp, Unknown; identical to SEQ ID NO: 27694
  misc_feature (1)..( 3003): 2750-1469P.txt file - cDNA_ID_2991474; gDNA_ID_2214701; Annot_ID_189680

SEQ ID NO: 27696 - DNA, 3003 bp, Unknown
  misc_feature (1)..( 3003): 2750-1469P.txt file - cDNA_ID_2991483; gDNA_ID_2926270; Annot_ID_143406
gtctctgagctatctgaagagccatggaaaggaaagctaataactttcagccaaaatccggagttgcatttggtgaaaggagacgatctgtactcaaaaacagagtttgttaaaaaaatgcaatggggtatgaacactgattttcagaaagtgtttgatttgattcttggagtggccgtacaagagaagctgaagccggaagagatgatcaagagggtgtttgtgttcagtgatatggagtttgatcaagcggcgtcgtcgtcacattattcaagaccaggctatgcatttttaaggcagcctccaagtaatccaagtaatggatgggaaacggattatgaagtgattgtgaggaagtataaacagaatgggtatggagacgttgtgccggagatagtgttttggaacttgagggattcgagagcaacgccggtgccgggaaacaagaaaggagtggctttggtgagtggcttttcgaagaatttgatgaaaatgtttttggaacatgatggagagattgatcctgtgatgatgatggagactgctatttctaaagatgagtataagtcgcttgttgttgttgattaagaagctttactgtttttttgagtttggttttgtattcctgtttcatggttgaagcttccattgcaattttattttaataaatttggcccattgattttactttttttttctgaaccaagtaatcgatacgagaccactaacctggcttttattcatcaatcgatgctctctctacacgtaacctgcttcaaaacactcatagttcgccggaaacaatcactcgtatcatcggatctcggcgtttagaattcagaatccgacgactttggcgagcaaaccttacgcaaactatggatggtattggaaatgaacgacaacaagaacaaccgtttcatttacagatttacttcttcaaatgggcttttcttctctaaatgggtttactaccttaaggggcttttcaactataggttcaattatattcttatgtaagggtactaactagtgtgggctgtaaacgacttaaagtttcggccatttagttttatgcaagaaaaaaaatatagataatacagtaatgatgaatccactatacatgttaaatccaatataataaatccactatacattagtgttctcatatttcgtttcaagattcgattcaaaaaatttgaaaatgttaaatatgtgtttctgagattaaaggccaaaagaagggtaaggtcgtatatgaaaggtggacagaggggcaaattagtcagcttgaaaaatacatcgacattaaaaatcggcagcactgacaaaacgtgtgataacacaaataaaaataatcggaagaaaaagaataaataaggcgtattgactctggaacgtgagaagatgaaagagagcgacgaaaacctctaaagacttatcgagaagtgcaccttagcctagtgaataatgatatgtattgacattaactactactactacagctcccaacacgtgaaagacatgcatctaactctttcactttcggttgccaagaaaaaaaaaaaaaaaaaactttcactttcggcatcaaatatatactactaaaaaagttttttatacgtaattcttttttaatatttgattagttcagaatattaattaaaaaaattacttttcgtaatcactacattttgtagttatatgatttttaatttaaaatagtaaaaaggagaaatgtaactaattaagctaacatgcgcgcgatagaataaggtgaagtttaaatttgagcacaagatagaaaattgaggtcaatttaattcggaagtggttcaaggtatattttcacaagaaagaaaaacgtgagttcattgaatccctctataactttacttgagaacaatgtaataatatgtaaatctgttaggaaacgagcagccacatatgctttaaacaagagaacaagaaaaagagcggccacatgtgaaaaaaaaacaccagccaaaatgtgaaactaagaaaagaaaagaaaaaccatcgacatcgtccaaaggatcgacccgtcttttctggtttggcagaaaacaaacttccaagttccgacttgacctagtctttatgcatctgcagtggtgttttctttaaatctttttttgaatggatttgaaaatcttattttttcttcttctttcaaaacactaactgtgaatcaccaccaacattttattgttctaaaatccctatttgtatgttttattggttactttcccaaatatgatgaaagtttattggtgtactttagtttagaaatgtaagaaatttcagttgtattattaggtcaaccaaatattattcttgaatagtaatgtcaaattttgtttatattgaaaaatcaataagactgatatctactaaatgtgatttgctatactagtagagctagtagtagcaagattaaaattcatattaagaaaaaatggaaaagaaaaacatgtttcgagaaaaatatacagatcagagactagagtagaaaacaaatataatgtcagaagaacccaatgtgacgaacagtaacagaaacatgttaccaaatttttgaagatatatttttataaaacattacaatgttcattggacttccgttatttccggatataaaatatcttctttctgcgtagcaagcaattacattacattaggtatattaagaatttaaacatgtgttttgaatcattaaattaattagataagtaagagaagaggttgggagcctaataaaaacaaaacaaaaaggaaaaagtggataggttgccaattgtgccgaaaagaaagagaaagcatgaacctcgtgcgttaaataagtatcagagacatactacattttaaaaactctcacatgagaaatcagaatccgttattattcctccatttattcatctcaaaacccatatctctctgtcttgatctctctctcactttctaataagatcaaagaagatg

SEQ ID NO: 27697 - DNA, 3000 bp, Unknown; identical to SEQ ID NO: 1858
  misc_feature (1)..( 3000): 2750-1469P.txt file - cDNA_ID_2991486; gDNA_ID_1620459; Annot_ID_157691

SEQ ID NO: 27698 - DNA, 3003 bp, Unknown
  misc_feature (1)..( 3003): 2750-1469P.txt file - cDNA_ID_2991489; gDNA_ID_2926232; Annot_ID_142692
cttgcttgatttctttctaaacaaagcaaaagttgtctttttggagttgtgagcaactaattctctgaaattgaggaagagaaagcgagaaggtttttttggagtcagagacagaagaagaatttaacagattcttgtcggaaacatggatacgagtgaagcaaggaaccgtaaagttgttgcagttgaacaattcgatctcgaagtccctgagactgctcatcagattagcagcggttcgtttcttatcctctatctttggatttttgtttttgtttttattgtccttgttttttgtttgttgctgctcttttttggtgaatctacttgtcgtttattgcataatctcgagcttttcttgaaaaaaactcatttattattggggggtttgtgctccttttttcattaagcttttcttgagaaataatacacagacagagaatggaaagggtcgtttagctttgtttgtcttctttgttagattgaatgatactttgttacttgcttttaccctataagctgctgaaatatgacacatcaaagaattgaactgatgttactttccaaatcatgttgtctccgatgatgtttgcggtgccctatagtggaaaatgttgtctttgatgattcaagaatgtgaacattcaataactttaagtttcttgatcagtttttgtcttccccaaagttttaagctatgaaaactctgtttttttttttgttttctgttactctgaatttacattgagatgaaaaatgagtggctgaggaatatagaaataattgacaaataatatatactctgttttagtgttgcatgtgtgtgaaagcttaagtgttgaagaacttgtacagattcatggtttcaggtagcttttgttctaacgaccggtataaacagtgcctatgtgttgggatattccgggacagtcatggttcctttgggttggattggtggtgtggttggtctcattcttgctaccgcaatctctctttacgcaaacactcttatcgccaaacttcatgagtttggtggcaaaagacacattcgttatagagatcttgcaggcttcatctatggtaaattcttcatcactctctcgcaatatcaaaatacatttcaagttttacattttaacgagaattgtatttgcttgattgattcaggtaaaaagatgtatcgtgttacatggggattgcaatatgtcaatcttttcatgattaattgtggcttcatcatacttgctggttcagccttaaaggtacaataaccgaaacaaaccgttttgttgcgaaaatccgaaagttagctcatatggctctgcttttgcattttgtgcaggctgtttatgtactttttagagatgatagtctcatgaaactgcctcacttcatcgccatcgcgggtgttgtatgcgcgattttcgcaatcggtattcctcatttatcagctcttggaatctggctaggagtttcaacaatcctcagcataatctacattattgttgcaatagttctatcagctaaagatggtaaacttttatgttaaatcaaacctcgaaaatgatttcatataaccacaaaaaaactactcaccattttgtgtgtttttgtttctggtttaataggagtaaacaagcctgaaagagattacaacatacaaggatcatcaataaacaaactctttaccataacaggagcagctgcaaatctagttttcgcattcaacacgggaatgctcccggaaatacaggtcagtgtcatcgatctattattcatgctcgatcaaatctttctctgttttgtgagtgacactaatcttttgtgcaaatgattaggccacggtgaagcaaccggtcgttaaaaacatgatgaaggctctgtattttcaattcactgttggtgttttacctatgtacgcggttacattcatcggatattgggcttacgggtcctcgacatcgacttatctcttaaacagcgtcagtggacctgtttgggtcaaagcactcgctaacatttcagcttttctccaatctgttatctctttacatgtaagtctctatccagaccacaatgatgagtctttgagtcttaatcctaagcttaaccgttttaattcttgtgtttttaacgtagatttttgcaagtccgacttatgagtatatggacacaaagtatggagtcaaaggaagtccattggcaatgaagaatctgttgtttagaacagtagcaagaggaagctacattgcggtgagcactcttctctctgcgcttttaccgtttctcggagatttcatgagccttaccggagcgataagcacgttccctctcacattcatattagcgaatcacatgtatcttgttgctatgaatgatgagcttagtcttgtgcaaaagctatggcattggctcaatgtttgcttctttggattaatgtctcttgctgctgctattgctgctgttagactcatctctgttgactccaagaacttccatgtttttgctgatgtttgattaaaatgtcttcgacatttttaacgatgtaatctttataccaattagaaaaaatttgtaatccttttgttgttacttttattatttcaaatgaaagaaattttttataacataatatatatatttatttttcggttcaacacaaattttttttttaacaaaacaattcaagagataaatagatataaaaaaaagtaaagtgaaattaatcaagtagtcatattcttaagcaaagccatattcattaagaaaataaataatcattttcttatgcagagccatatttgggccaagccgtataaacgtttgggccaacttgtttgagatagcatataagcccaatagagttttgttgctgagcttatttgtgaatccatataaagtcttgacctaataacgaaagctagggttttttctctgtgaaatcgctcgccggcataaaagagagtcagaagaggaagaagagagttacaaggattgaaaatg

SEQ ID NO: 27699 - DNA, 3003 bp, Unknown; identical to SEQ ID NO: 27698
  misc_feature (1)..( 3003): 2750-1469P.txt file - cDNA_ID_2991489; gDNA_ID_2926232; Annot_ID_203744

SEQ ID NO: 27700 - DNA, 3003 bp, Unknown
  misc_feature (1)..( 3003): 2750-1469P.txt file - cDNA_ID_2991499; gDNA_ID_2214471; Annot_ID_133089
caacgggaggctgatctttgatatgcctcaacataggcaaaacaaagccaagggttttacctgacccggttttggcaaccccaatgcagtctctaccgctcatgatgattggaagtgcttgtgcttggataggcattggcttttcatagttaagcttcttcagagtatccaaaattttgctagttaatccagtctggtgccaaaattgaatgggtcttggaacatctttcccatgaactttcagctccaattcctttctataagcgttcactgcatcctgtgtcatccttgagatatccttgacttcgatataaaaattcttccggaaaggttcatactctattttggagtggtcaacaagagacaatttctctgcttttgtcttcttaactctcttcataaactcctcgtcgtcttcgtctaaacttggatcatcatcactctttggttctgagtaatctgaatcagaatcttcaccttgaattatcctaccaagggcggccttattaaaaccttttttggcttggtcaccagtttccttcccattcattttaaaatccaaaataccatcgatcacaatattgctaagcttttcaacctcaggtaataccatagtattcataaaagcatctaagggatcaatttcgtcttcatctgcagctctgtcacctccattctcagagacagtaacagctgtctcattctccgaggcgaccatcttggcatctccaccattttcgagtttagtatcacgatcaacatccatctctgagtctgatttaacttcatcatcagattcaccatcaagagtccaagccttaccggtctcaggacccttactttcaatttgagcttcctcgttttgcctcttcaactcttgccactcctggactcttctcctccgtttttctacttcctcagccaactgcttctgctcatcctctacttgttcatcccgagttttcttctcaacatcgtcatctccatgcctgctacgctccgttcttttgcgtttcaagccacacttgacatcatcactctcttcattacaatcctcacgtgacctctcctttttctgtttcttcctacccttttctttctcacgttctctcctctctctgtcccttttcagatattttcctctatctctgtcacgttctcggcgtcctcttcccttgtcctcccctctgcgtttactatccctctcgtattcttcttcttcaaaatcgctactttttctatccctccgtatccgtatcctctcctcttcctcagaatcgcatctcttaactctcgagcgcatctccgtcgtatctcgccgaccattctctttcttactgcgatcacgatctttgcgatcattttccttcctggacttagatttctctaacatcatctcaaacgcaacaaatcccgatagaaaattccgtaacttaaacccaaattcaaatcaaattcatccgccaaacaaaagcttcaacgataaccctaaaaatgttgcggtgaagaagacaaagctaccagaagaatcaaaactctctacaccgtaacgttgtaacgtctcgttagtgtcgagtaacagagataataaagctgtaaggttgggcccttattggtaaaagataaaagtgaaaaccagttattgggctatttgggctttagttaggtccactattaatcgatattttcctcatgggcttctaaacaacatcgcaaggttattctattcaaaataattattcatttcgttgatttcatctcatgaatgatttcctattatttatagttcattccccaaaccactcgcatcacaggcgcgttgagcacgtgaggctaaaatccatggactatataaccttcctttttggggattttttgcataaattaaaaactgagaggacctgcagcgcgtgggttgggatttcatttgttgtgactacaattttttttttttttcccccaaaggtctttctgtttattgactttttatcataagataaaacgttacaaaatgggttaaacctatctaggtgattacaaaatttcaaaaattgaaactaaaaaggcctaaccccaataaaaggatatcaaacccaacttgaagagaggcattgaaagctaaaaggactggaccaaaaacccaaacgactacagtattcacatgaaaatataaccaaacgaaaagaactattaccgtgttttatcttttgctcagattatggtccgaaaatattgttatcgattcttgatttagattaaaaatgagataaaactgtaaagattttctgaatattttgaggtgtgcattttaatagaaaacgaagccgatagtgaatacaccgagtttgataacttcaccaaatgactcggtggcagtgctaatcagtaatatctcacctgcttaggagcacttccatatttaggaaaagaatatgatttgaaatattttgccattcaagatcgagactaaagattatttgaactataaagcaaattttcactctttaacgctccatttcgtacattactttgatcatttttctttttatctatttttttcgtcgaccgttttctttgacgatgtttgttatatgattctaaaagcatccacaatggtagactcttagcaaaactcttaacaaatatttaaaaaattatataatttaaatattagataaatctcttaaatttggtaaaacttaggtcaattgtctcttagttaagagacaaatagtcgggttttattaggcccactagttcgttaaaggctaaagcagtgcccggttcttatagcggaggtaactttaaatattgggcccttactgaaaggtaaattagttgggtttattgggctttattataaggcccactaattcagcagtaaccctaacgaaaccctagcatatattagttcttaaacttcagctgagagaaaaccctaatttctcaaagagtctaaagagacggagagtgagagaagagagaaacatttcgagacaaatg

SEQ ID NO: 27701 - DNA, 3003 bp, Unknown; identical to SEQ ID NO: 27700
  misc_feature (1)..( 3003): 2750-1469P.txt file - cDNA_ID_2991499; gDNA_ID_2214471; Annot_ID_183027

SEQ ID NO: 27702 - DNA, 97 bp, Unknown; identical to SEQ ID NO: 409
  misc_feature (1)..( 97): 2750-1469P.txt file - cDNA_ID_2991499; gDNA_ID_1590810; Annot_ID_150094
  misc_feature (45)..(45): n is a, c, g, or t

SEQ ID NO: 27703 - DNA, 3003 bp, Unknown
  misc_feature (1)..( 3003): 2750-1469P.txt file - cDNA_ID_2991503; gDNA_ID_1620465; Annot_ID_157893
tgaaaaaccacaagtgtaaattgttgagggaactaaaacacttgaagatggataacaaacttctgctgacaggaacacctctgcaaaataatctttctgagctttggtctttgttaaattttattctgcctgacatctttacatcacatgatgaatttgaatcatggtacaaacatggtccttttctactattatccctaactagtcttctttttttttttttttttgttaacactggtggcagctttttgacatttattcctttcttagtatctaactgatagatgagtctctacaggtttgatttttctgaaaagaacaaaaacgaagcaaccaaggaagaagaagagaaaagaagagctcaagtatgtacaattatatcaattttcctttatttctttgattgtatttatgtcttatgctaagggtacatcttgtctaggttgtttccaaacttcatggtatactacgaccattcatccttcgaagaatgaaatgtgatgttgagctctcacttccacggaaaaaggagattataatgtatgctacaatgactgatcatcagaaaaagttccaggaacatctggtgaataacacgttggaagcacatcttggagagaatgccatccgaggtacatgatctattttttttttttaatactttgtttaattatgtcattttctgcattgatttgttcatcccctatacttcaggtcaaggctggaagggaaagcttaacaacctggtcattcaacttcgaaagaactgcaaccatcctgaccttctccaggggcaaatagatggttcatgtatgtcagtttcttttaagaaacgtaagaaaaacttctgtcatactgttctgtctaattgtttcatttcgtgacagatctctaccctcctgttgaagagattgttggacagtgtggtaaattccgcttattggagagattacttgttcggttatttgccaataatcacaaagtatgtttcacaaacccatggctcgtagctcatttccctttgagaacttctctgatccatttgctgatgaccaggtccttatcttctcccaatggacgaaacttttggacattatggattactacttcagtgagaaggggtttgaggtttgcagaatcgatggcagtgtgaagctggatgaaaggagaagacaggtttcacctgtgcttatgctgcttttgcgttgcttttaagcaatattctgaccaaatattataaccataaggtctctctctctctctctttgccttgaaacagattaaagatttcagtgatgagaagagcagctgtagtatatttctcctgagtaccagagctggaggactcggaatcaatcttactgctgctgatacatgcatcctctatgacagcgactgggtaatcaaatcaattaatttattttctttgaaggaaaatctttctctttcgtgttgtctccaactgtgttttgtctgatctccagaaccctcaaatggacttgcaagccatggacagatgccacagaatcgggcagacgaaacctgttcatgtttataggctttccacggctcagtcgatagaggtaaaactctttgttgttcatatcaatcaatcttaacttcaaaccattgagattgttgcctcatgagattggtttatgacatttgctcagacccgggttctgaaacgagcgtacagtaagctcaagctggaacatgtggttattggccaagggcagtttcatcaagaacgtgccaagtcttcaacacctttagaggttttaacttctcttaaagctcaatcctttttagatacacttattatcaacaaaatctcctattgacagcttgaaccaaactaacacacaggaagaggacatactggcgttgcttaaggaagatgaaactgctgaagataagttgatacaaaccgatataagcgatgcggatcttgacaggttacttgaccggagtgacctgacaattactgcaccgggagagacacaagctgctgaagcttttccagtgaagggtccaggttgggaagtggtcctgcctagttcgggaggaatgctgtcttccctgaacagttaggacacattaataagccaggccttgaaaccacttctgtgttttttttttttttttccggaacatgatcggttacttttggctgggaggatttaattattagagggctcggaagtttttgtaagttaaagaactcacttaaaaccctgaaaacatgacagttaatggtgattagctctcaatgtgatgaaaacaattggccctctgattttgctgttgcggtaatattatgacttgtgtacgtttatagtctttgtagtctgcaattttggcattgagctatttctcacgaacttatgggatcttatgttttggatttgggatttgttaacttatatgattaggctcaatagtttcacagaatattaaaaacttgagtagggtttaaaaaagaagcaaaaagctccgatgccgggaatcgaacccgggtctcctgggtgaaagccagatatcctaaccgctggacgacatcggatttgttgatgtctattcttgtaaatagtaaatatttagttttatcggttttgcatctaatggactaaaacatgaacacgagacgccgacaagaatgaatggggcaggcaccaaacatttgggtaaaagtatgcagtggggtattattgacaatttgaccattacaagagctaatcttagggggttttagttagtaaagcaaacccggtttaggagtaaatatggagtgagaataggggtaattaagggaatttaagagaagtcatcatcgttttccatttttcttattttaagcgcctcggtggctatctctcactccgttcgcgtcttcctcttaaaggaaacctcctctacgcgaaattcgtattctctcatttcttctacggagatttgcatcgaagaaactgactcgcttgtggaatcaacaacaagacgatg

SEQ ID NO: 27704 - DNA, 3003 bp, Unknown
  misc_feature (1)..( 3003): 2750-1469P.txt file - cDNA_ID_2991511; gDNA_ID_2926263; Annot_ID_143268
tatagttttgttgtgtcctgaggtttttctatttcatttcctgccaggcattggctgttattgattatctgatttcgaatggatcagaacgagcggttgatgagattattgagcatacttaccaaatatctgtcagtttatttctctttacatattgatatgcagttctctctaagattgtgttttttttactgactagatctttgtcatccatgtagtcactcacaagttttgagtatgttgaaccaaatgggaaagatgtgggaatcaacgtgagaaagaaggcggaaaacatagtcgctcttttaaataataaagagaaaatctcagaaatcagagacaaagcagtagcaaatcgtaacaagttagtttttacacaagtggaaataattggtctgaccgttcttctttctactttgccttaaatcgtttttttctgcctccaattaggtatgttggcctctcatcaacgggaataacatataaatctggttcctcagcttcatttggtggtagttttcaaagtggttcaagcaattttgacagctacaaggatagagattccagagaagacaagaatgactacgagtcttttcaaaagtcaagacgtggtgttaaaactgaggagcaaagctacacttctaagaagagtttttcacgctatggcaggtttatgtcaaccccattcattttctgatgttcgttacatattttgggtagactatgggagttttcttttccaaaagaggctgcttgtttgcttttcttttcttatttctggtttggtttatgactcattagtctcattttgtgtaccatttttctgatgtcgagtaaattaatcgtgcaatcttgctcactcgattccaattctgaatgtgcagcacggaccatgacaatctatccagtggtaaaaagtcacccgattctgccaaacataggtcatatgtatctgcagctccttcaaacaacgatgatgattttgatgattttgatccacggggaacttccagtaatagtatgtttctctctacgactgctgagtttgcagattgtttatcattcattcgggagaaagttggtttgataaacatgtatttatgatagacatatgtgcatgtcttacctgtatggtttttatttttggcagagccatccacaggcagtgccaaccaagtggacctttttggaggagatctgattggtgacttcttggattctgggccaacagaaacatcttccaccaacaacaacgagaactttcaagaggcggacttgtttgctgatgcagcttttgtatcagcctcggctcagggagctgaatttgggtcacagacacaggtggtgacttctttcatctaagctagtatgcagcttttaacaatggaaaattcccttattaactgtccagttatgtgatgcaatttctcgctaattgacaaaaacgtttgtctgttgaagtcgttctttacacctcacaattacttgtgctgttgaatcgttgactgatgtgtttccgcatttctgtttctacagaaacaagttgatcttttctctgcgtctgaaccttctgtcacagtttcttcagctcctccgacggttgatctctttgcatcttctgaatcagttgtaagcccagaagccaagatatcaatacctgagtctatggctactcccaacattgttgacccatttgctgcagttcctatggataattttgatggatcagatccttttggtgccttcacttcccactcggcttcagtttctacaggtccacaagctccaagtgtacatgggagtgcaacaaacaccacaagcccgctgtctttcgcagactcgaagccacaacatttgcaaaagaaagatcctttccaggtgaaatcaggaatttgggcagattcgctgagccgtggactgattgatctcaatataactgctcgtaagtcgttacttcctcttctatcgagaactctctcatttgatctgcactataagaaaaaaatgttttattttctcattagatgcagtcaaacccaaaaggtatagttgttcgattacattccaactatttttcaaacagtacattctacaaatcaaaattcttagctcacataaagttccagtaccatgtagcttgtttgcatggtgtcacgacaaagaaattgttgggttttagtttctaagttcgattttagtcctgattattattttccctgtaaccagccaaaaaagcttctctagctgatgtgggtgttgtgggggatctgagcaatgaagatgggaacaaagcatctgctgcatcgtactactcaggctggtccatgggtgcaggatccgggcttggtaaaactggcctatacagtacacagcagcagcagcaacaacaacaacaacaacaagcacctgatatctcagacgatttcttctccagcctcagtaaccaaaggtaccaatctggtggctttaagcagtgaaattgtctgtgatttggtgttgagatgaaaaggcatatcaagtttgattctacattccatactggaaatgtaagtttttttaatgggtttgttgttcttgcacttcattcatgggacaatctggtcggtgactgatgtgccattgttgttgtggcgtttactttgggtttaaatgagagagagaagaattgtctttatgttttttttgataagagagtacttttattattggtttaaagtttcgatttgttcatagaacaaaagtatatgtatctcttcccactcaacaaatattttttttatcgcgtgtgattcttaatccgaaagagactccaactttcttctcagttgttttattcacattcatattgaccaagttcattcttagtgattatgttaacactaatcttatcttacacaatttagttctccggtcacgaatgattaaaatatagaatagtcttatctacaaagaaaatgagtagttgtgacaaaaaaaaatagtccaacaccaaaataaaaaatg

SEQ ID NO: 27705 - DNA, 3000 bp, Unknown; identical to SEQ ID NO: 3922
  misc_feature (1)..( 3000): 2750-1469P.txt file - cDNA_ID_2991529; gDNA_ID_1620674; Annot_ID_48202

SEQ ID NO: 27706 - DNA, 3000 bp, Unknown; identical to SEQ ID NO: 3922
  misc_feature (1)..( 3000): 2750-1469P.txt file - cDNA_ID_2991529; gDNA_ID_1620674; Annot_ID_164197

SEQ ID NO: 27707 - DNA, 3000 bp, Unknown; identical to SEQ ID NO: 3922
  misc_feature (1)..( 3000): 2750-1469P.txt file - cDNA_ID_2991529; gDNA_ID_2926210; Annot_ID_141933

SEQ ID NO: 27708 - DNA, 3000 bp, Unknown; identical to SEQ ID NO: 3922
  misc_feature (1)..( 3000): 2750-1469P.txt file - cDNA_ID_2991529; gDNA_ID_2926210; Annot_ID_202545

SEQ ID NO: 27709 - DNA, 3003 bp, Unknown
  misc_feature (1)..( 3003): 2750-1469P.txt file - cDNA_ID_2991540; gDNA_ID_1621093; Annot_ID_170767
ccttctattcgagcaaaactcaagccgtcagacaccgctacatgtggctactcatggcggtcataccaaagttgttgaggctcttgttgcatcggtaacatctgctttagctagtctgagtactgaagagagtgagggactgaatccacatgttcttaaggacgaagatggaaatactgctctgtactacgccattgaaggacgctatttggagatggctacctgtctggtgaacgcggacaaggatgctccttttcttggaaataacaagggaatatcttccttgtacgaagccgtagacgctggaaataaatttgaagaccttgtgaaagcaattttgaaaaccacagacgacaacgtggaccgtgaagtgaggaagtttaacttagattcgaaattacaagggaacaaacatcttgcacatgttgctttgaaggccaaaagtataggtttgttttttgttttctttaataatcagtaacagctacgtttaatctgttaaaattatgtaaaaccagcttgggacgagaatctcctccccaagatggctaattgttgttcccaattgtttgagtaggtgtccttgatgttattcttgatgaatatccaagtcttatggacgagcaagatgaagatggtaggacttgtctttcatacggagcatccattgggtattataaaggactatgcaacatcttaaaccgatcaacaaagggtgtttatgtctgcgaccaagatggttcttttccaattcattcggctgcaaaaaacgaacattacgaaattattaaagagtttataaaacgttgtccagcttcaaaataccttcttaacagacttggtcagaacattctccacgtggcggcaaaaaatgaggcctctcttactgcatatatgttgatgcatgataaagatacgaaacatctgggtgttgggcaagatgtggacgggaatacacctttgcaccttgccgtcatgaactgggactttgactccattacttgtcttgctagccgtaaccacgagatactgaaattacgaaacaaaagcggcttaagagctagggatattgccgagtcagaggtgaaacccaactacatctttcatgaggtatttctgattccgtttcatacaacacatttgatccctcataaatgatttatagcttgacctccatatttttggaattacagaggtggacactggcgctcttattatacgctattcactcaagtggtttcgaatctgttaagtcattaacaatacagtcagtgccactagaccctaagaaaaacagacattacgtcaacgctcttctcgtggtagcggctcttgtagccacagtgacgtttgctgcaggctttacaataccaggtggttatatcagcgatagcaaaaaaccaaacttgggcagggcaactttggccactaacccaactctcttcatttttctgctttttgacatcttggcaatgcaaagttctgttgcaacaatatgtactcttatttgggcgcagttgggtgatctagcactcatcctcaaatccttacatgtggccttgcccttactacttttttcattactatgcatgcccgtagcattcctttttggcgtgatcactgcaattgcccatgtgaaatggcttttagtcaccattagcattatatctggtggattcttccttttcgcaatctttatccttggccctcacgtcatgctacagcgctcacaccttccgcccagttctggtatatttctcaagacttttatgctgactatagacatatctgagttgtttgtgattttgatcaaagcttgttttggttgtgtggcgtgttccgaataaatcatcaaaagtttatagatcaaaggatatttttcttctcttttttttttctttcaaaaagctacgagatatgctggtctctagctctgagaagcggcatcttgatcatacaactcattcgaagtcctatcagaattatctgtagttgtaataaagcgtgaaaagtatatcattcgaagagattttcctctaaaataatcgagtgatattttattattcggtttagtggataccagtttactaatctctcgaatttatgaaccacattcaaaggagatgagtttaacaaaaaaaaaaggtaaattgttttttattctcgtcgtgcgttccacatgagtcgttttcaagagcaatatagacgatacttcacaagaattattatttttgttggggtataaaaatttgaagatacgtttggcaacgacaatacgacgttagattgttccaagaggtgcaaaaacttagggaccctctttattcgttcactgtaaccactgaccacaacatgactaggtagactcttctttttgtcaatgttgatgtttatacgattttgatgagactggctctatcaagatatgaatctctgatcatatctccactaatctttcatcttgttattccctcatttacttttgatttccttctctctctctcttttttatgtatacaaatttttctttatttcgcttcactaaaccccaccatgtaattgtgtgagttttggcgaagtggcgcaacaccgtagagcacaccaacactaacccaatccattttatgaccgtaaattttgttgttgattagtgtatttttttcttgtttagttattctgagaagtaaattttttttttacaattagtttttaaacatagtaaaataaatttatgacagattataatattattttaaaaatcaataatatctaacaaattaaataaacaaatcacaaattactatattttaaataaatattgataattttaattatattattttgtttattggttaactcgcaggatatgcgagttaattcatttgagattgtaatccgccatatactaactcgataaccctgactttttagaaatctaaaagtataaccctataataaaatagattatgtccaactcgcggattctaaacctgaattgacatg

SEQ ID NO: 27710 - DNA, 3003 bp, Unknown
  misc_feature (1)..( 3003): 2750-1469P.txt file - cDNA_ID_2991546; gDNA_ID_1620741; Annot_ID_166437
aaaaatgggtttcactattactctattagagattagaattgttcttccgtctatctagaccatacttggaacattgatagtatatagatataagtttcttaatattgaagacggacttgcgcactttattctgtgtataaacgcatctgagtgttttgcgcatatctaatatagttatgcattttaaaagataacaacttgacatttttgtacatgaattaacacaactttcagggatgtgatgcgtctgttcttctagactacgaagggacagagagaagatctccggctagcaaaacactaagaggcttcgagctaattgacgatatcaagtccgagatggagaaatcatgccccggcaaagtatcctgcgccgacatcctaacatcagccagccgtgccgccaccgtccaacttggtggtccttactggcccaacgtctacggtcgtcgtgactccaaacactcttacgctagagacgtagagaaagtcccttcaggccgtcgtgatgttaccgcccttctcgaaacgtttcagtcatacggtctcaacgtcctcgacctagttgtcctttccggggcccacaccatcggaaaagcgtcctgtggcaccatccagtcgaggctttacaactacaacgcaaccagtggttcagatccttcgattgacgcaaaatacgctgattacttgcaacgcaggtgtcgctgggcctctgagaccgtcgatctcgaccctgtaactccagcagtgttcgataatcagtactacattaatcttcagaagcatatgggagttttgtcgactgatcaggagcttgttaaggacccaaggactgctccgcttgtaaagactttcgcagagcaatcacctcagatattcagacagcagtttgctgtgtccatggctaagctggtcaacgttggagttctcactggtgaagatcgtgtcggagagatcaggaaggtttgcagcaaatctaactccagagcttactaaattataatcatcatccctcatgagaaggatcttttgtttcttgaaataatttcttgtttggtttttgagctcttttctattgcaattttgtaatttgttgtatgaacaagaacaaaaactgtgaattattttcgttgcaacttcgatttacatgagttctacacttaccgtcactatttgatcaagacaatacttaatatcagtccaacatgatcaatttatgtcaaagggttcatgatgttaatggtaataaccctaaacgttaactctaaatcaagttgtgatgatagcttttggtgcaagaaaaatgaaagatgggagacacaattcagacgcgatcacgtttttagggtttctatagtactgaaactcatggaaaaaacacagtacaaaagatgctatattctaagacattgaagaaccccaaaattaagagagaacataaattatgcaagtagaaaacaaacccagtagaagaaagccaagaccagttttagtttcgtttgcctcgaaggacacccttactacgacgattcttcatccccagcttaaacttcttcttcaacttcttcccaataggttttagcgacttgtttttcttctcatcatccatttcctcatctacaagcaaacaacaatagtatcccaaaacagaacaaacccttaataccaaaactttcaaagatatacttgtagatgcacacaaaattcaatataaagaaaccaaacaaagcttttagagcgatacgtttctcttagagtaacaaccttcccaagagtaatgaactaacaagctccttcaaagatttcaactaaaatgaatgattcagttaaatttcagattctaaagcttagcttaaattcgattcttcaagcgttaccttatctaaaaccaaatcgtacaaaatcaaagaggcaaatttagaggaggcataccactatcgttggcgattgtagtggaggcagatgcagactcagaggaaggcgtcgcaacttccataaacggagaaactggggcttgacgaactggtaacttcggagcagcgagtgcggcttcaatagcggcggatttggcgtcttctctcgttagagtgaatgattccttctccactatttctcttcttattgctctcaatctcttcaccctcttgcatctcattgatttcgccattgttgtgcttggggagatttgaaatcagggttttgaggcaaaaggggttttaatttctgcgtcggacttcttttataaagtctaaacctaattgaggaacaaaggaattgctccggttctgtttggttacgagtttaaatgtatcctatccaagtttagagcctattcggaaaattattggcccaatttaggcccaaataaatagagaagaacgcttcgaatggaaaacccgataatacccttcttcgtctgcgtgcagatcacactgtttgatttctgaggagaatccattgtttccatttgaagaaaactctaactttctcgttgaagctttgagctctctacctctttatctccgggttagttttgatttggtgtggatcggtagtggaattttgctcttcgtcttgctatttcgtatgcgttgttgtttctcgattagcgaatcagatctttgttcttttgttagatttgataaatttcgatagattttaggtttggattgattgtgttattgaacttgaatgcttctggttgaatcatagatctagttttggctttgctttgttatgcattgtcgtgattgaaattcgaaaaagcaatggaagtgattacgaattgagattatgactttagaatcgatattaggatctaagaagattctgtggaaattgaaattgaaattttgaagaagattctgtggaatctaagaagtaaatgttgataatactgtttggtttcaagagttaagagtttagaagttggagatgtgtattgactgtggttggtttggtttgagataaagatgtgattgttttggtttgatggcagagatg

SEQ ID NO: 27711 - DNA, 1944 bp, Unknown; identical to SEQ ID NO: 3442
  misc_feature (1)..( 1944): 2750-1469P.txt file - cDNA_ID_2991550; gDNA_ID_1620647; Annot_ID_47616

SEQ ID NO: 27712 - DNA, 1908 bp, Unknown; identical to SEQ ID NO: 3459
  misc_feature (1)..( 1908): 2750-1469P.txt file - cDNA_ID_2991550; gDNA_ID_1620647; Annot_ID_163268

SEQ ID NO: 27713 - DNA, 3003 bp, Unknown
  misc_feature (1)..( 3003): 2750-1469P.txt file - cDNA_ID_2991550; gDNA_ID_1620628; Annot_ID_162576
attctctagtttagctaaacttaattggaagtaaagtttattgttgctgatatataataaaatattttcatgtttaaaaatctaaatatagttgaatggactctttaacaagaaagtaaatattggcgtctataaggtcaagagatgtggcgtaatgactacttttgagcaaatcagtggacaaattaagactttccaatctttcattggtcaagtctaaatataaatgattggatttctaagtttcatttcctgtttttaggctcactcgtggactttttttaatttctttcctttgccatatttataaaataaaagagagagaaagaattttcaataattttcaacaagcaaagttcatgatggggaataagcgaaatctcggatttgtgatcttcttctgggctctggtggttgcagtagtagccacggccatcgagcatcgtcgcaatgagaggactaaaggcgtcaatggtcttgacaagatcatcatccgcgaccgtcgtggccgatctgctgaggtactcactcttacggtttggtttagatctattgattgtgtcatttacatcaaaaaacttggcttcaaaacatcttttggatattgcatgatgcagattttgtttctttgtttattcaggtttacttgtatggaggtcaagtcagttcttggaaaaatgagaatggagaggagttacttgttatgagtagcaaggtaacttcagtcagattcactctatctccttttaggatcatatgattgctacaaatattgttctctgattggctaaaaatattgttctctgattggctgtatctgcgataatgtttttttttttgttttgcttttgtatgtgcaatagttgactaagtaaattatgcaaagatgaatctttacatcttctttttttttgttttgaatctttacttcattagaggcttgtaaatgaatagataagtatagcttaataatctgctttgttctaaagtagtagtaattttatgtgtgtgtatgagttccaaagcagagtgatctaaaacatgtgttacgtattgtgcaggctatattccagcctccaacaccgattcgtggaggaattccagtattgtttccgcaagtatgtgtttatagaaaaaaaaacttttctttgttgttgaagggtatagttttgttaatgaaatgttttttatggaagtgcagtacagtaacaccggtccacttccctcacatggatttgtaagacagaggttctgggaggttgagactaaaccacctcctttgccatcactttctactgctcatgttgacctgatcgtaagatcatccaatgaggatttgaagatctggccgcataagtaagattcttgaaacatctctctctctctctcattttcaacattttttcagatatttgattaggaatattttacataaaatatggagactgttttttaatctatgtatccatttcaggtttgagtatagactgagagtagcattgggacatgatggagatttgacgttaacatctcgtgttaagaatactgatacaaaaccatttaacttcacatttgctcttcacccctacttcgctgtttccaatatcaggtaatccaaggagtcataacttcacgttgatatctttttttttggttgtgttggtgtaagtgtcattgaatcagctggttgttgtattcagtgaaatccatgtcgaaggattacacaacttggattaccttgaccaacaaaagaacagaacacgtttcactgatcatgagaaggttataactttcaatgctcaagtaagcctctttccatttgccaattcaaatttcaacccttttattattttagtccatcactaaaaaaaaacacaccttgcaaaaaaagcttgacaggttgtacctaagcactccagatcaactaagaatcgtggaccataagaaaaagaagactattgttgtacacaaggagggacaagttgatgccggtaattacaaatttagatttgtaaacatacatagacatagacacagtcacacagaaacagattgttttagtagtactaatgatggatcacttgtaattacaatgtgcagtggtgtggaatccatgggataagaaagtatccgatttgggagttgaagactataagcgttttgtaacggtggaaagcgcggctgtcgcgaaaccgatcacagtgaaccccggcaaagaatggaaaggaatactccatgtttctgtggttccatcaaatcggaaagcttgaccctataaaagtcttgcattcatcatcctcatcctttaaaaaaaaaaacttaaaactgtctttattaaagtatacttaatgttcccgagagacatcacatggtgaacacaaagttagttgggttccaaactggactcttgaccagttttattgttttgtaactttagcattcatgaataaaaaaagtgcgttaattacaataattgttaaatgtaattaaataaaagtgcgttaactacaataattggatattggttatttgcaaaattcatgttcttaaatcatcagtctaaacaaaaaaattagattagccgaagatttcttcttctacccttgatgatactatttgggatgggcttgcttagatgtgccgaatccaattctcgtttttgggtctatctatatttgggctgggctttataagaggcgaagcccatgtcgaacaatcaatttttttttaattttatatttcttttgggagtctgttctgtcgtattgattaataaagtaaaaaatcttagccacaaaattaaatcatctccaagacgtatcaatatcatcatcaatccaccaatgaaaagttctctctttttttttcccactcttactctgttctcgctacagaatctcctgggaaaaaaaaaaaagaaacttgatccacccgaattccccaaatcttcacaatttctggaaactctctcgatcgtgaagcagaaaagtgaggttccaaatg

SEQ ID NO: 27714 - DNA, 3003 bp, Unknown
  misc_feature (1)..( 3003): 2750-1469P.txt file - cDNA_ID_2991550; gDNA_ID_2926188; Annot_ID_140877
ttattgttgctgatatataataaaatattttcatgtttaaaaatctaaatatagttgaatggactctttaacaagaaagtaaatattggcgtctataaggtcaagagatgtggcgtaatgactacttttgagcaaatcagtggacaaattaagactttccaatctttcattggtcaagtctaaatataaatgattggatttctaagtttcatttcctgtttttaggctcactcgtggactttttttaatttctttcctttgccatatttataaaataaaagagagagaaagaattttcaataattttcaacaagcaaagttcatgatggggaataagcgaaatctcggatttgtgatcttcttctgggctctggtggttgcagtagtagccacggccatcgagcatcgtcgcaatgagaggactaaaggcgtcaatggtcttgacaagatcatcatccgcgaccgtcgtggccgatctgctgaggtactcactcttacggtttggtttagatctattgattgtgtcatttacatcaaaaaacttggcttcaaaacatcttttggatattgcatgatgcagattttgtttctttgtttattcaggtttacttgtatggaggtcaagtcagttcttggaaaaatgagaatggagaggagttacttgttatgagtagcaaggtaacttcagtcagattcactctatctccttttaggatcatatgattgctacaaatattgttctctgattggctaaaaatattgttctctgattggctgtatctgcgataatgtttttttttttgttttgcttttgtatgtgcaatagttgactaagtaaattatgcaaagatgaatctttacatcttctttttttttgttttgaatctttacttcattagaggcttgtaaatgaatagataagtatagcttaataatctgctttgttctaaagtagtagtaattttatgtgtgtgtatgagttccaaagcagagtgatctaaaacatgtgttacgtattgtgcaggctatattccagcctccaacaccgattcgtggaggaattccagtattgtttccgcaagtatgtgtttatagaaaaaaaaacttttctttgttgttgaagggtatagttttgttaatgaaatgttttttatggaagtgcagtacagtaacaccggtccacttccctcacatggatttgtaagacagaggttctgggaggttgagactaaaccacctcctttgccatcactttctactgctcatgttgacctgatcgtaagatcatccaatgaggatttgaagatctggccgcataagtaagattcttgaaacatctctctctctctctcattttcaacattttttcagatatttgattaggaatattttacataaaatatggagactgttttttaatctatgtatccatttcaggtttgagtatagactgagagtagcattgggacatgatggagatttgacgttaacatctcgtgttaagaatactgatacaaaaccatttaacttcacatttgctcttcacccctacttcgctgtttccaatatcaggtaatccaaggagtcataacttcacgttgatatctttttttttggttgtgttggtgtaagtgtcattgaatcagctggttgttgtattcagtgaaatccatgtcgaaggattacacaacttggattaccttgaccaacaaaagaacagaacacgtttcactgatcatgagaaggttataactttcaatgctcaagtaagcctctttccatttgccaattcaaatttcaacccttttattattttagtccatcactaaaaaaaaacacaccttgcaaaaaaagcttgacaggttgtacctaagcactccagatcaactaagaatcgtggaccataagaaaaagaagactattgttgtacacaaggagggacaagttgatgccggtaattacaaatttagatttgtaaacatacatagacatagacacagtcacacagaaacagattgttttagtagtactaatgatggatcacttgtaattacaatgtgcagtggtgtggaatccatgggataagaaagtatccgatttgggagttgaagactataagcgttttgtaacggtggaaagcgcggctgtcgcgaaaccgatcacagtgaaccccggcaaagaatggaaaggaatactccatgtttctgtggttccatcaaatcggaaagcttgaaccctataaaagtcttgcattcatcatcctcatcctttaaaaaaaaaaacttaaaactgtctttattaaagtatacttaatgttcccgagagacatcacatggtgaacacaaagttagttgggttccaaactggactcttgaccagttttattgttttgtaactttagcattcatgaataaaaaaagtgcgttaattacaataattgttaaatgtaattaaataaaagtgcgttaactacaataattggatattggttatttgcaaaattcatgttcttaaatcatcagtctaaacaaaaaaattagattagccgaagatttcttcttctacccttgatgatactatttgggatgggcttgcttagatgtgccgaatccaattctcgtttttgggtctatctatatttgggctgggctttataagaggcgaagcccatgtcgaacaatcaatttttttttaattttatatttcttttgggagtctgttctgtcgtattgattaataaagtaaaaaatcttagccacaaaattaaatcatctccaagacgtatcaatatcatcatcaatccaccaatgaaaagttctctctttttttttcccactcttactctgttctcgctacagaatctcctgggaaaaaaaaaaaagaaacttgatccacccgaattccccaaatcttcacaatttctggaaactctctcgatcgtgaagcagaaaagtgaggttccaaatgggttctgtttcgggtcaaacccgaattacaacgatg

SEQ ID NO: 27715 - DNA, 3003 bp, Unknown
  misc_feature (1)..( 3003): 2750-1469P.txt file - cDNA_ID_2991550; gDNA_ID_2926188; Annot_ID_200785
ttctctagtttagctaaacttaattggaagtaaagtttattgttgctgatatataataaaatattttcatgtttaaaaatctaaatatagttgaatggactctttaacaagaaagtaaatattggcgtctataaggtcaagagatgtggcgtaatgactacttttgagcaaatcagtggacaaattaagactttccaatctttcattggtcaagtctaaatataaatgattggatttctaagtttcatttcctgtttttaggctcactcgtggactttttttaatttctttcctttgccatatttataaaataaaagagagagaaagaattttcaataattttcaacaagcaaagttcatgatggggaataagcgaaatctcggatttgtgatcttcttctgggctctggtggttgcagtagtagccacggccatcgagcatcgtcgcaatgagaggactaaaggcgtcaatggtcttgacaagatcatcatccgcgaccgtcgtggccgatctgctgaggtactcactcttacggtttggtttagatctattgattgtgtcatttacatcaaaaaacttggcttcaaaacatcttttggatattgcatgatgcagattttgtttctttgtttattcaggtttacttgtatggaggtcaagtcagttcttggaaaaatgagaatggagaggagttacttgttatgagtagcaaggtaacttcagtcagattcactctatctccttttaggatcatatgattgctacaaatattgttctctgattggctaaaaatattgttctctgattggctgtatctgcgataatgtttttttttttgttttgcttttgtatgtgcaatagttgactaagtaaattatgcaaagatgaatctttacatcttctttttttttgttttgaatctttacttcattagaggcttgtaaatgaatagataagtatagcttaataatctgctttgttctaaagtagtagtaattttatgtgtgtgtatgagttccaaagcagagtgatctaaaacatgtgttacgtattgtgcaggctatattccagcctccaacaccgattcgtggaggaattccagtattgtttccgcaagtatgtgtttatagaaaaaaaaacttttctttgttgttgaagggtatagttttgttaatgaaatgttttttatggaagtgcagtacagtaacaccggtccacttccctcacatggatttgtaagacagaggttctgggaggttgagactaaaccacctcctttgccatcactttctactgctcatgttgacctgatcgtaagatcatccaatgaggatttgaagatctggccgcataagtaagattcttgaaacatctctctctctctctcattttcaacattttttcagatatttgattaggaatattttacataaaatatggagactgttttttaatctatgtatccatttcaggtttgagtatagactgagagtagcattgggacatgatggagatttgacgttaacatctcgtgttaagaatactgatacaaaaccatttaacttcacatttgctcttcacccctacttcgctgtttccaatatcaggtaatccaaggagtcataacttcacgttgatatctttttttttggttgtgttggtgtaagtgtcattgaatcagctggttgttgtattcagtgaaatccatgtcgaaggattacacaacttggattaccttgaccaacaaaagaacagaacacgtttcactgatcatgagaaggttataactttcaatgctcaagtaagcctctttccatttgccaattcaaatttcaacccttttattattttagtccatcactaaaaaaaaacacaccttgcaaaaaaagcttgacaggttgtacctaagcactccagatcaactaagaatcgtggaccataagaaaaagaagactattgttgtacacaaggagggacaagttgatgccggtaattacaaatttagatttgtaaacatacatagacatagacacagtcacacagaaacagattgttttagtagtactaatgatggatcacttgtaattacaatgtgcagtggtgtggaatccatgggataagaaagtatccgatttgggagttgaagactataagcgttttgtaacggtggaaagcgcggctgtcgcgaaaccgatcacagtgaaccccggcaaagaatggaaaggaatactccatgtttctgtggttccatcaaatcggaaagcttgaaccctataaaagtcttgcattcatcatcctcatcctttaaaaaaaaaaacttaaaactgtctttattaaagtatacttaatgttcccgagagacatcacatggtgaacacaaagttagttgggttccaaactggactcttgaccagttttattgttttgtaactttagcattcatgaataaaaaaagtgcgttaattacaataattgttaaatgtaattaaataaaagtgcgttaactacaataattggatattggttatttgcaaaattcatgttcttaaatcatcagtctaaacaaaaaaattagattagccgaagatttcttcttctacccttgatgatactatttgggatgggcttgcttagatgtgccgaatccaattctcgtttttgggtctatctatatttgggctgggctttataagaggcgaagcccatgtcgaacaatcaatttttttttaattttatatttcttttgggagtctgttctgtcgtattgattaataaagtaaaaaatcttagccacaaaattaaatcatctccaagacgtatcaatatcatcatcaatccaccaatgaaaagttctctctttttttttcccactcttactctgttctcgctacagaatctcctgggaaaaaaaaaaaagaaacttgatccacccgaattccccaaatcttcacaatttctggaaactctctcgatcgtgaagcagaaaagtgaggttccaaatg

SEQ ID NO: 27716 - DNA, 3003 bp, Unknown
  misc_feature (1)..( 3003): 2750-1469P.txt file - cDNA_ID_2991565; gDNA_ID_2926240; Annot_ID_142851
ctttattaccgtatggaaatagagacacgtcaaagctagtatttggacctacgtacgctcatgtattccgccacgtgtcgtggtttcactgacataaaacacatgtcggtcagataattctagctctcacgacgatgaagcaatgtaggctcacttccactcaccgccgcctatagcagtgacacacgtcctgtcaccggcgtgtcactcaataattatcagattttcattttaattaaataatgttatcctatatttgttaggtggatcccaacgggagggctttatggtaattaccatttactcctgagaagcttttatttttgtgtgtggagtagtaggagaagtgttgccgttccttgtcgaacaaaaaagagctttagacagacgctcctccccttttgtaatatttttgatattacgtgtgctctacgcgaatctatcaatatctaaatcctctctttctctctctctctcctccttcttcttcttcttcctgtcgctgccttgtggttgagtgagcaaaaaaactcaaaaccctccatggaaatgggagagagaatcaattcgagttgttgttagggggtttgcgatattttaggcttctgtcggtgatctcgaccaaaaaaaataaacaaaggagctagtagggttctgttttctctatcactcggaaggaagctggtttatgtcaaaactttgttcttcggaaaatgcgaaaatcgttcaaggattcactcaaggctcttgaagctgatatccagttcgccaacactctgtaaatctctctctctctctatttcttctctctgtttttctctgttttgatgtttcgatgtgttggtagaatctgatcgtgttcttagtcgagagtggttgatttgcctcataaatttgtttgatgctgtggttaaatccatatttagttggtacttcggttttccctttgcttgagttgctgatttttgtctcttccgattcgataggtcagattgtttttttacttctactgaagtttccagaggataatcagtttttgatacttgtgaatctgtatctctgttgtctgctgggtcttatgtgtgctgatgtcatattgaatttaagactttgcgtttacgcgagctcataaattccaatttattccttagcaagtctcagacgccaccaccaccttttggtcagatcacacaaaatctatctatagtggtcaattctttttcctttcgtcgtatatagtctctgatgctatcctaagttgacttggtatacttggattaagctgtgaagcaacatgttcatgttgcgtactaatctcaccaatcattgaatcaaaatgattaaaaaaaaatgaactatgtgtgtgtagggcgtcagagtacccagaggagtatgatggtggctacgttcagatgagattatcttacagcccggcggctcatctctttctcttccttcttcagtggactgattgtcatttcgctggcgctttgggcttgcttaggatccttatttataaggtctcttattaattttcctgctgttttattgctactggatcttcaagatcacaatgttcttgtctgcctgatatgtgattctctgttttttatttataggcatatgttgatgggaagaccacaatgtcgctacatgaacgcaaaactagtatcagagaattctatggtaatctgttaatcacttattctctcttaatctaaaggtataagattagaccagacgatatgtttttttctgactagcaatggatgttgttgggcagatgtgttgtttccttcgctattgcaacttcatggagggatcaccgatgtagaagaaaggaaacagaaggagatatgcgacaaaagataccgtaaaaaggacagaacagataaaggaaagatgtcggagatcgatttggagagggaagaagagtgtggaatctgcttggagattcgaaacaaagttgttcttcctacgtgcaatcactccatgtgtataaactgctacagaaactggtatataaagcttttccttcttttcactcactctcaccattcatcagcctttttcttacaagttatagaatctcttgtttggaataggcgtgcacggtcacagtcgtgcccgttctgtcgaggcagcttgaaaagagtgaattctggtgatctatggatatacacttgtagcgccgagattgcagatttaccagcgatttacaaggagaatctgaagaggttgttgatatacattgacaagttgcctctcgttacttctgatccaaatcttgtcccttatgctcctcttcctcggtgaacattacattctctctgtttcttgttatgcacatagcaatttctttcaaacaaatttcatctatttatgtccactttgtatataatatttatgtgtttttagttggtttttcatctttctatagtctcagatttgggtttgtatataacaaccattggttattgacatttagatcaaaaattcgatatcatatttgctgattaagggtacttaatcacattttggttcgtttaaattagtatctgtctatctgactatgaattacagtaaccgattggtgtttcagtcaaaccgacttgttttgatcgttttggggagtaatttggtttcggtatggatcgaattggctgaaccggaaaccagcaatttgagtgaagcacaagaccgcagtacacgtggcttcttctaactggggtaagaaattatttgacccaatcagattgtacctcatctagattttattgccaatggacttgaaacatcaccagataacgcagagtttaatagataagattagtaatcctactcaccgtcagatggatttgtgaatcgatccaacggtcataatcgtctttccaagataggccagctccgaaactcacctccacgcatctataatcgtgtatcaagaaacggatctttcttctctatcttctgaatatcacaaaacccaattagccggagatg

SEQ ID NO: 27717 - DNA, 3003 bp, Unknown; identical to SEQ ID NO: 27716
  misc_feature (1)..( 3003): 2750-1469P.txt file - cDNA_ID_2991565; gDNA_ID_2926240; Annot_ID_204041

SEQ ID NO: 27718 - DNA, 3003 bp, Unknown
  misc_feature (1)..( 3003): 2750-1469P.txt file - cDNA_ID_2991568; gDNA_ID_1971948; Annot_ID_58594
cacggatctctatttgtcgacgaatgttatttacaataagtgtttcttattttctttccaagatcgaaatgccaaatgtatacgagagacacaagtatgttacatcataatatacaaggtgtctccatagttttggtattagcacacaagtcaagagtatgccctacaaggaaaagattttttagatatcctattcaccttgtatctacagactgacaagacactaggactcctgttattcccaatcagcgtcgaagaatccagcatctttcatttctgaatagtagacattctccaaattcagatcttcctcctgaagcaaacacaagtgaattttagcaccaaatcatgtggtgatgaagatggtactatggtaatggtgatggtactatggtaatagtgatggcgatggtgatggtactatagttataaagaaggtgatggtgatgctgctatagtgatgaaggtggtgatttattgcatgtttgtgggtacatagatattatgtatagagactagagagagagagagagggagagacaaatgttaatttgagggatttacctggaaaaagtctgcaagaaaagtaacatacaaaagaggaagatagaaggcgtggtaacaaacacttgtgatcccatacaacctgcaagaattttcaatttgtatttcctaatgttagaagcaagaatctgacttagacgatgttactcttttgattgtaaggcttttatctaaagggcttaccataatccaaaatgagcaccgtttgccgtaagagcacatgcaaatagggagagcccatttaaggcgagcatgacagttatatacttgtagaatgcaggtcttgctgtcaaaccggaaaataaaaacatatgggatgagtaatagaagccagtgaacagctattggcttatgcaaccataaggaggatatgagtggtcgatgtattcacctggtaatctctctctccatttggagttgtacatgaagaatatcatcccataaatgccagctagtaagagcttgtggatgacccataagccccatttgaacttatgtatatgttcattgttgtcgataaacaatggtactccaaagccaaacagataaattgcctgaaaggaagaatgaaaaccgtgaagaaattaaactgactgtagttgagtaaccagacaatacaagtttgcatatatcaactgtagtggacacatgatctaatgcagaactaagatcatgtcaatatacctcaaggaagtatatctatctatatatcagaaagtgtatctaacagttatgaacacaaatctaccttgagaagcaaatcgagaccaatgacaagccccgagatgaggaaagttcgtgttaatgcttcagcaccgcttgcatagtttccttggaagagaaaggctaccaagcttacttccagaaacaacattccagatgttgtgaacaaagttaacaaattccaaataacttctttccccggagtgcattcccatgcctaaactcatgaaaagtaaattcaaaacgaaatctggagtaagactaaatcaggtaaaacatttcctgttaagcagcatctaaccaagaaatcaacactaatagcttacacaaaatacaaaagctttctaatcaccagtgtagaataaaaacaatgttgataagatcgcaaagtttctacatttacagagcctaaaacactctaaaaagcattcttcttcaatctaagttctgatctctttacacgcaacataggtatgagttacttgtgaaatgaatcgaagtaaagaagagaactttaacaaacctgaaggcaacaccaagcaagattgagcaagctaacaagccaaagaaaaccataataggcaatcataatgtaagatctccgattagacaacttggacaagctcttcttcgcctcgtacgctaagtaagcgacgaatagaatagatgctaaaaccaaaaccgtgttatgaagaaacccatgacacttcccgacccatccgccgataaaccctccggtggccgtcgaatcagggcttagccgagaaatcacgaacggtgactccgcaatctcgctgagcactcgcatttcatcaaattgtacgaatcagaaaccaagtagacttagcgcaaggagcggaaagcaatccctagttccagaaaaggagctcaatttcgagatttgatgtttttgcgatacagaattcgtatgaatcgtatatttcttcttctctctggcgaccaaatccatacacttgacgcaaacatgagtaattacacaaaagttaaagggtattataggtaattatcatcgcttctcccacttccactctaaaacaaaaaaaaaaaactatcatttttctcatcctttttatttttaactgattttacatgtgatgtttaaagagttaattattggacatgtgatgtttaaagaatttaaatattattcttttcaattctgtatcttaaatttgaaagacttattacaagctgatctaatttcaaaatcaatcttatgaaatgtaaatttttgaagtgctatttaataatcaataatgtgttattctttttaattaaattagaaaacgtgggagacaattgtctctcttttgcccaccaaaaagatattaaaaaagtcctattcaataatcatgatttatttatttatatttatatctcatattatacaagtaaaattgatttttaaccataaatgatcagcattcagcacaccaaaagtaatttccattcacttgaaataattgtataaatcgggtatttgaaggaaaattgaaccaagacgatccggtttaaatgtcagagattaaggttatcatgactctttaaaaaatgaagtcacagatcagaaataatagaaaactattaaggacttaaatgtaaatactctacaagttaatagatcggagcttcgttgcataagccccaaaccggtggagagaagacggaaagagtctgagagagagagaagaaatg

SEQ ID NO: 27719 - DNA, 3003 bp, Unknown; identical to SEQ ID NO: 27718
  misc_feature (1)..( 3003): 2750-1469P.txt file - cDNA_ID_2991568; gDNA_ID_1971948; Annot_ID_177294

SEQ ID NO: 27720 - DNA, 3000 bp, Unknown
  misc_feature (1)..( 3000): 2750-1469P.txt file - cDNA_ID_2991576; gDNA_ID_1620762; Annot_ID_50022
accccgaaaaattgttgcttgaggcattgacgtgtgtaagaccagttgccattcctagaccataagggaaggttccaaagaagctgttcacactcacatcaatgaccttcaaagacgtgagattagaaagagatttaggaagagaagactcaaatgcgttattgctgagatcaagggcttgcagagaagggaagctctgaatctgatctgacacgtttccgctgagattcatgttggagagaagaagcttagccacatagccatttgcatcacagtgaactcctgtccaatgacaatgaaccaactcagaaaatgttgtggcattctcaggtctcttccaatcttggagattatttgaaggatcaaaaaggtctgacttgaaggccaacaagatctcttgttcggagttttgaaatgtttcagaagaaacaaaagggaaaagagcgaaaccaatgtaatagaagaggaagaaaagtcgagggatcgccatttttctcctctatttcttcactttttggctagttttatggcatttttgtgcaactgagattgaaggtccccaagcgaagttgataataagagagtggaaaccaaaagctgaaaaacaatgattagtcagaatctaattttatttaatctctctcaattattttatcatgattgtgtttctttttcgttcggtggaataatatgcgagttccattggcgtcataacaatttgtatgatagcaagtagttcgctttgtttctgcatctgtgacattacatagtagaaaaagtgatacaatttccttgatgttttcatctatcttcgtgtgttaaattgtgaattgtgtttgagaaaacgaaattagattataagtttgtttcatatgcatacccaaatgctaaattgtgaataaagtcgaaccgaaaattttgaggagcactaattccataaccatatcctgaaggattatcttgctgatctgtgcaatatcaaacaactaagcggtgagaaagaagattaaaataatgataatgggatatataatatgaagaaatcgtgggtttctgaacagctagctaaatcataaaacactgagtgacttgtaaagctttgtcctcattagagatttgtgggacagtgaaacatgggcagagaatgtgtctcacttactgtccaatataactattttctattcaaagatgatggctaattaggcaagatcaaagtcttttaagaaaactaccattttagttctacctcaccaatgatttgacacaaacaatgtttttttacaaatgatttaacttcacttaaatatgagtaactaaagaacgcaaagtttttattggttataaggttagttatatcatccttggcggtcgagctaggttgagtttccgcatgtcttcattagtcgggagaatgttttgtttcgaatggcgtcattaaaaaaacacacatgaaagatgatggtcgtgagagaatcttcccacgttgttccaacataattaaaattaggaaataagaaagttcataactccattgccaagttgcaagtagctaggaacgtcccatgacacctacgtagagactagagagatatacatacatcaaatatatctacttacacatgcattgaaaaaaaaaaatacaaatacattaattaaattattgcattcatgtagacatatatgtttttctagatcttataaacacagattttaatgtttttcaaaatacgattatcagaatttttttttctctgtatattagtttgagttgagagatttaaggccatacatatgatatatgcataaagtttgcatattaatgcatttttagacaaggagcttcaataaactatgcatatgacatcaagacgtaactgaatatgtagccctaagtccgtaaccgaatttgtttatattcgtgtggttgcaacttgtgagtaaatatgcatgctgattgcgtgaagaacaaagtagcattaagtgctctcacgatatcaaaataaagtttagaaccatcgaaaagggccatctatcatttttattttgttcttaaaatctaaaacatatatattcgatcggatatacccattaaatgaatgaatcatgttcacattagaagaatcaccataattgatcccaaaaactatatgaaacatattctcgtgagtgtatagactttttggagatcgatatcttaattaatacatctagcacaactctatatattcttgcggattaacatctaaattttacgtacctcgagcatatatatccattatcgactatcgagtatcgactatcggttcgtccaacacatttaattgttgtaggtttgcaaggtagatatggacagtacctctaattaaagttctttgtcctttcaaatttatcctctattatcatattcataagaaggaaaaaataattgctcaaatctaactttataatatgccctttcatatttcacatgcacccatatgggactttttatcataatcaacattttaaaatataaaataccgaatggaataacaacaatacatcctatatgtgaatgataatgcatgcattaattattaattatatgtatatatactaatgatgagatcataatttcgatagtttagagagaagatgaggctggagagcatgtgctaagagctttccattaaccatctaaacacttaaatctaattagtttagccacattttgtttttttgtaattaaatttcacattttttttattttaagaagaagttcagatttcaataatttgacgtctttcaatttgagccgaatcaaaccgaaccggattaattgttatttttctcaagcagcaacgataaaaaagatatctaaaaggcccaaataagaaattgagaaaaggcccaaatagaattcgtgcgactgtggaatttagggttttgcatcgaagttggtttttaggtattaagtgagcgaggcgtcgaagctaggggtttgggtagagtagtaagatg

SEQ ID NO: 27721 - DNA, 3000 bp, Unknown; identical to SEQ ID NO: 27720
  misc_feature (1)..( 3000): 2750-1469P.txt file - cDNA_ID_2991576; gDNA_ID_1620762; Annot_ID_167178

SEQ ID NO: 27722 - DNA, 3003 bp, Unknown
  misc_feature (1)..( 3003): 2750-1469P.txt file - cDNA_ID_2991584; gDNA_ID_2926243; Annot_ID_142935
ccagggccagatcacagtttctacgaatgctaatctccaagtctctacccattgtgacatcttctgcaaaatagatgaaaaacattcaatatcatgtttttgagtttcagtataaagaagagtatggaagaaactaagagatcacagtttcctttctttaccaaatttatcatcatgttcttgagtctccttctcagcaggtggtgcaaccaactgattacttggaaactcagggttagaatgtaccacttgggcgcaagtgctatcaactcggtcccatagagataccgctcgtggactgtcatcaacatccacagcttttttcgtccaagagctctgaacaaaaaaaggtatgtcaaaatcaacctaggttttggagataaaccatgtgcaaaataaaacttcaaaatgaactagaaattttcacccagtttatcactgaatagatctaagttaaacatcattgagttctacaattggttagttaagcgcttccaccatttataagcatctgagtgcacatgcgaagttcgatcatccgacccctatcatttgtggttaagaaatttttaaaaggatagcttctcgggtgtatatttagattatcggtattgcacattcgtcttacctgagcgccactcccatcactacttccatcactagcattcaggccaatgctcccattttcattctcatcactgcttcctgaatcttgatcagattttttaatacttttcgatttcacagacttttgagtttgatgcgttccgctctcacttccactaccactagactgaacaagaaacaaggaaaaccatgagaaaccaaaaagtaagataccaatcatgtggaaaaaaaaaaagaagataccaatccacaattagaccatgaatttctagtttactacttatcaccagttgtaccaacaggttttcagattaatcatatatgagcaaggacatacactttggcatcttctccaaacatgctgccaaaggatcttaagctcattttttcttattggcttaacaagaaagtcaacagctcctttcgataagcacttaaagaccagccccattgagtcatgagatgacatcactgcaacacaaatctcacaggggaatgtagttaaaagcatctactttccaacatacgctagagaagactcaacaaatcgtgtaacttcaaaagaaagagctcaatgtaaaacgaccaaggaaaaagaactcactgatgacagggatgttccgacgagatttgtggttcaaaatcttgcacaagagaccgataccagataagtaaggcatgatcacctctgttagcacaatatcaatatgattgtttagatcttctaacaccttccaagcttgtatcccatttgacgcctcaacaactgccatgacagagttaataataatcaatcaacaaacagaaccgaaacgggtacatatatgcgctatagattaaagttgggccataggcttcaaaactgaccttcatagctacaattgcgaagaagtgcagtaacgatataacgagtgcagtcgtcattttcgacaagcagaactctaatggttctcacatgaagaaacctttcccaacagacagttgccgctgtttgttgcgacaatggaatttgcagtccacctgaactcccatttctcacatccatagtaattccattagttttctcttcttcactatgcttctctgtccgactctcaaccctatcgaatttcgtctctccggtctttcgatcagtgattgggtaacgtgaaccctccccctcctcattagcattcatcacaccaactctgcttcgctgaattcaaatgatcaaaatatcaaaacacagccataaaccctaatttcgattattgcaatagctagaggagttagaatcgtacaatatctcagattaacagaaaaaagagttgaagaacgacgaattctcaaaaaaccaactaatcaagtaactttttgaagaatcatcaaaaaatcgaatctagacaaattacatcaaataaaaatccaaccatacaaaagcatctaaattccaagagagtactgatcttacaataatcaaatactagaacgaagaatcgagctccagaagttgcatcaatcaccagaaaaatggatctagcacaatcagctaacggttgggaaatagaaacaaggaattcaaatcgataaacagaattaagaatcgaagcttcttagaactttagaaggaagataaacacagtgaacaatttttgagattatgaggtttttctgtctcccagagagtggaaatcggagacgaccataagccaccgatttttatttttccggagatagatagatattagaaagatttgtctcgggccaacaaaaaaaaaaaggaaattaaaaaatcgtaatatctgacatggacaaaactagaggtcccgaacgttcgagaagttccacgtcagagcggatatttccacatcatatattggcgaggattagtgacgtggatggtatatcaaaaacagtcgttcaggaggctagtggcagattattaagatctttttgaactgacacgtgtaatggtgggtaaggaaaacgtcaagtggtaaactcatctggaccgttgaatagattttggcggaagagactagcgtttaaagattttatagatgtagttaatattgggcttaccatatgggccattcaaaaagattttaacccaataaaaaatattcaaaaaactatcgtcgacagcagggttcgaacctgcgcgggcgaagcccaatagatttcaagtctatctccttaaccactcggacatatcgacatctcgttaaaagcacaattaattaacttaataaatgcgtttctaagtctacccctttagtttaccctagaaataacattcacgagatacgttgacctaaagggtaaattttcccgccattgttagtaccagaactctctgggccgccgcgtctccgtcgtcgtggctatctacagatg

SEQ ID NO: 27723 - DNA, 3003 bp, Unknown; identical to SEQ ID NO: 27722
  misc_feature (1)..( 3003): 2750-1469P.txt file - cDNA_ID_2991584; gDNA_ID_2926243; Annot_ID_204169

SEQ ID NO: 27724 - DNA, 3003 bp, Unknown
  misc_feature (1)..( 3003): 2750-1469P.txt file - cDNA_ID_2991587; gDNA_ID_2214518; Annot_ID_133993
caaaaacaaaaattgacattttttttcttcaaaggatcagaaacattttttttgttgttgctaaaaatgtaaatatttcatagaaaaaatatatattaggtttatgatcgatcattttcaacctagacaaatgaacaaaaaacactatcgaaatgcctagatttgcaatgtgaaaaaatggtcggcttcatgacaaacacttagatccacgttggtgcattacaacctcatcactactacatatcttttatcccatattatatttctctctcttttgtttttccttttatcaaattatatagggtctcaattaaatatccattcagtttgcgacgttgcgtgtgttaaacagatacaaaatcgacgtattaatatacacccagatttatgcatttcgacatataaaacacaaaaattcactttccttggaaagtttggaggttggatcaagtttataagtgaccgtctccaacaaggcaacaactcaagttcttagtagaaaaaacactgcacatacatctggatcggtaatccatttggatgattttattccaaaaagaaaacccaattacaatattttttttgaagtctagatctagaaatatctttgctattacatattcctctatatatatctatgttttaattcctctacaaacaattttttttttgtcaaagctctacaaaacatttctgtttttactttttaaattggaagtcaaaaatatctttgttcaacgtttcttttatatgtagaatgtagactgtagttctctcacttcccggccatttggcttcttttagtattttatcaaaggagataaagaaaaataaaatcgcgacccatatgatatgaagcaggcctcgtctctaatggccacgcagattcattttaatatgaaacggcatgaacttatatattgtttactacaataattagaccatacggtgcaaaaattaaaacaaaataagtcatgcatccctcgttctacggtgacgcatgttgatgaacggattctataaaaatagtaatatttaatatctgttatccagtcagatatatttaaaacaatataagaatttaaattgacaaagaaagataaatctgattaaccacggaatatgtgtgtttagattggtaacgtatgattagacacatcaatgctatttaaaagatgcatatgatgataacttttagaagtgagaaggcctttggattattagggattacaaatagtaaacttattatagattacttgagaaaagagattcattaaaacaaaatttgcataaagtaagaaccaaactagaggagcttattccaagaagatgcattttacatttaaaaggtgcatgtaattaatgtctgataaccataactcattaattattctaattcagctaaaagcgagcctaaacccattacacagagaattgcacgaatcacaagtacacaaattgatagaacatttagactttagaggttgatattttttgataaactatagtattgatttatgttattaattgggttgtgtagcacgaggacttctttgaacatgtgaaatgaatattgactttacgtaaaatcgaccatgccctttaagtgttcctcaagttcatacaaaaacaacagtcatactcttatatgtatattataacatgatttaaatttgaactatgtttatttaactatatcctatatataattattacgattgagagatgagaaagtttgttacagatgaagaagaagatattttccccttaaatttctgtaaatgtattttgtacaagtatatatacgatgacaatacaaccggttaatataacccgcgtaatacaaaatcaattaaaccgataaattaaatcaacactctctgatatgacccctcaatatgaggattcgaaaatgttgagaatgctcatcttggactttagatgttcaaactgatgtgagaacaaatgtttagcaaaatatcagctatttgatcatccgtgggaacatgaagcagtttaagctcaccatcatccaacttgtcacgcacggtatggcagtcaatctcaatatatttcgtgctctcatggaagatataattgattgcaatatagataacatctgtactgtctgaaaacaagataagaatcgaagtagtatccgtttaagatacgagcaatgtatgcaaccaaaccaactcacaagtagcaagagctaatgctcagtatctagaaataacatgttgcttcttagatcgacatgagatgatttatgaagaaatttgagctttgatggctctaataccatattacgatcgagagataagaaagtttgttacagatgaagaagaagatattttctgattaaatttccgtaaatgtattttgtacaagtatatatacaatgactattcaaccgattaacatcaccgtaatacaaaatcatctagaccgataaaactaacctaacacattctgataataacaaatatgaatttattgattttcttttaattaagaatagctcgttcaaccaaatgttgacatcttttttttttttgaacactaccaaatgtagacatctagtacactaattcaaccatgtctgtcgtctaatactatttcgagtagtgtgtgatatgcttaatatataaaaaaaacttgttcacgtttctgattttaaaacatagactgaccaaaagctcacaacacacaactagatataaagcccaggagtcaaacaaagaacctgattcgttattttgccgcacaaggcccaaatcaaattagtgatgttacttgaacagttcaaaaagaactgggattattatgcattcagtttataacttaaggggttattatgttattaacccgtttactttcgtttggattttggaattagacgcgaagctgtgaaatctagaagaagaagaagaagaagaagaagaagaagaagaagaagaagaagaagaagaagaagaagaagaagaagaagaagaagcaatg

SEQ ID NO: 27725 - DNA, 3003 bp, Unknown; identical to SEQ ID NO: 27724
  misc_feature (1)..( 3003): 2750-1469P.txt file - cDNA_ID_2991587; gDNA_ID_2214518; Annot_ID_184505

SEQ ID NO: 27726 - DNA, 3003 bp, Unknown
  misc_feature (1)..( 3003): 2750-1469P.txt file - cDNA_ID_2991738; gDNA_ID_1971712; Annot_ID_175124
ctcctctgttcaccactgcaaatgcagcctgaaccgccgtcatgttctggaacggtaacagacctgtaatcaactcccacagcacgattccaaaactatacacgtccactttttgagtgtagggtctgtgctggatcatctctctgcatcgatcaaaataagggaatatagtgtctaaatatgacttgcagagatatataaggttattaaggacaagacaaggatggaaaacgagatatttattcaacttacggtgccatccatctgtaagttccagtctctggtgtcatcccttcggtttgaacttcaattcttgcaacaccaaaatcagcaatcttgatggaccgatcagctgatatgaggaggttatctgactttagatcccggtgtataaagttgcgctcatggacgtaagccatacccctggcaacatccaacgcctgcataacagctaacttcaaaggcacagctcggttttgtctcttagtcagaaactgtctgacagaccctccttttgcatattcagtcacgatgcaccacaccatcggtttaatgcacgcaccaataaacctaacgatgttaggatgcttcaaaaatgcaagcatagaaacttcctgctgaaactgctgttcgagggcttgtgccttttcagggttgctatctgacctctcgagtagcttaatggctacatcttctccgttgtaagtccctctgtataactttccaaaagccccttgagcaaaagcaggacccatatgtagtttcctcagatctattgtccactcttcatagttcaccagtccctcggttggatacttactatccatcaacgcttgtgctaaggcatcatcgttaagtgcatgagtaacttttcctggccgaaatacgctttggccatccgagagagagtagggatggcgcataggcttcaaaccaggatggccaataagagcatcactcgaaccaacgctactgttatcgacagacattgacacagaccctccagcattacttgtctgcatactgtcaacagacatgtttgtaccttcttccccgagcttttgataaaagtcttgggtgaaggcatagtaattgttgtcgttgttgtgattgccaacagcgtgcaaatcgaactttggattctcaagcatcctttccaatctcgtgttgagtgtaatgtataatgtctgaccgagctgcaagtcacatgtaaatcgctttcaatcacttcaacatgcacctaaagcaaatatagaccatagtaaaggaaacaaaagaaaggatatgagaaatcactattatcaaaatggtattttctttcattgaagtaactgcaaatacaaagaacttacctttaagagcaaatcaagaagctagaagaaatgaaagtttatgtttcgtgaagctctacaccgtcaacaccctaaaatagaaacatatatatacatgttagtataagaatgaaaattttcgtgaattaagctgaaatcagatgctttaataactcagctcagcttcaactaggtaaaaatagtaacttcatcattgaattccataattttatttcaaagaaaacaaagaaaaatgagaggtcatatgagaaaactcgtggatgaaaaaaataaaatcatcatttcccacaaaacccaaaaaagtagacacagatccgataattccataatgagataagctaaagcaagaactcatagattacctagagcttcacaaaacacaaaaacacttgatatgacatgaaaagaaacacgcaaaccttgccttggtgtactggataagtaaaacgatcgaaaagagaaaaactctgaatccgatcgacaaaatcaatacccacaaagtaataagatcataacccacaagcttacttctgatcaaatttcagtgctaagaacctaaacaagaggtggaggaggaggaggaagaagagtcagtcgtcgcttcccatttactctttttttccagactccgattttctctcttttttttttttattattaatttgttttttttgggatttttatttaattttggtccgtcctttgctggcaaattcgtttttttattaattgggacagcttccgagcaatactctctccgatagaaagtgtctcacacgcgctctaccattccgagcaatacacattttaaccctaatttttttattaattgggacagcttcagagcaatactttcatggccgtcgctgctaaggtcatcatccccactatcgctattgtctccagctagtcccagaattcgatccaggtcatcttcgtcttcatcatcttcatcttcatcttcatcttccgtctcatcatcatcatcgggatccgagtcatcatctgttgctccttctcataggggtaaggtcttcttctttctcctttcttaatcgttttttttgtttaatagtttgttttgttgtttgctcgctaagatctacctctgttgttttatctatgattttgtgctttgcttacggttactctgttgtgtatgtgtattgattttgagcattataggattatggtttaatctaaactttaaaattagagaatatcgattgtttatcttggttttgtactttgtttactgttcttgtgttatgtctgtgtatctattttgagcattatagagttagggtttacttataaactttaaataatcgattatttattttggttttgtaatttgtttaagtatctcttttgttgtgtcttagtgttatgattcttttgctaacataaactgtttgtgactttgtttatgttcctgattgtatgaggcggcgcgttgtagcttctggttcacgctttctatttttcttttcgtttctctaaataacctccaattcttaagtattggggtcaaaacgaattaaataaatattaaaggggcctttttgaatttatctagtttttataacctacttacataaaacctagtgtttcgtttcagtggactgactattcattcattctcatcatg

SEQ ID NO: 27727 - DNA, 3003 bp, Unknown; identical to SEQ ID NO: 27726
  misc_feature (1)..( 3003): 2750-1469P.txt file - cDNA_ID_2991738; gDNA_ID_2926199; Annot_ID_141429

SEQ ID NO: 27728 - DNA, 3003 bp, Unknown; identical to SEQ ID NO: 27726
  misc_feature (1)..( 3003): 2750-1469P.txt file - cDNA_ID_2991738; gDNA_ID_2926199; Annot_ID_201716

SEQ ID NO: 27729 - DNA, 3000 bp, Unknown; identical to SEQ ID NO: 13396
  misc_feature (1)..( 3000): 2750-1469P.txt file - cDNA_ID_2991745; gDNA_ID_2214624; Annot_ID_187748

SEQ ID NO: 27730 - DNA, 57 bp, Unknown
  misc_feature (1)..( 57): 2750-1469P.txt file - cDNA_ID_2991756; gDNA_ID_1620359; Annot_ID_154573
aagcttcacttctcagaagaaagtaagatctgcgaatctctctcactctcacaaatg

SEQ ID NO: 27731 - DNA, 3000 bp, Unknown; identical to SEQ ID NO: 8487
  misc_feature (1)..( 3000): 2750-1469P.txt file - cDNA_ID_2991765; gDNA_ID_1971812; Annot_ID_175792

SEQ ID NO: 27732 - DNA, 3000 bp, Unknown; identical to SEQ ID NO: 8487
  misc_feature (1)..( 3000): 2750-1469P.txt file - cDNA_ID_2991765; gDNA_ID_2926171; Annot_ID_199536

SEQ ID NO: 27733 - DNA, 3000 bp, Unknown
  misc_feature (1)..( 3000): 2750-1469P.txt file - cDNA_ID_2991768; gDNA_ID_2926269; Annot_ID_143390
tgggaatttttgtatattttatggtttttgcttttccattcatatggttttgctgattaaaaactatctataataagtgttttcatgtatatgtgtattcatatttgccctataatgagtgagagtatttatttgttgaatttctttatttttgtttgagttcatgaccaaattaaaacctaaatttttggttcgttatacaaatttcgttttgtttgctcagcaaatttcttacaaaaatgacatgtaaacaacgttatgcttaaagttattaatcaatcaatgtataataaaaaaaaaggaattagattctttgactacattgaatttgtatttgttcgattcgatagcggaaaattcaaaaaataaccgatatcggtttatattttaggtaattttatctggttcggtgtagtaaattcaccgtttgaccgtatctatatcacagatgattcactgcgattaaaagttgtggttatcactatctaatcgtgatcgctaccaaaacgcaaacgctagttaccggaagacacgtcttgagtttcgcagcatctctctcctctcctctgttcatatctctctttagaaatttctcaatgaacatactcaacagattgggtttgggatcaagtgggcaaaccaatatggatccttctccgatcgctcagggaaatgacgatgacacaccggcgccggggaatcagtttgcccaattcggagctggatgtttctggggtgtcgagctggcgtttcagagagtcccaggggtgactcagaccgaggctggatacacccaagggaccgtagacaatccttcatacggagatgtttgttctggtaccacaggccattcggaggttgttagggttcaatatgatcttaacgattgcacctatgagtctctgcttgatttgttctggtctaggcatgatcccaccactttgaatcgccaggtatttttggatccaagagttgaaagttttaacctttcaagttcggggattgagaaagattctgtctttaggattattgaatctattgggatgtgcctgagtctgttgtgctttggggatttcttgatttttctcaaatctgatagctttctgattttcatcaccagtctttactttgaaactttttaaatttggaaccttgatcatctaagtagaatatgaggaaggaaatgatattgaatcttgatttttgttgaattatgaggcttgagttggtaactttggtcgttgatcttagtatgatccagattatgtagtagctctgtaatctctcccctgttgctccctttttaattgaggtagagatacggatttcagagaggttcttcttgttctgttcatgatcattgattagcattggatttcatgtttgtttatattgatgttagtttggcttatcatttgtcttgcatctgtgcgcagagaactataatcatatgcaagtttctgctagttttgtttgagaaattcactagcttatagtcaaattatctcgttggggttcatagcgaagtattctcaaattctacgcatgtacgaaaccaaatcgtaagcggtctgtttaggttatatggttttagcaatttctgttgttgcaaactcgggacaactatctcgatgatgttaaccttgtgtattatgatgaaaaaaaatcctatttatgcttttttccgacaatttacatttgcatcttctctgactttcaatagcatatactgaccagtcttatgactgtttatctcatgagtttgaattctctgtgtttactatcataattttagtttaagtactcagttttctcggcagcctacttccatgctaaattgatactttgatttatgactttgctgtgatcagggaaatgacgtgggaacccaatacagatctggaatatacttctacacacccgagcaggagaaactagcccgtgagtcacttgaacgtcaccagcaacaaatggagagaaagatcatgactgaaatcttgccagctaagaaattctacagagctgaagagcatcatcaacagtatctgtcaaaaggtgggcggtttggccaagggcaatccactgccaaaggctgcaacgacccaatccgctgttacggctaataagctgctttcctctgtccctctccgaaaacagaggacttagcatcaaaggacttgtgtgtcaaatagattgtgtaaaacttgactaagttgttcacacgctatgtaactacttctttggaatttcattcgcaatgttgtaatattgatgttatactctataaacataaaccaaataatcattgcgatccttactagatctaaaaagccatcaacatggtaaatgtagccaacgaaaaaaaaaaaaaaaaagagtgttggagggccattcctttattagagtaatgattctctagttttgattgcataaacaaacgtgcccaccaacctacaagttgcatacttgcatgattgtttattattaagtcatccttcatagttcatataatagagcttagaactagctagttgagtaattgacccaaaaaaaatgtgaacggtatcaaaagtcatttcataaacacatgttttccaagttttgatcaatattatatctgaccaatctatagattgtctttctcaaatacgaattgatctaaataatttcagaccaaccaatttttttgaattatgtttccaaattataatgatggttgttggattttttttttaaatagatagttgatacagtatttctatatacaataaaagaaatgacgcgtaatatatccattattcattaacaatttgaccaaattataaatgctacacatagtattgattgaatgtatttttcttgtgtgtcaaatactacttacattgaaatatgaatattcctatttagcgatgatttttaggtgttaatctctgactagcttctttatatatataaacgagcttcccgaggtctcatcatcaaacaatacacttaacaatg

SEQ ID NO: 27734 - DNA, 3000 bp, Unknown; identical to SEQ ID NO: 27733
  misc_feature (1)..( 3000): 2750-1469P.txt file - cDNA_ID_2991768; gDNA_ID_2926269; Annot_ID_205049

SEQ ID NO: 27735 - DNA, 3003 bp, Unknown
  misc_feature (1)..( 3003): 2750-1469P.txt file - cDNA_ID_2991799; gDNA_ID_1972192; Annot_ID_180209
aaacagttgcgctttgcattctcggggtaagctactagtagtttacacaaacatagaaactatgagatatcacttcttgccttgtcttggttaatccctctctgatggatgtttctccatgttgatacagaccaaagtcatcccagcaaaatacataatgaagacggatgatgatgcgtttgtacggattgatgagctcctatcaagtctagaagaaagaccgtctagtgcccttctgtacggtttgatctcatttgattcatcaccggaccgtgaacaaggcagcaaatggtttatccctaaagaggtaaaacttctcaatatttctcacacctctgtgggctctaatcctcttagagactcatatatggctttctctttgtgaaggaatggcctttagattcataccctccatgggcacatggccctggctacatcatctctcatgatatagcgaaatttgtggtgaagggtcaccgtcaaagagatcttggagtgagttttgtagtttcatcaccatagagttaagatataacgaatcctagatatcataagtgacgttgttcttatgttgtttgttgaaagcttttcaagctggaagatgtggcgatggggatatggattcaacaattcaaccagacgataaaaagagtgaagtacatcaatgacaaaagatttcataacagtgattgtaaatcaaattacattcttgttcattaccaaactcctagactaattttgtgtctttgggagaagctgcaaaaagagaaccaatctatttgctgcgaataaatctctcgagcatgtacgtatgtaacttttctggttctgtttcacacttcaggaagaagttctcccagttaaagacacactggctcgagtatgtcagagtatattggctattatctgtctttgtagattctctcaatcagcatatctacaaacatattcgaaccatagtttataggccaggagcgtgtcaaaggtgccattagtgtcttattcattgtcctcgtaaacgttgttgcttttgttgtatcggggcacacttatccggatttatcgattatgcaattgccctactacatcacattattatttaaatttgtcttcaagtttttatttcgcatagcacatatataaagaaaacgcttcgttcaaactcgtctgtgaactccataaaacttattaaaaaatccgtccaaaaaaatatatagtatagtttggatcgcatgaaaacatatctaaacataagtctttgttaggggtcggattgggcccttctcaagtagttcatcagctcgcccttctcaagaagctcgttagctcgctccacttcgtcaagctcttcagatcgcctttaagctcttcaaactcgactcgtcctcaagctcctcagctcgtcttcaagctcttcccatcactcagcgaccatttcctcgcctagctgtcagctagtcagctcgtccaactcctcgtctagctatcagctcatccctcgtcaactacctgccgacctacctccaatgacggcctagctcacttattctaatatgaactacgtgtggcttgatccctttctaagggtacgtaggcaaccttttacaaggttcagctataaaacgaataaactctattcttcctcggacatcaagttcgtcttccggcctcaagctcgcctttcatctacaatcagctcgttcttactccatctatgctcgttgaagaaatcatcctttgtaatccgtccaattcgcctaagtcgcaggctcgtctttaatagaaagattcttccttccctagagatcccattttcgtacttgtgtgattcgtgcatcaacagttggcgcgccaggtagggggatagctcgaagtggcttgatccctttctaagggtacgtaggcaaccttttacaaggttcagctataaaacgaataaactctattcttcctcggacatcaagttcgtcttccggcatcaagctcgcctttcatctacaatcagctcgttcttactccatctatgctcgttgaagaaatcatcctttgtaatccgtccaattcgcctaagtcgcaggctcgtctttaatagaaagattcttccttccctagagatcccattttcgtacttgtgtgattcgtgcatcaacagttggcgcgccaggtagggggatagctcgaagatatctctcaaaactacgaccccgcgacgaagcaaagtgataacaaacagactacatggagcattcgataccgactcgtcaggctctggaagtaaaacgacaacgtcgatccccgggagagccagtcactcgacctcttcattcgatatcgcagcatgttctccgacaagaaaaggacttcaaggaactatcgaccccatcatcctaggcgatgacacttccagcccggcagtcaggacaataacactgaccaacgaggaagtgccgccgatcaaagaggaacatcccataacctcattaaacataccgacctcgttatcactcacgcctaaccaagaacaagaggagaagtcatcaggcgggcgtcacttggagaacctcgacgatgacactcccagctcggcagctcggacgataacgtcagcgcacgggaagacaactcaaataaaggaagaatactactcggtatgtaaaaaaattttattattactttttcaacctagttatttgcaggtaaaaaaatcattactttttaaaaaggctagcagacgaatcaacacggtatgctattaactaaaaccaaaataaaaataaaacttagtggttttccaaaaataaaaaacagtgagcggatgacagttgtcaaaagcagcacatggttttacttactttcccggtttaaagaaagaagcaaaccctagttttagagcatctttctttctttctttctttttcccgtcgcttttaaagcatctttcttatccgtcgcagttcatcttcctaactccatctctataaaagaaaaaccccggcaacaatg

SEQ ID NO: 27736 - DNA, 3000 bp, Unknown; identical to SEQ ID NO: 1670
  misc_feature (1)..( 3000): 2750-1469P.txt file - cDNA_ID_2991813; gDNA_ID_1620433; Annot_ID_156904

SEQ ID NO: 27737 - DNA, 3003 bp, Unknown
  misc_feature (1)..( 3003): 2750-1469P.txt file - cDNA_ID_2991829; gDNA_ID_1972177; Annot_ID_180050
aaattggtacattatctcatttacctaggatcacatatatcatgatgtaataaaggaaacataaggcatggcagacagatgaacgaatctaaggacaataggataaccttggacggtgatgagataagcacgtgggatagtctaaatggtcagatcttaatccaatcgctaacattttcaagtttcaaatctttgaattttgctttgggaatttatttttttcctctttttaagaaactaacaatatacaagttggatgaaaaaaagaaagaagcaaacgcaacattctacgtttgcgtgaaattttggatttcaagttagataacagacgaaaaaatagagattgaatctaatttttcaaaataatcaatttttgttttgcatatttttttcaacgttgtttttcaactttatacatatgcgcaatcaatgcattatctctgatataaaaaagggaaagaaaaaaaaacagtgcatttttcacgccaatcatcaattcactattaataattacaatttcttttagttaaagaaaattaaaactaggtaaaaaagttaagtaaacaaaaaaaaaaaaaactttcccactagcaaatatcaaattcaaagttgagatttcaaaattttttatctgaaatttatacaataatgaacatcaaacttaactttaattttatttaccaaaaccaaacaaatattctacttattccttaaaatagaaaaatctgaaaaatagagagaaagctgaccttaacatctctgacaccagcacgaaccaaagcgttgttaagattcctcatcgccggtaagagattattgatcatgttattatctccggtgagcagaatctcatttccgactgagatatacttaatcttcgtctgaggatgaaacggcaaaatgttaaccgaaacccaccgacgagcttgtcttccgttagccaacgccggaatatcaccgttaggaacggtgacaacgacggagataccagttccagcgaaggcacgtaggatatcgggattcacatcgaagatcttgacgctatcaatcgaagtttgtgtcttgataaagttagccacctgagtcggtggtgggaggtttccgagagttccgtagttaacaccgatggcggagatcacggcggggatggtgaggaatacggcggcgcagaggaggaggagaagagagattgacggtggcgctttggccatctttttatatttcggaaatgagaaaaccaaacgattccaagtgaaacccgtgaatcgtttgagttgtgtttttattattacgacgaatagatttttttattcttatcgagaaagtatttataataaaaattaatagatatgaccgttttgtatagcgtatacgtgtgtatatttttagtgaggaacagctggattttgtggaaagcaaaataaaagaagaagtttgtgttgtctttgtttttcatgtgcgtcggcttaaatttaggccgttgtaaattattgaaaaagtggattttgttgtgaccgtggaaactttagttaattaatttggctaattatagagtctgcttttgtttggataatcaatttgtcatctttttctttaatggtttttggctggtaaatactcatactatccaagtttaatctaaaaatatacctctttcttgttaatcgtaattttacaatcctaattttatccagatacggatgaactatatttgaaaaaaaggaactaaagtgaagttaagaaaacaaaagagagatcgagtgttgttttttcttggatacgtttattaaaagatgttcttaatgaggtcaaaggagactatctgagtttttactgctaaacttaaaactaaaaaaaaaatcgattagtaatattgatgtatcaacgaaatgtatatggttaaatattaagtgaaaagaaaaagaagagagatcgacgcggtttgggataatgccattggcccattggacacgtgtttgtaggaggaatagtttggagtttgaacactacggaccaaagtcaaagagattcgaagtatgaagatgttgttgaggaagctgattcgaagtaacttttaccgacacgctttagccatttgttatgctttctttgggaaaagaagatccgcgtccatgtctcattgttaacagtttattgtcattttcaatgacatggttacactcattgcacacacacacaaaccacgtaattttgtatttttttaattaaatcccatccttattttttgcaataacaaattaccattgttactttttaatgatatcacataaaataatcgatgccactcgatagccctttagactaacaatatgtttgttgaagtatgccacaatgtttgaagtgagccggctcaatgctctcatggtggtttagtagtttaacttgagaacttacaacagttttctccttctccacactatttgtatccaagaaggggcattacaatatagaattgcataatacgatttaaacttttaccaaaaaaaaaaaagaaaaaaaaagaaagaattgcgtaatacagaatttatctttaagggaatacaaatataatttggtttcagaatcatctcaataggctttcctttaaccaaacttgggttttattgatgtgcttgctttaatgggcctaaagcccatacaacagcatcactatccacgccgttgtctattcttattattcaccccacccggtacaccgaccaaaccttggccaacacgtccataatatttcatcctccctcctaatttactttaatatcctcaactttcctaatcgttcagggaatattctcatataccctagacatatgcgtcttttccaatctaaaatgttgagagtatatttttatttatatatatatgagtgacccctgcgagagacaacggccactgaacactatcgatctaatcttttcagctctctccatcgtcgtcgtatctgtgactctcgtgatcatcgcctgaaaaaaatttgagataatg

SEQ ID NO: 27738 - DNA, 3003 bp, Unknown
  misc_feature (1)..( 3003): 2750-1469P.txt file - cDNA_ID_2991838; gDNA_ID_1972176; Annot_ID_180022
tatggaaaaaaatttaaaaaaaatgagggcccaaccgggttcgaaccggtgacctcttgatctgcagtcaaatgctctaccactgagctatggaccctttgttgtacatcatatctatattaagctatctaaatctacattaagatttctacatatagtagcttatttctttgttattgctttagaaatttggtaacaagatttatattagtagacctcttatatttgtctctaaacaataagaacaaaatgagaaaatctagttatacattatcaggccagaactccctgcggaaggctcgttcaaattcgttttccgccaatcgtttttcgtgctcgatcatcttcactaatttcttagaaagtttcttgctcttctttgatacttcttcaaaagctgtatcctgaggctgtgccggttttctcttggctggtttttcagctcctagtccttgtttgttatgttttggttctgcttgtagaggcaccaatataccttgttcagtgattcctagaccagttccttccttccagccatgcttctttaggagctgaaaaccaatgttagaagaactgatagcagtcgatggattgcttgattcagaagaatccccaataacattggacactttttcactgtagtgagaaattgtagcctgggacttttctgttttcttcctcctttgtataaccagtccctgtttggtgattcccatatcagtactttccttccaaccttgcctctctcggagctgaacaacggacgtttctctccgagtacaagccagatattctgttccttgcatcgtaagaaaggaacttcttccgtttagggtttgtgtttcttctgatgatccattctccttatatagaattattatgatttcctaacacatgaggacacaattattaatgggcttatatgccccgtacccacaaaagaaacaaaaattgtttgctaatccagttatgaactaatcgtgtttataggaactcaaaatttgcagagtcagtggcaatcctttaacttgttgaatctcccgtaacaaatcctaaccaaaaacgtgaaactcaagtaatcgccgaacaaaaccagaccaagaaaccctagaatcgctgatttgatctaattaagtaaaattgccaaaaaccgcttcgactaattagagaaggcctggccctcttactctatccgaaccaccgcctctgctttattttaaccttatctaatgtaaaattcgagtgatgcaactctgtacacgtagaatcgctcattaggtcattaatttgtgactgcaatataccccaaaaccagaacatttagccttagaaaccggttcaactagtcgacagaaagaaaacgtattcaaataataattttgatgtttctaaacttcctaattgaagcaaacaaaaacgacactagtacaacttttctaaactaccaaaccattatacaaatttattcgaattggttataaatgatataccgagcgattccaatcatgttttgggtcatatgtaatttggatgacataaaatggttagaatcttttttgtctggttcatatatttaattttctctggttcatatattttccccaaactgacaagtttcaaaaaagaaaaaaagaaagaaagaaagaatcagaccgaacccaccaccatctgtcagcaaaccggtaatagaggttgttggaaccacatgtcaagaccaatcatatctattatatcttggctttcctcatctctctttatttttatgttatcctatgaaaatcatttcatctttgatatagaaagcacacttcatatccttcactcgttggataaatatgaaattatatcattctatatataagacttggcagttatagacttattgtatatctcattttgtataatagattctggtttaaaatttttggtgtttccgaatataaatcacaaatgtggcaagaaaacagaaaagcaagttgatgatagaaaaaaatataagtaaataatattggtattatcatggaaaatctagcttttgaggatttcccgccttatcaaaatttaaaggaaaaaaaaaacaaaataaaataaaataaagaaagacctaactttgtatgtttaaatattatattgtttggaaaatattttaaaagaaaattatcactttgaaagttttttactttttaaaggaatttttgtcttttgaccaagagaataagaaaactaagtttgaaagatatacaaatttcacaatttgcgaatgcaaatcattcccaaattgacatatattgtatggtattgacacacccacaaatacttgaaaattatctgatattggatgtttttcaattatatattaataaaaataatatttgtatatagtaaataatagactatcatttataacaacaaaaattttataaactaatatagagtgctatataattttgtttaatccgaatctaattcaataaaaagactcaaaatttataaacataatttagaacatagtaaaaaaaagtgagagagaaaacaaaaaaaattgagagaggaagttcaaattgttcttgtatttagacaaaaacaaaaaaaaaaaaaaaaggaagaggtgactaataatgaatgatgcttttacacttataaaaaggtcatgacgcatcgattaaataaataaaatgttgtttgtttgttgaccaaataagaaaagcaaaattacttaaaattgatttttttaaaaaaggcagtgtatataaaaacctttgtcgttctcaaatcctctctgtaattctggtttttcttgcaatgcttcttccatttctctcctcctctctcctcctccgtctctcttctccgatcatgtcccctgatcccaaatccaataccttcttcttctctttttccagttgattaccggagaatttcagatcgcgatctccgatttattaataattacagaaaaaaataattaaaccctagagagagagagagatatatatatacatg

SEQ ID NO: 27739 - DNA, 3000 bp, Unknown; identical to SEQ ID NO: 2446
  misc_feature (1)..( 3000): 2750-1469P.txt file - cDNA_ID_2991846; gDNA_ID_1620537; Annot_ID_159917

SEQ ID NO: 27740 - DNA, 3000 bp, Unknown; identical to SEQ ID NO: 1983
  misc_feature (1)..( 3000): 2750-1469P.txt file - cDNA_ID_2991850; gDNA_ID_1620474; Annot_ID_158105

SEQ ID NO: 27741 - DNA, 3003 bp, Unknown
  misc_feature (1)..( 3003): 2750-1469P.txt file - cDNA_ID_2991881; gDNA_ID_2684091; Annot_ID_189954
attacagtagatatatgaagggaatcttatagaatagagactaacagattgtttatctgaaatgattgctagatcagtcatttcgcatagccccaagcttgtagagagctatctcaagaaccagtcccaattgtcatcattttctatctcgactacagaccaagcaatacggacaattcgattgtcaccatctcttccaactgtggctaatagatgtccttttatgtcccatttcagaaaagctccatctatccctattacaggtctgcaagtttgtttccatgactccctttgagcttgaaaacaaatatataaccggtaaaatctctgcttgcttccaatcactgctcctgcaactgtctctatgttgaactctgtccccggattccgcaataacacctctgcttgataatcccatatcctagcaaaatgagaatcatgactagcacgtctagctctcaaaacttttgtctttgccttagcacattggtctggagtcacttccaacttgtattctcttaagatctcagcaaccatctcatgtttagtgagttttggattcactctcaacctttcttcaaacaaaaacccaatagatgacacctttaacatcttcgaatgtcctgacctcacacaagtatgctcattgtaataagttcgtatttgcatcttatgttttctcttctcataagagcaacggactctgcacggacattcaacaccctcatcactaacatacacacacttagcagcaacaaccatagcttcagaattataaagtttaatgtcataccttgtctttagggaatacatcaaaagagcaagcttgaaatcttcaggagagttataagtcttctccaatgctagtaaaatctcaggatcaccaagatcatttcgagctgcctctactctatcatcatcttcatcatcagaggacaaaggatctggaatcttgtcttcatcccatatatcatctaccctgtcattgtcactagcttcttcttctccattagcctctggaaaatctctttccatgtctaagttaccatcttcttcgacacctaatccagcagtatcatcttcttctctattagtatctactgcatcatcaacctcatcgcagtcttcatctccttggactgcacagtcatcgtcttcatcaagagcaggaacttcagcctctaaatcctcctcttcttcatctctgattctccttcgtttacttcgtctaagtggagcacgaacttcgactgcatctgtcacatcaacgcctgattcttgagcttcatcgtgagcttcctcttctccgccacaagacgtttcacctaaagcttcctcttcctcttgtccaatttcacgacgagttgattcttcaactgcaacatcagcttcctcttccaatctattttgccttcgtttacttcgcctaagtggagaacaaactgcggttgcatctgccacatcaacggactgacctcgagcttcttctccaatttgatttgcttctccttccggcattggttcaactgcatcgtgagcttcttcttccaatctgatttgccttcgtttacttcgcctaagtggagaacgaacttcggccacatttgccacatcaacatttgatactacattcgcttgacctcgagctttttctccaattcgatctgcttctctttccggcgttggtttagctgcatcttgtgctccgtcttctccgccacaagactcagataccacattcgtttcacccccaacttcttctccaatttcatctctttctcctcgcggtggtgcttcaactccatctcccaccaaattctctgattcgtgaagcattggagatccaatcctcataacgacgccattctttctaactaatggcatttcagaaaacgaattgaagcaattagggtttcgattttgattttgggggcaggattaggtttcgatttgggtttagggtaattgattttgttttgagaatttctattctcgattttgatttctctttagcacgaaaacgaggtcgtaagactataataacagatgcttaacggattaaaacggctgtcaattacgctgttagaaggagttttaacggtggttaattagaccgagtcaacgcaaacttgaaagtttaaaacagaagtcaactttttgttgagagttaaaacggccatttctcgagttcacggttactttggccattttttgtaaattgaagtattaaataacattttttctaattaaacttaataaactacttaagaaaaatgggaaaataataattggaaccgactttaatttcacaatgactcttttgcccttccatcgttgacgacattgtttctccttctctcttccacccatttaaaaacgcaaacttggaaaatggagaactgtttaactacgccaacgggctgttttaatgacaaatgttagactgggctcagtaacggatgttgtttcttgtcactaaagaatacgattcatagatttaaaagtaatccatttactttgcttttactttttcatgtgaagagaaacaaaaaaaagttttgttggtgatcaagtttgtagtgtactagtaaaatagtaccatagtatgtgtgtgtgtgatgtggaaacaaaagaatatatagaaaattttatgttttgggtttcatgtattttcttttaacataaaaacaagaacagataagcataatgacgtaagcagtggcctaagcatctcttaaaactccatttaaaaaaacatatcgaattgaataacattgagttgacttgtttaacattcacaccttgcttgctacggtatcttagcttccaagattcaattaatttttcattttttatgttcacagtcaatagtaataagacatcagcatcgcatacaaatttcttatataactcgactagtttactctataaagaatcagcgattggagtatagaaaaggtttaagcaaaatccatcaaagaagagttccttttcacaataatg

SEQ ID NO: 27742 - DNA, 3003 bp, Unknown
  misc_feature (1)..( 3003): 2750-1469P.txt file - cDNA_ID_2991917; gDNA_ID_1971823; Annot_ID_58366
caattccacacattgagaattcttatgcaatagaataattaaataaacagtgacaatttaattttcatgcaaacaaagatatatgaacgtacaagtttctacatcaaaatatatttgttaataagattatacaaaactctgaaaacctaatacatggaaaaaaactcaatggtaagagattaagatactaagtgaaagtcattgcaaacatgaaaaggtgaagcttgcttggatcacgaaccaaaatgtcaaaaaacaaattcttgggtttttcattttcgatccaagtaaacttaaccacccccatgacatggttgtcattggttactattaaatgtttaagtaaaataataaattgacttttatgtcaaaaaaatattgaatagtacaagatctaaaatttaaatactcagtgataatcatggctaagaagaaggtaaagcttgcagtgataatcataaaggttttgattcacgatcgattgaggcaaatctcactttcttccatgccatggctatcactcataattatctctcacttagatttttttttttttgttttttgcagtgtgaaaagaaaatcatgcacttgtgatcttatataggaagaatcaaggataagagataaggatgtgggaatccaaatattagataagtataaatctaacaaaatccaaaaatccacacttactattttcttatgttaataccattttagagttaaaatttgtttgaatgaattttttgaaaacttaatgaatagatataggttattttatttgattctcttatttttatcttcatctttccaaatttgtgattcaatttcactttcacttactaggtttgtaaatttaatttacacttatacaactatcgaaccctaaaagcttttatagtcgtctttgaagaagtacaaactccaactctttcttcatttgaatgtcgctccccatttccgtctttttccatgtatatttctttggatgtgatatattgtcaatttttttttttaaggtttataatttactaaacttaagatatgacagggtgaaaccatatatgttttgaaatcaaagcaaaatatatcttgtgcattgttaggtctcactagggtattgatctatgcccacatagtaaaatcatttgtattttgaaatcaaaacaaaatcacattttggataacacattggtattattatatgagatatatagacaactgttgaacactcttaagaacataattaagattaggggatgtgatttggtactggtacgttataatggattgattagatgcaaaaccatatttgtttgatcttttgtagcttgtaaatcaaaacaaccacgatgcaaataattgtaaacgagtttagtgccaagctaaagataaaatacatatataggaaaactcaagttgaaactcctcctatattggtttcctctttggaactaaattgtatatgttacaaaggtgaaactactaaaataaaaaatgaagttgaattattagttgcacttgtagttatcctctctctcttagcaaagccaatcctgagaggagctagaaagtaggtttatttttagagtaattaaacctactgaaaataaaacatagcaaaaaagtacctttatttattagggccacagtaattcactcgccaaccatgttatgggctaaacgttttcaactttatttgctatattgaaagacacccaatatgtaggaatcctaaaacatcacaatatgtaggaatctttgtaaatcatcacatgttttgaaagttataacaaatgattttttttttttttaaaacatttgagccgccttaaaaatattatcgtatacaataaaataattgtagcaaaatcgaaatctctaatcgacagaagttaacgactgaaatatggatttgatgaatcatttagatgtatacaattgtgtcggtcaagttagtgttaatgcacatctttcaacaacagtaataaatcactcttgccaactgattaaacagaaaaatactccgactattttagagcatgcaaaaaagtgagatttagtctgcgaaaatgtacaagagcgaattgtggacgaacccatacctgcttctatcatgatttcagaggcttctggtttcaaatgctatattgacgggtctttgataaccaccaagatttccactagtctcggttagatatgctttgaaaatgacgagacgatgtcatcttgaactgaatgctactattggcgatgttgtggatgttcgaaaatcaagacgttcacgtaacaaaaaaaataaactcacgttccttagctatgacagttaaataaaaataatatcaaaattaaaatatttcgcactataaaaaaaggtttataaactaattttttttgtcattaacataatttcatttgaagttattgtcgttttgcaaaaaggtttctaaataaatcgatcaacacatgctggtgacatttatgatgagtttcaaatgtatgagttttgaagaagtttcaaactcttataagggtttataatgtgggaattaagttttgttaattcgtacgttcaaatataattggaaatgttgtggtaatataaatatttttccagtattcgtacgttcaaatataattggaaatgttgtggtaatataaatatgtttccagtaggggaaaaaaactacaaaagtttcagaaattttcataatgttttgtgactcccacaaattttaacgtgttcgtcatgtagaaaatctttggtaaaagagtgactagggcagtgtcccaagcaacgatgggtcggcacttggtcactccaatggacatgtgttatacagttgttacctatctgagctctaagtactgagtactaaaaaagctgtcatatgttagccacattttacacaacacaaaatccatttttcttctttcataactatcagaaacaaacacaaattaaatcaaagtttcattagttttaaccccccacaaaaaaacatg

SEQ ID NO: 27743 - DNA, 3003 bp, Unknown; identical to SEQ ID NO: 27742
  misc_feature (1)..( 3003): 2750-1469P.txt file - cDNA_ID_2991917; gDNA_ID_1971823; Annot_ID_176262

SEQ ID NO: 27744 - DNA, 850 bp, Unknown; identical to SEQ ID NO: 210
  misc_feature (1)..( 850): 2750-1469P.txt file - cDNA_ID_2991917; gDNA_ID_29590; Annot_ID_146748

SEQ ID NO: 27745 - DNA, 3003 bp, Unknown; identical to SEQ ID NO: 27742
  misc_feature (1)..( 3003): 2750-1469P.txt file - cDNA_ID_2991917; gDNA_ID_2926152; Annot_ID_139362

SEQ ID NO: 27746 - DNA, 3003 bp, Unknown; identical to SEQ ID NO: 27742
  misc_feature (1)..( 3003): 2750-1469P.txt file - cDNA_ID_2991917; gDNA_ID_2926152; Annot_ID_198158

SEQ ID NO: 27747 - DNA, 629 bp, Unknown; identical to SEQ ID NO: 242
  misc_feature (1)..( 629): 2750-1469P.txt file - cDNA_ID_2991921; gDNA_ID_76498; Annot_ID_147067

SEQ ID NO: 27748 - DNA, 416 bp, Unknown; identical to SEQ ID NO: 251
  misc_feature (1)..( 416): 2750-1469P.txt file - cDNA_ID_2991925; gDNA_ID_77238; Annot_ID_147154

SEQ ID NO: 27749 - DNA, 3000 bp, Unknown
  misc_feature (1)..( 3000): 2750-1469P.txt file - cDNA_ID_2991928; gDNA_ID_2328; Annot_ID_145643
  misc_feature (889)..(889): n is a, c, g, or t
aatcctcaaactgggctacaagacctcactgctccatttaatcctcaaactgggctacaagacctcactgctccatttaatcctcaaactgggctacaagacctcactgctccattaaatcctcaaactgggaatcgcaatgacccgagaagctcctcctttctgtataatcaaggccattttgacttctctggtggtaatgatgatgatccttatggcttttctgcttccatgagacatagaccaaaaatgtaaaaaaagaagaagagaagagaagcaggatttacaaatccaacagatgcaaatcagaccgaatagaaggaggagcaagcacctttgtttcttgtctttgaattatgatttttattagtcaaaatctttttaatgtgtcgaaacttccctatcaacattctctgtttcatccttagaatctcgtatttcttcagagtattctcaacatttattcttgtttctattttgctatggattattgtatatatacttcttctgtctaaatcatatcattaatagtaaaaggaattttaatgatgaatactgaaaaacacaaaaactaatcgggaggaacaaaagttccaagtaaaaacgaagaatgaaaaaagtaaataagaagaagaaagtatcgtaccagatttaggaccataacagatgatgtagatgtagggcttaaatgggcttcgtttcgaatcctatttcgttggcccaatattttagctttcccaccgcatcattattcatcatctcgtgtattaaaaagccgatttgatctctttccactaaaaaccttgctgacaaagaattcaattttgattgtcgtcgatcgtacggtatcttgggggattgatggagaacacagacgtcgtctcgggtntgcataatttcttgagtaaaccctccgccaaagatttcatcaaatcaatcaaaaggttatctctctctctctctctctctctcgcttctcttcttcgctttttgtatactttaggtttatttactctctagttatgattacatgtgtgcaagataagatatcttgctgatttcacattgctctctagtagttatgaatagtttttttcgtttttgcgacaatgttatgatatcgatgatttgctataaacttaagcagatttttgttgtgatggaaacatcacatgccactggttttttgagttgtgaacgttttttgatgttttgcagtttcattgtttcgatcttgaacactgcaccagaccctgaaaaagattgtgatgcagttcaggacttcttttacaagatggagtctgctttcagggctcatccactttggtctggttgttccgatgatgagttagacaatgcgggagatgtgagttattcttcttccctttttcctgcttatctctctcatgatttatctataataatctttcttgacttaatttatgtatacacagggcctggagaagtatgtcatgacaaagttatttccccgggtttttgcatcaaacaccgaggatgttatatccgatgagaaactctttcagaagatttccttggttcaacagttcatatctcctgaaaacttggatatacaaccaacttttcaaaaccaaacatcttggcttgtaagtcacatctatctctccatagtgttgcttgttttcttataatggttcttacttgtgatgtttttttctcttattttatggcagctagctcaaaaagagctccagaagataaatatgtacaatgctcctcgtgataagcttatgtgtatccttaggtgctgcaaagtcattaataacttacttctaaatgcttcaattgcttcaaaccagaatgcacctggagctgaccaatttcttcctgttctcatatatgttaccattaaggtatgttgtcaaggattgtacaatttaagcaaaagctgatttctgatgtctcatgtttacttcatattaattcttatccttggattctgaaactgacattatttgctttgtttctccaggctaaccctccccagtttcactcaaacttgttgtatatacaaagatataggcgtcaatctaaactggttggcgaagctggctacttattcaccaacatactctctgcagagtcattcatctcaaatattgatgcaaaatccctctccatggatgaagctgactttgaaactaaaatgaaatctgcacatgctcgtctttctggtccgggaagccagtcttatcaaacggatcacggtgctgcattacccactgctcataatactaagagggaaaacatgcttctgcatacaaaatcaactgatagtttctctggtaccaatgaaacactgagtgaaacaccaacaaagaaagttgaccccattaccgatttggaaaataagggcgctgctacgcttttgaatgatagaagtgaggcaaccaaaatatttcaagaatatccttacatgtttgccagtgttggtgatttaaagataggagatgttgaagacttgcttaataattataaacagctagttttcaaatatgtttgcctttccaaaggcttgggtgatgcaacatctttaactccatgcatttcaccattgcaagcgtctaaagtctctgagaatcatacaacattgtcttcagattttcaaacgaaaagcgaaactgacaggagcgttgataatttgtttcgagctctacaaggtgagggagacaatgttcataatatctcagatgtaaaacaataatcagacttatctcttccaaatgtaatcggattcagttcttgaatgctacatgtaattttacattcactaattatacggttctacggttatacgacaaattgaaacacttaccggttttatctgagaaccggttaagggttcattacaagatatgaaaccaagataaacgaaaagggtattattgtaatttcgcttcattttctgctcctctgccattcccacaccactcagaggaacagagcttaacggcgactatg

SEQ ID NO: 27750 - DNA, 3000 bp, Unknown; identical to SEQ ID NO: 14308
  misc_feature (1)..( 3000): 2750-1469P.txt file - cDNA_ID_2991936; gDNA_ID_2684103; Annot_ID_190318

SEQ ID NO: 27751 - DNA, 3000 bp, Unknown; identical to SEQ ID NO: 9123
  misc_feature (1)..( 3000): 2750-1469P.txt file - cDNA_ID_2991955; gDNA_ID_1972003; Annot_ID_177762

SEQ ID NO: 27752 - DNA, 422 bp, Unknown; identical to SEQ ID NO: 481
  misc_feature (1)..( 422): 2750-1469P.txt file - cDNA_ID_2991959; gDNA_ID_1591360; Annot_ID_150880

SEQ ID NO: 27753 - DNA, 3003 bp, Unknown
  misc_feature (1)..( 3003): 2750-1469P.txt file - cDNA_ID_2991959; gDNA_ID_2926228; Annot_ID_142584
acgttattcatagaaagtaatcgacgttaacatttcttgaacactcccaattcactggtatggtcctcatggacatagacaatatttttgatctatgtcacaaaaacactaaatcgccaaggcctgattaattcgtaacagttatcatggaaacaatagttagattaagcctttaacaaacaaaataaaaacaaagttagaattctgcattaaaaaaaaaaaattttaaacaagtataactggaccatttattagttacctttgtgactattaatttggggataattagtttataagaaaaaaagaattaaaaactcactttttaggtggctgtgtgacattaggaatctcttttgaggaaagatcattagtttccatcattatccacaacatctttagcttttgctaatgatttttatataacaatacatatatactttcagaatataaatgtgaaaaaatcaaatggttttatcatttaagccgtctaaaatgcttaataataacaattaaaatcacaacgagaatacgtttaactcaagtctggagtctggacccatgaaacaaatcttactatacaatgaagtgctatttttctaatatatatgacaaattttattttcggcctaggattctctcaacttgtaattcttttttctttttgtttatgggatgggaattcgcttaattcagatttccttgggtaattaaacgtgttattgtcacaattttatgagtattcaagcgaatctaaaagaccattatgaaaagctggaccatttcacgcatacccaatgactccatacagtaaaaaggaattttaacttaagaatacacgcaacgtttcgatttagatatgcaagaaaaatattgtaacagcagaaaatttgatttgtttctgttttttccgcattttattttgtttgcaatgaaatttaaggaacagtaaagagaacaaaattatgattctgcaaagctgtttgattggaaaacaattgtgaattacataatgatttacttttcgtcattccattcctgggattctgctcagtcaaaacattttaaacaatatcgatgtatctgtttaatataattttctataaaaaaacactcttactcaaaaaaaaaaaaaaactaagacattattttgaaaaaatctttaaccaaaagtttcattttgaaaaaaaatcatccagataaattcgattttattagagaaaccccacaccaccactagctagaagcagaaagtgattgaaggaaataaaggggggcacgcgttgctctgacctcaatatatatctgggaactatatgaggaaataactgtaatcaactttattagaattaccattctcagaaacacaatcataattacttcttttcaaaagacagaagttacaaaaaggttttgtattttaaattaaagttgatgtatatgtggagtaaccaatcaaatgaaaatatgaaagctatcaaatgttgtaccatgtcctttttttctggccaatctctacacacgagaagcactgtaaatacctatttttaaaaattattttcgttacgttcaaattgtaaattttgaattcccccttgcagaaaattgcttcatgtgattgttgtgtctgtgtataatgtatatgacgctatagttcgtcccatttatcaagaagttaattatttgatccataagtttttcggactacagaccaaaacatattgttatttttcttactaattgttatcatccctctcaaaaagatgagattcaagtttttgttgccagagagttttgcaactctataaaacaacagaaaattcaataattcatgtgaagtctcattgtcatttgaaattgcaaaccttttctttttttcgtcttttgcaaatggtaattcactgagactaaccatgtcatgtggtaacttaaatacaatcattgatgattttgaaaaagatttcgtaattaatatgaaagtggtgagaaaaagggtcgtcaaaaaagtaaatggagtcaaaatccagttcctataataaattgggcatgcgtgtttctctcttttgtcgttttatatttcaatttctcacgagtttttttaaattaaaccctaattttttactctttacttctttgagatcgtcaacgcttttgtcctttgaaggaaaaataatagtttcacagaaatgtgaaagttgaaaacaactattcgatgctattattgaaataagcgctcgttatgatttacaattttcattttctacttctgtaaaatatatgaagatggatataaaaagaaaactcttgagtgactcacaataacgttgagattaatgactgcgtttataaagatctttttaaaatgatgtttacacttcttctttctttttttcacaattttacacttctaatgtaggaatcatatttgttttgtctgattaaatatagtttaatatatgtaaattaagtaagaacatcaatgaacattaaacatagaaaatattaacaaagagcagttaactatcaaggggaccaatttgattaaagaaattattttttgttcccattagaaattggcaataacgttgaggttgttctctcaaattaaaaaaaaaatattttctattttgttggtgtgctcttaaattccccattgttacattgaggttgccctctaaattttaaaatattttattttttttgttggtgtgcccttaaatcacccattacacaacaaacaaaaaaagagactaaccaaaaaataattttataattaattttgtttcttcctacctacaagtatttacttaaccattgcctcgatcttttaaaccatccacattttttgaatcaccatcaacatctttctctcttctttttcttctctctatctgagtccagaaacattcacattaattacaaactgaaaaaacattgaaacttttgaataaactcacgagaagtactctgttttctcttcttactctgtttcttgttgatacaatg

SEQ ID NO: 27754 - DNA, 3003 bp, Unknown; identical to SEQ ID NO: 27753
  misc_feature (1)..( 3003): 2750-1469P.txt file - cDNA_ID_2991959; gDNA_ID_2926228; Annot_ID_203576

SEQ ID NO: 27755 - DNA, 3000 bp, Unknown
  misc_feature (1)..( 3000): 2750-1469P.txt file - cDNA_ID_2991963; gDNA_ID_2213659; Annot_ID_132501
atgaaatcatctgtaaaatcgctcaggttttgattttttcatctactttttctttcagactataaactaagtatgtaataatttaataaattaaaggagaaaaatagactaggttggatgaaacagcagcaaaggccgtgaaagagctgttacctgaatctgcagaaggagacctctcaagcttgtgtctttgggctgatcgtgtcaagttcagataccactggtcttctcctcttcattacatcaacactcctgatgcatgctcataccaatacaatagtgagcgtttttattataatatccatatcacaaaaaaattaaaagcataagtgttgtgtatccaaccacatttcctttgtttcgggtccaaaggggactgcaaggacgaatctggagagaaaggaagatgtgttgcgggagccatttacaactacaccacacagcttctttcctacaaaactgcagcttcatctcagtcacaatgtagtactaaaacgttgccatctttttgcttttcaccaatttcctcatcttttatctccctcttatattctgtttctatttttccttgtggccagacaacttaaccgaggccctgctcttcgtgtcccatttcatgggtgatatccatcaggtattataaaagtcgatcaagataactggtttcttatctgagtatgtctgactggcataattgtaaaatacagcctctacatgtgagttatgcttcagacaaaggaggtaacaccatcgaagtacattggtacacgagaaaagctaacctccaccatgtaagaactgcgaaacgcatctattatttcagcatcagatagtacaaagttttaaactttagattcatacagatatgggattccaacattatcgaaacagctgaagcagatctctataactctgcactagaaggaatggtggatgcactcaaaaagaatatcacggtactaatgcaacaaaactactgttctctacatgtatgctacaaggtgtttctgacttgctgacatgtattaataaaatgcagacagaatgggcagatcaagttaagagatgggagacctgcacaaagaagacagcatgtccagacatgtaagtatgataatagtacctttgaatagaagtggttcttcttcatgccagcaagaagcagatttaacttccaattgctttccccctgtaaacttttttagatacgcatccgaaggaattcaagcagcctgtgactgggcatacaagggggtaacggaaggagacactctagaaggtaaagaatccacccaaaaaactatgatgattgacaaaagaaagaagctaacaaacacataatgtcttctacgcagatgaatacttctattcacgtctaccgatagtgtatcagcggttagcacagggaggggtgagactagcagctaccctaaacaggattttcggttgaagctgaagttacagcataatgattggtctaagcctgtcttcatattagattaaaaactgcattattgaaacaaggaaatagcaatcacaagccccgaacacggcaatgctctttcattatcaaacaaaataaattatgtttactcacaaagtttcttcaaacaatagtaaccaagcagagcattattatcaatatgtttacaacacacacacatcaagccagggttctcgaactctttcatgagaagaggtcttcaagcttttgttctcaccacaagaactgggcacttagcattgttaacacagtaattgctaacacttccaaggaaagtcctgtccatacacacacacacacatagaacataagacacattatcatctccaaaaccatcaaagtttaatctacgcagtacacacctttgtaatgctcctttaccatggcttccaaccacaagcatatcaacaccaagcttctcagcagcttcacatatcgcttctttaggatttccaaattccaacacctttcttggagtaacctaatacacaacaaccaaaccaattagttccaaaacacacacgaatctgactaatttcatataagtgaagtcaaaccccagtctcagcacaaattttggttccttcatcaagacgattcaatccagcgttcttatgactctcttgcaatgagtttataagctcaatcgctacaacacataagaccaaaattttcaaactcaatttcaaaaaaatccaaccattatcaacaaaatgaaatcgccggaatccgatgaagaagattacttacgagcggcgccataagaggaagcatagacgcagctgagatcaagatgaggttgagcagtgaagaggatgatgtcggaatcggcgaggctatctttgagatacacgagcgtccattgaagagcgcgtttactacattcgctttcatcaatcgccaccatcacttgcttcatcacgcttttctcttcttccgccatggttttcttcttctctgtgatcgctccgatgacttggtgatttgatttctcttctttgagaaaagtcagaatgatgacgtgtcgattgtgtagaggaaggcacgaggttcttctggagattttgaattattcgatgggcctgatccaatttcgggtttcttgtatcaggtccagagaaagcctataacctcgttgttcttattggctcatcggattccaaattggcggcgaggttacacagacctactcctcaaatccttaacgtactcgtaagcccatatccgatttttcttttcctgtaaatttaaattttcttacaaatttctcaaaatcgcaaaatctttgcctctttcttctctaatcgaactaaatcttaaaactttgctgattgattgattttcgattccggtatgtatctttctttagttttcaattcgctgcttgcttcttccctgggaattttagggtttttagggttttgtaatttccgattgaaaagtttcgtgctttacgagtctctgtaactcaatttttggcagggagaagaaaaatg

SEQ ID NO: 27756 - DNA, 3000 bp, Unknown; identical to SEQ ID NO: 27755
  misc_feature (1)..( 3000): 2750-1469P.txt file - cDNA_ID_2991963; gDNA_ID_2213659; Annot_ID_181800

SEQ ID NO: 27757 - DNA, 394 bp, Unknown
  misc_feature (1)..( 394): 2750-1469P.txt file - cDNA_ID_2991963; gDNA_ID_1591621; Annot_ID_151274
ttgtatcaggtccagagaaagcctataacctcgttgttcttattggctcatcggattccaaattggcggcgaggttacacagacctactcctcaaatccttaacgtactcgtaagcccatatccgatttttcttttcctgtaaatttaaattttcttacaaatttctcaaaatcgcaaaatctttgcctctttcttctctaatcgaactaaatcttaaaactttgctgattgattgattttcgattccggtatgtatctttctttagttttcaattcgctgcttgcttcttccctgggaattttagggtttttagggttttgtaatttccgattgaaaagtttcgtgctttacgagtctctgtaactcaatttttggcagggagaagaaaaatg

SEQ ID NO: 27758 - DNA, 3003 bp, Unknown
  misc_feature (1)..( 3003): 2750-1469P.txt file - cDNA_ID_2991971; gDNA_ID_1620815; Annot_ID_169211
ttttttctcacggattttttattttcttgcaatttttatttaaagttaatttttaatatttttagattaaaaaaattattttttaatatatataatatttttgtttttaagtgttaaagtttaatatgtgtaaaataattggacacaacatcccgtccataatatgaggtccttaagcggtgttctaggttcattaaatattttatacatacaaaattttaacatttttaaaaaagtattttttgggttttcagtatgtattattttttaaatatacataaagttttaatttaagtgttagatttaaatatgtgtaaaccaaaaagaatgtaaataatacatgtaatatagacataactctttttactaactttcaaaaccatactttatataataaaattgatttttgatttaccaaatcaataaaggtacatgtacaaccaattactcttttttttttctttttgaaacaaattaatggtaataagatcaatggtttacttaacttaatagaacttttctttttcataaattttatatttacatgatattcttaatagatgagccatgacttttatatagcaataataagatgcactaaaacatagtgataatattattttagcattttttaaatgagagtgatagaattattatcctcttaaaagctaaattctaacattcattttgtgtatgttaactctcatgctttttgccttggacaaacaaaagctagacgtctaaaaatagttagaaaataaaacatatataagatgaactaaacactttgggggaaaaaaaaattatgaacttaattagggttctatatgtttagaaaaaaaatgttggtgttagcattattttccatttacttcttatcaatagaagctgtccggaatgaatcatttcctgcgctattagcttttggagattcaatggtcgatactggtaacaacaattacctcctgactctaatgaaaggaaattactggccatatgggtggaatttcgactcaaaaataccgaccggaagatttggaaacggaagagttttctccgatgtagttggtataatattaaagagttctttacaatgcttttttgtaatttctggtttatatcatattgtttggctaatcatatagtgaagttctttttttccaaccgcagctgaaggtttggggatcaaaagaattgtaccagcttatcgtaagttatacattgctccaagcgaccttaaaacgggtgtttcttttgcatcaggtggtgcaggagtcgaccctgttacatccaaattgctggtgaaaaaattattgaacttgttatttggttaagaagtggtatatattctaactaattcgggtgtttgtttgatcagagagttttatcgccagctgaccaagtaaaagatttcaaaggctacaaaagaaagctaaaaggtgtagtaggcaggtcaaaagcaaaaaaaatagttgcaaattcagtgattcttgtttctgaaggaaataatgatattggaatcacatatgcgattcatgatgctggtatgcgattaatgactccgaaagtatacaccagtaaattagttggttggaacaaaaaatttataaaagtaagatggagaaaatgaattttttttattcatcaacactgttatatatgtgtttattcacatttttttggtttttgtaaatgtatgaaggatttatatgatcacggagcaagaaaatttgcggtgatgggagtgataccattgggatgtttgcctatgtcaagacttatttttggtgggttcttcgtgtggtgtaatttcttggcaaacacaatctctgaagattacaacaaaaaattgaaaagcggaattaaaagttggagaggagcatcagattttaggggtgctaggtttgtctatgtcgacatgtacaactctcttatggatgttatcaacaatcataggaaatacggtacgtaaatacgtaaatctcctttttataaaaatatatgcattaccaagatcaatacaaaggaaccacatatttagtgatgcttagacatttgaaatctcaggagcgaccataatagttaggtattgtgtacttgtatggtttcaggatttacccatgagaagaatggatgttgttgtatgcttacggcaatagtaccatgctccaacccagataaatatgtcttctatgactttgctcatccctccgagaaagcctacaaaacaattgctaaaaagcttgtcgaggatatcaagacaggacttgcctgatttcttacaatgctattttcatcttggaattaccataattaattatatacgtacttcttctgtttcaaaatctttgatgttctagagaatttttttttgttttacattataatgttctcatttttaatgtaaaatttattagtttaaaaaaaatgttttgaccatttatattttgcagtttgttattttgcagttggttgaattgtgttagataaataataaataatgtttttatctacaaaaaataaaaaatagaataaaggatttttttattttttttttcacaagaataaaggattttcttattagtgtacaatatccttaaacaatctcttcctccaaacacatcagactagtcacgcttctgctcactaaattttattctatttcaaatgaaaagagcgaagcttcttgaactctacagctcttaccaaactactttaaaatcttttcccactgtcacgtttcagtactaggactccacagcatctcgacgatcatatgtgcaaacttcttgaagctcaaccactatatatcttctatatcatttctcatttaaaagttctcctgctggaaaagtctaaacaattcgtctgtacagatttaattttcatttgtaaaattaaccgaaaccaaaagaaaaaggaaagaccaaataagaaatcaacaaacttgacaattttgactaaagtaagataaatttgatcgagtttttttcataaaacatg

SEQ ID NO: 27759 - DNA, 3000 bp, Unknown
  misc_feature (1)..( 3000): 2750-1469P.txt file - cDNA_ID_2991982; gDNA_ID_2926195; Annot_ID_141252
tactcatctgcagcactccacttacctcgcttcacatcataaatccaatccataaactcagccccagtctttacgtaaatctttcctcccaccacatcgatttttcgaacattatcttccgtcatcaccttaacgtcaggattcgccggtagaggtctccaacactgagtctttacatcgaacatttcgaaccaattgatgcccccagagtcacatcctcccattacataaatcttgtcatccaaaacacatgcggaggcgttttccctcttcatcttcatgttggggacatcgccccacgagcgagtaaaacagtcatatatccatatagctgaagacggaccaaaagcgtcacccatatgttcaccatatattttcgaacccatcgttacggttgaatttgaatatgggagagaatgatcagaaggaaccaaaacacttccacttctcctactgagagtaaaccagcgtgagactggttccgtagcggtaacaaaccgtagacagagataaaggcagcagatctccgtggttccgagttgatatcgcgcggagtagaggggttgagagtggaggagagaacgaaaggttttgcagacgagggagagtgaacggtaagacgatttagagagacgtgccaagcagttcaccaggatctcgtcgggaagttgcaagaacaacgacgtctcacatggtaacgacggaagcttcgtttttttctgcggccgctcaacttcttctttggggatcatctttggtggtgatggagacaaaaatcatgaaatggggttcaaatatatagaaatccttctccctgatgtaaagaaagatagtaatgtagtcaaaagaaaaatcaaagggaaaatttatcaagtttccattggaaaagagatatcttactataatctaaattttatttctcaagatatgtacaatagataggcaaactaatagctatattccacgcgctagagtcgcgcgtggatctaacttgcggacggttttctctttcaaatcttctttcttttgatcacaagaggtttactaatagctcaattctagctgcctttatttttaatattaaatttgattaatacaaaagcaagactatatatatcaaaaccttacaataaaactgtgaccagtggagattgaaccaaagataaaaaagctacacaaacctttgaatttcattgaaacaatgctttccagataaaagcatggtcaaaatttacttctagtgttttatcgttctaattaactattgttgataatttaactcaatcatatttttgtatgatatcttcgtaaaatttctatttcaaaatattaaaaaaaaaaaagggacattcaatctccaagagactaaataagagagagtcatcaaaccgaaagacttatacaatgctggaattgatatgactcgtattgtgtaaccatagcatcagaccaccactcagccttaccctaaacctcacttccattgcatcttgtttctaaggaaatctcggcataaaaaattgttgttcccgctctggctttggggttccacataaccattggggagattggtgctcaggcaattctaagcagaaatattcttagaattttgagatcgtgtagtgtagatttggggagaaatattctttttgaataaaaaaaagtaaaatagaaatattctttctaaatttttgaagtcaaaatgttaagagaatcgagaagaaattcaccgttgtttttcaaaaaaagattcactgtagttaatgggttaatgcccaaagaaaaataggagaagaaacccaattggcccacgcccactcaaatcaagaaattaacttggtacgacattatcatctttaataaaattttgtatacagtaccttcattgccatgatcaaatccatattagatacatcgtttgaattatacccttattaggctcaaactcttattatcattgttccaagcaatagatcatcttgattttaagtaagcctttataatgttccacatgttctcatcaactacttatgacactgcttaaaatctgataaaactagtagccagacccaaaaacaacttatgcttgtgcactctaaaattccaaaacaacatactggatttacattttcaaatggtaaaaaatcaaatgtaagaaattgcaattactttggtaaatacaaaaattgcattgagtggagattggaccgttaaaaaaaaaaaaaaaaaaaaaaagcagaccactgtggtctgtctgtactgtagtactctttgcactcgaacccatttatctttttaatattattttttattattataaatctaaaaaagtttttttttttttttttttttgttctcgaagcagtaaaatctactacaacagtcaaagagagagagcaaacatgctcgcttaattcacggaatcgagacgtttctacaaactcaattttatattttcagctggaatccgaactctgatatagaaagcacacaacgttcacctccagtgacttctctctatctctaaatctctcttgcgtcacttaaaaagtcggtgcttcctacttaagtgttcttgagagtgagacgtttcatttctgggttcaagggtgtagaataaacacttgagtgaagtttaaagcttgagaaagacagaggaaagaaaaatgggtcaaagactgaatctagtcttctggatttttgtctccattcttgcctttttgagtatgtctttacactcaaatcctcttttgggtctgcatttacctttgattctctcttctatgtttcactatctcttaaatttgtcttcttgatgttaaagttcgatgctttactttttgtcctgggttaatctctgtttcactgtagtagttcttgtctgaaaatctcgaatctgttagctttgaactacttttaggtgtttggaatcgacatttgagattcaaaagcagccatttttgagacttgttttgtggatttgttgcagattttggtatg

SEQ ID NO: 27760 - DNA, 3000 bp, Unknown
  misc_feature (1)..( 3000): 2750-1469P.txt file - cDNA_ID_2991990; gDNA_ID_2926057; Annot_ID_196150
actcgtcctcgtctctttttcacctttaaacacttcgattcccggaaacgtttcatcttctcagctcctgaacgcgacaacaatgacaaatcctccacagttgtcgccagacacgacatgacgatctcggatgtcgcctacatcagatctctccccgtcaacggtttgttttgctacacgcgtggtgattcgatcgcggtttgtaatcccaccactagacaaatagttaaattgccagatgtggaatccaacggaagagacgtatacacacacgtcttgggtatgatccggttcaagaccaatacaaagtgttgtgtgtaatgatgttcgatggacacgacgccaatcaacaagatatccaacaggaacacttcgttttcacgctaagctctcaacaaaaagagtggagaaagattgacataaccaaagaagaagatccttaccgccacatgaaaggtgggatttgcatagatggtgctatacactatggagttttgtatagaaaaatagctagatttgatgttagaaccgagaagattgagttcattcaaggaccagaagactttaatgcaatctcatgttattcaacacttataaattaccaaggaaaattagcatgtgtagcgtttgacccctactgtaacactgagatgggtatgtatattctacaagatgttgagaaacaagaatggtcaagcatcataacttgtgatgtgcctagtgagtggggagatttgtttgaaaaagagagatctttgtgcaccggaaagattcatacgggcgaggttatgattgtttccacacctgcgaggttaaagtcatatatgccattttttgttaactattgtgatataactagggagagtattagaagatgtgagattgatggaattgcggattatgagtttagacgtatccatggaattggtaagcgtactcgtgaaatgttgtgttttccaggtcacattgagaatattatcttctttcattagaccatccgcaacgaggggttttagagtggttcttagctttttgattgaataaaattaaatcaataatgctttctattacaagaggcgctcttatgtaagagcggttgttactttctaaaagatgttgacgtgtcaatggtgtagtattttcttttttatgaaacacaaaaaacattatttcccttttgttcctctcacgagcatcaattcttcatcgaactcatagttaccggcgttgttttgaggccactaccatcgtctctctccgtaatcctctccatcatcgtcatcttctcagtttcgaagcattttctcctttaataggtaaaattatgtaattttcgtttgtaaacaatgttgaaattgtagaagttggaattcagaaagtgttttttatcaattcattagcttttgtaatatagtcaatgatggattcattagcttttgactgaagatttaaagcttattatatattgcataccatgtgttcgatgatatgcctaaatgaattctgtctacagactctttgattttgtgtattagtttcagagaaatatgtatcttaagatgacaaattgtaattctaaatagtatagtttcagagaattctgattgtttgttggacgatgtaatcgaaagtggaaacgctacaagatttggtcccttaaaagatggtttcatgttcgaaacctcaattggtttatcaagaatgtgagtttcagtcttgttcctttcttttagatgaagttcatttcttgactctcctcactttactcttattaagtttttttttagaaaaattaagaacctcaacttaatatactaccattgatcatgccaaaacttaaaattcttacccaaactcttaacaaaactttcaaaatcaattcataaaatattactaaaagcctttgctaataacctaccattgtggatgctcttagcttctcctttctttggagatatatattttcttttgtttaaaagattttgctttggttctatactatttttatagagcctcatgagactaatctttgaaagtgctttagcaaagttttgtcttgcagtttgtgagtttttttttgtcatctgaaaatatatattgattaggatgagaccacaacaaacatcaggttggaaacaataaaacagacgcaccataactactcttcacctatactaaacaccttaacgaataaggcctttacaaaggactgctatttgctgatgcatcttcaataatcaatctccactctggaatcaacctcaaagtatccaaaattagagccgcttgatatctataagatggcaatgcttttggtcttaaaacaggaccaatcaattccgaatcttgcaaaccaacatacaaagcatggaatggaatatcagacatccatcctcagtattaattagcctaccattctttctgaagttttgacttcatgagctcgtcagctttgacttcacctcagtggacacactgccagaaaaatacacaaggattaaagcaagattcacctatatcaaacacttagaaaaagggattagaaccatagagtttatttcatcatcttgtggagaaaactgactctgaagatcagatacagaaatatctcacaatccttagatgacaaacaaaaagaaacgaatgttgggggcgatttttggtacttctgctggctttaccccatttgggccggctctgaacaaaaaatgagaagagcttcacttttgtctaactgaatcttttcaaccaattatgtgccgccatttgctaaactttctgtagacagaaccgtacatgattattctctcctccttggttggtcgtctccatcaaggtaagagtgttgtgttcaaaacccttaaacccaactgatcaaacgcatacatacataactccgtcatcttcgtctttactccaaaattccagacatttgaagcttttaagcatctgggtatttgatcttctatccacagatcatagaaacccaagaggcaaatg

SEQ ID NO: 27761 - DNA, 3003 bp, Unknown
  misc_feature (1)..( 3003): 2750-1469P.txt file - cDNA_ID_2992000; gDNA_ID_1620553; Annot_ID_160369
cttgtaagactcatatcttgaaacctcgataagctctaaatgaaaatggagatgtgctgtgaagagaatcagactttgaattgtttcgtgttgatttagttttgtgttgttgttgttgttgaaacttgcaggtccttaagattctaccttgcaggtctttaacttgtaaaagagtagagaagaggtctggtttatctttggaggggtttctgcgtgattattatctgccaggtacaccagttgttataaccaattctatggctcattggccagccaggaccaagtggaatcacttggactacctcaatgctgttgctggtaaccgcaccgttcccgtggaggtgactgccatcatttcttcacttagttcttagttagcttgtgagtgttgattagtagtcattagacgatggttttagctttagttggctcctacgctgctctaagttgccatgtccatatttttttagggttcttcttaagaatgttgaatctcatagagtcgtgtcaactgtatgataaaagggtttagggtctaggtttgaaataagatttgtatctaggttagattatcacataaaatcagaataagaacatgacaatttcacgagcgtaagatttctcatttttgcttcatagagatatgagtcttattaccactatttagtctgagctaataagaagatgggttggatcagaataattttttccgtagctgaaagctggtgaagtttaaaatgctattcaggtggggaaaaactatttgtgttctgattggaagcaagagcttgtgacattttctaagttccttgaacggatgcggaccaataaatcgtctccaatggagcctacttatcttgcccagcatcctttgtttgatcaggtatataagtaccgagatgtttgatgtatatgtttgtctgtactcggtgtgtgtcatactaaacctatggctattggtttaacacgaatgggcagataaatgaactgagagatgatatatgtattcctgattactgttttgtcggtggtggggaactccaatcacttaatgcatggtttggcccggctgggacagttactccgttacaccatgatccacatcataatatacttgctcaggtaactacggtgaaagatcttttccttacgtgagctgagcatggctcttgtctgtgctcgctgtctttaatgctatccaatatatatatatgtatgttctgtaagtgtttaacaacctttttcttctttgatgttcttgcataataaagcctgatcttctcgctggattgaagtttgatgactctttgactaaccaaagaaatcgtttggcctgcaattcatatgtttctagtttacggaaacttctttacttagatgctttctccttctactgaagttttgatatcatctgttcttcaggttgttggcaagaagtatataaggctttacccatccttcctgcaagacgaactttacccttactctgagacaatgctctgcaactctagtcaggtaagctttttcattccgaagtcaaatctcattttttggattaaacatacaaccgaaagctgactcgattcttctgttccaaaactgggtggtttcaaactatggttgaaggttgatctagacaatatcgacgaaaccgagttcccaaaggccatggagttggagtttatggattgtattctagaagaaggtgaaatgttgtacatccctcccaaatggtggcactatgtcaggtccttaacaatgagtctctcggttagcttctggtggagcaatgaagcagaatcttctagctcgtagcgaatggatttatttttaatctctgtttcaggttctaagttcacgttgtgtctttatgtaagaagaaactatgtagagaagaaaacaactgctccgagcatgaagatgtttgtttggtttacgtctatgttgtaaaagacaattgagagctcttggtacagacattttttaggtattggtaatgtttgtctttgtttcaagtaagaaatggtttaatcaaaatctaatcttcaattagtatcttccttttagttggcttatgtcattgtaattgcacttatcttgttgatatcattcattttatatataacttgcgacctaaccaatgctttggagttcgtgggtgattaatatactcatgccaaaaccaataattaatttcttgacacgtaatacccgcagcaactgagctgtcgcatgacaagccaaaaaaccatcaagtttaaagaaacaaaatccaccaagatgagatttttaactcgcaaagatttttgttctttgggatgtaacattaaatagtagacgacagattttatgcgaaatacaaaaactttgagaaaatagttttaaaaaagacatattgtacccctccaggtaaaaaagatctagtccaacacctataaactttgaaaactctactagcattaaactttggacattactatgtctcgcataatcgcctttaggaatgctaaggacaaaaacatgttttacagttattgtctgtgagcagtagtttcatgtggctgccgtttattacgaaaccgtcggtgctgaattagagacacggacggtgaaaaatcataaacggtaaatgcttttacaaccatttatctatatgctttgaagcccaatcttagcccaagccatgatactagaagccgaatcaaaagctaatatagggcttgattggttctccctctgccacccgcaaacgcagcgtttgcgggtggtagcggttattagcggttggcaccaatcatagaaaccgctagataccgctttggaccgcttgaaatcaccagatttcaaaagctccttcccgcaagcgtttgcggttgcgggcggtagcggttaggttaaaaaaaaattaattaattaattaaaataattatgtcttccacccaaaccttatacttattcttatcagaaaaccctaatcaatgaaaccctattctctcaattatg

SEQ ID NO: 27762 - DNA, 3003 bp, Unknown
  misc_feature (1)..( 3003): 2750-1469P.txt file - cDNA_ID_2992012; gDNA_ID_2926225; Annot_ID_142518
ggaagtccagagcaatcgtatgcaatcttgagccaccttcatcttttggttgttcgtgcgccattcatctttgctgcagactataagcatttctactgccagtacaatgaaccatcatatgtcaaaaagttgaagcttgagatgttgactgctgttgcaaacgagagcaacacttacgaaatcggtaatgatttcaaactatgtcaatatggaatctgaagctagaaaacctttcttttccggctctttgattggactaattcgtacttttttcttttcagtgacggaactgtgtgagtatgctgcaaacgttgatattgcaattgcgagagagtcaattcgagcagttggaaagattgctttgcaacagtatgatgtaaatgcgattgttgatagacttcttcaatttctggagatggaaaaggactatgtgaccgctgaaactttggtaaactatcatttgaactattcacggagatgattggccatcacattgatacttatattgtttacattttcataacaattccacttgtctggttcctcttctaggttcttgtaaaggaccttctaaggaagtatccacaatggagccatgactgcatttctgttgttgggggtatcagcagcaaaaatatccaggaaccgaaagccaaggcggctcttatatggatgttgggtgagtatgcacaggacatgagtgatgctccttatgttttggagaatctgatagaaaactgggaggaagagcattcagccgaggtatttaggcatcacttttctgtttttccttgctactgaaattatggttccatttatgcgtgagaatgaggacttgctcattagtatatgttcccaatttgtgccattgagcaggttcggttacatctcttaactgcggcaatgaaatgctttttcaagagggcacctgagactcagaaagccctaggaacagctctagctgcaggcattgctgattttcaccaggtttcttcctatctccccttccaaatttctctttctttttttcaaacccattggcctattagatcactaattcaacatttactgttggcataggatgttcatgaccgagccttgttctactatcgggttctgcaatacgatgtacacgtggcagaacgtgttgttagtcctccaaaacaggcggtttcagtctttgctgacactcaaagcagtgaaatcaaagaccgtgtatttgacgagtttaacagcctttctgtgatataccagaaggtatgtttcctgactttactactgaagccaatgtagtagtatgcattcattagcctacattactcagaggtgttccttatatgttttcataataaaatgactttttgcagccatcttacatgtttacggataaggaacaccgaggaccctttgagttttctgacgaagttggaaatatttccatcacacctgaagcctccagcgacattgttccagctcagcaatatgaggcaaatgacaaggacctgcttctaggtattgacgagaaggatgaaaataaaggagtttccaataacaatggttctgcttacacggccccttcattagaaagctcctctaatataacctcacaaatgcaagagcttgcaatctccggccctgccacatccgcaactaccccacaatcatttggttttgatgatctctttggtttgggtttatcaaccgctcctgctccaacaccatcaccgcctcttttgaaacttaacgcaagagctgctttagatccaggcgccttccaacaaaaatggcgccaattgccaatatcactaacacaggtttttttcccacaacttttagtaaaagtcttttacttgcgatgctactttttcagcttccaagtacattatagccttatgaaagacgacagtttaactggcttttcttcctcttttgtcaagatgcttaacttagcacgaggatttttaacattagttcatgatcgtaatccttgaatttcttacactgttaggtgcatttggagttgtaatttgtatcatgtttctaaattcataaattctcggggattttgactcctgagagtttgtaactttcttaacttcgtgtgcaggagtgttctgtgaatccccagggaatcgcggccttaacagttccacaatcacttatcaaacacatgcagagtcattccattcactgtatcgcatcgggcggtcaatctccaaacttcaagttcttctttttcgctcaaaaggaatcagaaccatcgaactatctcactgagtgtatcataaacacttcatcagccaaagctcagataaaagtgaaagcagacgagcagagtacgtgtcaagcattcacaaccgtatttgaaacagccttgtccaaatttggtatgccttgaaaagcattcaatcaatagaattctctggatggatctctacacttgttgtaaaatgcgatgatactttttcgagttttgtagtttctctcacctttgatttcgtttcgttgtgttactaagatagtttgtttgaggtgttatgaagatgtactttttatccttagattaggaaatttcaaatgaaactatatcaacaaaacctcaatacacgttacgttgcaccatgtgatctctctgaaatgtaatctcggatcatcataagggtcgacttctggatattgcaagatcaatatatgaagttgtgcaatttttcaaggtcaccactcggtcactaaatgaaataaaagttttaggcctcaaaagtaagatatgtataaataaggggtaggtttggaaaaatattatttataaggcgaccgaagaaaaaaaagtcaacagctttgctttttttgttttgttatgtttttaattgtcgtgagtggttacgatttcttcaatttcgtaaacttctaggggagaaacaagggagatagagaagtgagagagggggaaaccctagattcgatctccattcgatttgattcgtttctcgaatcgaagcgatg

SEQ ID NO: 27763 - DNA, 3003 bp, Unknown; identical to SEQ ID NO: 27762
  misc_feature (1)..( 3003): 2750-1469P.txt file - cDNA_ID_2992012; gDNA_ID_2926225; Annot_ID_203467

SEQ ID NO: 27764 - DNA, 3000 bp, Unknown
  misc_feature (1)..( 3000): 2750-1469P.txt file - cDNA_ID_2992026; gDNA_ID_2926221; Annot_ID_203309
ttgtcatgcagactgcgagttggagtaacaaagaagttcaatggaaaataactgaagctgagctacgattagaagttactaagctgaagaaggtacactctaagagtttgttgtaacgtggtcactcttgtcactttgttttgtgcttggacagattaagattactagtaactagtcgagtctggaatattaagttggttcgttactcttaaaagggagctcagtttgactaagagttcccattataatttccctcccaacctaagattatatttatttttgtttttttttctcataaaattgtcgcacatgtttctctagttagcgtcatggctagaatttttgtttttgcagaaaatagctaatatggaaagtacgactaagggttcgcaaagccagtctaatgtggcttctcaggagaaatatatacctggtaatcacacaataacatgccccttttttttgttttcttcctcttgaaattctctgcgtctaaatagttgtaagtgcacgcctgcagctcataatatctaccaagagcatcatggacagtcaccttcttgcagcttcagacatcaggtgtggcttagtgctccttcagacacattgttttggtttagttgaagtattgtttgttttgcaattgtgttgatgtgtattatgcaaattataaagttcgttaccatccatttttcgtagggagatctgctaataaacggtggccgtatatttgacatagatggtggtagacaaatattattatatgcccgtaggctctcaggcgttggtggaacgtttgtgcttacgcaagtaagcttttttgttttgcctctcatttttcttttttatcttataccagtaaaatgatgcactatacgacctttttttttaatatattgcagatgagcctacattcgccttgtgagattgatgatattttgttgcctcgtaccactagagcaattaaagatcttcacctttcccctcacaataatgggcttgcagtatttgggtctctaggaaaaaaattatctgttataagcttggagagccacaatactgtcttatcttatgatctaccggctgcaccttggtcttgctcgtgggatctcaaaagctctcaccatatttatgctggactacaaaatggaatggttttgatatttgacatgcgtcaaaccacgggacctttcgcatcgatgacaggcttaacaaccaatccagttcatactgtccatcatctctctggcaattccactccaacttctgatgtccgtaccctcttatctgcttcttccatcgggctgtgtcagtggaacattagtggtagcgagggaaggtagaggtcacacatcacagaagttgaagaattttatcattgcatttttgaggctctaacatgttataatttcggtttttttttcctttgtctagcccatcattagtttcggaaacgggaaacccaggtgtatgcatatcctcctcgtactgtccccgcagcaatcatatagtagcttcttatagaccaagagttggatcatctgatgatacagtcccgactcagccctcattgactcaaacaggagtcagtaatagtaatagtaatggtgtagatggatttcatgtttgtcacaagagaagaggtgttgattcgtattaccagaaactatcctccacacaagctattgtagatcccatccgtttgccaagaacagcgattatagactttggtggggaaaggaaacaactttttgcatcttgtgacgagtccactcgggagctcatcttgcaagatccttcgacttttactatttctcaacggttgccattgtcaagtcatcttccgcttcaagatgtgaaatactgtcacgtcaatggttcggatctgctcggtctcttaacggatgatagattgcagattcttaggaacgaatctccatgaagattaaaaaagattgatagtcttgcaaggatggtgtttgttgaagagaaaacatgtatgtaaagcggctaactagtctatctatcttttgtaatctggagatgctatagagtagcgagccattacttaaatattattatcttagttatgaacctattgctgcaatgcagcctgctccttttttgtatatacgtattacttaaatcagtttttttttctttatcactggtggattaagtaaatctgtaaatgagaatgaaaaagcatggaaaaagagacgtatttatatgacgcacaaaaaaattgacagaattttccaaatagatgaaaaaaatccgacctgccggaatcgaaccagcgacctaaagattacagctactactacagtcttccgctctaccaactgagctaaggtcggttttgttaagctactgataatagtttattatatacgttaataacttgttggagaatctaatcaagtcctgattataagaaggataaagaaaagggaattagaaaagaagacattgattccgattggattctgcttttttcttttcacgtttccgattgtttctggaactttttgtgagcctaaggtttatctctctcttctagtcgtcgattctggtcatcgaagattccaatcagctaaggttacattcatctctctctctctctcgttgtcttggttttgattttggcagattgtgcttggaatcaacagtttcggttattcgatatatgagtactgttaattctagggttctatcactttcctcttcggatcttttgcctatgggttccagaataaaagttttagggttcttcttccctttattgcgaattaagtcatatgcattgcctctgattgtgcgaatcatgttgtagttccaatctttctcttaatacgatgagaataattgtagttagttgctaatgaaccttggtttaacaatctgtaggtaaagtgctatatctcgtttcccctgtctcggttcaagctttcaagagaattgtgattgattctataagggctctttgtcagtacaatg

SEQ ID NO: 27765 - DNA, 1670 bp, Unknown; identical to SEQ ID NO: 273
  misc_feature (1)..( 1670): 2750-1469P.txt file - cDNA_ID_2992029; gDNA_ID_99849; Annot_ID_147373

SEQ ID NO: 27766 - DNA, 3003 bp, Unknown
  misc_feature (1)..( 3003): 2750-1469P.txt file - cDNA_ID_2992037; gDNA_ID_2214579; Annot_ID_186438
attgatttattatttgagttaatctaataaagttgtcggaaaaaacggaaaagtgagaagagaaaaagtcgaaaattcagaaacggtttaaagttaaccaggattccggtttttataacagaaccgatcggttttgtaattgagacgaaaacttctgatatcacttaaaaacttcacagaaacaacacctcgatctcatcgaagctcctctctcttacatatcatcacttcacatcaaccaaacctacttctgtctctctctctcgctctctatctctcacgctctcacaggtttttttctctctctgtctctctcttgttctccatttgcgtctctgtttgtttgatgagtttctgaatgttaaatgcagatgtgttttggttttctgtggaagtttttatatctctgttgattgagtttttctctgatgttgttgggctccaaaaaattcgaaacttgtattatctctcgtttaggtttcgtgttctctgcattgatctgcttctttaatttgttaactatactcacgtatgtgaaaaatctgaactttgtttgttaactctaatccaaatcattagaaaaatgcagattgagatttctctaatgcagtgcttgaaattttggaaactagggttcttgttataatgtttcaagtagtgaacttatgtcaacttgtgctttaggtttgatctgattcttaaattttgtttcatatgtggtctttcttacaatgtttctggatttgttgttttagtagaagaaaaaattagaaaggttgtgagaatggcggctacagcagcttcaagcttacaaattgctacacgaaggccgagcatgtcttcgcctagcaaaattcttaaagcaggaacctacattgttggtgccaatcctggaaacgcttcatgggataaactttcatgcactcgccaattatcaaaccttggatgtttgagaaaccacagtgctgttccaacttgtaagagacccttttctttttccacaagggcaatgtctgaatccagtgaaaacaaggctccttcagggcttccaattgatttgagaggttggttggcatatctttctttgaattcagagaagacttggtgctatctgaactaagcaagtgtaaatggtacagggaaaagagctttcattgctggtatagctgatgataatggctatggttgggccatagcaaaatctcttgctgctgctggagctgaaatattggttgggacttgggttcctgtaagtcatttttggttcagctgcttttagtttccttcattgctaaattatactaacctatgaatggatggtctactaggcacttaatatatttgagacaagcttgagacgtggaaaattcgaccagtcacgagtgtaaggacttacaacatgatcttgtctggttttatgtaatgggacattaatttttccatccatgtatattcaggttgcctgacgggtcattgatggagattaagaaggtttatgctttggatgctgtgtttgacaatcctgaagatgtgcctgaagatgtgaaaacgaataagcgatatgcaggatcgtcaaactggaccgtacaggtatagattagagatacacaaacacgcctgcaagttaacatgtgttactccttaatgctttttgttgcttaaatcaggaagctgctgaatgtgtgaaaaaagattttggaagcattgacattcttgtccattcccttgcaaatggcccagaggtagagaactcgtatcgattattggttacagtaagtgcattgtgttgtatacaaactatttcctaatggtgttcacatgtgggtttaggttagcaaacctcttctggagacatcaaggaaaggctatctcgctgctatctctgcttcgagttactcctttgtttccttgctgaggcattttctgccaattatgaacccaggcatgtaacaaatttcgtatgtctctttattccttgtaaatatgttttcttatttggttctctatgatgatttaggaggtgcttcaatatctcttacttacattgcctctgaaagaatcattcctgggtaaggatggcttcttcacaagttattcaaaggaacaaactaatgcacacacataacgatgtcaacacattctcacaagtatctctttcattctgtgcaggtatggtggaggtatgagttctgccaaagctgcactagagagtgacacacgggtgagtttacaattctgtttcgtaaactcaaagatgtatcggttagaagtctcttagtccaaactgtgttttcaacataggtgcttgcatatgaagctggaaggaaatcaaacattagggtcaacaccatctctgcgggtaatccatctttccctcttacacgcctcgtggtacaaataacacgcctcgtcttttgaaattataaaagagtactactgtttgggtttcaggtcctttgggaagccgagcagcaaaagccattgggttcatagacaccatgattgagtattcctacaataatgggcctattcagaaaacactgaccgcaggttcatttccttcaaaccatcacctctcttgtgcttgttttttcttggaatcttacgctttataaatggcgatgatgtagatgaagttgggaatgcagcagccttcttggcatctccattggcctctgccataaccggtgcaaccatatatgtggacaatggtttgaatgcaatgggcgttgcactggacagcccggtgttcaaagaccttaacagcaagaattagagtcttgatcgacgactggactcgagaaattccgtgttttcgtgagcttgcttgtttctttatgagttagtatgtacggcatatgttccccatcggctgtctttttttttctttctttaagagaataaattatggttctaggttgggtcatttagcaactatatatgtagtgatggattattattcctcttatgattgaaaatttgcaagtgagaaaaactatcatg

SEQ ID NO: 27767 - DNA, 3003 bp, Unknown; identical to SEQ ID NO: 25274
  misc_feature (1)..( 3003): 2750-1469P.txt file - cDNA_ID_2992057; gDNA_ID_2213619; Annot_ID_180904

SEQ ID NO: 27768 - DNA, 3000 bp, Unknown; identical to SEQ ID NO: 2520
  misc_feature (1)..( 3000): 2750-1469P.txt file - cDNA_ID_2992061; gDNA_ID_1620550; Annot_ID_160284

SEQ ID NO: 27769 - DNA, 3000 bp, Unknown; identical to SEQ ID NO: 13588
  misc_feature (1)..( 3000): 2750-1469P.txt file - cDNA_ID_2992072; gDNA_ID_2214638; Annot_ID_188205

SEQ ID NO: 27770 - DNA, 3003 bp, Unknown
  misc_feature (1)..( 3003): 2750-1469P.txt file - cDNA_ID_2992079; gDNA_ID_2936582; Annot_ID_194949
gatggtagatacgatttgaacttcaagaaacagccaaacgatggagctcacgtactgtcagccgagagtcttgctgacctctacagagaattcatcaaggatttcccaattgtctctatcgaagatccttttgaccaggatgattggagctcatgggcttcattgcaatcctctgtggatatccaactcgtgggagatgacttgttagtcactaacccgaagaggatagctgaagctattaagaaacagtcttgcaatgctctactcttgaaggtaaaaataaaagtttttatattattttctcttttctaatctcaattctctagaccattttgacaaaacccccgttattggagaagaatttcaatttgtttgtaattcatggtttcacaggttaaccagattgggacagtcactgagtcaattcaagcagcacttgactcaaaagctgcaggctggggtgtgatggttagtcacaggagtggcgagacagaggataacttcatcgcagatctctctgttggtttagcaagcggacaggtacatcaaatcctctaaacctgtctgtattactctctagtgtttgcttatcattctctgttttgtagatcaaaactggtgctccatgccgaagtgaacgattgtcaaaatacaaccaggtagttaactaatatccaacttatgcttaatactatactctatataccacatatctgaacccttgagtttgatttatttccattgcagcttctccgtatcgaagaggaactcggcaatgtgcgctacgccggtgaagctttccgatcaccatgagaaattcgagaaaggcactcattggcggcttttgcttacagaattaggtgaaaccaaatgaggtcctcctagtatcagctccgttgtagctgtctctgaaaagtatcagattttctacaaaaacaaataaaagaacagctttttcactgagtcttctgttgtaatgtcattgataccgatataaacatggatcgaccaaagcgtttttcagattaatcagatgctcagagatatgtcgatttgattgttccaatgattaagaagagtgtttcattcgtgttacttaatattagaaaacttgttcacgcttgagccaatggtattggcatagttgtcggtcaacgaacaaattagttggcgttattccttcagctaaacggaacaaaaaacaaatatacaattaacaaaatactagatacaaaaagaaaaacaaattaacaatttatgtatattatttctttatagataaaatatttacatctttttaaataatttaatcaatttcgaataatcccaaacaaaactgaaaattaaatcgtaatggagaaaaacctctgattctaacgattaagacttcggatctgaaggaaattatgtggagctgtgagcaagttctattatccttacgccaatttggctttgaagttaaccattttaaattttaatgataaagttgagtataacacgtaatggccttaatggggaaaacatttgagtcacgtagtagttattttccgtgtttaaatttgatttcgccattaagcataaaatcaagccatcatcatggacatgaaccaccaagaaacaacaacgttaattgatgataacatattccccttttctttgtagtaccttttattttcttaacaaatcaaaataatcatacggtttgcaacaaaaaaaagttgaaaaaaacttcttaatttgaagttctcacaatgtataagcacaaaacactaacatttaacttggaagctcagtatttaaaatgcaaaatataaaggccacaactacgataaacaattaagataaagtactggttaacataaaaatagcgaaaccaaatcgtttcaggttatgccagccccgccaaaaaaaggtggctacggatctttggtgaccaatttattagctatccatcaagtctgatagtgatagcaaccaatatgtacgtccatctttatatttattgaaaaataatgatatattgggaggtcaaaaatcggataagcttatgattctttttgtgcatttgcattttatttacccaacatatggaccataatattatatcttctgtttattatggtctatatgctagaatgtaataatacatcggaattttgaaagactagaaacattgctttgaaatcctgtgtattttgcacccaaaaaaaaataaaaaaaattgtgtgtttatatacgcaatttattcttaaccacatagtagttgtaaattgtaaacgcaaacagtaaacataaaacattccatattattgacgttttacgtttgtgtttacaatttgcaattgatgtttgatgataaacgcatcgatcgtcaatatttgatcaacaagactaagatcattgaatgcgactatgcgaccggttgatttattaacagtatccatttggtcctttcaatatcacaaaaatcttaaatttccttttttttttaatatccaagcaaatattctagggtatttctcaaaagtatatgtattttatttatttgtaatcaactgctccttggaattacacttgtatatattttctgatatctaaatacctacttctactttatcaaaaaaaagtttacctacttctaatcaatcttagacacaagtacataaatttttagaccatgcgtttgcgatcttgcgttgacagtcgtacgtctaccccaaaaatcagcaatgtacgtggattgcaactatttgactttttgttccatgtgcaacttaatctgtcaagaaaccccgagaaacaactctaatctcttcactaataaaataatccgacgagcataacgtgtgccatcaacttaatttacaaaataagaaaccttcttaaaaattaatcaaaaaagaaaaagaaaagttaaataatcaaacctataaatattcgtaacgactacaaagtacaagaaagtctcatttgagaataattgagcgataaagaaacggtatg

SEQ ID NO: 27771 - DNA, 3003 bp, Unknown; identical to SEQ ID NO: 27770
  misc_feature (1)..( 3003): 2750-1469P.txt file - cDNA_ID_2992079; gDNA_ID_2936582; Annot_ID_143774

SEQ ID NO: 27772 - DNA, 3003 bp, Unknown
  misc_feature (1)..( 3003): 2750-1469P.txt file - cDNA_ID_2992082; gDNA_ID_2096294; Annot_ID_195499
aaaccaaacaaccaaaaaagaaagaaaacttcaccataacatatgttgcttgttccatatcatttatagttagattgtagcagcaacacaggattcagctctagccttgtcagaatcttccaagactttcttagaggctttaataacaatatgattagtgatgtaatgcttgcgacaaacaggcatatagacatcagctccaccaataagctcagttctggtgtcacaattctttcttaaagtgaagaaagctttatgtccacagacctcacaccttgcagttagcttagtcacagaatcagctattggtataatgtcaagtacagccccaaaactcctcctgcacatagagagatcaattccacattttacagtcaacaaaattgttaaacattgaagtaaaatatcaaaatcacagctttggtactaggatgaagcaccttaaatagtcaccatctaggccagcaacgatcacaattttaccatcatcatcagcgactttgcagcaaaactcataaagatctccaaagaactgagcctcatcaataccaatcacatcaagctgccaatcattttaagagaaaaacacaaattcaatacagatccttcacaattaagacccgaaacaccaaatagagcatcgaatttattaccttgttataagcatctagtccgaatttctcaggaaatgacatgagatctggaagagcccagcaagggaatccaattccatcatgtgtcaccaccgaatcttttgcgtatctcgtatccttactcgatttcagcatcgcaacacttctgcttaaccaaaacacgaaattaagaaatttacggagatagatctaacaattaaaatctacggagatagaaaataaactgtaccttccgtcgctgatctctgacttgattcggcgaaggagagaggtcgatttcccagaaaacataggacccatgataacatgaacagcacctgacccacgacgttccagatcggagagaaaatctccggtgacgtcactgtcgagggttttgatcaaaaaggaagctttgagagtcgccatggcagagacttgagaagaaaagatggtttgtagatgaaaaaagggagaagggttcaatttgcttgtggttttaggtagcgatggtgaatagcttgttgaagatatatatacgcggacatccagaagttgaacaaggaagaaaattgctggagaagatttgtcaaagataagggtttgaaattttgaatgggaggttttttcaaaaaaattacatctttggagggaaacagttttttagagcgaatctttttattttacctctctcttttcataaagcggaacactataaacggaatttaaaaaaaaaaaaactgattttctattggcttattttttttaattaatttccttaatgtatagatcatatgaaatttttaaacatgtgtgtttaggctttgcaaacacattatttaagagaatgataaatatttttaaaaaatatatccacataaaatggtactggtttttggtcatatattccactaatgttttttagaattattgtttaaattagaaagtcgtaaattcgtaatattcgagaaaacaactttctcacttgggtttttatcctacaaacccatcattttgtgtgtgtgcttttgaatgtgggcttaaacccaaaaccctgaggctttttttggccctgagatgaacatgttcacaaccttcttcaagtgttccaatacatacacgttcattgctttttcgtagttgcaatttttatttaatttttcgtatgtagttgcacaccttcatgtctaaagctacaaattgttgaaatgttttttccgatcacctcaattaatgtacaatcgtagctcgttgtattcctaaaaccgaactagaatacattttcatcgccaggttattacaagttaaatcaatttgatcaaaattcaaacatagataaaatgtacaccagtaggttaaaactaaaccaaacgtacacaacaagcctaaattatccaaacaacaacaactctcagttttgctttaaaaattctgtgaataagacatccttaattgcaaatttatttttaattacttctttttaaaaaacttttagtggcaccatcctaattagtaattactttctatataattcttctttaagatacaaactaaaaattccgcaaaaagaaacatctaaacattccaatatattaatatttttttgttatgacaaaagtaaaatttccgtgtaataaatggaagggaaaacgtataaaaagtttagtattgaaaaagagaaaaaaaagaaacaaaccaattatgtaataatgagtataaatatataaatacagacatatcttcttcttcttgcacacccaaaaagcctttgtctttctatctctctaccaaaacttctttctttctctctttttctatatctctagagcgcgttactgcgcgtcgtgagtatgtttttattgacgccattgaaattgggttaaatcggtttgaatcggattgaacaaaaactgtattaataataattcttcctctacttttctctctgattgattccaatcttctttcattttcttcttcttcttcttctggggaaggggcaggttaaaattatgccatctattcaaatcgtgcctatcctcagatcttaactcttttctctacgagattcggcatctgggttttattcttcttggtgggtttttttttattcttcttcttctgatctcagatttcccctgattggtttttttttttgctaaatccgttttatgttttcccgatcaaactctcctggcagattctcggatctgttgttttctagattcaatctgaatttgattttacgtttttgtctttgtaaagatgtttccttttgatcagattttgataatccattgacatctctgattcaagcaaaagctaattaactttgatccgattcctttgtgtgtgtgtgcagagcaaaatg

SEQ ID NO: 27773 - DNA, 3003 bp, Unknown; identical to SEQ ID NO: 27772
  misc_feature (1)..( 3003): 2750-1469P.txt file - cDNA_ID_2992082; gDNA_ID_2684204; Annot_ID_137280

SEQ ID NO: 27774 - DNA, 3003 bp, Unknown
  misc_feature (1)..( 3003): 2750-1469P.txt file - cDNA_ID_2992092; gDNA_ID_2926258; Annot_ID_143153
ggatcgtctagctctgattggtcaggctcagcccaatcatatgacttaacgtgcattgaaccataaacaagcttgcttagcactgtcatgcctggatgattatgaagtggtatgatagacccaggtggcatgcagaaaattccaatctgacaaaataatgatcaaagcataataagcagacaagtaaagcaagaatattgcatttcagaactttgtttaactgcagtaaacatgtggagcgtgttgctccatggcttaggcaagggccataccaggaaccaaaatgattagtgatgatgagaaatttggtttcaacatgagaaatctagcttaggtacttctacttaacctaaactttaatgcctacccacttactctcaagatttcatagccaatttctgactatatcgatgaaggcagactcaaactttaaaaggtgaaaactacatgcgataccatcctgcaagaatgtttgctcaccgagaagctgtcacactcatgtaactgaaggtattttattgctggcagagaatgatggtttccattacgctcgttcccaggaccaggccaattacgcaccaattgagcttcctgttcgagaccaacatcagacggcttgattttctctgaaataaaaattacaagtatcacgtatgtctgcaagtaatagacacgataaacaacagttgtctaatgccacaagaaggtgcgataaccaatatagaactgcaattcagacataacgagcaacacagtgtgcctaaagaacataatggagcaagcaagattgcagaaatagaagggaagaaaatttgcaagacagtgtatcaataatgtcgtcgtacccaagacattgcgaaccttgtctaaggcctcctcagacacaggaccattaggtgagagagatgacttgcaagtattgaaaagcctctgaataaaatatggcatgatacaaaaagaagacacagctccaagttcttgagcttctaactttggtaaccctctttcagcaaaacggctttgagttatcaaaacagcaccagcgatcaccttcttcaatgattctcaagcactgccctgaaaggagagaaaagaaaacaactttaacttcatatagagctccataatctaaacaaacacatctgaaaacaaatattacaaatccaggagctctgagtctctcacaaagtagtgtttttgacgaactctaacaagtgaatgattaatcttttttcttacatatcgaattcaaaatcactgcagctacctaaatgggctcactcaatgaagcaaaagtattgccaggaatagaatttaggtcagttattttgcaaaactgaatcatatatcgaattgaattgaattgaattgagctgtgcccagcaaattctctcaattcattgaagaatattacaagcagaaaaaaaaaaaaaaaaaaacgatttgaaaacatactggaacaagagaaatgatgatttggagttgttgcagcaagtagaagaagaagagcagctaaactagaagcaggagtgctacagagaagagaagagaagagaagggaagtttcaatttcaatagattaaaaaagagaagagtgagagacctttcgagcagaagagtgaaaatccgaagaacggcgacgaggagatgtatcggaggaaaccgatgatggaaatggttttttagtcggaaggaggaatcagaatttgatctcttctttttgtttcttttgctttgtgagtcgtttaaaaacgtcaagtctcactctctctccccttacttttcaaattagtcaatttcaaccccctttgctttttaagctcgaataaataattccacctatttttttaggacgagaacaaactgcaacttttttggtagtaccaacttactagtacaatttcgtatacattcattctcagattctcttgctaagttataagaatggtaaattatttaatgtgatttttgctatttgtgaaaatagaagataacgagcttattttaaaaaacaaaaaaaaaactataaacttcaaagattttgctatggttattagattatgacattaaaatattaattttaatagattttcattctaaaatgcatctagatttcaatattgatttccaagtagcaagaaaattatttaaaatcatagttaaattaaattaatcttaatttgatttaaaattaaaaaaactcaaaattaagttgtcaaactacaactgactgccacaaggttataattttaatttaagcgattgcaaatatagttcaagaaaccatgcattaaaaaaaaaaaaagtggacaaattttaggtgactttgggtatttatggtcatcaatgtactctattagtggacttgaaaactttgaaaagcccaacatttgttctggctctttaatctgagacctaaacattgctgatttggtccatctaaaaaacatagtcaaagtccgtttgtccggaagttttttctaccaattccaaaaggcctttctcggcctatatgacctttgtgttggtccctgacttctcctatgactaattgctgtgccctgtgtgccatttttttttaatcagagttttctcattttatatatcaacaagttatacaatttcggattaaattccgacatcgtcaaaaaggaagaaaaaatccgaccaactctaatattattggttatagtttttgcgtgttaacattttttagttaatatagagatcaaatttgggccaaaattatctacgagaaagtctgtctcaactatccaaagttaaagatattttcgctgagaagttaaaaataatatttcgatgggcccttcaatcttagctaatttactaaagtaacccttgtcgaaaaatcaaaaatataaaatcgcaaaacgaacacggcttagtttatcttcttgtctctctctcatttcttgttattatccacgaacgaagaaaaacctagaaaacagttgaagaaagaaaatcacaagagaagccatg

SEQ ID NO: 27775 - DNA, 3003 bp, Unknown; identical to SEQ ID NO: 27774
  misc_feature (1)..( 3003): 2750-1469P.txt file - cDNA_ID_2992092; gDNA_ID_2926258; Annot_ID_204620

SEQ ID NO: 27776 - DNA, 3000 bp, Unknown; identical to SEQ ID NO: 13123
  misc_feature (1)..( 3000): 2750-1469P.txt file - cDNA_ID_2992094; gDNA_ID_2214599; Annot_ID_135524

SEQ ID NO: 27777 - DNA, 3003 bp, Unknown
  misc_feature (1)..( 3003): 2750-1469P.txt file - cDNA_ID_2992105; gDNA_ID_1620401; Annot_ID_155957
gataattatggtcaaaggagttataaggagagcttacaaggatgttggcatgagcatagatgatactgccattatctgtatagatgactacatcagctttgtatccgtcattgaaaagacgatcccacatatctcttgtggctgtcgaaacgctgctatgcccaagttttttcttgagtccatcagattttgatggaagaggaggaggaattggcacagaagatgaatctgcagatttgaaagattgatgaagatcaacacaacctgtcaccattctcttgtttagcttatcttctcttccctgcatcaatcaaatgaaaatatatattgtcgattctttagccacagataaacttcattgtcatttctacacgaaatatgtgactcagacaacaattttcacagcattatgtaaccagatctcatttacgattacaaatcgaataggataagaacaaatctctacatatatattcacacgaaaatatcaatcagaaataacaagaattcttgaaacagatcgatagaaaatgtaagaacaagaatcaatcaatgctctaatttgttccgacatatataccttgaaaagattcagaccacagaatcaggttgcttcgaagaggcaagtcaaacaaaattaacgagaaaatcttctccttggtagaaagagcatgagaagaaactctctctatagagaagcttgagagatcagagatctcttaccattatataaacacacacactcacaaaaacaatagaagacgacaaaaaaaatcccaccgaaaggataatttattgttttaatttccttattatctcacttttttcttacttttgtgttcaataatttgaagatattttcttggttcatatcatcaacagagacacccacctgcgaaaattacccgagaggcgcgtggagtctacggttacgaaacggacggctgagaatccacgcgccttaacggccttttttcctcgttcttgaaaaagctttcgtcaagttggttttattatcggctttatcaattgaaacacgactctgcatgttttttttttataaatgatttaatttaagagccgtacaaaaacagatcagtgtgtcctttgttttttttgttcttgttcggcgttacacagctcataattagctgttcgttttttcaaacttttatccgtattattatcctttcttcttcaaagataaatttagattagtcttaattttaaccacatgatcagatactctcttcaaaaatgttaactaatcgtgaattatgttgaggtccgcaaaattgcgtcataaatattttactggtctctcttcatatttcttagcttcgcttgaattgattgttacccttttttccctttttttctgtgtttactataatgccacgtttcttctatcgaataatctaaaacagaagaagaagaagtcaaaatgctttttatatgatcattttcttgtatttttttttagtttttgatcggagtaaagttataagaacttcaaaaaaaaaaaaaaaaaaaaaatgcatgatgatgccaatctttttctaacttttaaagagtattggaacataatacatatatcatgtaaactgatatttttaattgtaattttatatcatatacggatttaattgtaatttgagcatcacccagttgtgcaattgtagttatcacagaagtgcacattgcaatgttgttgaacaacagaaataccttgacatcatctcactgacccatgcagccatgcctaaacttggaccagaactcatgtaaccaccgggtaatgtcaaacctgaactctgaactctcaggttagttaaactcatctcttgttgtttccttaattctaaatcatcactaaacctgtattaaagtgtcccaaattttttagatagagatgtatagatgcacatttaacccacctgaggaagaacttattaactattactggaataacaagatcaccagagaatgatgatccaaataaaggcaacgaatttgaagttctactacattttcttccattttctccattattttgcaaatacataaacacataaaacgaatttatttccatttttcccagaaatatataagaacaagctaaaacacagggatacatgaatcctctcagaaatcagagcatcgaccacgttgttcccaatcgccgtaccgagtcggttcaggacctctaggccctccaatctcaccagtatcttcgttcacaaactctccacctccaccaccttctccttcctcttcttcttccttctgcatctgcagattctgttgaagattctgatctggcttcacgtcccggttcagatcctgattcggagatggagcttgcggcggaggaggtgtaccggagcttagaaaccgtgacactggctcgaggaatctagaggagacggatcggcttggagcgatcaaacgtacgatgttgttcgtcgccattgttagatcagatgtgtcggccaaatcaagaaagagatccgaccttcacggtttgtgatagtatagggttcgatagtcatttaggttgggccataattggataataagcccagtagtatctaggcccaatcatttacatgtttataaataaattaagagaattagagagtaaatttggcccagtataattatgtttaacaagcccatcaggagctaggcctaacatgtttataaaacaaataggagagaattagagggtaaagttgacgtgggctgatttcgaacccgtaacctttttatatattagacctcattaccaaaaagcgattcgattatctcataaagcgtcatgtgtttttttgtgccacatcaacggctgtgagtggttagtcactaaagaaaagtcacaggctgttatatagtattggcttcgctatttattttcgtctaccacgagaaaaacaagtcgtaattcttctatcttgatatcttcaccgcctgccgatctctctcaatctccgatcaaccatg

SEQ ID NO: 27778 - DNA, 3003 bp, Unknown
  misc_feature (1)..( 3003): 2750-1469P.txt file - cDNA_ID_2992115; gDNA_ID_1620498; Annot_ID_158768
ttttatccacaactaagtacaagatacaaatttaacgatggtttctgagtgaaagctgacctataacatggagtttggttgtccaagagcatgattctttaaacaggcgaagacggtaaatcggagcaccatatgtaatctacagagaaccatctaaatatcactttgcattcaacaaacatagacacataagaataaaaagtgatacgaaaatattaccaggatatagactcctttatccttgaggaccctataggtttcatcaactgctttcattataggtgaaagaatcaagaaagaaatagaaaaagaagaagctagaacagataaacagaaaccattcaacatttcatgccaagtacctccaaacctcttcaagcatttgtgttgagtattgcctcgaattactcccacactaatacatgtaaaaagtataagacttagtgagaaatcgagcatctagagataacataagtaaagagaaagtagacctcactcaccaaaatggagtctaaggttcctgaaaacacacacacaaaaatccaaaatgttatacaaatgaaacataatgcattttaggctagtaatgatattcaaacaagtagtaagaacacctttatcgataacagcatcaaaagaagcatcttcaaatgctttcatatcacgcacatccatcttcaaatctgttttatttttcacgttatccaaaaatacacaagttcatgctaaatctagtaatatacccgattaaggcagacacagatatgtctcttcccaaattgcaacattaagtagaagaatcaacaaatgtaaaaaaaaaaccaaaaaaacaacgttacatttgagctgaggacgatcagagtatttcttaatcatggtatcaatcaccactgatgatatatcaatactgactacatcttcgtatccatcatccaccattccttcgctaaacgctacattaaaagttcgaaacaactaatgaccaaaacggatccataatacacacaaaactgtgaaatcaaaagagttgttttcttctatatacctgagtttccacagccaatgacgaggactcgttgattacgttgaggaacatagagattgatgagaggagctaaaggtgaatacttctggtaccaatcaaacggttcagattcattcttgtaacgatcgtcccaataccattgctcgctgtaagattgcgttggtgcctctgtagccatctccgtcgttaacttttccgatttcgcttcactctctgatcaaaaggaagaaggagacagaagaaagatacacgagcgaccacggtggtccaaatcttccacgtggcatatttatttaataaccgaccggttcaccggtttgattaaacatttaagattaaacccgttaaaaatcgaaataaccggaatacaaaccacttttcagcagtcacccctaaaagcaaacacaccaaaatcaatcagagggttacattgtttgataccatgctactcttctgcagtagcattgccactgcctttcttagttccttcctactgcataactgtggcaaaatatcacggaacgttatcgaactagaatacacaccattagaaaccatctcctggaaaatgtctaaggcggtattaaaatcaccaacttgacgaaacccatgaatcaaagtggtgtaagtaattacattagcaactattcctcttcgatacatctcgcagaaaagattcatcccatctttaacccttgttgctttacagtaaccattaatgagtgtattaaacgttgagcagctcttggatacctttctcgcctgagctagtttgttctgcttgcagagtccatggatcattgagttataggttatagtatcggggactagacctctacggatcatctctgcatataatttttcagccctacctaacgagctgaatctgatcatcatattgtaagtttgaacatcaggttgcaatccactgatgaggagattagtgaatatattccctgcttcgtcaaacttaccagccttgcacagtccatggatgatgatgttataaccagctgtatccatatccatgttactctcccgcatgaccttaaacattttcaaagccttttctagtttcccattatcgcaaaaagcagagaaagtattgatcaggaagctgctcggtctgggttatacacaatttcaacaccttgaagatccaattccactgttttgtgtgtgtttttgatgaagacacttcatctagattattagtgagtgactttgaaaatcatttggcttgtttaagactcttggtattgtttctcttcattgatatacaaactagaagatgcacactgaatcttatatatctgaatcaggaattaaatttcaacaagtaaaaattctttttcattatttccaagtgatgcttatcctcgtttatgtgtttttcgttcttttttttgggaatccccttgtttaaggggtgtagtatatatgcttgctaagttgatgtttattcttgctttttgattctgcaacctcacagggcataagtctaaacatggaaaaagctaaaatccttacaagcaaagtataaaggtttgatcctaaaaaacacaagattcattctataaatagaaatttaatatactgatgcttatctgtatattgactagttttctctctcgtttctgcatatcttctcatggccagttccggtgattatgatggtatcatctcactctccctctatattcttcacttaccctatctgattaaatacactgacgtaccagccgtgaatggtatatgtatatgtgcatatggtcctatagatagaccattgaatgatatacatcataggaaaccaagtgtgatagttaagatttcaacctttggatgatgttgttgccctgttttgttacggatagtgtaattagattgatttctccttccacttaaaggtaaaatgtataagtaaatttgcacaaaggtaacttttgtgagaaatg

SEQ ID NO: 27779 - DNA, 3000 bp, Unknown; identical to SEQ ID NO: 11359
  misc_feature (1)..( 3000): 2750-1469P.txt file - cDNA_ID_2992127; gDNA_ID_2214492; Annot_ID_133478

SEQ ID NO: 27780 - DNA, 3000 bp, Unknown; identical to SEQ ID NO: 11359
  misc_feature (1)..( 3000): 2750-1469P.txt file - cDNA_ID_2992127; gDNA_ID_2214492; Annot_ID_183697

SEQ ID NO: 27781 - DNA, 3000 bp, Unknown; identical to SEQ ID NO: 2142
  misc_feature (1)..( 3000): 2750-1469P.txt file - cDNA_ID_2992143; gDNA_ID_1620494; Annot_ID_158682

SEQ ID NO: 27782 - DNA, 3003 bp, Unknown
  misc_feature (1)..( 3003): 2750-1469P.txt file - cDNA_ID_2992152; gDNA_ID_1620388; Annot_ID_155517
atcttatctccaacggaaaaatctcactcggtacaagccatcctaatggaccccaagaccaaccaaacccggccacgtagacacacaccaaaaccacaaccgcgtaaccatacccttccttgatcacaccgtcgtgaacatcagccaccataacgatcacaccaatggtaacttgcgacacgagcatctgtaaccctccaatcaaaaacagagtctttctaccgattctgtcaacgacaagcatcgacaacaacgtcgacgaggttcccacgattccagtcacgagggtcgacatcaacgaaccactctctccaaacccaacggttctatacaaaaccggtgcgtagaaagcaacaacattgattccagtaacttgctgaaagaaaggtatcaccaaagccatcactaactcaggcctatattttctttgaagcagtttcaaaaacgcgtttgaatctgtatcagaaccagaactcgcttcaacgagatcagtaagctcatcttgaacgtcgttagttccacggacacggcgaagcataagctcggtcttgtgaacatctccggtggtctggatgatactattcggcgtttccgggagaaacagtgatcctaaagtgaggattgaagcaggtattgcagctgtggctaaagagattctccaaccatgtttgatattttgggtttcgtagtttattacatttgcagatagaaatccaattccgatacagagctggaaaccattgctgattgctcctctgtattttgccggcgccatctcggagagatacagaggaaccgactaaaatataaaacaacaaaccagtcaacatacagagaaaattgaaacatcattaatcaacttgtcttttgttacctggttagcgaatccaactcctacgccgagcaagagacgcgcaataatgagcatagcaacgttttgagcagagccaccaagagcagcgccggcgagaaaggacacaccgccaagaaatatagagggcttgcgaccccatgaacgagtcacggacgaagctaacagagtagcgatgagaccggaaacgtatagagaagatgtgaaggatgtaagaagttggctattgaaaaggcagtagtggttattgctattgcctcttcttcttctatcttcttcttggagcttatacacttttgggaaaaatctttttagaaatggccccattgacatcactccacctacatatttatatagttacatgtttgcatttatgtttaggtttagagaaccacaacatttcatttaaatattatgaaaaactaaaatgttttctacttcaaaaatatgatttattctttttgcaaacgcaaacacaaacacaaacaaaaaaaagaaagaacatatatatcctaattagcaagaatatatatgtgaacctgaaaccccgatgtcgtagccgaagatgacaccgcccatggcggccatgacacatgaagccaccacaaaataagtaatcttcccgccagatactgatttagccatggcttcttttcttgcttcttctgctaccatgtttacctagagagacactcaaacacaacacacctactattcaagttcggtaggtgtttttagatcctgtatttttgtatatcaatcatccaaaggttgagtttcaaggtagacgacgaaacttgttggaccattggagtgctttaattgacttgagtgtgggacttatagtttttgtttgtttcggttctggctgatgagatatcgaaagtggacaataaaagacatgtgaagaaagacttttcactgcctaccttcattatcttcctcttttttttttttttttttttttttttttttttttttttttttttttgaaaatcgatagaagaaaaagatggctatacttttttcaacgactgaatgataaagctctttcgatgatattggacataccaagttgcaaactttgattgtttaattccataatactgatattttgttttggaatttgactatgtagaaaaaccatcattttctatatataaatactgatatacatgtggaattaagttggcagaataattactatcaatcatgtaaatttatggaatcatttttacattcactttttataattataattttatagtaaattttattttttgcttttaattttatagtaaaataattttactctatggtcaaaaaacttaaaacattaaggggatgataagctgtgaaattagaagcttaggtcacaaatgagatactaaaagaagatgaaggaccatttttgtgaagagaaaaacttattacacgtggcaccaacagaatatttattaccgtcacagtccgtgacggagagaatatctgtgatttgcaaagggaagaagactttcctattcaaaattcaaagccgactttttttttacctaaacagcaataatatctttttttctctgctccagggggaaattaaaaaagtggaaccttttcatctcctggagcgatcaatttctttttcatcatatcgctgactctcgtcttcgtcgtctttgatcgtatcgaggaattgggtttagttcgattcgatcatcagctatctcaatttttctggggattgttctaaaggtttgatgatcggattgcttttgttctatttgttctttttgattctcgtatatgattgattagagaatataggattagggtttgtgttccttaaaagttatctccttttggcagttaaagacttggtttttattctttgtcaagaaattcattccatggttgacgatgaagtcaaggttttggttttcttttgtgtttcttctgtatcaattgtatatgattagattgaagatgatttcatgtgatgaagttgattacaacggataataccgcttgtgaggttgtatcataatttgctaagaataagtatatatcttcccatttgtttcttgatgcaaacaggtttctagtgacttgtttaaagtggttggtattggataatg

SEQ ID NO: 27783 - DNA, 3003 bp, Unknown
  misc_feature (1)..( 3003): 2750-1469P.txt file - cDNA_ID_2992154; gDNA_ID_2214633; Annot_ID_188036
gctagtaaaaacagtccaagtcaagtttaagacttgctccggcagatccaccacaggacaccaaaatcagagacatgttcactaaaatcggaggaatttgtcgccgagaaagcaaaaagaaaacacaatccaaggttatggaatctacgaacctgtgggtggtggatctatacacgacgcccctccattttcggaacttgctcttctccaagctaaatcttatctgaaatagaagatattgtgttacagactagtttactgagtccggtgggttacagggcgggcggcgatggagcagagtcctcctcaaaaaaattccagtcttcttcttatcgctcgatcgacgaattccaggcagtggcattgactattgctgcatttctttctgggtaagccgggcctctcggtataggcccaaaccattctaaggcccaaaccattatattaagttggttggtccaccaaagtcagcagcagctagaacaagagcgactctgcagctgctcttctcccgcttccttcctgttagttagcctcagagatcctcgttccccgataatggatttgggaaaactgatccagctgtctgcgctgctgtgcccatttcttctatcattacactttagaatcgctggggcctccgcccacatctactcttcccagcccttccacgatgtcggtaattctctcctcctctacggtggcagcgagggcatcttcgcctcttcccgatctttaatcaggtatattctatggattacattttcaactcttttgatgctctctactctactctactcatcctccctcctcactgcaggtttgagaacatcactctctggaggacaattaccggtaagggccaccgcagcaatgggttagttcaagcagtgatctttgaagcctccgatcgtaacaatatcggtggttcagcttacggaggccaaagatctatttgctgcactccagatctggccaagcttcaaggctgtaagcagggtgagatcattaggattccttctccacatgaccctcaatggcctatcctcttacctgtccgctttaaaggaaaacgctcgtctgctaagatggcagacactgagattcttatcaccaagactggaatctataatctcttattcatatcttgtgatccacaacttaagggcctcaaaatgaccggaaagactgtttggaaaaatcccgacggctatcttcctggtaggatggctccactcgtgaatttctatgtctatatgtctctcgcttatttgttgctcagtgccgtctggttcttccagtatttgaggttccggatggatatattgccacttcaacattgcattactgccgtcattcttctaggattgcttgagatgctcttttggtacttggattatgctaattttaatcacacggggatgaggcctttagcccttactacatgggttgttaccattggtgccttgagaaagactgtttcccgcattctcattctctgtgtttccatgggatttggggttgtcaaatctactcttggtggtctcacttctaaagtcctccttgttggagttacttacttcatagcttctgagatccttgatattgctgagcacgttggcatcattgacgatatgtccggaagatcaaaactttttcttgtccttcctgacgccttcctcgatgcatttctcatattgtggatatttacctctctttcgaaaacactggaacagttacaggtatctctttctttctaaatatagccatcagactctgtaagttgtaagggttttgaggcaagattcatcagaccagctataaaattctttattactgcagatgaaaaggacctcggtgaagctggaaatttaccgcaagttctcaaatgcactcgctgtgatggttgttgcctctgttgcgtggatagtgtatgaggtaccatcctgtcaagcctgatttgatgctgatttagtaaactcaaatcttacctctaggaaacaaactgctcaactaaaactggctttgtttcaagctaggaaaaaagaagctccttctttcttggaatatacccagcttgcttgcctgatgatttgtccccgtgcaggtgtatttcaaagcaacagatccattcaatgaacgatggcagactgcttggactataactgccttctgggatgttatcgcattcttgttgctatgtattatttgctatctctggaccccctcgcagaactcccaaaggtatgttacatcaacttaaaaggttttgatacctctcgggcataccaacaaataagcatggttttgtggaaacggtttcagctgagcatgttgtgggaagtcttggctacatgctagtggttcttatgtagtggtccaattttggtgttcctgggtgtgatagggatgctaatatgaaactaatgatggacagatatgcatattcgggagacgtggatgaagaaaacgaggaagctcaatctctgacaggggggaagcaagatggtgatattagcttagttaagcaagagaagaatgcggagtcggacagggaagaagatgttgaagaagataaaagagagtgaggagagtcagtatagaaacgacgtggcatctgtgtttgatcaagagttgacgaaaatataaatatcagcaagaggtcagctatatagcacaaagcaacgacgtaatacatatatatgatgtaactaaaggatagtaactgtgtgtttgtatttgtttgtttttttaatatcagatccaacattttttgagtcatctctaacccttgtctgagtgtgagatttgcctaaaattgctgtaaattacattattgatatttttattggtggttaaaattgtgaaacattaatttgtcaataatactagagtccagacacggaaacagggtctctctctcttgttgtgtataatttcaacaccgctattacagaagaagagtgaaaagggagagggagcttcctgctttcacttactatg

SEQ ID NO: 27784 - DNA, 3000 bp, Unknown; identical to SEQ ID NO: 10148
  misc_feature (1)..( 3000): 2750-1469P.txt file - cDNA_ID_2992162; gDNA_ID_2213627; Annot_ID_132078

SEQ ID NO: 27785 - DNA, 3000 bp, Unknown; identical to SEQ ID NO: 6163
  misc_feature (1)..( 3000): 2750-1469P.txt file - cDNA_ID_2992185; gDNA_ID_1620852; Annot_ID_51005

SEQ ID NO: 27786 - DNA, 3000 bp, Unknown; identical to SEQ ID NO: 6163
  misc_feature (1)..( 3000): 2750-1469P.txt file - cDNA_ID_2992185; gDNA_ID_1620852; Annot_ID_170349

SEQ ID NO: 27787 - DNA, 3003 bp, Unknown
  misc_feature (1)..( 3003): 2750-1469P.txt file - cDNA_ID_2992185; gDNA_ID_1620607; Annot_ID_161807
tcagcccatcgataaacacctttacgtctttgacctcgagacccggacttggtccattgctccagccaccggagacgttccacacctctcttgcttaggtgtccgtatggtgtcagtaggatcgaccctctatacctttggaggccgagacttttcacgccaatacaacggtttctactcgtttgacacgacaacaaacgagtggaaactgctaactccggtggaagaaggacccactcctcgtagtttccattcgatggcagcggatgaggaaaacgtttacgttttcggtggagtgggtgctatggatcgaatcaagacactagactcttacaatatcgttgacaagacgtggtttcattgttcgaatccaggagattcctttagcataagaggaggagcagggctcgaagtggtgcaagggaaagtatggattgtgtatggatttaacggatgtgaagtagatgatgttcatttctacgatcctgctgaagacaaatggacacaagtggaaacattcggtgtgaagcctaacgaaaggagtgttttcgctagtgcggctattgggaaacacattgtgatatttggaggtgagattgcgatggatccacgagctcacgtaggtccgggtcaattaatcgatgggactttcgcgttggatacagagacgttgcaatgggagaggttagataagtttgaggggactccgagtagcagaggatggaccgcgtccacgactggaaccattgatggtaagaaaggacttgtgatgcatggtggtaaagctccaaccaatgaccggtttgatgacctcttcttttacggaattgactctgtctgattaagcgcgatttgatcatgaccgtttgtgttttatttgtttgtgtgtctgtgtgtctgtgtgatgcaataagggagggatcgtgatacctctatatgatccttcgtcagcttatccattttattttttattttctaaatgtatctttttgttttttgttttctgttttgtatgtttaatgtttcgtggcttgttcaataagatgtttattttccgaattttttttgggtatgttacgttatactacaaacaaaaatattatgattttgattttctctaaagatgaaatgaatagaacaagaagtcagcagatagggtggtttcatctacttttgtggttggtaaatgtggttagaaaaatttgcattgaattgtaagtttctatccataaaagaaacaaaaaattaatgtaatcaagagtggaaagttaccaatggattataaaaatcttgcaattctaataaatcctcatgtcaacggtacagataagataagggtaaggggcaaacaatcttgttggttcaaatggcaagtaaacaagggcaattatatccacctaatccattgcgttttctttctctaatcttagaatctactttaattgtatgtttttctctttcatctactttccaaaactatataacctcatttctatactttttatgcatttattttgaaacccctttatcaaaaaaaaaaaaggggccaatttttcttcaaaaatggttactttaagattctcatatacagtgtgccaaaaaaaaaaaaggtacctaaaatatttattatttcagatattggtcaacatattatctgtaacagaaaaatgttcacgtgatatttgcgaatcacatttttctaggggcaaaagtgatatatgagaatcttaaagtaaccttttctagaataattgcccttgtttacttgccactgtagtcatttatttaatttatgttcaaaaacagattacctacctaattcaccgaaacgaaaaattttgttgccagtttttgttttttttaattttttttttcctctttttagtttaccttctcttttttctgttcaacattaaactagaaggtagagtaataaataacgatggatggatgtgttgaaaacgcgctttatgcatgattcatacgagagcagctgaggaggagacaaaaaacgggtctacactatatcagacttttttttgtttttttggtgtaaaactatatcagatggaaaaatatcaaccaaataatgtagaaactatatcaaacttttaacaaaactatcaacccaatattttatattttattaaaaaacaatactaataatttttccttttcctcgtttttttttttctgatcaaccattcacacgttgtttttcgtaattatgattctgcataatgctttctctaaatcaaaaactccacgccacggttcaactgatgtagtgcctccaccgttgtcgtttgactcgttgcagaggacaccattatgcacttcgattcattttcaaaatcgtctttctctactgaattgttactccatttaattttttggtccatagataacatagaccattatactagtatgttaaatgtatacttatcagttaccgcacaacattaattcttaaagagggttcattttcgagaattgagtacaacactaccattaggccaaaatgcgagaggcaaaaaaagatatagcatatacttatcatgaataatgaaaatcttttccatccaaataaaaatctttcttctcataaaagaaagaagagaaaaaacaatgagtttgcatatctttatcctgtagaatgataatcttccccatcaactactgtagatcgtcaacgtgtactcacttccattatcgatcgaatcatcaatttaatgcctcgtgaatcacgagatcatataatatgacaagaaattcgtcccgtttatctactgctggtcaataaatactcatgcaattcccaccaatagatcactcaaccaatttcttctcaggttctctcttcacacctctccccttctctatgattatagatagtatatgatttggttaaattatctatatttcttttttgataaaggatttggttaaatttttaattgcaggtaatactcgtaagatttatcaacacaagcaaaaaagatg

SEQ ID NO: 27788 - DNA, 3003 bp, Unknown
  misc_feature (1)..( 3003): 2750-1469P.txt file - cDNA_ID_2992193; gDNA_ID_1620482; Annot_ID_158368
ggatccatacttttggagaaacatattacctgactcaaaattttttttcaaggggctagattaagctgaatttatatagataattaacactttcaagtatcatcaccatttaactcttccattcaaatgcaaatacttgagtggacaggatagtcttaatattgataaagtaatagaaaaaataaagacgttatgaacaaagaaaaaccactaaatatattgtagctcagttaaaggaaaaatatatataccaaattaaggcttaaacgataaataatgcatataacccacttttcagtgcctccatggataaaaggatttagcaactttaaggaaaaaaggtttataccaaaaaaaagttcaaggagaaaaagaccactgatttacaattgttgggtagtttgaagtcccaaaatgttaaaaattcaattaaaaaaattgtgacagctaataaaaatggaactttagctggattcggaagatttattttattgaaaataaggattctgttttaattatagctctaatacagttgaattggttttttatagaaaaacatttctttattgaattttcttcaatggaaaaatatcattttagagtgaataagtacaaaaaataataaatgttgctttcaacaaaaaaaggaaggaaattttatgttttggctttgtatatttgctttcaacgtcattaaaacgctttttaaaccggagatatgcatcttgttttcctcatttacaagttcacaagatgattaattacattacttgggtcatgggcttaaaaagagagagtttgggtccaactaaaaaggctcagtaaaatacgtaaatgggcctagcgttatagcgagaggcagagagagaatttacacgacgacgacgtcatactcaatggacgtaaatgtccaaactacaaaagtttttttttttttttgtgtattaaaaaaaaaatctcaagttaaaaacacatcaagagtatattacagcaacttgtgtgttaaatcaccaattgtgaataaatcggttatggaaatcaatcatttttttttttggtttaatggaaattaatcatttgatcgttaagagtgtcactaattcgatacgtcacttgctgacgaatctgcagatgaaataggcatggtatgataaatctcgttaagaataaaatttcacctagatgtttgagtaatttttgtaagatgatgaaaattgtaacatttttcattgaaagaagcaaagagacaagcaacaagacaagagtgtccccacgcatgtgagcaccgttaaccataatagaaaaaagatatcttcatctaataataggtgaaaaaatcttataactgagcaaattttagagaatgaaaatagtgatctgtgaaataattttttttttttttatgatagacctcacctaacaactagaagaaataatataaaaccattattacttatattgataaactcttacaagatcactgtttccataaatcttgacaaaaatgtcactccatatgtttggtgtacaagactagaaactgtagttttgagttatgttattataatgttaaactgtattatgctcaaaattgaactccttttgaaaggtggtttatcttctttactaatcgtttcttcattttctctctaggagctaggtgggaaaaagattcaaccttgtcttagaaaaagaaaaccaaagctaatctttttcttttgtacctctctttcaaggattaacaaaacaaatcgatgaagcccgggttttagtacctaaacatctctttgtctcgtctttgaaaacccccccaagtagatccaacatcattcatatctctctctctatctctgcataagctacggagcgatgtcggcgtgcatcaatggcttatgcagagccgtgactgtctctcttcttcttcttcttctttctttctctttttcctcagcttgctccaatggaaattgccaggttcttgattctctttgcttattattctctggtttatggctatcaaatttgggtctaaatctttagggattttgcatttttgtgtctctttcagctgctggattcatgctcctcggctactgattgtgtctctggtttatactgtggagactgtcctgccgttggaagaagtaaacccgtctgcacaagaggccaagccacaagtccaacttccattgtgagatttagttcctataattagttggatttctctagagtttccaatttttgaagatgcgttgtttcaaaagatagtctagatcacttggtctatcaaaagttttgaactttgaagatgggttttgctgaagatttcatttggttgcattaaaagatagtctagatcatttggttgtatcaaaagttttgaactttgaagatgtggtgatgaaatttgtgtgtgtgttttttgtagatcaatggattgccttttaacaagtatacatggttgatgactcataatgcctttagcaatgcaaatgcaccacttttgccaggtgttgagaggattacattttacaatcaagaagatactattactaatcagctacaagtaatgctcttattaccaactctcttattatagtttcctctttttttggataaaactcttgaatgtatatttttgttctagaatggagttagagggctaatgctggatatgtatgacttcaacaatgatatctggctttgccattcgcttcgagggcaatgtttcaacttcaccgcttttgtaagttttatcttcagcttaaccttgctggatcgaaagcttgaaacctgattggattggtaaatgtgaactttgttttctttttgaatcagcaacctgcaattaacatactgagggaagttgaggcatttctgagtcaaaacccaacagagattgttaccatcataatagaggattatgtgcacagacctaaaggcttatcaacactgtttgccaacgctggtttggacaaatactggttccctgtttcgaaaatg

SEQ ID NO: 27789 - DNA, 3003 bp, Unknown
  misc_feature (1)..( 3003): 2750-1469P.txt file - cDNA_ID_2992208; gDNA_ID_2936585; Annot_ID_195057
gatatcactccaatatcatttggatattgcttctctagcttcaaaaccagccgttccttgtctgtcaattggcgttcctgtgtatattgagaaggtttcagcagtgccattcacaaggcaatttagagaaggaatcatctgaaaaaacaatcgaaattagatgactgacctgactctccatatgcagtcggcgttttaatttggatacaattttctttgttgtatcggcgtcagcagacattagcagggtgaagattgttcggacaacagatttcactttttcctcatcatgttcagtgatacagaaaacttggtttgcttcttcactcccaacaagttcttcaatctccggaatagctcgaatgacactcttaagctcctgtaacattattacaagaagaaacataaatccttcaattctgaaatataagctaacaatcctaaaagtttggaaactgaataacatacataagagacttcatagagctattctccaaaaccaaattgtttctaaagttttggtaatatatccagagaaaaaacgaggaaagagcgagtcatgtgcaacaacaccatgaaccaacataaatacttgttcagcgaatccaatctcaaaccttaggctcaaacttatagcaatagagaaggagacactgcagtcatttactactcatggaatttggactacttgtcaaaattgggaagctaggtgggccattgcataggttcatctcttatgttaaaaaaacaaaaaaaagtaagatatgataaagtatagtgataagatagcaatgtgatacctgaagaggtataaagccacagagagcctcgaattgagtataggccaaagccatctctggtttgtgattgtcgtctttataaagattaggatgagctttgtgcattttctttgctaatttcttatctggatgtgcttgaatcgacaacggccttgccaccgacaacacctaccaaatattttacaaaatttaatcacatttctgcaacacacaacataaaagtacatattcaactccaaatcagacgaaatgatcaaaatcaattcattgaactatgtatagatgtttgtaccttgaacagaaaggggagatcgcaaccccatttctccaaaaccctatttccaagagatttagggttttcggtgatccaggatctaagggtcacgccattggatccatcagcatcctccaagtaactcggaccagactcgtgagtccccatccatagctcggcgtaaggtcgtgtaggatcgatctcgtaatctgaattcgccgcataaaccctgtaaacgagtgaatccgatccaattttgccccaatcgtaatccttaacagagcatctcaatcggcgaagccgtcgtcgatccgcttcacaaccgccattagcctttacgacagtagcgatctccattacaccaaaaaactcacgattacgaatctaaatccgtttctcggaggtaaaaacaaaatatctcaagcataagctaagcgcccatgtcaatggaagactcaaagcttttctctttacccccgaatcgtggatttttttatgttttataaacagaggaaggtatgattgtaaaatcaaaagtatgggggtcaaaagttggaataaaatataaatgtagggttgcgatgtttaacttaagaaagtgcaaaagtgacagatgttcaaagaaatcacgtgttttgccgacggtattaacgtccgtccgttggttgtgggccgtttgctagctgtccacgtggactctaatgatgactcactctcacgtctttaaattattttgtactagtgtaaactaaaccgacaaaatgtaccaatataaaatgttctaaacgttctcattttattacgataattccaaattcactcttttatcaataaatatatctaatgtaagaaatgataaactataatttaaaaacatgaaaaatctattcagaccaataaatcttcatttttgtagtgttgtaaacgtcatacatccgacatcaaacagtaactaaataacagaattggaattttcaaattgtttaatatttatttaaaaaaatctgtttgaattacggataaaataattgaaatattgaatatttcttaataagttttataatcttaattggctattttaaaatatttggtttgggttttacattttgggccaaatgttattagcccattaaaataaaaagggtccaacgccgtttgttttgttctgacggcgcgtgactgtcgtcccattccacgtgcgggcacgtcatcttatatactaccaagtacaactgtacaaggaccaaacaaccagcatcttttgtctcccgtcggaatctaaatcaactcctacttctttctctctttctttttgcaactcccccttaacttttagatttttacaaatttcaaccctataaaaaaattatgacacacccttacccatatgaatcacacttactcataggcacatgatattctctttgtcatactctccactaaatctcaaaattttgagatttgttgttatagacaattcatgtattctattgtttaacttatttcagttcaaccaaaattttcattaattcgaatattaaaaaaaaaaaactagtaacaggccattccaaagagtctgttatcaaaatgtgttttggtactattatgttgaatatttcccacctttcattttcattcataaacttggtgacgtggatttattttgatatacaagtaaaaggttcaatttgtaaatataacaaaatattgggagctatttcgataaaaccaaaacaatgggccaagaattaaaaatttaccatgaacatgagagagtgagagaagaagatcgatcaatcaatcatcaaactctctgtgtgccacatgcattactactgttgacttgttcaataaaggtaaagtaagatcaatccggcgaatcttctttcgttttccggcaccgatctcggtggatctccgattcacatg

SEQ ID NO: 27790 - DNA, 3003 bp, Unknown; identical to SEQ ID NO: 27789
  misc_feature (1)..( 3003): 2750-1469P.txt file - cDNA_ID_2992208; gDNA_ID_2936585; Annot_ID_143842

SEQ ID NO: 27791 - DNA, 3003 bp, Unknown
  misc_feature (1)..( 3003): 2750-1469P.txt file - cDNA_ID_2992212; gDNA_ID_1620835; Annot_ID_57967
tcaactgctcatgactaacaaatccatctacacatctccaaagtgtacaaaattttgtccatttcaaacatattttaatagtttttaccatctatactcaaattttacaattccatggcaaccatttacaactagtataaaccgtgggtctgtaagaataaggccaccacaaaatgttaatacgcaagacatcttcggattcagaccattttccattcgttatttaaaaaactaatgtatcagttaagtaagagtaaaaataggcagtatagtacaattggaccattagtcttttaaaatccactaaaatttaccatttgtagtaaacagtacacgtattaaaataagtttaccgccgcagctgataataaaaagagaggaaacaaaagaggatggaaaaaaagaagtgagaaatggatgtgaaaaaaaaagtttgcacataatcaaagtttgactttattcatatcatccatattttattatctaacttattttttataaatttgtcgtcattgatcactttatcttgcattttcttctacatgtttaacattttttttgttcaaacatgtttaacatttaaaactagttaatatgaaggaaataaacggattgagtgagtgatcagggttaatattatttgttataaaggacacatatggagaagagaaagaaatggtcaggcctcagggctgtgagtctgtaacactgtccatcttctttattgctcccatctgcctctcttctctaccttttccttctttattatatatattcctcacttttctccatcttcttaaatataggcattcccgtcaataaatgtgtataatctcgattagtgattcatttccgggttttaaacattggtaagatgttttttgcaaatccactacgaggaaaacatccaaccgaagtctaaatgaccaagtaatctatgggttgtgtttttgcacttgcacacaatgaaatcgaacatggttccgtagcaccttcagactttgaaaaatataaagaactacgtaattcaatagattgtctcaataatatagcaagacaaaatcggccgacaaacaaaataaagaagaaaacataggggaaacttgaatttcaaccaaggaagacccaaccacgtcagaaacaccttgggaatagtgtaactagatttaaatatttgtgcattacttcttactataccatcaacactcttataaatgtattaccacgacacataacggtcttaattatgatgcaccttttttagcactcccaaagattctctagctataagtatcggtcgaaagtattcattaatgcactatttgttttacctaagtttgaattcatttcataagaatgtgtgttcttaattaattttggcacactggtcgctcactagctattttcttctttgggcatagcatttagccttttagtatatatagaaactagttaatgttaagaaatggtgtttgatcattaatgatttagcaataacttgtatttataaccaaaaatgacaatttgtattctaagattttgtctttatctttttcagcaatgtatttgttttatctcatgtatatatatttttttgtgtgcacttgtgttctcttttgtgttttctcacattcttgtgtggatttttatttttttatttttgtgtggatttttttatattaacattccaattaaatttgattttctaagcagttctttttttttgggttaattttctagctacttaatcaattatcaaacattcttgataaattttaaaaacaaatctttgtttatgtacatgtatattaacttctcttttttactcgtgttggtatgaagagaaaacgatgtatgtaatgtgtacacggacaaaaactatagatcaagacatagcctataatgatttatgctagtgttgttgatgtgtcactatttaaaatttaaatcatgtgatatgtatatgtaggttcaaatttgaaagatatgtgacctaatcaatgtgagcatgtgatccaaacaaatgattagtacaactaatatttttcattttttggacaaactatataatttattttatgcatgatcaattttttgtatatatatttgcaactaccatagacatgtgaatccgaccacaattgttatcagacaggtcatgtatcacattggtgacagaaacaagactaagcccgtaaggtagcaacattgggctcaaccaaattcggcccatgaatttagactagagaaacagaaccggattaaaccggggattcggtacgaggagaaacagccgactgttgtagaaagaatatgccaaaagagtcaaagattcgtgactcatcatctctgtcgctgttccttttcttcttcttcttctcctttttttccaaacttttctctctgttacttacttccattattttcgagcttattcttatcttcatcgcttaaggttcgaattttcgaattcgatctctttttgtagctataccaatcacaaggtccgttctctactcaaatctcgcatattccttatgtcatcactgagctaaatcttttctgtattatgattcaatcgtgtctatgctttgtctctgtttctccggtaacctaattcgttgcaaaattaataattagatagaattcgaatctattgcatgcttaccagatcaattttggataaattgaatccagtaatttacgaaactcttggaacaattagtgttaatcctatgaattcttgttgttttaaacagttagagcaaatctaattatagatgacaggatcttaaaacgacttgtacctaatttctcaatctggcaaaacttaatttattagttagttgattagtgttttttttgtttccaaaattgcaatttattgttaatggtgaatgtttttattttcttgtggtgattgtagcagtagctgaaatcaatagtattaagccaggctagctagaccagcaagtaaatttgctggctagcaggatcctcatg

SEQ ID NO: 27792 - DNA, 3003 bp, Unknown; identical to SEQ ID NO: 27791
  misc_feature (1)..( 3003): 2750-1469P.txt file - cDNA_ID_2992212; gDNA_ID_1620835; Annot_ID_169853

SEQ ID NO: 27793 - DNA, 3000 bp, Unknown; identical to SEQ ID NO: 9860
  misc_feature (1)..( 3000): 2750-1469P.txt file - cDNA_ID_2992216; gDNA_ID_1974092; Annot_ID_180646

SEQ ID NO: 27794 - DNA, 3003 bp, Unknown
  misc_feature (1)..( 3003): 2750-1469P.txt file - cDNA_ID_2992243; gDNA_ID_1620807; Annot_ID_50568
gttccgtggcgaccaagatgtgcggaacagtgaccgaggtcgatgataatgcaattcaccgatatatgttgacataattgttttagtttattagtttatcgttagcatgtgacttatgacatgtgatatatcaatatgtaactcgcaacatacgtacgtgtatatcagattctttttgtcatcttccctgagagagagacactgcatctcagcctctcagctatgtattactgttgatgtcattgcttatgcaatccgaatccaaattgtaaaatcaaagaaaattttctatttctttctatttacattacctgttaattcgtccccaaatatttttgatgtcactcattattacaaaggaacaaaataaggaaccgaaaacagaaataatgggaaaaaagactacttcgacaacttccggcctttttatatttaacgccgtcccactttggaacccaatctatccacgtggagctctatcactggtcattcttaattctctggagttcacaaatttatgcaagaaaataaaaaaattgattttgaccgcctccgagtctttttacaactttttaattcgaattttgataacatctatatatacatttttggagctattttagtaaataaatccttaagttgggacttatttacagtggatgtcattgatatttaattattataactaattaatattcttaattattagcatttctttatctaatatatttccatcaattctaattacttttaaaaaggagaaatcttaggaatttattaatattatactttattaaaaataaatattatagttagttaaacatttaaaatatttaacggaaaaacgttttataatatttataatatgtgaaatgtataaaaattaaataatcatttgaaataaaacttttaaattgatgtgaattataaattttttaataaaaatattattcaaacaaaaaataaaaaaataatgtttaattttaccgaacgagattagatgataagacgggtttataatatttataatatatgaattttaaaacaattaaataaccatttaaaataaaacttttaaactgatttgaattatatatcttttaaattaaagtattattaaaacaaaaataacaaaataatttttagtttcgctgaacggggttagatggtatgacgagtttgggtcgataggtaatacgagacagtatagcatgggtgaaatctattagatatgtttaatttcactgaacgagattagatgatatgacggctttggatcgataataatacgagacagtatatcatgggtgaaatcatatatatatatatatatatatatatatatatcaaaatatcattatattaataaaattaatataattaaaatttgaattatttagttataatctaaattttaacttaataaactgtgtgttattctttctatattgttaaacagtaaaaaataaacatagtaattgtatactaaataatatatatatatatatataagagttgtacatttagaaaatattaaaatgaattatatttatttaatctactaaacaaattaactttttagtttttaaaaaagatataaccccgcggtataccgcagattaaaatctagttaactgataatcttgctgcataatatagccaccactaaatttacggtttactatcagaaatctgttttgttctaaattaaattaaattccaagatctttattttcctttacttgacacaatcgtttaattatttgtcattttattttcttaatttttaacctaaattaattaaaaaaaaagatgacttgacccttatttcattatttgtatcatattaattggtcggtcgtcggtgttatattttcaccggctagtcggtaaagataatgtgcttatatttggtgacaaggattcactaactttgatctttggtgcaattgaagatcagccatatgtatttcaaccttatattatcccccaaatcattccaacttttattttataaacattcgtggccttcatttttccactctgttgttttctcatacttttaataatttcttttgcccatttgtctttatcattcgaagaactcagaaacaactaactcttcattcttgattctcccacttaaacgacggcgtttttgcttaacgtttatgtatgcaagcaaatttacatacttttcgtgacctttggtttctgtgttgtgtgatatttactacgaaaccacttgtcaccaaaggttcttctttctgttagcgttgggttcgtgattccaagatcaatggttgtgaacttcactagttagagatactgaatcaaagagatgattcttccgagaattgggtaaatcttcgattctgattttctgggtaagaatgatcaagacccttcctttattttctttttttgttcttgcctaataattcttattctctgaatttgatttctttcttttaatgactcagaatcttccgtattggatgtttttgttcctgttcttgataatctctttatgactgtatctctacctctggattctcactgtcactgatgttcatgtctaatgaagcttctttaatttagtcttgttcgtgtcactgttcgatatttttaaatcaaaagttgctaactttgtgtcaatgatttgcttaagtaggactattttgagtttatggacatttgattcttaaattctgaggttgcatcagattagggaacttgaatcttggttactgtaaatttactaggagaaacctgagattgactattaactctgatatataacttatgtttgcttcttgcatttgatcttaacagattaaagaacacgtaacctattttcaattcgcgggtttgattccatagcttcttcagatcatacattctcgcaagtgttcgatacgggagtagaagaagaagagtctttctatgctcctgatcatgatgtcttgactctgcttcaacctaacttcaccagcaacgatg

SEQ ID NO: 27795 - DNA, 3003 bp, Unknown
  misc_feature (1)..( 3003): 2750-1469P.txt file - cDNA_ID_2992247; gDNA_ID_2926232; Annot_ID_203722
ggatctgaaagtctcttgtttgacacgagatattaggctacgtaattggatccaataggctttcccaaaaccatacagtgtttacatacggaatttgcggcgcttctggtgaccagtcattagccacaactaagataacattgtaactcataaacatccaacaaactaagatgttcttcgaacttggtctctcctgggatgcttttggcgattaccatcagatttgtagatgtataatggggagcaggattttccactgaccaaaatgcaatttccactaacatcttgtttagtctctcactcttaccccctaaaaaaatgtatatatcagttatcaactaacatgtaaaattgcactgcacatacatatatatatatatatatatatataatatgtaataaaaaagaactagggtttaagtaaaggacaatcacttttgggttcgaagtcgattacatcatccagactgtcaggtttcttctcaccataagcagtgattgacacctcaccatgataacctacaaatcacagagatcgagatctctgggcatggtggtttcgacggagatcgagaaaacagaaaattagatttagaagtaagaggcctatcaatgttttacatttaagcacagtaaacatttaaagcccagcctagcccattaagaggtaaatctaatttgctacgaattcggttgttaattattaaaccatcggtttagttcatcaaacgcaaaccaaagccaataaccgaataatttctcgagaaaaaataatgactttccggtgaagatttttttttacgacggcttctcctgacaacggaaggtgttgagaaagtggcggaatttgattttgtttcctctcctctcctatctaaacaaggtctgttttcgtgagatccagatattcaatttggattcaaaatcgtgaattgggttttggattgatttctgttactggtctgtgtgctttgatctgaatgttgtttcattctctagttgtcagatttactgatgatgggaataagcaaaacggagatcaatttgcggagattgctttccgctgcacctaaccagcaaaatcagtcgaagcttatgcatgtacgtttcttttgatcttcattatatgtaaactattagtctcgtgtttatgttgatgtatgaaacaaaaaatctgcagtatgttgctacattgagggaacaattagaacaactctccgaagaaaaaacccctgaaggccttcccaggtttacttactctcttgttgattcaccattgccattaaaaagattcctgctttttggtgtctctttctaggatcaagggttagagatttgaactggattgcttcgtattatagttgttgttctaaaagtacatgttttttggtgaaatacccttgcaaccattatgagaatgtgcttattttctcctttgatctctttgtccagagttacaaaggctaaggttaatgagtactatgagaagattgaagctgttgcttccaagatagcttctcaagaggtaagtcacctgaactagaaagggacacttcttttcacttgtctagctaggacattaggctcttgttgatatgatactttgttagttacttccccaatttttactagatgtattggtctcaggaattagtttcaggaacgcacattttggttggttcctgcgtagaaccattgtttagctgcaagaattttcaagttttacttctgtaacttataccaaatttttgatttttgctaaatttacagcctgagacagaggtatctgatgaaccctttgcaaaagattcgactagtggaagctcaccaaaaatagaagatgagcctcgaagccccacttcgccacagctgagaagaagaatcgtgtacgtggaatactagattcacatccttctcaagttgtagtaaattctttcttttagtacttatcaacttccttgattgagttagccctgcaagttccaaggagcaaagctttgatgctgctgatgctgattcatcaaaaccaataaaactagacaccgcagctcaagcgcacattgacaagcacaggtagatgcattgatcaccaagaagaactaggaactcatttctatctatgcactttcgttagtagagagaaaaatttatcgcaaagagtagagctttattgattttaatataagttcaattttgccacttcatgccaagttggtgattcatttgatgacagaaagcttcaagaggatctaaccgatgaaatggtggtacttgcaagacaactcaaggagagaagtcaagcgattagtcaatctgtgcaaaatacagaaaaggtgagatgctaaccatttcctcacaaaaccaattattcttacttttttaatcaacaactatgtaacaagagaagaatctatattggttcatatatccttttaaccggcttcattgctcctaacatttttctttctttcttttcttgtggattcattaacaaaagatacttgactctaccgaggaggccattgagcaaagcctagcgagcacaggacacgcgacaacaagagcgacaaagatatattcacaaagctcaaagacaagttgcttccagtggctcttgatcttcgccatgatctgtgtgttcataatggttgttctgttgatccgggtcacatagaaattgttcagattgtaataccaaattagtgaaatccaaaaaacatttcagtctctttatcatacagtttgtgaaagttcttttgacttttgtaaattctgagtttttgatatgtgaaactatacttctaaaagatatgccagaaatcagtacaatttgtttgtgaagaggaattgagaaatgaagaattgtaatttaaccggtttggtttgaagaccggtatgatttggttagtatagtttgtcttcttcgtacacttaaaagttaaaaccctaaggaaaggccaaaacccagagactgagagaatccattttcttttaatcgccatg

SEQ ID NO: 27796 - DNA, 3000 bp, Unknown; identical to SEQ ID NO: 3205
  misc_feature (1)..( 3000): 2750-1469P.txt file - cDNA_ID_2992258; gDNA_ID_1620631; Annot_ID_162694

SEQ ID NO: 27797 - DNA, 3000 bp, Unknown; identical to SEQ ID NO: 3205
  misc_feature (1)..( 3000): 2750-1469P.txt file - cDNA_ID_2992258; gDNA_ID_2926182; Annot_ID_200338

SEQ ID NO: 27798 - DNA, 3003 bp, Unknown
  misc_feature (1)..( 3003): 2750-1469P.txt file - cDNA_ID_2992261; gDNA_ID_2926230; Annot_ID_142642
ggaaatctttctaaaatcaaggttatttagcaatttcctttatttcctttgttttagagtcaaatatatttttttgggggtcagaaaatcatatataattttcctatatagaaaaatggaaatcttagaaaaatctagggctatttaagcaatttcaattttcctaaacaaaattcgacgctgccgccggtaaaaattgagctcgtgaaagctttacccgggagaagtgaaaaatcatcagagtttttgagaaattcttccaagcgacggagagatgtcggagatggaggtggagaaaccggatttgacattgtacaacacaatgactcaactgaaggaagtttataagccgatgaatcccggcaaaatcggaatctatgtatgcggtatcaccgcttacgattatagccacattggccacgctcgtgccgccgtgtccttcgacctcctttacaggtcagttccatagttttcgccgtaggattgttgtttaatttgaatttctttaggtcacgaatttggggaaaaatcccaacaatttaaaactaattttgtctattgttagcttcgattaacaatgtactaagcttagagacatttgaagctggtatttatctctctagtgtactggttgattatgcagatacttaaggcacttgggttatcaagttacttatgtcagaaattttacagatgttgatgacaaggtctggtatccttttctgcgttttgaaactagagcaatgaacaccaaataatcctcctgtttatcaaactctgaatactgtacctgcaagtaattgaaaaggctaaaaactgtggagagaagccgttagatttgagtaatcgcttttgcgaggagtatcttttagatatggctgctcttcagtgcctccttcccacccaccagcctcgtgtcagtgatcatatggaacagatcattaagatgatagaaaaggtttgttgtcttttttcttcttgtttggtttcctgcaatgttctttgttaaaatatggtggtataatgatgatgcttccttggtacagatcattgagaatggatgtgggtatgctgtgggtggtgatgtgttcttctcagtggacaaatcaccgagttatggtcagttatctggtcaacggctggatcatactcaagctggtaagcgtgttgctgttgactcaaggaagcgtaatcctgctgactttgcattacggaaggtttgacaagtttaatctttttgttcaattcttatttcagttattaaactagagcagctggagtttatgctgaaatttttatgcaggctgcaaaatctggtgaaccaagttgggagagcccttggggtcatggaagaccaggatggcacatcgagtgcagtgccatgagtgctcattaacctgtctccgaggtttgacattcatggtggtggcgcagatctcaaattcccgcaccatgaaaatgagatcgcccagacatgtgctgcttgtgaagatagtggtgtgaactactggttgcataacgggcatgtcaccaacaacaatgtgaagatgggaaaatcattgaacaacttttttacgattagacaagtaagtttcttatttgtttcaatatcataaattgagtgtgtgttttctcacggctaatgcaaaattgttgaatctgtgtagatcgcggctaactatcatccactggctttgagacatttcttgatgagtgcacagtaccgttctcctctcaactattcggtttcgcagcttgagagttcatcggatgctttatactgtgtttatcaggtgggtgccttcacaatattttttagcatctcttaagggaaaacggtatgaatgtttcttaactttaaagctctatcgccatatcgagaagaaatgagtggagatgttggaaagactcaacagtctgcagaagccaaagagatgataaagaaggtgaaaagtgagtttgaaacaaaaatgtcaaaacgacttgaacactgcccatatactcactggtgcttttcaagacgcattgaaattcatcaacgtttcaatctccaagctcaagaaaatgcagaagaagcagcggatgtcgctggtagtgtcactggtcgaggttgagaaggcagtgagggaagttcttgatgtgcttggtttgctcacgactctaagctacggtgagcttttgaaagacatgaaacaaaaggcattaacaagagcaggaatgggagaagaagaggtcttgcagaggattgaagaaaggaatatggcccggaagagcaaagatttcaggagaagcgatcggattcgagagctgttggcatttaaaggaatcttcctcgaggatgttcctggagacactgtgtggagaccttccaccccattgaccaagcctaaatctggtttaggtttaggcatgacagccatcgtttttgctatcgtttttactttcttaggcttcttcttctatagccgttgaactctttatttatttcactatttgtttagattgtgttgtattagtgtgtggtaaacttattaactttaaacattgacctgcaactgaaaaattattggatcaccaaatctcaaacgtttttatatgtagtcagtcacattttgtgaaaaacgttcgttaactaaatctaatctaaataaatgcttaaaactcaagagcaattcgtatgtgaaactaaatgggacagatttataataaattttctttttgtttaaaaatggccgatggtctaattaactacttatagtagtattactgagtaaatattgtaattaatgaaaacgatagtatataggatagtatatatgataacgtgatgattcataagcatatttattattttatcaaattaaactattggagttggagataccgatacgactccactacatctatgaaaccattttcgtgtcttgactttggtttggttcaacgaagacacatagaggaagaagtcgccggagaagtgaaaagacgttgatggtgattatg

SEQ ID NO: 27799 - DNA, 3003 bp, Unknown; identical to SEQ ID NO: 27798
  misc_feature (1)..( 3003): 2750-1469P.txt file - cDNA_ID_2992261; gDNA_ID_2926230; Annot_ID_203651

SEQ ID NO: 27800 - DNA, 3003 bp, Unknown; identical to SEQ ID NO: 26845
  misc_feature (1)..( 3003): 2750-1469P.txt file - cDNA_ID_2992269; gDNA_ID_2213668; Annot_ID_182167

SEQ ID NO: 27801 - DNA, 3000 bp, Unknown
  misc_feature (1)..( 3000): 2750-1469P.txt file - cDNA_ID_2992273; gDNA_ID_1621133; Annot_ID_172568
ggatacagaactcagcctctgatgatcactatgatctctgttcaagttgttacgttgcctttagggaagcttatggctagggttttgcctgagaccaagtataagattggttcgtgggagttttcttttaatccgggtccctttaacgtcaaggaacatgtgttgatctctatgtttgctaatgctggtgctggatttggatctggtactgcttacgctgttggtattgttgatatcatcatggctttttataaaaggaagattagtttcttggctagttggattcttgtcatcactactcaggttcaatgttttctgattttttttccctttttttataatgttctaggtgaatatatagctgatgatgattttctctgttgttgaatgatcagattcttgggtatggttgggctggtatcatgagaaagttagttgttgatcctgcacagatgtggtggcctacgagtgttcttcaagtctctctgtttcggtatgctgattgatgcattttagagcatactatatataccacttgttttactattgtttacttagtggctctgacactgtctttgatctttatacagtgctcttcatgagaaggacaatgcaagaatgtcacgaggaaagttctttgtgattgcgtttgtttgtagcttcgcgtggtacatattcccagcttatttgttcttgaccttatcatcaatatcttgggtttgttgggcattcccgaagtctatcacagctcagcagttaggatctggaatgtcaggacttgggattggtgcatttgctcttgattggtctgttatagcttcttaccttggaagccctcttgtgactcctttctttgcaattgtcaatgtccttgttggttacgttttggtcatgtatatggttataccaatatcatattggggcatgaatgtgtatgaagcaaacaagtttccaattttctcctctgatctgtttgataagcaagggcaactttacaatatctccaccattgtcaacaacaagtttgaattggacatggagaattatcaacaacaaggtcgggtttatctcagtacgttctttgctatcagttacgggattggtttcgcagcaatcgtttccacactgactcatgttgctctcttcaatggaaagtaagtcaggaatatccataatggactaacttatgcaccaatgtctgaaaatatcactaaccttcttttttgacttaggggaatttggcaacaagtacgagcttcaactaaagctaaaatggacatacacacaaggttgatgaagaagtacaaagacataccaggttggtggttttacagtctgcttgcgatctcattggtgctatctcttgtcctctgcattttcatgaaagacgagatccaaatgccttggtggggactccttctagcatcattcatggcccttacattcactgtaccagtcagcattatcacagctactactaatcaggtaccacatataacttccactacagattcctcaaaataacatgatttggatattttctcactttgaaaatgttgtgatgcagactccaggtctgaacattatcacagaatatctcatgggtgtgttgttaccggggagaccaatagctaacgtctgcttcaaaacttatgggtacataagcatgtcacaagctatatcattccttaacgacttcaagctaggccattacatgaagataccaccaagatcgatgttcttagtccagttcataggaacggtgatagcaggaacagtgaatatatcagtggcatggtacttgctgacatcagtagaaaacatctgccagaaggagttgcttcctccaaacagtccatggacatgtccaagtgacagagttttcttcgacgcatcagtgatttggggattagtaggacccaagagaatctttggtcggctaggaaactaccctgcactaaactggttcttcttaggtggactaataggaccggtcctcgtgtggcttctccaaaaagccttcccaacgaaaacatggatctcgcagatcaatctcccagttcttttaggagcaacagcagcaatgccgccagcgacaagcgtgaacttcaactgctggatcatagtaggagtgatattcaattactttgtgttcaagtactgcaaaaagtggtggcagaggtataactacgtgctatcggcagctttggatgcgggattggcgttcatgggagtgttgttatactttagtttgacgatgaatggaatatcgataaatcattggtggggtgctaagggtgagaattgtcctcttgcttcttgtcctactgctcctggtgttctagttgatggttgtcctgttttttaaagtctttttaagatttgtttttctttgtttttttttagattttacagttttttttttctttttgaagatatttgttccatttgtacgtttttagacttgaatctgatctttttttttggattttttacgaatcgtataggttaacaaaaacagactcaatgattttttatccatgtatctgttatactaaaatttggtaagagtgagtatctgggattattttgtttacgtgaaaaaccttatatatctaaattagtggaaaatataagattatacaagtaatgcaaaaactctaaacaaggtacagtatttgtaatgtggcgcgtggacgagaaggaagtagaggagcgtgggttatcaatttggattgacgccaaaaaaaaaagtgattcattaatctgagagtttggttcaaccatattcatcaatttttctttattttattcactaataataattttgagtctctcttctctctctcttatatctcaaaatccgagaaaacgaagttcaaagatccgtggttgaattcgtgattctgaaatttcgtttcttcaggtctctgatcgtcctggttctcctctgatctgttatttgcttcgaaatagaagtttgtttctcgtttgacgatg

SEQ ID NO: 27802 - DNA, 3003 bp, Unknown
  misc_feature (1)..( 3003): 2750-1469P.txt file - cDNA_ID_2992285; gDNA_ID_1620335; Annot_ID_153760
tatctctgaaagtgaaatcccaatgataaactatgtgatctaacatctaaaacccttcaggtggtagctttgaacagttctcaagaagcagaaggtgaactctacatcgatgacggcaaaagctttgaattcagacgaggctcttacatccatcgtcgcttcgtcttctcaaagggtgttcttacatcaacgaacttagctcctccagaagctcgtctctcttcccaatgcttgatcgacagaattatcctcttgggacacagctcaggtccaaaatctgcgttggtggaaccgttgaatcaaaaggcagagattgagatgggacctctgcgaatgggtgggcttgtagcttcctcgggtacaaaggtgttgactatccgcaaaccgggtgttcgagtggaccaagactggaccgtaaagattctgtgattgaacggtttgaaccagtttcactcatggccgttagagtggccgaaatctgcttttccggcgacggaatatcacactttttaatatatgtttggagatttagacttaaatagttgtaagagctaacagtttgaaagtcactttgcattgttgtttatcttcatataaatgagtttagattttgataatttcagaattcgtggaatcataattaacaattttgatagggaaaaataatttgttttttttagtcagagggtcaaataatcttaccttccatcgttgcctaattattgtcaaatccttttactttttacctaatcaacccatgaaaaatcttgaattacacgttttaagagtcatgaagaaaaatcaatctgattctgttggctagatttgttttttttatactgcttagtgtttactgttatagaaagggttctaagtatgcaaagtttgccctaattagataatgttagatccgtgtaggtgaaacaagaagccaaaattctgtgtaaaaagagtcacgtaactacctaactcttgtaggtctaaagaccatcttcactttaaattagaacctcatgtttcccaaacaatatattccgttcatgaatctcgtttcgaattaaaactaaaatattacacattttagaatgtaagaaaaacacactcaaaattaagaatcttggaattgaaaacgagattttgaatgtgttcaaagatactctttagaaattataatggtagataatagcacttgcatgacaaattcgattctctcttctcatcatgcatttttgctttacattttgttcctttaaaccaagaatattttgactcacctaaaagataaaccaaacatatctgaaatctacaattgacaattaacttctctttttcttttctcttattcttactgaaataaaaatagtatgcaactggtctttataaatttcagttttatatatttaaaaaaaatcttctataccaagtttaccaactcatggtagtccaatgattaaaaaataaatcattatggggttaggacttaggagatcgaattcgaatcatttcaaattttcaatgcgatttcaatcattgtttttcactgttaacactttgaaatatctaagtgtatctaaaaatttcaagccttagagattaatttggacttcgatccggaattctgcgacgactatcaaacaaattttgttttaaccgaaatatagattatttgcatctctgattatcaaaccattcattctttttattattattcagtttactataaagtatatgtccctccctttatgaaccgtatcaaatactatacatagtatgcatgttcgaagaaatttccaacatactaatttgaaatcaacgaacatatcaaattataatgcgttgatgcagaatatatgctttctatatatataacttaaatacaaaaacctaaattttccatatgccttcgtaatttagtatataaatattcattcattcttaatacagcctaggactcggtagcattttgaagtaggaacgaattttgttaattaagatacatgagtgattagatcgaatccaaaaggtatggaggcgtagaacaagaatttggttctctttcattttacgtatctttcactaaagaatagagagaaaacaaaaccatgcaaaaacctctcaaaaattatatattgaacgcttagacaaagagccaaatttattcgctttttgatgtttacatcagtatttgtttctagctagttcatattatttaaactccataatcatttgaaagacataaaatacagatgtttaagatctgtggatgtttatataggatcttcgaattcggataatgaaatcatttatacactattaagtattaactttgtagaggacttaagtattcgaaatcttgattcaggttgtcaatcaagaaccgtaatgtttgatctatagagccatgggattaatggatgctaaaagaataaaacactcgagaagaagagtacacgtaaaatcactcacacacaaagaatgagagatgggagaagaatactacaaagtgtttgttttttttaaatcggctcatatataaatttgggcgatactctactacccacattattcttttaaacaatgatataaatgtgtatggcctatgtagccgaactttttacatatctgacctgtatatatataataattatttatcaaagaaattagagaaagattcttccacttttgatggcttataaaagatgatgacccaaaacactcaaaatgcagcagcaactgctctctcaccacccatctcctcatttctcttttgcatttctttctttttttctgcattgcattcttttgaggggtttaattttctgcatagctttgtctaatctcttagagctcaataagagaaggtactataactgatctctccctctttcaagttttttttttgtttggtttatagaaaactataaccgccattatccgttagttttaaccgttttttgaaactagtgaatcctcataactttggtttctcactaaaaacagatg

SEQ ID NO: 27803 - DNA, 2012 bp, Unknown; identical to SEQ ID NO: 6154
  misc_feature (1)..( 2012): 2750-1469P.txt file - cDNA_ID_2992285; gDNA_ID_1620851; Annot_ID_170325

SEQ ID NO: 27804 - DNA, 3003 bp, Unknown
  misc_feature (1)..( 3003): 2750-1469P.txt file - cDNA_ID_2992289; gDNA_ID_2926231; Annot_ID_203693
tggactgttgtaggacgatgatccaccgcgcattggaggcggaagagggaatctctccgggatatatccatttcttcttctgcggaaaaagttaaaagggtaaggaaaaagttgacaactttgggatgaaaattgataaagattatgtttggggatttaccctaaaaggttaagctctattgtcgccttgtattgttgaggaatctccatgagagcagaaagggcaaactctgtttccttcaaggattgagctttgttctttgccatgatctctgtgaagttcacgaactagaaacagaacatcagattaaaacaccaaactaacttcgatgttattagctagaaagaaacttacttggaagttatcaaacgctctggccggaatattatcgtcaaattccctcatcatgtcccaaggtccatcccccaccccgactaagacgattgatagaggaagcttactgtcacagagaaaaagttcacatcagaaaagccagccaaaaagagatataacttcaatggagagaacaatgtcaaaagattggacaatattccaacctcgcttgcacgatcgcatctaccgtcttctgttcttgtggacttaactgtccattttccgtgtcaacacttcttgtaacctgaaatggttcattgaggtttcttcttttgacacaaaaacaaaggttcataacatcatactggttttattcgtacctgcccatctgctattatcactaggacgtgatattgcccaccactctgctcaacaatggtcatggccatatcgatgatcggagcaaaggaggttggccctgcagaagtattcaacattcacatttaagaatttagctagcatttcatgaaaatgcggccaaataaggaaaagaaataaacctgcaagcttaagttgaggcacgatctccttataccgggaaagtacttcctcaaatccattacagaatctatcctctgaattgaaactgaacacgtcttgatcatgtgttgatgcatctccaaaaccataacatggaatcaagttgtcctcgtcaaaggcggctaaggttcttcctatgatagttatcgcttgttcataaggattgggactactgcctatgaagtgtaagcttttcctattgaaggacctggcccctgttatcaaacaagcaaagtatgattttgagagtgaaaccatttgatgcattacacaaagacagaatctagaatctcaccaacctgtccattcgttactcttagtgaaatcaataccaacgatgagatttgaagattctagacccgcccgtgcaagagcctccgtcacctaaaacgaaaacagaacataatgtgaatcttttctgtcaaacccatgagaatctacagttttcaagttttgtaatcatcaaagaacacacactagattccactaaaaaccaacgcgagactcagctaacctgctccaaagaagagtaatcatcagaaattttcgaatacttgcgctccaacctcttcttattatcactaccataactttgagaaggcggtgcagaataagacggagcagagtaaggctgagtactatataaaggaggaggaggttgcgtatactcaggaggttgggcataagaaggtggaggagggtaattatagctttctgcaccatactgaggataactttgttgagaagcccatgaagatgaagatggtgatgctgatgaagcagaagttgacctaaacgatgactgtctccagttttctttagaattccctgtccccatcaaacttaacaaaaaactaaacctttttagattcaaatcaaacctctcaggtcagttccgtaccctgcaaaacaaagatttagcctttagagtatattcatgaaaccccagaaaaaaaaagcagaaactttgtttaagattctgacattattagaagatgcaatttacctatacctaattcgttaagaaaaggtgaaagctttatctttgacagatgttgaattatctcaccgctctttaaaatcgaaggttggtagagatgtttatataaagaaaggagattcaatcacgtcacgtaattttccacaacaatacgcgatttagtgacttctagattaagataaaagtcctattacgaaaacctactccaacactctaacccacaataagtaaaacaaacaaaaaccagtttctgacaaatctacgagctttccaatttcgccgaattgaactgaaacattctctgattcatcaaaccaaagactaccccaaaatcgaaaaataacattaattcgagattgaatctcccgacattcatcagaaaatgacccaattcgattgagaggaaaagttgtctacctttaaactaaacgaagcagaggaatgacgaatcagagaagtactttgagagagagtcagaggagcttcaatggcggatcgaatactaaagagttcgcctttaaagtttcctccttttgttcgaaagcaatttcacttttcttctgtttgttgtatttggtttgtttctatgaaatcattaggagactaatcacttttctgtttttaaaaaagtgtgaagcacgctaatggtggaaacttcttctaattttaccccacattttattctctcttccaacaattggccctataatattattatcgatatccaaagtcataacatggtatcaattgacaatttcttttgattacttgaaattcttaaattgaccatttcttaaaaagtacaaatagtcaataactaaactaacattttttaattccaaatttttaatctagaggattgtattatacatatgtaaattatatgaataaaaaatacttaaagaaggaaaacataatcaataattagtttaaaaaattgcaactcagaagtttagaaatgatgtatcatataaataggactgccaaacaaaaaaaacttcttctgtatgatttgggcaaatactaatagtataataacaatgcaataaatacctttggggatgaaatg

SEQ ID NO: 27805 - DNA, 3000 bp, Unknown; identical to SEQ ID NO: 10843
  misc_feature (1)..( 3000): 2750-1469P.txt file - cDNA_ID_2992296; gDNA_ID_2214452; Annot_ID_182600

SEQ ID NO: 27806 - DNA, 3000 bp, Unknown; identical to SEQ ID NO: 10801
  misc_feature (1)..( 3000): 2750-1469P.txt file - cDNA_ID_2992300; gDNA_ID_2214450; Annot_ID_182429

SEQ ID NO: 27807 - DNA, 3003 bp, Unknown
  misc_feature (1)..( 3003): 2750-1469P.txt file - cDNA_ID_2992308; gDNA_ID_1620769; Annot_ID_50173
ctcaaaattcaaaatcattgataataccacacatattgactcagatcggagctgcaaagcatatcttaagccaatcaaacatgaattcagatcctcattatgcaatcgacaaaacaaaaccatattaagtgttataggcaaagatcgagatcgcattcataccatgattacgccggagaagaaacaccaggaaagctaattagaaattgaaatgacgatcgcgagcagaaaatcaatttcacctctctcttttttttttggttttttttcttaagtttttgtctccttgatttcaatatatctctcttttttacatctgtgtttcaccacctaaaaagagattcagtcttgctattctcacaacgtacatcgtcacagaccatctatgattgggtattgagacgtgtgatatctacgtggccgtctataattgggtcgttatttgagattttaagagcttgagaaggctcgagaattgagactcgtcggacaaaaaaacagacgtgtcatgtcaactactgaaaatctagcggacgtgtttgaaagtcaaagcacgaacctctttggggtcagtatttccaaaacaaccattttagatttctaattttctactagtagtagtaacctataaacttatagagagcttggttttacggactgtttttcctagaccgttcatgaacattgtgttctttggtggatagattttgattggatatgaatacatgatccgtgtttttagtgagagtttaaggattcgattattcgaagcaggctcatagagtgtggcatctcaaacgatgcacggtcttccacaaaaacgcacatatatggtcttgaagactcataatattcggattgataatagtttttcttgaatatgattgttttggtggatatgaagaggaatctcagaacattggattttcttggtgatgatatgataatggtatagttggaaatacatatttacttcgttttgtaaaatgacaaagcaaaatgtgtaaaaatctcgtccaactgtaaaaaccccatgactatattttagtatcactttctcttgacatcatcacagcaaacaagactcacgtaattccacaaaagctaaaatttgtgtctatcaaagagccatgtgtactaaaagtacaaatgaatggaatgtactatgtgttatgtactatgtactaacggtatatcgaccaaactcataatttcatgtttagtaatgcttttaatttaatttaaaatatatagttcccctaaactaatcttagtcagttcatcgtacgtctaataaattttcatttaattgtgatgttctcggggatggacactctaaaatattagtattagtgtacttgtgaaagtaaaagagaggtttatagatattaaaacttgcacgaattgtactaggtatgaatggtaggtactaggttctctaacaaatgaaaagagttgcagcctttttgaattaatgttttgaacatacaaattcgatttttcagcggctttttacatgtttaattagcgaccgataagaatatgaagaaagatccaacaatataaatttgacctttcttacttataatgttgttacttgcattttttgtttgttttacatctaattttagagagcctaaaattagttacaacttacaaatatttcatcattttgttgtccatatgattgtacctacatattaggcctgaaataaataaccaatttcgatatagaatcgaatctgtgttggtaaaaatataattcgtttcatatactagtattagttaaaaattagacaccaaaataaatacgaaagcccaaaaaacaaaaaaaggcaaaacagttgaagaaaaatagtgggaaagactcctctgagctactctcattcgattttcctcaggcgattttggtgtatggtcgtccctttcactgtatttcttagtcaatagcatcttctccgatcatcgacgtccggagatttcttcggccctctcatacttgaggttttgtactctttactccctcaaatttttccaaaacttgcgcttcttagatttgggcgtcttcgttatttattgtaaaattcagctttatgcctcttagactagttatagatcgacgaatcagtaaaattaccttcaaggtgaatggtctctaggtatagagaatttgtcaaaatgacgaatttgattgaaacattggtaactttttttaatctcttcgttagttagttgaacttattggtttggggggaccatttgctttcatcgaaaaccctagcttgcgagggagggaccttgattgggatcgtaacctaacttactgtcactttttttatcgttcaatctttattgctgcagataggtccactaatggctgagcttgctgccgttttctttgacatatagttaattcaatgtgtaaagttgtaagctttttagtctttggttttgaggaagttagttaggaaccttctccaagtacaaaggaggaatgggtagggaagggtttgcaattacaatgtgtacatcgtgtttcttgacaagttactgatagatactttggggaaatttttgatttgaggagtgtaggaccaattcaataaatgccacttagtttttgtgtgatggagatgagaagatgaaaagtaatacccttcctctcttgccctttttgctggtctgggtgaaacatagaaaagtttctcttgctcaagttaatgataaaagggtgagagcaataaacgctgataagccttgtctggtccttggaattttgaattttctttttctatcttacttatagtattggtagttgagggtgtcgtcgataaggtatctatttgcctagccagagttatatataggattgattgtctagtcttttcttatatgatttttgttctcatttactaatcaaagttctgcaaacttgtagttgttgtaggatttgttgctctggctctggtggtaggtctatgaaatcaacccatatcgtgaatg

SEQ ID NO: 27808 - DNA, 3003 bp, Unknown; identical to SEQ ID NO: 27807
  misc_feature (1)..( 3003): 2750-1469P.txt file - cDNA_ID_2992308; gDNA_ID_1620769; Annot_ID_167429

SEQ ID NO: 27809 - DNA, 3000 bp, Unknown; identical to SEQ ID NO: 7841
  misc_feature (1)..( 3000): 2750-1469P.txt file - cDNA_ID_2992312; gDNA_ID_1974075; Annot_ID_180350

SEQ ID NO: 27810 - DNA, 3000 bp, Unknown; identical to SEQ ID NO: 7841
  misc_feature (1)..( 3000): 2750-1469P.txt file - cDNA_ID_2992312; gDNA_ID_1621167; Annot_ID_173877

SEQ ID NO: 27811 - DNA, 3000 bp, Unknown; identical to SEQ ID NO: 9157
  misc_feature (1)..( 3000): 2750-1469P.txt file - cDNA_ID_2992324; gDNA_ID_1972015; Annot_ID_177889

SEQ ID NO: 27812 - DNA, 3000 bp, Unknown; identical to SEQ ID NO: 7788
  misc_feature (1)..( 3000): 2750-1469P.txt file - cDNA_ID_2992328; gDNA_ID_1621163; Annot_ID_57162

SEQ ID NO: 27813 - DNA, 3003 bp, Unknown
  misc_feature (1)..( 3003): 2750-1469P.txt file - cDNA_ID_2992336; gDNA_ID_1621202; Annot_ID_57709
cgtttctatattaggcactgataaaagttgtgatatcagactggaaaacaccaattgcaaaaagatatctagtcaaaagacaaggcctaatgtgaaagtttcactgaatgcttttaagtttcaacaaagaagcatagcagatgaaggggttaaactcaatgttcctacactttactaaaccgggaccttctttttagatccccatgtgttcacacagtaaaatagcttgaccataaaacactatgagaagtatagtgattgtagaacagtcttactggtttgaactgtggctccttgatatcttcctaggagcctattagttgacactagctagaacgtcaacacataacacaacaagggcatctctttatttctttagctgaaaaggggtctgcaacaagccataacttatggggccttggggaactagagtaggaagatgaccttctacgctgccagttaaacatcttcccctgttcagaaccaaagaggagattacagttttaagttttaactataactgagtatgattacaatggacaaacactactcggtaaggagctacaatagcagaatttacatactagatcttggcaattcgataccaaaggccattaagtcatagttgactaaagtttattggagctggtagaccatacgtttctaaatcaaaataacacaaagcaggatcttggatcatacttatgaactaggagtctaatatgtaccgtagtagctgtgcaatcacaacagataatcaaatctaacactgacaaatatacaaaggtttaaccattacctgcggggtgatatcgaccttgaacgcgaacgagcatgctattgcctacaaattggttatcggccacgtctgcggtctgcggattggataccttcttcttggaagggacctgcatgtgtgcattcaagaaataatccatcaaatgaaaactaatacaatgtaggcagaacatctataaaattgaaacactaatgcattgagttgcatacactataaataaattgatctcatcctctaattactacaatgcagctctttaaacacaaatttatcgtcacctaagaggagaacgtcttagagcaggactgccacggatccttcgagggtaaccctccagctgacagataaaaggtgagacagtgaactgaaatggtattgaacctcagacgaggaaactgaaaccgttttggaggagaacggccgctagaagaggacactggcctgcgtatgggtgatccaccactcataggcagaggtgattatcatatttctcaatgtcagtaccaacattatcagattttaaagcatctccctttggatcacttgaaacatacaccatccatgtacagctgtggtttctcagcatcagctatttttgccttgaattcaacatatgcatctcctcttgaaagattagcctgttaatgtcaatcgaaattatgagtaaagtacttaggaaacaaatctgcaaaccagccaagagcaattgataagaaacttacagctcgatctatcgcaagttgaacatgaatgatttcaccaaaatcgcctgcacataaggaaaaaaggaacatcactgaaattggatttaagcgatataacaacattcgagcattgatttgacaatttaaatgtgtaattgtaatgagtccacttcgtataagataaccaaattaccaaatccaatctctaattaatcaaattggagaagaataagaagaagacgacgatgatcttgaactggagcgggagcgtgagcgggaaatagaccacgaaagactcgaatcttcgccatggccagattcagattctagcgcgcttgtaaggttaaccccagacccaaccctaacggctacctgtcgatttacacacaaacacacacgagtccgcacgtgacaagtcatgggttgggtaagttaactataatgaacgacaaataaataattaaacttactaaagcaaattatagtttgacaaaaatagtcttaattttcagattattagttggatatgcatagtttattcaacttttctcttaatatttttattacatgattttttttatttttggagatttatcagttttttttgttttaataatagtttttagataatttggaaaagcaatgatctctgcatcatcaatcataaaaattaaaaaaataaggcctcgtcgctatatcttctctctagggttcgctgttgctttttcatcttcttcttctccttctctgtttctctgctttcgtcacgaaagggcgatatgtattgtttctcagtaggaagctcgttactctgattcgattcgattctcaatcctttcatcaaaccgttttgggacttcggattttcatattaaggtagcgtatccgcttagggatccaattttctccgagaattgtctccttctacaatctgattctcctcgatttttccagttttcaaagcagtcaattagggtttgtagactaattcggatttggagacggtagcggttatggacgcttttggaatcgggagtagtttaaatcaagctcccgtaactcaggatcttaagaaatttggagataattctacaggtttgttcttcttttttctcggatttgttttgtttctgctcttttgaattcggcgtcttgttctctgttagattgaatctggatctagttggttcttgttcttcaactgtttaggagtatataaaacttgaattgcctcttagttgattcgttagaccttggtcttcgttagattttatttactttcattgtcttgtactcccacgaagaagattagggaagacttagttgctaatttaaatcgtgaaatgagaaaccatattatgcctgttgagattctctccgattgagcaatttccggaagaatgtttcaggtttagatcaaacttgcatcagagtcttatagtttcatctcttgtttgggcttgtctaactgaaggtttcttttgtgcaggtaacacaatg

SEQ ID NO: 27814 - DNA, 3003 bp, Unknown
  misc_feature (1)..( 3003): 2750-1469P.txt file - cDNA_ID_2992340; gDNA_ID_2214700; Annot_ID_136851
ttctcagcctgagggaaagagtactcagtagctaaggcaacagcaagaacgttcttgtaagcattgaggaacatgtgaggcgcagctgctacggttgggtaagagattgcaagagaaagcgcagtgatcatcgagacaccagctgcaaacttctcaacaaggtcgtcttcagtgaggttaagcacttcagggttaaacactgacccattatcgtagactgactcaacaacgagaccatacgaaaagggcctgattccaagcttggcaagaagcgcagcctcggatgaaccgactttgtcgcctttcttgatgagctccacaggggttatgatctcaaccgtacctttgttgattttggttggaatgttaagcacctggaagaaggaggtctgtgaagggtcaagaccagtgttgcctggttgcacgaccacatcaattggagcgactaaacctacacgagcaggagctccaacctgtcaaaaaaaggacaatgaatttctcatcaattaacagtacaagactaagttgaaaaaatcaatcaatccaacaacatgaaaggacgctacaaaaatgtgagcctaggaaactagtagactctcaagtaagtttcttgaatgtggttgcgtttcaagacagaaaatagaggttttgagttccaatttaaaccaaaatgcaaactttatcacctatccaccttacaagttaataacctaaagccataggttaaaggatgatcataaactgactaaatcatcaagtaacagtagaagctaaaaataaaccaatcaatcaaaacacaaaacagaaactacaaatgtcgtctcctcaaacctcaatgaaccaaaataactagtactataatctaatcaaccctatttgcttggaaagtgaaagtttgcatttgtgtttaaaatcgaataatacaacaccttgcattcttgcttacttagagataatcagatacagcataaaactaaccaaactaagtaataaaccaatcaatgaaaatgtaatctcctcaaagctcaacgaatcataataatctcaattagaatgtggctgcattttaagcaagaacacatatgatttcatttcaaactcaaaaatacaaactttcactttccaagctatcaatccatatttgaactctactaaagcttaacaacaacaataacatcaattgagccaaagaaacaaaccttgtacttagcaacctcttcactgacttccttcaagtcacccttagtgaagatcaacccaacattcccctgttaaatagattctaacaccaaaccaaatcaaattctccacaaaaccaaaaaatcaatactttatatccaaatgaaaacaaactattcaagacaagagaaatgaaacctgaagaagaggaaggagactgaggaaagcttgattgccagttttatcagcatgaatcctcacagatctcttcatcattgtgttcttccccatcaaaacaactgaatcacctcgtaaacctttccttatgttctgaagctgagttgatccaacattgtcagctgcaacgacaagaatctgagagtactcattcaaaagctgacaaagctttgaatcgtaaacgatcttcttctccgcctttgttgctttcaccgccatttccacttaaaaatgataaagtgagactaaagaaactaaattttggggtagagaaaatggagggcctagacgaagcttggagctcgtacaaggtggacagcgcgaattggcgctgtctctttaacctctgtaactgtttttaacagaggaaggaagagagaaagaaaaaaagctgcgtaagaatttgcttaaggttgaagaagaagtttcttgggtttatatagttatcggaagacggaaggatgaacggtcagggtttgtgggatgacctaaatctaacggcttatattatttgtagtagtatcaatgggatgggccaatattgcccaacatgtttaacattatgaatctttttcctattgggctaaaagctctttcgacccacatctcaagcccaactgagatccattcattgtaattcatactttattattttttatagtaaccaataagaaaatggttgacttaacagagaaaatggttgacccaaacaaatactatattatttttttaattcgatttcattcaaagaagcatttttgggagacgaggaggcgatccacggcttattcttaagaaaccttccacagtcgccgccgattttatcttctccgccgtaagtactctctttccctatcgaatctgaacgaaacagctcagcacattgtcatctctgtagcaaaattaagttcgtgtttttgtgttttgttgtgattctgtttaggtttcatttgggtttgaattttagggtatttttggtttatctctagtgttactgattcgggatttttgggaaagagctcaacttttgttttgtttcatctttcgttgattttgttgttacataggtttgaaaaaagggatcacttgtttggttgcctttgtttgtttgtttgattataacccaaagacttatacttttggtcctccaatttcttctgaaactacagggaattgtgagggatcaacaaatggctcccagaggaagaagaaaggtataagctgtactgttttttttgttttgtttttccaaattaaaatgctggctaacaagtaaagatatgagcttttgaatcatatagtttttagagagtatagtggaaaactaagataaaagcatagacatagacattagagtagaatgactatatagatgaagtatttgaatgacatgattgttgaagttaacattttgtttctctctacgacttctgtgtactcaacgttgagaacactgatgagataagtttacaaatacttctttttatgatgggtgttcttgtttttttccttctatgattatctctcttttctatgcttttaaattgctacttttcttttgcttttttgcagaaggctggattgatg

SEQ ID NO: 27815 - DNA, 3003 bp, Unknown
  misc_feature (1)..( 3003): 2750-1469P.txt file - cDNA_ID_2992340; gDNA_ID_2214700; Annot_ID_189637
ttcagaaaattcctcaacggagagaaattaaaaccagaaaggtagttttgatgaagaaacaaaatatccataaacgtaacaaagaaattctgaacgtgaaagttttaaaggtccataaaataaataggaaaggctggcaaaagataagacggtgtattttaaccgaacagatcaaatcccatgtccccatcagactcttctgcagcttcttcctcaacagctactgccaccactgctccaccagactctcctgaaaccggtgcagccactgcaactgcaaacttggttggatcctgatccataaatgtacagttaacaaacaatttcatgactactaatcccaatatctgaaacgcaaaatgaaagaggacaaacctttaggaactccttcacattctcagcctgagggaaagagtactcagtagctaaggcaacagcaagaacgttcttgtaagcattgaggaacatgtgaggcgcagctgctacggttgggtaagagattgcaagagaaagcgcagtgatcatcgagacaccagctgcaaacttctcaacaaggtcgtcttcagtgaggttaagcacttcagggttaaacactgacccattatcgtagactgactcaacaacgagaccatacgaaaagggcctgattccaagcttggcaagaagcgcagcctcggatgaaccgactttgtcgcctttcttgatgagctccacaggggttatgatctcaaccgtacctttgttgattttggttggaatgttaagcacctggaagaaggaggtctgtgaagggtcaagaccagtgttgcctggttgcacgaccacatcaattggagcgactaaacctacacgagcaggagctccaacctgtcaaaaaaaggacaatgaatttctcatcaattaacagtacaagactaagttgaaaaaatcaatcaatccaacaacatgaaaggacgctacaaaaatgtgagcctaggaaactagtagactctcaagtaagtttcttgaatgtggttgcgtttcaagacagaaaatagaggttttgagttccaatttaaaccaaaatgcaaactttatcacctatccaccttacaagttaataacctaaagccataggttaaaggatgatcataaactgactaaatcatcaagtaacagtagaagctaaaaataaaccaatcaatcaaaacacaaaacagaaactacaaatgtcgtctcctcaaacctcaatgaaccaaaataactagtactataatctaatcaaccctatttgcttggaaagtgaaagtttgcatttgtgtttaaaatcgaataatacaacaccttgcattcttgcttacttagagataatcagatacagcataaaactaaccaaactaagtaataaaccaatcaatgaaaatgtaatctcctcaaagctcaacgaatcataataatctcaattagaatgtggctgcattttaagcaagaacacatatgatttcatttcaaactcaaaaatacaaactttcactttccaagctatcaatccatatttgaactctactaaagcttaacaacaacaataacatcaattgagccaaagaaacaaaccttgtacttagcaacctcttcactgacttccttcaagtcacccttagtgaagatcaacccaacattcccctgttaaatagattctaacaccaaaccaaatcaaattctccacaaaaccaaaaaatcaatactttatatccaaatgaaaacaaactattcaagacaagagaaatgaaacctgaagaagaggaaggagactgaggaaagcttgattgccagttttatcagcatgaatcctcacagatctcttcatcattgtgttcttccccatcaaaacaactgaatcacctcgtaaacctttccttatgttctgaagctgagttgatccaacattgtcagctgcaacgacaagaatctgagagtactcattcaaaagctgacaaagctttgaatcgtaaacgatcttcttctccgcctttgttgctttcaccgccatttccacttaaaaatgataaagtgagactaaagaaactaaattttggggtagagaaaatggagggcctagacgaagcttggagctcgtacaaggtggacagcgcgaattggcgctgtctctttaacctctgtaactgtttttaacagaggaaggaagagagaaagaaaaaaagctgcgtaagaatttgcttaaggttgaagaagaagtttcttgggtttatatagttatcggaagacggaaggatgaacggtcagggtttgtgggatgacctaaatctaacggcttatattatttgtagtagtatcaatgggatgggccaatattgcccaacatgtttaacattatgaatctttttcctattgggctaaaagctctttcgacccacatctcaagcccaactgagatccattcattgtaattcatactttattattttttatagtaaccaataagaaaatggttgacttaacagagaaaatggttgacccaaacaaatactatattatttttttaattcgatttcattcaaagaagcatttttgggagacgaggaggcgatccacggcttattcttaagaaaccttccacagtcgccgccgattttatcttctccgccgtaagtactctctttccctatcgaatctgaacgaaacagctcagcacattgtcatctctgtagcaaaattaagttcgtgtttttgtgttttgttgtgattctgtttaggtttcatttgggtttgaattttagggtatttttggtttatctctagtgttactgattcgggatttttgggaaagagctcaacttttgttttgtttcatctttcgttgattttgttgttacataggtttgaaaaaagggatcacttgtttggttgcctttgtttgtttgtttgattataacccaaagacttatacttttggtcctccaatttcttctgaaactacagggaattgtgagggatcaacaaatg

SEQ ID NO: 27816 - DNA, 3000 bp, Unknown; identical to SEQ ID NO: 7102
  misc_feature (1)..( 3000): 2750-1469P.txt file - cDNA_ID_2992345; gDNA_ID_1621127; Annot_ID_172357

SEQ ID NO: 27817 - DNA, 660 bp, Unknown
  misc_feature (1)..( 660): 2750-1469P.txt file - cDNA_ID_2992353; gDNA_ID_1620639; Annot_ID_47456
ttcatttttcttctttgaatcgaaaatatacttctttaactcttttctttcttaggtatatatagatgaaatattcaagactttgatcgatgaagattaatgatctcttgaatgatacttttatagagatgcaaatttcattttggataggaattcatcatcacatagatattttactcaatacgtgttggccgacatcgtaaaagtaatatattcaattcgtaattgattaagagtcacacacacatggcaagtaagacgtcggtgtagtagtggttagcgaccgacgtaattttaacttatatgggcctgtgggcctttagatatgaaaggcccaataatgcatatcttttactaaactaaaaaacgatgtcgtttggtatgtttcttccacctttgttgttcatcttttgattttttgaaattgttagtaaagaaaggaaaaaagctttgatttcgatttctcaagctgtgtttttttatttttcttcttcgcatcaggaaggaattgaaaaaggtatgattttgaagctttagctctcatttatctctgaatcctaatgcttttttcatgctgttgtttcagatttttggtgttaaaagatggatccagatgcagtcaaatcgactctctcgaatctagcatttggaaatgtaatg

SEQ ID NO: 27818 - DNA, 3003 bp, Unknown
  misc_feature (1)..( 3003): 2750-1469P.txt file - cDNA_ID_2992361; gDNA_ID_1620634; Annot_ID_47332
gtaaacatcaagtttagcatcaacatctggtaatccaactgggcgtacaaaattagatacacatactaaattggcaaaattcttgcagatagcatcccgcttcaggataaggtgcatcaacgttgaacagatgatacttgtgaaaagtctctggagttgaggtggtttgataccatcggaccgttatacttcggtttaagatcagtaatgagacatcttctaactgtgtttcttgaacaagatgctttcaaacggttactgccttggatactcatgcacaagcccttctgaaacactccttgctctagcatgtccgaacagcttgctaacaatagccagggaaaatttggtaacagttgcgagccccaaacttgtaatcacgtttccatctataacaacttcggctccttcgatcatttgttgattcataggctcgtctgactctgaaggatacacagtcgttctcttctcctaaaataggattccaattgtttatggcgtttgtccatgtatatgacaaagaaaagaacaatagttgtcttcaccttaccttgagtaaaccatgtttatgcaaaacggtagatgaagagttggtagctccatatattcgcccagattcatgttgttccctgagcagtttcttgagaattttggacttctgcagacgttctgagccagtatggcctcccttgggaatttccatcaaagaaaagaaatcatattactcaccatggaacaaccaacagttgtagtttgtctaaaagcttttcctaagcgcattgatttgacatggcatataagttatactgaaacatgtacatagcaagatttatttaagaagaagtaaactagcgaaatggtatgagtttattatgagactaggacatgcagggttttgcttaaagccttaccggaagaatgattagatcatatgatgactcagcagcttcaccaatcaatttgtcagtgataattttggtgccttggaatgccgtaatccgcaaagatcgttcaactgatgaaaccgtgacatctactttggctcttctaagaacatctgcaattgagaccagttcaaccgcttcagacccgttggctaccgggataagaacctggatttagatgcatcattaaaacaagtttctcagctttcaaactaaaatgaaatgttcttagaatcagctaactttttcatctttcaaaactaactgagcgtgaaaggagaaggaatggataaaagaaaaaactccataggtatagaagataaaaccaagatcagttctcatcatatatcatgagattacatggaaatgcattgatcatagcttcatgcgacttacacgaggtgtgtggtctaaagaccagtcaatgctattgaactctttgttcttaggattctggtaaccatcacgcagaagctggagaaatgattggaaaagaagactatgagaagattgttgcatatcgagaaggataaagaaaagcatgatccagaaaagtataagtgaataggatatagaccagaaactcttcaattgacttggctgtggtttctccgaagagctgctccgccaaggaaagagcaaactggaaagaagtgccgggtccacggctagttgtaagctcccctgaaatctgaatgtttgtcttaacagcccagaatgtaggaagcttcccgaaaaaagcaggatgtcccgttgtcttgcacgatgaactacaccaagtttagaaatcaaaacatgaagagaaaagattagttactagatgacatcaaagattttgatttataccctctttcttgtcaaaagtccccatggaagaagagtaatagctggagccatggatatagccccgtataaccgcttatcttcagcttgtctcttcatgatcttctcgagaatttcacagtctcttaacctaacagcaccaggcatgcctcccttcacaatttgtatttccagaccatccagaaacaaatacacaaaaccattaaagtaaagctcaaagactgtcctcacttatagtttatgaatcagcaaaagaggaacttaccggcaaagcaactaaatcataaacttgatcagcacatttcgagataagaacatcagcaagcaatctggtccctgaggatccttcaacctctagcttctgctccacagaagcaacagtaacatcagcaccagctcgccgtaaaacatcaactaacacaacagcttctatttcctccgtcccatatccaattggaacaagcacctacatagtttctcagttatctccaatctcaatctctctacacaaacaagctggacaattttagttatagataacaagaaaaaaggagaaacctttttagtagttgcagaagacccgacgccaacatcggaatctagcgttgttaccatacccggagacatggaagatctaagctttaaagttcggtccctccttgttgtccctagtgaagaagaaactacagagactgaagaaaaactaggagcaacagtcatcgagacacaacccatcgaagagataagccttgactccatcaaagttggactcagcgaagctatcattgaaatcgaatatcctaaagaccccattgacgatagctaatgcagcagtctgataatcccgccgctagacggagagtgagttgcgtcttatctactagtatacacttcttgaagaaagctaaaaacgtcgtcgtatcgttgtcttattgcttgattggataaagcttcaattttttcctccaatttttgtcgaaaatgtaacattttttttgctttccactgtgagattgtcacacacgattctctaaagaaatgagacgaattttgaaaacgatttataaaaatagtatttttgtttccttgagcttatctcctcttttctctttggtttgagatatgaattacagacaatcaagtagtcagtcacaacagtgtgtataaatatgtcttttaagtgaaatcggtttcgagagacagtgagacgaaaatg

SEQ ID NO: 27819 - DNA, 3003 bp, Unknown; identical to SEQ ID NO: 27818
  misc_feature (1)..( 3003): 2750-1469P.txt file - cDNA_ID_2992361; gDNA_ID_1620634; Annot_ID_162835

SEQ ID NO: 27820 - DNA, 3003 bp, Unknown; identical to SEQ ID NO: 27818
  misc_feature (1)..( 3003): 2750-1469P.txt file - cDNA_ID_2992361; gDNA_ID_2926206; Annot_ID_202227

SEQ ID NO: 27821 - DNA, 3003 bp, Unknown; identical to SEQ ID NO: 27818
  misc_feature (1)..( 3003): 2750-1469P.txt file - cDNA_ID_2992361; gDNA_ID_2926238; Annot_ID_203937

SEQ ID NO: 27822 - DNA, 3003 bp, Unknown; identical to SEQ ID NO: 23623
  misc_feature (1)..( 3003): 2750-1469P.txt file - cDNA_ID_2992369; gDNA_ID_1620704; Annot_ID_165194

SEQ ID NO: 27823 - DNA, 3003 bp, Unknown; identical to SEQ ID NO: 23623
  misc_feature (1)..( 3003): 2750-1469P.txt file - cDNA_ID_2992369; gDNA_ID_2926204; Annot_ID_202086

SEQ ID NO: 27824 - DNA, 3000 bp, Unknown; identical to SEQ ID NO: 4735
  misc_feature (1)..( 3000): 2750-1469P.txt file - cDNA_ID_2992375; gDNA_ID_2926149; Annot_ID_197949

SEQ ID NO: 27825 - DNA, 3003 bp, Unknown; identical to SEQ ID NO: 21110
  misc_feature (1)..( 3003): 2750-1469P.txt file - cDNA_ID_2992375; gDNA_ID_1621141; Annot_ID_172830

SEQ ID NO: 27826 - DNA, 3000 bp, Unknown; identical to SEQ ID NO: 4735
  misc_feature (1)..( 3000): 2750-1469P.txt file - cDNA_ID_2992375; gDNA_ID_1620725; Annot_ID_165929

SEQ ID NO: 27827 - DNA, 3000 bp, Unknown; identical to SEQ ID NO: 21113
  misc_feature (1)..( 3000): 2750-1469P.txt file - cDNA_ID_2992379; gDNA_ID_1620742; Annot_ID_166509

SEQ ID NO: 27828 - DNA, 3003 bp, Unknown
  misc_feature (1)..( 3003): 2750-1469P.txt file - cDNA_ID_2992383; gDNA_ID_1620844; Annot_ID_50930
tacaacatatcttgacagagcaaagattgatttttacctcacagaattggtagtaatagtgagacagtgaaccatggagtgtgaatccaacaagacctgatctaagaacacgagttcgatcaaactcaaacagcggttttccttcgtaacactgcataaagttacagccaaaatggtcagagagaactcaaattaagaagctttttagagtatttttagtttcttacttgtgcaatccaatctcctaaagaatacacaattccactaatcgccattttcgccaaaacagggtttgttttgagaatttgttcatacgcaaaccaattatgttcaggtgcatacctaagtatctcgtagagagtccaaccctaagaagaacaacaacaatcgtgatatcaatttcagtataatcccataaaggagcaagctttgcagagatagaagaaccaatcaatcacaagagagataaagaaaaccctaagcttacttgccaatagtcatgatcaatggttaaaagcttagtaaccgcaacggtaccggcggcgagaactatagctgcgttgatacctcgactcatcagccgatctgtatcttctactttatcttctgatagttcttcctctgccttgaaattgtcatttttaacatcgattgcttctctgtcttcaatgatcgatttaacgatcaagtttcttctctctgtaatcaatcgtttctgattcttaaaagggttgattcggggtaatgggcctgcggttttaatccgtgaagaaaccttcccggagacgatgatggtggtgggacaacaacagagagctgccatggacttgcacttctcaaaggaagatactttttctcttctcgttggctctctcacagccaaaggagaggtttttagacttagagaacaaaaaagaagcagcagactttggtgaccaaacggtaggaactgagccgaaccgagtttcggttaaattaaaaccaataaccggtgggttttaatttggttaaaaaccggtttgcacaatctcaaaaccgaagccgaaaacaaaggtcctaccgagatttgaactcgggttactggattcagagtccaatgtcctgaccactagaccataggaccagttgcttcgagtcctaccgttttggtttaagatctagacatgttcaaggactacaccatcgtggtctccgccgatacggcagtctgatcaaaacgattcaagagaatcaggcggaaggttttttctgaaattcataaaatcgggtgatctttgcaatatgcatacgtatatccttggtaaatgtattggctttgtttggttaacgatgttgataggattaggttgtgatcaaattagaaaaaaattgggtcttttctgattttttttggccaattctctgattatgagttttggaatggttggaatggtagaggagggtttaggcgtaaggtaagagaaaatgggattgaacccaatttgcatacttcaaattctctggtgagcttgatgtttcattgatttgacaaagcatgtatttgagattgtgggcagttgcaggatcagactacatgttacttacaacaggcatgatcaaggagtattgtaaggtagggtagagaaatgatatgacaatgatgcaggttttgagtattgcctagctttgtatcaagatttggatgagaagtgactttcaggcttgtagtttagtgattggagattctgcaagaagggaaaattacatgaaggttatgtggtttttctgcaatatgattcgttaaggaggccaagccaaatgtagtcaaatacaccacgttaatgattcatccgtatggggacagcttagatttttctgtgtgttgcatccaaagatgtactgtgtacccaaattccgagttcaccaaccagggatgaatgatactgtgtacctaaattccaaagatgtactgtgtaccctaacagttttcgtctggttaggagataatcacttcttgaaagcagtttgaatgtttctcaaagaatggtcatgtactacccacgttttttgtttggttatcttggaggtaagatgagctggtgacaattctgtttttggcttatactaagattaacgtggagctagtcctttgctttacggagctttgataagatgttttaggatttaattacccatcaagaagataatgagggagaaaaaggctaaagagattcattcgacttgcaaaaccatggttggaattttgtgcacatagtgattgaggagagagatagaaagtgaagggactttaaatgttagacccgttgaaactagtggtgggcctgtgaaggttgaggttgagggaagagccagcctgcccaaaagaaaaaatatcttgtgcaacttgtgatgcttggtagctttggtcctacatgcttatccagatatttgcagagaaagaaacatcaaaaggttagccacattataggaagaactaaaattttctaatgctattttgctcaaataggtgtttgagagctctgttcatttaataatgtccatatttgtggctatgttcactgaattattaacagggaaagcagttgaaagatagctaacatgatgtaggggttttggtttttaggaggcaaagaggctttcatgggaccacactggatgatagttgcaaaatacattgtggttaaggtttgtctcttgagcacatgttgagactgggatactcttctgtgagaacgcattaatagctgtattaagtgttgatagaatttgtggacggtaattcccgtgacatttatggaggtatctgtgatgtttttcctattaaaaagacaaataaggagacccaaaaaaggtgagaacaactatacacacaaagaaatttcttttgtctgaagacaaagggagtggtcaatgaccagtactcccctatatgttgggttaggacttctactcattttgcatcgttgagatactatactgccttgaaagacttggtattggatg

SEQ ID NO: 27829 - DNA, 3000 bp, Unknown; identical to SEQ ID NO: 5271
  misc_feature (1)..( 3000): 2750-1469P.txt file - cDNA_ID_2992383; gDNA_ID_1620775; Annot_ID_50283

SEQ ID NO: 27830 - DNA, 2251 bp, Unknown; identical to SEQ ID NO: 5260
  misc_feature (1)..( 2251): 2750-1469P.txt file - cDNA_ID_2992383; gDNA_ID_1620775; Annot_ID_167707

SEQ ID NO: 27831 - DNA, 3000 bp, Unknown
  misc_feature (1)..( 3000): 2750-1469P.txt file - cDNA_ID_2992383; gDNA_ID_2926205; Annot_ID_141709
acatatcttgacagagcaaagattgatttttacctcacagaattggtagtaatagtgagacagtgaaccatggagtgtgaatccaacaagacctgatctaagaacacgagttcgatcaaactcaaacagcggttttccttcgtaacactgcataaagttacagccaaaatggtcagagagaactcaaattaagaagctttttagagtatttttagtttcttacttgtgcaatccaatctcctaaagaatacacaattccactaatcgccattttcgccaaaacagggtttgttttgagaatttgttcatacgcaaaccaattatgttcaggtgcatacctaagtatctcgtagagagtccaaccctaagaagaacaacaacaatcgtgatatcaatttcagtataatcccataaaggagcaagctttgcagagatagaagaaccaatcaatcacaagagagataaagaaaaccctaagcttacttgccaatagtcatgatcaatggttaaaagcttagtaaccgcaacggtaccggcggcgagaactatagctgcgttgatacctcgactcatcagccgatctgtatcttctactttatcttctgatagttcttcctctgccttgaaattgtcatttttaacatcgattgcttctctgtcttcaatgatcgatttaacgatcaagtttcttctctctgtaatcaatcgtttctgattcttaaaagggttgattcggggtaatgggcctgcggttttaatccgtgaagaaaccttcccggagacgatgatggtggtgggacaacaacagagagctgccatggacttgcacttctcaaaggaagatactttttctcttctcgttggctctctcacagccaaaggagaggtttttagacttagagaacaaaaaagaagcagcagactttggtgaccaaacggtaggaactgagccgaaccgagtttcggttaaattaaaaccaataaccggtgggttttaatttggttaaaaaccggtttgcacaatctcaaaaccgaagccgaaaacaaaaggtcctaccgagatttgaactcgggttactggattcagagtccaatgtcctgaccactagaccataggaccagttgcttcgagtcctaccgttttggtttaagatctagacatgttcaaggactacaccatcgtggtctccgccgatacggcagtctgatcaaaacgattcaagagaatcaggcggaaggttttttctgaaattcataaaatcgggtgatctttgcaatatgcatacgtatatccttggtaaatgtattggctttgtttggttaacgatgttgataggattaggttgtgatcaaattagaaaaaaattgggtcttttctgattttttttggccaattctctgattatgagttttggaatggttggaatggtagaggagggtttaggcgtaaggtaagagaaaatgggattgaacccaatttgcatacttcaaattctctggtgagcttgatgtttcattgatttgacaaagcatgtatttgagattgtgggcagttgcaggatcagactacatgttacttacaacaggcatgatcaaggagtattgtaaggtagggtagagaaatgatatgacaatgatgcaggttttgagtattgcctagctttgtatcaagatttggatgagaagtgactttcaggcttgtagtttagtgattggagattctgcaagaagggaaaattacatgaaggttatgtggtttttctgcaatatgattcgttaaggaggccaagccaaatgtagtcaaatacaccacgttaatgattcatccgtatggggacagcttagatttttctgtgtgttgcatccaaagatgtactgtgtacccaaattccgagttcaccaaccagggatgaatgatactgtgtacctaaattccaaagatgtactgtgtaccctaacagttttcgtctggttaggagataatcacttcttgaaagcagtttgaatgtttctcaaagaatggtcatgtactacccacgttttttgtttggttatcttggaggtaagatgagctggtgacaattctgtttttggcttatactaagattaacgtggagctagtcctttgctttacggagctttgataagatgttttaggatttaattacccatcaagaagataatgagggagaaaaaggctaaagagattcattcgacttgcaaaaccatggttggaattttgtgcacatagtgattgaggagagagatagaaagtgaagggactttaaatgttagacccgttgaaactagtggtgggcctgtgaaggttgaggttgagggaagagccagcctgcccaaaagaaaaaatatcttgtgcaacttgtgatgcttggtagctttggtcctacatgcttatccagatatttgcagagaaagaaacatcaaaaggttagccacattataggaagaactaaaattttctaatgctattttgctcaaataggtgtttgagagctctgttcatttaataatgtccatatttgtggctatgttcactgaattattaacagggaaagcagttgaaagatagctaacatgatgtaggggttttggtttttaggaggcaaagaggctttcatgggaccacactggatgatagttgcaaaatacattgtggttaaggtttgtctcttgagcacatgttgagactgggatactcttctgtgagaacgcattaatagctgtattaagtgttgatagaatttgtggacggtaattcccgtgacatttatggaggtatctgtgatgtttttcctattaaaaagacaaataaggagacccaaaaaaggtgagaacaactatacacacaaagaaatttcttttgtctgaagacaaagggagtggtcaatgaccagtactcccctatatgttgggttaggacttctactcattttgcatcgttgagatactatactgccttgaaagacttggtattggatg

SEQ ID NO: 27832 - DNA, 3003 bp, Unknown; identical to SEQ ID NO: 25590
  misc_feature (1)..( 3003): 2750-1469P.txt file - cDNA_ID_2992387; gDNA_ID_2214506; Annot_ID_184123

SEQ ID NO: 27833 - DNA, 3000 bp, Unknown; identical to SEQ ID NO: 11996
  misc_feature (1)..( 3000): 2750-1469P.txt file - cDNA_ID_2992390; gDNA_ID_2214527; Annot_ID_134175

SEQ ID NO: 27834 - DNA, 3000 bp, Unknown; identical to SEQ ID NO: 11996
  misc_feature (1)..( 3000): 2750-1469P.txt file - cDNA_ID_2992390; gDNA_ID_2214527; Annot_ID_184785

SEQ ID NO: 27835 - DNA, 3003 bp, Unknown
  misc_feature (1)..( 3003): 2750-1469P.txt file - cDNA_ID_2992396; gDNA_ID_2214533; Annot_ID_134326
ctattttatttatgtgacagtttggatttgttgagagtatgattctaatgaatttgataattagtatcctcttactgcaatagtaagaggtatccttttttttgtcgcaaaggtagattacttgttatattagatattagcacaattacaactgacttgcagaaagtcagaccaaaaaatgagatcaaggggcacaagaaacacccactaaaaggtcaaccctgagaatccaaaaattaacagggcaacaaaagaataagcctcccaaaaagcaaggagcctaaaagcaaaaagacttcagtccacagaggttagaactctctcatccctaaagacaccaagaagccaagcaggaaaacttacggccacgtacgattgaagcctacactccttagtaacactttgggcaatgagattagcacctctattcgaagacaccgattcaagcaccactttccaaactgcaatgccatttaaagctaacaagatctccgaagactgaaacctaaaagaaggccaagcttgcggcctgtttaacaccccaacaagcaccgcagcttccacaccaaaaaccaccctattcacatgatgactaaccatactctcaacagcccaaacaatgcttagaaattgagcctccaaaaaggaggaaatattggagaaggctcttctactgtgcatcaagacattgcctctgtcattcctcaacacccaagcaacccctgcaagtctagtaagaggtatcctattttgtacaaaaaaactattatgattttgaattaccaatcgaattaaatttaaatcatacaagcgatcaaattaatatttgaatcaaaatttactaatttataaattagctgaaaccaaaaatataattaaattgaaaagcagccggtagtccaatgatcaatgtttgtttgtctttaattggcctgaaaataataaaactattttatggtaataatgattggtcattgagtaaatttccttttcctaaaggggaaatacaaaaggagacctttgtggcggagaatataaaatgtggaagataaaagtaaaacaaaaaaggaagtttttttttttcttcttcatgattattaatgaaagactttttgaatgacaatgacaccaaaaacaaaaaagcatataaatggtggtggtggaatttataaaggagttggggcctaatcacttactcatgcttttattctttaccatatcacatccatctaatctcttaaaagtaaaattatatcactgtctaccactgaatatatgcttagttataattaagttgacttgttgttaatcatttctattatcttcaagttatacgtctcaaaatttaaataattgaattttcacaaaaaaaaaatctatttgtaaagtatcagtcagtatgcaaatcaattcattttaactttttctgaacaaaaatatttctatcatcatcattgtgtttaatttttttccaaaacactcgattacaatctttgtatagcttttaaactcttaacatagccatatgtaaatagatatccgacattttaaaacccgtaagtacacagattatctctctgaactgattctgtttagaaactatgcatcttttactagttaacttgttgtgaattctagcactatgcatctttattggcttaatacagtgcaatggccaatatatatttttcttttgtaacatagtgtatcttagttttatatttcgttgaatgaccttctagatgattgttacactgattcatctccattctcagcgtcttgtgataaatcttcaatttataatgtccaacatttaaccatctataaaagaactaaacacatcgaaatagacttctagctatatatgtgatttagaaaaagattcattgtttatgttccaaaatattcatatcatattgttaatatacgaacaaagtctttgacatttcctcttatagatcatctcttatccaagatttcttcgtaatatactaaaagaagtaatcatcattctagtttattatgtcgccaatgttttcaaacttggataattaatctgtttgtttggtaccgtgaaacaaattttggtttatttatcaaattacagtaaaattcttaatatttttttttccaacaatcaatataggaataaagctaacagaagttggttgaacaaaactaacaaaagctcaacacaattaaaatgaattacttggtctgaatcgaactattaccttttggaatatagttagttaatgttcacaatacgaatacaagttggaaaaaacggaaagaagaagatttggcatagatactcactcactcatacacttagatatttttctgtctagctactttagataagaataagagaagagagaaaatcaaaaacaataaaaagaagaataattgtgaaaaacaatgtggattgtcaaatccaaacttaattgaaaatttgaagagtttaagcgaatggaagcaaaggaagatctttgagttgggccatagagaatctatgctcaccacatgtgcctttctttgcctttcctccttcaatatacacgagtatttggggcaacacataacaacacataacaacaacaacaacaaaaattacacaaacaaaaacatttcataataataacaaataatcattcaaaatataaatataaaatatattagtgggttccatcgccaatagaccaccaaacagcgactcttctttcttacatatctatcttcacaagcttctgaggattgaaaccaaagaaagaaacgtacaaacataaaacataaaaactatatattataaattaaaaacacttctttttcataaaagcgactacacggttttcatttctttgtcgtaaaaatcccatttccagctttaaaaatttcacgctttgtttttgtttatagtttcttgtatgaattttattgattggtgttgtggtttggtttacttttaatttcgaattttttataactaaaccggcgacgatg

SEQ ID NO: 27836 - DNA, 3003 bp, Unknown; identical to SEQ ID NO: 27835
  misc_feature (1)..( 3003): 2750-1469P.txt file - cDNA_ID_2992396; gDNA_ID_2214533; Annot_ID_185001

SEQ ID NO: 27837 - DNA, 3000 bp, Unknown; identical to SEQ ID NO: 12436
  misc_feature (1)..( 3000): 2750-1469P.txt file - cDNA_ID_2992404; gDNA_ID_2214551; Annot_ID_134671

SEQ ID NO: 27838 - DNA, 3000 bp, Unknown; identical to SEQ ID NO: 12442
  misc_feature (1)..( 3000): 2750-1469P.txt file - cDNA_ID_2992404; gDNA_ID_2214551; Annot_ID_185561

SEQ ID NO: 27839 - DNA, 3003 bp, Unknown
  misc_feature (1)..( 3003): 2750-1469P.txt file - cDNA_ID_2992408; gDNA_ID_2214610; Annot_ID_135735
gaaggaagtaattcttcattgcaacttaaaacagctttagacatgagtttcccaagccaagcatgatagagtagtccccttgatccgagccctgaaaatacccagaagttgcaaaactgaccagcacctatgagctgattaacacatcccaagagcggcagtgatccatggcttgtgacaggtggcattgctctcaagcccgcccttgctcccgcaaattcccacttttctatgtctggataaactgcacttgctttcggaagaagctcgttgagagctcttgaagcttcctctgctgggacatccgatgaataatttcttgattgccattcccatgtggatcccatgtgcagattacggggtccctgaaccgcgagccacgcatctgacaagatcgaaggtccatcgtccgggtaacttcctctgcattacataatttaataaagaaaagcttttgaacaggaaaaaaaaaccacaaagataagtagctgagctcaacatagtaatgtgcgagtatgcgactacatcaacacatactttctttttttggaaggtctcacactaaaaaaaaacagagaagaattgtacaattgaaagaggatgtaaagttgacatcagagttgaaaaagaatactaggaatggataactataggcgcaaggtctcgcaatacctggcactctcgtgtaactgcatatgagtaatgacacctcggcatgtccttaaagggagctttccagtaagccctggaagaaagtctaccttggatccaagacatattactactgcatcatatcctcctacatataacaacacaaaagctgttcatactaaatttctgaccatgcggatgagaacctcagagaaaaagcatggatactatactcttggattgttaacggctatctaaattgtgtttacggtctctagatttaagtttatcacatcagttttcatgcctgtgaaacttgatccaaaaggactagttgtggttggaggatgtttctataaagcttacgcaagttccagaattaaacaaaaatataagaatatagttcaaaatcattcaccttcaagttcaagcacatcagttatagacttgttcaccaaagttatgtttttccttcccagtgatgtttttgctgagctctggcatgctagaaagagtgcctagagaagggagaaaaactcggtaaagaaaaacgcaaaagcttggtgctaacatatttgtgttgtcttaacctggagatatcggtgcggattaacattcatagctcctggaaaatagaaggcgcagttcaaaggcaggtatagattggggacgagattttgtgcaccatctttgtcaatagtctctactacacaactagcaagacagtttcgagcattctaatcgcataagtaataaacagtaaaactacgggtttagttaatatttcaaaggtatctaagtcgagttcaaacttacatcactcattaaatctaaagtcttggcatttgttgctggtctcaagattcccctaaagcaagaagaacttggtcaaactaaagtatcattgaatgaacatttcaagttattagtgttattgagattggtaccttcttcgaaccataaaatttccgaaactctcgctaaagtctctgttctccgtagattggtaactagaagaagcagctgtttcagccacatttaagagctctaaacattctctccaacactcagcaccatgccaaagtagctttcctacataaagtaagaatctttatgaaacaatacaataatcaccaaaggggacaatttcttctacctttaggagaataaggatggaggagtcctccagaaacaccagaagcaccacctcctatgccaacttcatcatatacgtcaacacttaatctcagctcttttggactctcctgcaaaaacaacacatattttaaattcagaagcaattatctcacaacaacacaagaacaaaatcaaatttagagatttaaccttaagcaggtgccaggcaacagagattccagcaaaacctgcaccaaggatggcgtacctggaggaacaagaagaaactctaaaaatcacagtgagaaagatagagagaaacaaatgaagagagctaacctaagaggaggacggttgggaagagagagagacgccgaagaacaagggtgaagaacagcagtgatcatgtctacacgccaatgcctttggattccggcaaatgcttgttttgcctgcgacgagttcgttatatcggataactcagttacctaccactactgtaaaggaacctctgattcatctagagggtcttcttctcagggacaaatattggtttagatcggtacaagaaaaattctacatgattctaaacccggttgagtacattggattcgataatccgatgcgtatactacacgttaaaaagtacattgaattttggtttaggccttttctccaattagtttattttctgagtcagacaaggcgttacattattgttcgcctttttagttttattttatccattttcgcaaacgttaaaacttaaagacacaacaaaatatataaaacggagatatgattgaggggcatatttgtcattttcttgtgatcgttgatttcgaagtcgctataagagtataagtagcagccttgaaaagtgttgttcatctctcgaagtaaaacttttctctcagtgatcggataaaattctcggcgaagaagtgaagtttccggcgatcagaggtgagttttccgttagatccttatcctagttgctacttgtgtgacttcgttgattaattttgatctgaatatcaaaaatcgggttttaagattctccagagtcctgatttttctcatgcacatgatcttccaaaattcatagggcttatgcaattgattagataaggatcattttaggtcaaaatctggtaatcacgtattgatttacttagttgtttgcattttttgatcgttttgaaaggtgatatg

SEQ ID NO: 27840 - DNA, 3003 bp, Unknown
  misc_feature (1)..( 3003): 2750-1469P.txt file - cDNA_ID_2992420; gDNA_ID_1620814; Annot_ID_50638
tgtttttctctgctaatttcgtcaagtatcgaataatgttcttcgccactttcatatttattaacatttttggggtttggtcaggtgaggacgatagtgaaaccaggatgttctcaagacgtattgaaggcagcactgagtgtgatggcttcggtgactgatgttcttactactatttcttcaaatggtggtcaatgatttgcttaaaacttaaggacaaagctcttatgaatcacacacgtcgtgtttgttctcttctttttgttttctttcttttgagatgtaacttttgttgtattttttaagttattgagtttggaaagacataaaaattgaaaaggtttggattatagaggcgctatttcaccatatcaatccttgtccaacttttatttttcagtttcactattattacaaactttttttaaatatgacaattaggcatgcatgcatgatgcatatagcaatagcatcgcttgaacacgattttgtttacaaaaagaatcattaaaattttaagagttacatttttaatcttaactacaccaaaatactagaaatacagtgtatcttgcaaactaactttaacaaccaatgacgtgtcatgttcccaaatcccagttataaattttgatagatttttgacagtatcttaggtacagctttggcataaatacacttttatttattttaaaaactatctttagcctaaatacattgttagttatttaaaaattagaaactaaatgaagaaattatttagatattaagaaatatttatcattaaaagatattagattttgtcatttttttatattagtaaattttctttgttcaactaatgaaattaataactaacagattattttgcaaaatgacaaacctataaaatatatattaatatttgattttcaaattatcttgcaaaatcattcaaaaatttaactaaatttatattaatgttgtatttgaatttttcttataatggtgagatactgagattatccttgattagaattgattgttacttttttttggtaataatatgttgtctattattatatatatatatatatatatatatatatatatatatatgttgaaaataacacaaaaatattcacatacgccaagcaaaatagaatcatgaataatttgccaagaaattctcaatttgattcatcttccatcatcaatgatttacctttagaccttctcgacgagattctcttcagattagaacccaaatctatggctatgatgcgatgcactaacaattctatcaaatcatatttaagtgatccaagatttggaccggaatatccttcatgggtcagacctagtttgtttaaccttggtagctatggcgctacttatgtatgttgccatcctttggtctcttcatgcgattatatgtcaccgggaaatggagtagaactgtttgatggtagtgcggattgttacattttcggctcatgctctggtcttctcctattgtacattggttgtctctttgttgcaaatcccttaacaaaaaggtttcgaatcctggatcattctggatcaaagcttataccaatgatagttaatggtggacttaaaggtcttagcggaattagttatcctggaggtaatgttgcttgtacggaacgagcgatgtgcgttggatttgcggtaaatcgaaatctaacaaccaagagattcaagatcgtgggcatactcgagatggaaaacgtatacggattcgagatcaacgaaggagactcttggagattatcggaaacgagtatcaccactagctcaaaaagtgatctcactacgcggatgaaacctgtttacttggacaacactcttcactggctgagaaacgatggcagcatcatgtcttttaatcccgagacagagcaagcatgcttgattccttccatatttcatcgggaaccggatacgaagctacttttcgcggaaagcgttaagatcaatcgcctgaccctaatttcggggacgatagaaacaatctccgtttacacacttgtcgagaatcacaaatggacactcacaaggcggatcaagaacatatctatcgaggaagaaacgcttgtatattggaacatagctatgtacgatggcaagtgtcttgtggtgagggtgaaaaagatgggtttagaacctttggcaagtgttcttcatgtgtacgacatggaagctaacagttggggagttttggtgtcaacccttgcttggcccaattgcgtccgagatttctataaattgacgccctccttgttctttgtagaggaggatgagcaacagaaggtgcttgttgcttctaatgaccgacgcatctcctatataaattcgattatgggactcattgataccaccaagtaaacatttagggcctatagattatacaaaaaatgtcctgatttataagaatgtttgtttcccatttgcttttatcattgcactattatggtttatgtatttcaaatctaaaaattagttgtatattactatttcttttgggacaaaaaatcatttaagacaatgttgtttaagaacttgttcttctctggcttgtcaatttttcgtcctgcccaataaaggcccatcttgtgtgttttgtcgaatctaacaacaaactcacaccttttgaccaaaaaacaaactctccccttttttttttcctttcgtgtagctaaaccgtctccggatgttgacaaacattggttattcactttttccacgtcacacttaaaaacagaacataaaaaaaaaactaatgacgacgctccagttttgaattttgaaaaaagaaaaaaagaaccgttgaaaaaacatgagtgctcaaagagggaatatacctttttaataatctccttcctatttaaaccaattctcgaatctaattacatttcctctctctttccccaaattgaaaacaaaatctgagattcgcgaaggaagaagaagagttgtcttgagagattgatagagatg

SEQ ID NO: 27841 - DNA, 3003 bp, Unknown; identical to SEQ ID NO: 27840
  misc_feature (1)..( 3003): 2750-1469P.txt file - cDNA_ID_2992420; gDNA_ID_1620814; Annot_ID_169178

SEQ ID NO: 27842 - DNA, 3003 bp, Unknown
  misc_feature (1)..( 3003): 2750-1469P.txt file - cDNA_ID_2992426; gDNA_ID_1620761; Annot_ID_50005
ataatcttaatccttcatacactggagggtactgtctaactattttaaaatgatctaaaatgatttcatcgctaattcaacgcctagaaaaggcaactaatatcagcatcgacatggagacaataatcttgaaacctgatttgtcccacaagttttggttgctagaaagatcagcttcatgctgtttttttgcagccaattgctcgttgagtacttcttgtattgccatatcgtttcgctctcccatctagcatcgcacagaaagaacagctcaaattggtactgtattcataaaattactatccctagtaaaagcaagtgagtttaccttttgaagttttcgagtttggatgcgtgtttcgcgtaggcaaaattctaacttcagcaccttcttcttcagctcctgatcaattctcctttgattctccacctgatccagaagaacaaaggctttactacataaaaccaaaaataaatcacagaaataagagatgctaaagcatgtgttgttacctgatcttctaattcctttgtcttaaacgtccaatgagccgacataatcttcagttcatctctgagagtctgagtcttgcaatatcatcatctttagccgtcaaaagttatttagcttcggagttaccgagcctagggcttcgaattttgtatcatctaaagtaacgaatccttcgctaacctacgcatctggcgcagtaagctaacttgctaggtttgactgtagcgcggcaaaatctattcgttcaaagtgtagaaagccacgtgtgcatagtgtttatcgttagtggtcgcacactaataatcttcttgtcataaaataatgttgttgttcgttttattgccgcagacgctgccgctgccgcaaccgcaggtttatttgttcgttttgacgccgctacgataattttcatgtaattcttttatttacttttctagttatattctgaatataaaaaaatgtaatttaaatatatttacatccataaaaaatatttgtttagcatgtaatagtttttagctttttttggtaaggagtaataattttaaatattagttttctgaaaaatgcagaaacgattttaaatacaaatggaacaggtaaaggattgggataaaccatctttcctaacaaaatctgaactcgtacaatatagaattcagtcttgtttgatacaaaaaaatcataaaaagaacaaagcaagtgcaaaaattcttagaagagaatgaaaaaaatggaaacaactcaatagccacctttgagatcgttgacaacattgggaatgggagtgacagtctccaaggtcataccttcaaccatgaaacaaggtttaggacctttaggttgtctcttagtgctaatagtctcacatctagctttagcagcagtcttaaacacatcgttttgcttcttcctgagactaaactcatcatcacaccttgactgttgcagccttaagcacatcgttctgcttcttcctgagattaaactcctcatcacaccttgactgttgcacatgctccacacgtacatgtatcctcttccttataattctgtgcttaatctaaaactcaacccaaaactcaaaattagctctccaagagattcaactaaatgataaacatcaaagtcaaaatgaaaacatcactaagaatcatagtagattgattgcaaattatacaagtagcaaaagaaggacccaagaagaaaagcttgaagctttcaaaccaatactaatcacacatcacaaaattcaaaacagatagctcacacaagacaattaaaccccaaatcaaagaatcaaaataacgttcaaatcctaatttcaacaatcaaaactcttccaaacagatgagaattttgagtaatcgaaacctgtttgttgacttcaacaccaacggcacgcttagtgagattccagatacgaccaatacgactatggtagaacttatgaggaatacccttgtgaatagctccattaaccttgacatcgacgtaatcgccgaccttgaaggttatgaggtaagtggagagtggaatataacccttcttcctgaatggtctcgcgaacagatctcttgttcttcagggtcaaccagagaacttctaaaacaaaacccattacttcgaaatcgccgagtttaattcgaaatcgctgagctttactttttcagatcgaaatcgtgtaaaagagaagaaaagtttcagatcgtgaatgtgttaggttttagagttaggttttatcgtgggtttctaaatatgttaagggtatttctgtcatttggcatattaatcgcagttttttaattttaacgctgaatttaatcagcgtttaatttttttcgccgcataacattgcgtcggccgcagcgttttgccgcagctatctgcggtagtgaaatgaacagtttcatctgcgtctaccgcagctgcaactacctgcggcgacgaaacgaacagactaaatataaataaacataaaaattaaaagcacaaatgaattttagtatgtgtaattatgtatagtagtaattactcatcaatcatcttaaaaacctttttttctggtgatttctagttttaaagtttttacctatgattttgtcttgaggatgtctaggctttacaatatattgaaatatttatacatttaaaataaaatctataaaactgaaagaaaataattaatattctgaacttcattttttgcattttgtgtataaattaaaaaaaaaaaaaattactgctacgtgatttgttgaaaaaattaacacgtggggtgttttatttttgattacatgaacttgtgaaccttgtttctgcttacaaaaactgaagagcccatttcaaacaaggcccatattctgattgagcggccctattttaccaaaccacctactaatgaacactctcaagtcacctcattcgagttggaagttccctttaaaacaattattttcagacacagagagactcagacaggagatatg

SEQ ID NO: 27843 - DNA, 3003 bp, Unknown; identical to SEQ ID NO: 27842
  misc_feature (1)..( 3003): 2750-1469P.txt file - cDNA_ID_2992426; gDNA_ID_1620761; Annot_ID_167151

SEQ ID NO: 27844 - DNA, 3000 bp, Unknown; identical to SEQ ID NO: 8244
  misc_feature (1)..( 3000): 2750-1469P.txt file - cDNA_ID_2992432; gDNA_ID_1621202; Annot_ID_57693

SEQ ID NO: 27845 - DNA, 3003 bp, Unknown
  misc_feature (1)..( 3003): 2750-1469P.txt file - cDNA_ID_2992438; gDNA_ID_1620617; Annot_ID_46914
ttttaaccgaaccgaaccgatccgaaccaaccgaactcaaaccgacccaaactaaacccggattaacactaaaattattcggttaggcttcttctcaacccaaatagttcggtttaaaaacctttcctatcacgacaataaattttgtttggtgtttacataaccgaattaatcgtaccgaatccgaacttaaaccgaaattcccaccgttaacctggctatactgaaactatatatatacgtatatatatatatatatatacatgcgatgttgacaaatgaacacaaaagtagataaactcaaaccggtagttattacattaactgtgtaataaagattcggtatatcccacccgcgaagaaaaggaatcatatcacgggttaacgaatccgggtcgggtacacggagcaatcataaagaagaaacaaaaactacgacgacaacttttttttggccttggttaaaaaattttcataagtgaacacagaagaagcggtggctctgagccggcgaaatctcctttctcatccctaaaattttcatgtccatcttgcctcctccgattatccaaggtcacaattcgtcttctccttcttcagattcctctctaaaccctagctctgagcatggcaacaactcttcttcttctctctctcctcttccctcctctcctccttcccggatctcttcttccaccggaactcgattctccggacattctgaatcctctcacaatttctccggtggctctaggggtaatggaattgattgattaactcagctgcttgattttgccctaaattttagggtttttacattaaaagttcgttaattttgttgagttttgatttgggtttttagggtctctttgaaaaatcttagctttttctctaattttttattctttctgttaaactgtagaaccgagtgttgcagctgaggagggacatagccgtggatcttccaaagaggtaaactttagatgcttctcagtaaatgatgagactttaagtccttttttgttgaatggtccgttacttttgtttctacgctgcagatgacacaaaatggagcagggaaggagagtttttccccacctaatgcagataagcgtgaccattttcgatatgatggtcgaaggaataggtctagagggagaggtactggagctgctggttcttcttcttctcaattgcagcataattccggaccttttaattctcctagaggcggtgtttcgcatcataatccaactggtagaagagctaatatgataagtgggaatcatttactgaattttcagtatgatccgatttcgcaaccgcaatctaggggtcctcctccgcctcaaagaaggcaacaatataaggggaggccttttaacaaggatttgtttcttaaggccaattataagtttgttgtgttggacactggagatcattctcctgattcaatggatcctgataaaatgctgcagtgggatgatattatttgtgtaaggtattctactccgtctcctgtccagtgtccgatttgcttggagtatcctctatgtccgcagattacttcctgtgggcatattttctgtttcccgtgtattctacagtacctgttgactggtgttgataaccacaaggtggactgcttcaagaggtgtcctttgtgctttgtgatgatttctccaagagagttatacactgtttatattgagaacgtcaagcagtattctgttggagatcccatcgagtttgtacttttgactcgcaagaaagattcttttgctcctacccggaaaaatgagcatgacttggctgttcctaatggtgaaaatgagatatatgatccgttctcaaagttcactttcacccaagatgttgatctctctgtcagacaagcagtttcagagttagacagttggattgcaagagcagatcctcagctcgttgaagacttggagaagcatctttatgtaaatgccgctttagagcgtttggagcagagaaaattgtactggaatgagcataagctctctatttacagcaaagtgtgcacaacggctagaaatcagactcaatcattgtcacctcctgatgtttctcgagttggttatcaagcacccatggggggccatggagcgccagatagcggctccaatgatcaagataaatcaactgaagattcttcagcggataagtcagatggagaatctcaatcaagtttggaaaagggttgtgataatgatcttggtcatcctctagaagatcaagacgcaccgtcatcttcctcatgcaatggaagtaaaggtttcctgtctcaccaaattgacaccaaagacctgaaggacaacgacgcgtacaacttttatcaggtaatcagtttctgatgcatactgttgtgttttcataaagtactaatgagctgcatgatgattgttttattgctatgggctggtcaatctctataatctgaaataaatgttattatctgttttcgataatctaggtgggtttattaaataattgtggtggttctatccatatatgcttaatttgtcttacctttgtgctcttgttgtgtacctatacagtctgttgatggtcagcacattatccttcacactttgaatgtgaagtgccttctgcatcactatggaagctatgactttcttccaccaaggtaagattccaggtcgtttatgcatcacaattctcatttttcaaagactatggaataagttccaatgggatcttcttcgttatctaatcatttctgcatgtatttgggatgctgattcaaagtgtgatatatggcacttttcgttgattaatcaagaaccgttcgtataaagatccaactcttatttagtatgaaaatcagaacggacaatacattcaagtaaaaacggttcagtacaagatgttatcatctctagtttgttgttctaatagacttctgattttgatccattaaacggcagattgagtggaaagatactggaaatg

SEQ ID NO: 27846 - DNA, 3003 bp, Unknown
  misc_feature (1)..( 3003): 2750-1469P.txt file - cDNA_ID_2992438; gDNA_ID_1620617; Annot_ID_162082
acagtgagttgatctcttttcacaattcttcatgttaaactgatgaagagaaatttcagtattttaatttcctactttctagattgggcctataccagctgatgatggtattagcaaagagattatcactaaacttacaaccaccatgaagacaaatggaacattttacacagactcgaatggccgtgacttcatcaagcgggtattagatgcaaaattcatgtgaagtagtttatttttatttttgtaacaaggggtattttgtttttattgtaacatactttgttacattttcttgcagattcgggacttcagaacagattgggacttgcaagtgtaccaaccggttgctgggaactattatcctgtaaggcatcaaacccatctgagattccttctcgtggtgtactaaggtcttgtactagactgagctgcactatatctggccttttgtctaatatatatattttcttccagctaaatctcgggatatacatgcaagataaaacctcagagctatccgtgttggtggatcgagctgtaggtggatccagcttagagaacggccagatcgagttgatgcttcatcggtttgtcaactaactttctctatataaccaagacaagcatatgttgttttgcttgtatttcacctttttttcattcatgtaggagaatgcagcatgatgacattagaggtgttggtgagattcttaatgaaacagtctgtctccctgaaggatgcaaaggattaacggtaagcttaagttctcatctcatttttagctgtccaagttgcaacgtatcagcttttaagggaacatgtgacagagcttgtttccaaggtggtattaaatcgttatagttggtcttataaccgttatggtaactctgaattgttttgcagatacaagggaagttttatgtacagatagataaacctggagatggggcaaaatggcgtcgaacatttggtcaagaaatttattctccactacttatagcattcacagaacaggttgctcttaaaaaaaaaaaaatacttacttccctccagttctataagatagtgaagtgagataaggtactttttttgtaggaaggagatagttggattaattcacataagacgacattctcagcgtttgaaccgtcatattcattaccaaaaaacgtcgcattactcaccctccaggttagttggattgtgtactgtatacatgtcaaagacggttttttattagtttgaccacactcacactatgattaattctgacattttcaggagttggaaaatggggaagttcttctaaggcttgctcacttattcgaggttcttacttgtcctctctatgcgtttccaccgttaataatgtgttatagctatgtgctttttggttgtggaaatgtagtttaacactaggccgattaaactagcaaataattagagatatagaaaaacttgtattactcagaaaacccaaatcttgcagtgtcaggaaaccagacaattagttgtatagagttagttcataaaaccaaaccgtaacgtttagggtgtatttttcacctaaaaatcaaactgttttcatgtttatactcgtaaaaagctgactatgcggttgatcatcgtgctatgtcatttggttttccttaatagttccacatgtgaaataagatgagacctaaagtaatatagaagggagatggtcaagtccactaattggttttaaattgagaacccatgaacttcgacagtgttgcttttttggttcactaagcaacgggtaaaatctaatgtggaatttgataattattttctatctcttctcttaatggtttcatcgaagttgagtccttctgagttactgtcttgttaaccttgtgaaggttggggaggatagtgagtactcagttatggcaaaagtagagctcaagaaactattccacaacaaaaaggttcgccaaaaaaagacgacccttctcttatttgtctcactgtatgttaacaaaaacaactgccgttctgtttttaatatgttttgaacagataagggaagtaaaggagacaagtctttccgggaaccaagagaaggcggagatggagaagagacggctaatctggaaagtagaaggctcggccggggaggaagtgaagagaggagaggcggtggacgcagagaagctagtggttgagcttgttccgatggaaattcgaaccttgttgatcaagtttgatgatcaaattgaaatggttggtgataaagagcagcaacataggttatgaaataatacacgttgttgttgtctttttaagtttaatcggagaagagaaaaaagtttgaatttagtgtctgatgcgagtttaaaattcgggtgattgcaacagtcacgagtgcgatcccggtagagtatcgcaatttctgcattaacatttacgtttgctaaggggtgggcattttaaccgaaccgaaccgatccgaaccaaccgaactcaaaccgacccaaactaaacccggattaacactaaaattattcggttaggcttcttctcaacccaaatagttcggtttaaaaacctttcctatcacgacaataaattttgtttggtgtttacataaccgaattaatcgtaccgaatccgaacttaaaccgaaattcccaccgttaacctggctatactgaaactatatatatacgtatatatatatatatatatacatgcgatgttgacaaatgaacacaaaagtagataaactcaaaccggtagttattacattaactgtgtaataaagattcggtatatcccacccgcgaagaaaaggaatcatatcacgggttaacgaatccgggtcgggtacacggagcaatcataaagaagaaacaaaaactacgacgacaacttttttttggccttggttaaaaaattttcataagtgaacacagaagaagcggtggctctgagccggcgaaatctcctttctcatccctaaaattttcatg

SEQ ID NO: 27847 - DNA, 3003 bp, Unknown
  misc_feature (1)..( 3003): 2750-1469P.txt file - cDNA_ID_2992438; gDNA_ID_1620576; Annot_ID_160996
acagtgagttgatctcttttcacaattcttcatgttaaactgatgaagagaaatttcagtattttaatttcctactttctagattgggcctataccagctgatgatggtattagcaaagagattatcactaaacttacaaccaccatgaagacaaatggaacattttacacagactcgaatggccgtgacttcatcaagcgggtattagatgcaaaattcatgtgaagtagtttatttttatttttgtaacaaggggtattttgtttttattgtaacatactttgttacattttcttgcagattcgggacttcagaacagattgggacttgcaagtgtaccaaccggttgctgggaactattatcctgtaaggcatcaaacccatctgagattccttctcgtggtgtactaaggtcttgtactagactgagctgcactatatctggccttttgtctaatatatatattttcttccagctaaatctcgggatatacatgcaagataaaacctcagagctatccgtgttggtggatcgagctgtaggtggatccagcttagagaacggccagatcgagttgatgcttcatcggtttgtcaactaactttctctatataaccaagacaagcatatgttgttttgcttgtatttcacctttttttcattcatgtaggagaatgcagcatgatgacattagaggtgttggtgagattcttaatgaaacagtctgtctccctgaaggatgcaaaggattaacggtaagcttaagttctcatctcatttttagctgtccaagttgcaacgtatcagcttttaagggaacatgtgacagagcttgtttccaaggtggtattaaatcgttatagttggtcttataaccgttatggtaactctgaattgttttgcagatacaagggaagttttatgtacagatagataaacctggagatggggcaaaatggcgtcgaacatttggtcaagaaatttattctccactacttatagcattcacagaacaggttgctcttaaaaaaaaaaaaatacttacttccctccagttctataagatagtgaagtgagataaggtactttttttgtaggaaggagatagttggattaattcacataagacgacattctcagcgtttgaaccgtcatattcattaccaaaaaacgtcgcattactcaccctccaggttagttggattgtgtactgtatacatgtcaaagacggttttttattagtttgaccacactcacactatgattaattctgacattttcaggagttggaaaatggggaagttcttctaaggcttgctcacttattcgaggttcttacttgtcctctctatgcgtttccaccgttaataatgtgttatagctatgtgctttttggttgtggaaatgtagtttaacactaggccgattaaactagcaaataattagagatatagaaaaacttgtattactcagaaaacccaaatcttgcagtgtcaggaaaccagacaattagttgtatagagttagttcataaaaccaaaccgtaacgtttagggtgtatttttcacctaaaaatcaaactgttttcatgtttatactcgtaaaaagctgactatgcggttgatcatcgtgctatgtcatttggttttccttaatagttccacatgtgaaataagatgagacctaaagtaatatagaagggagatggtcaagtccactaattggttttaaattgagaacccatgaacttcgacagtgttgcttttttggttcactaagcaacgggtaaaatctaatgtggaatttgataattattttctatctcttctcttaatggtttcatcgaagttgagtccttctgagttactgtcttgttaaccttgtgaaggttggggaggatagtgagtactcagttatggcaaaagtagagctcaagaaactattccacaacaaaaaggttcgccaaaaaaagacgacccttctcttatttgtctcactgtatgttaacaaaaacaactgccgttctgtttttaatatgttttgaacagataagggaagtaaaggagacaagtctttccgggaaccaagagaaggcggagatggagaagagacggctaatctggaaagtagaaggctcggccggggaggaagtgaagagaggagaggcggtggacgcagagaagctagtggttgagcttgttccgatggaaattcgaaccttgttgatcaagtttgatgatcaaattgaaatggttggtgataaagagcagcaacataggttatgaaataatacacgttgttgttgtctttttaagtttaatcggagaagagaaaaaagtttgaatttagtgtctgatgcgagtttaaaattcgggtgattgcaacagtcacgagtgcgatcccggtaggagtatcgcaatttctgcattaacatttacgtttgctaaggggtgggcattttaaccgaaccgaaccgatccgaaccaaccgaactcaaaccgacccaaactaaacccggattaacactaaaattattcggttaggcttcttctcaacccaaatagttcggtttaaaaactttcctatcacgacaataaattttgtttggtgtttacataaccgaattaatcgtaccgaatccgaacttaaaccgaaattcccaccgttaacctggctatactgaaactatatatatacgtatatatatatatatatatacatgcgatgttgacaaatgaacacaaaagtagataaactcaaaccggtagttattacattaactgtgtaataaagattcggtatatcccacccgcgaagaaaaggaatcatatcacgggttaacgaatccgggtcgggtacacggagcaatcataaagaagaaacaaaaactacgacgacaacttttttttggccttggttaaaaaattttcataagtgaacacagaagaagcggtggctctgagccggcgaaatctcctttctcatccctaaaattttcatg

SEQ ID NO: 27848 - DNA, 3000 bp, Unknown; identical to SEQ ID NO: 3158
  misc_feature (1)..( 3000): 2750-1469P.txt file - cDNA_ID_2992442; gDNA_ID_1620628; Annot_ID_47180

SEQ ID NO: 27849 - DNA, 3000 bp, Unknown; identical to SEQ ID NO: 3158
  misc_feature (1)..( 3000): 2750-1469P.txt file - cDNA_ID_2992442; gDNA_ID_2926187; Annot_ID_140859

SEQ ID NO: 27850 - DNA, 3003 bp, Unknown
  misc_feature (1)..( 3003): 2750-1469P.txt file - cDNA_ID_2992453; gDNA_ID_1620706; Annot_ID_48883
tcttcattagcatcaccgaaacttcttcatgttcttgctgttgatgatagtatggttgatcggaagttcatcgagcggttactcagagtctcatcttgtaaaggtaactgttgtgtttgtgtttatcaaaaaaaagtgttgtgtttgtttatcttgtgtaatctgtttaagtacaagaatctgacattagttttgttctgtctcagttactgttgtcgatagtgcgacaagagctttacaatatcttggattagatggagagaataatagttcggttggatttgaggtaataaatctgatcattgtgtttaatatttttgagagtgagaatccattcaaatttggtgttaaaagatttttggtttgaaattatattttaggatctgaagattaatttgataatgacggattactctatgcctgggatgactggatatgaactactgaagaagatcaaagtaagttttgttgatgattcaattgttttcacaaaattaaaatgaagttctgatttgacgaaaaaaaatttaaaaaaaaatgaagttttgatctaatcttgtttatggattttgaactttttaacaggaatcatcagctttcagagaaataccagttgtgattatgtcttcagagaacatcttgcctcgtatcgataggtatattctactataataatcttaactatgatccttaattcttgtttaggtcaagattatgtaggaccaaaatttaccaaatatagtagattttgtgcatttattacttcaggagatggggatgattagatttagagggtattgtttgtttaggaaactttttaaagtaatcacactaatttaggatttgtgataaagttaccgttaaaggatatgtattgactaaattaaattgttgtataatcacaagattttgttatgatagaaaaggttattatatgattactttttaactatcatggggttaactttggtggtggttgtatatttgatcaagctgagatttggtgtttattttagtgggtcctaaaatgatttttaaaatggatcttaggaataataaaatttatcttgtggccataaatttagaaaagaataatccatcataagttaagcaagatcttctcttgagatttgattctatataagccggtgacatgttaggccctccaaaactttataatatatgttttaattgtttgggttgcataatcttaggtagggtcatttataaaatcccaatcctcgtgatagacacctcacatgcctttgcttattactaaggaaccaaaccctctttaccagattaagtttaatgattatcatatatgagctggccattttctgtatccaaagttataaactttatggaattagatcactaacatttggttccttatatttattcagatgtcttgaagaaggagctgaagatttcttattgaagcctgtgaaattagctgatgtgaagagattaagagattctttaatgaaagctgaggaaagagcttttaagaatattatgcacaagagagagcttgaagctaatgatatctactcgcagctaaaacgcgcaaagatctgagtttatcagattccacgtacgatatgttctttaaaagctcaaagattcacacacatgcatgtcctgattctttcggcttacaatttttgagacattacggcttcttttgctgatagaaccaagactgatcaagagtgacaaagatgggtttttataagatagaaatgtaaattgtagacttggattcattagagaggagaagagatacattttttttttctttacatgagagatatgtaaaatggtggtgtgttattttggaagttaacatatgaatttcttttgttaagattacttaaataatgatttaggaatggattagtagtttagtaccgttcattacacgaagacaagctaatcttttgtctaattaaaataaagctgtctacatgaatcgaatccagcgagataagttagttattttaagcgttggttggaacactttacatggcttttcgtagaaatttccccaagttgggttttattaagaccaagaaaattctagtctcctagacttttttttgtttcttttgttaatttagtctcctaggctttttcattctatctgaaagcaaaatatggttatgcaatttggtttagccaaaaaaacaaactaaatttttctagtccggttcatgtaacttcataatcaaacaagtaaaagtcgaatgtgacgcgtcttgccgaacgcaaaaacggaccaggcaagaaggtgtagttagttaattcggttaatattcagctgagagaaatcgaaccggttccatatcttgtagattatccggtttactttccggataagatttataagcaaaacagagttaaagtagtagatttcttctatacgagaccaaatctgaaaacccaagtcaagctacaaaaacttaactccaagcgaacaaatctcctcattcattaaacaacaaaattgttttccgacaaaaaagtgaatatcattgagttactgcgaaatcccaaccgagagtgacatctcaaaccaaaagatggagtctatattaaagagacgaagactccaaagtcaagctacaaaatttccaagcaaagattacacagagaaaactttccgaccaaatgtgaatgtttatgaaagtttctgcgaaactccagtcatgtcggatgtacaaagccatacaccaatgtaaaaccgacacgtggaaagctaagattcctagcttttctttcttcatgagtctccaatagccaaagagtcaactccaaaaaaaaaaacccatttttgcattgaaatggtctcatgatggggtattttgggtaactaattagtcctgtctacatcttcccataaattaacagagtaggagcggattaaagaagcaagacgattcaaaagaaaaaagagagaagaaagtccactaaagaaaagagaatagatatagatcaatg

SEQ ID NO: 27851 - DNA, 3003 bp, Unknown
  misc_feature (1)..( 3003): 2750-1469P.txt file - cDNA_ID_2992461; gDNA_ID_1620769; Annot_ID_50186
ggcgaacttgatcagaataagcaaaaagtgatcctgtgttagaaattgcactgcatatgatcttccgagcatctttacttttaacacgaaccaatggcttagtggagacacgcccactagaatcattgcttatgtgaatacgaagaatatctaaagaacaagaatcctgaaccaagagaagagaagtctgattgaacactgtattatgtaccatctgcatgggcactctctgaggcgcaggacatatatcatgtggagggaacttagtaaactcttgaaccgagtatgcataaagcttggcatcatcaccagctgaaatgagcatcggaacccccaaatgtgcccatttatggtaactgaaaccagccggctccttcctgcgctgtttaggacttgttacttttgcattcctatctggaatggaacctgcaaaaggtgggagcataagaataatttaaaaaaaaaaaaagactaggtagcttctagatacaaaacattgatcccatatgcattcggatacacatcatggcccaagccaaaatcagtgctacggtttctcgtgataagttctaagtagtttgatagaattaggttactggttttacatcggatttatatttgtagtcgaatgagggcttcttatgattttattatattgaaccctctgggtattctctgtgtttgtgatcctttaactctaaacacattcaatcttgaatcttaattatcaaccatacaggaaaatctgaatatagctcaagaagccactgaccttcccaacttattggcactgcaacagttagagccctgatatcatgtgtatgagcccttacacaaccgatataatcccacttctgagcagaagaaggtttaaaatcttgtgatctagatgtaccaccagagagcttatataaaataacctacaaaagcatgaacggagaattagaaagttgtcacaataacagccaaacaacatatataatgttatgtcaatgcagaaaggtttctttttaatcttacgagaccttaaaatcggtaatagtaattgtttctactttatataagtcccatttctcgtccatggggaagaacctgtctttattatataccaattattaactgggattcacatgagtaaacacactagcagtatcatttacctgtccatcagcgcctgcagaaaacacccggttatgacttggggatgctgcaagagcattgacatcacccttgtgattagaatgcgcctgcaaaagggttccatgctggctatcccaaaactggacacttcctgtactatctccactgacaagaactccatatctaaaataggatgtacataatcagtaataggaaaggtaaacataaactaacatatgagcacggtaatttttacctcaatgaaagaagtgaccagatgcagagctcagacccatttcccagtcctccaagtccaactgttattctatatacctcatggcatagattagcatcccagcatcttatcagcctacaaatattgttggaaaaacaaaaaaaaaaattaaaactttagccaaatcaaagaacatccaggggtcttcttgcacaccaaaaatgcatctctaaggaaagtaaataataatattgcatatcatacaaagtaaaataaattatcctcacccatcgctactgcctgaaaagatcctctgtgcgtccgcactccacgtcacacttaaagcacgacctatgaaaataatgttccataaagctctaagtaaatacaataatgaaagatcaaaacgatgcaaaggggagtaaagagttctcaccagtgaccctaggcaaagatctatagtacgttaacttgtcagattcagagatataatatatcctcacacagccatcatcacaagcagctgcaagatgcctatccaaggcctccactttctcatcaagctcgtccaactctgaatcatcttcaactccactttcttcctcgtcgtctgatttctcactcaagtatccattctgaatcagcttagcttctttactttctgcttcaatagagataggggccagagctatttgccagattgaaaacccaattgaatctaggacgacctgaacaattagataccatacgagcaaattagcgaatgaacttattttggaagtaactagaatcatttacaagaagctaaaaacttttattcaatgaaattcaccttctgcttcaagtcgaaaagatcccactctgaaattgagccatcaatgctcgaagaaaacaatctagcggaagaagaacctttagaaccagtaccaaaccacgcaaggtgcgagattctcgattttggatctccatgaatgatctagactcaaaagaaagtgaacaataaaactcaaatcagttaccacgaatataaccgactcaaaatgttcaaaattggaagagagaaaacaaaagcacgtacgagctgacagtgccaagaggaagcaccgggagagacgagccagagctcaagagaaccatcctcacgagctgcggcgacctgagaaccgtcggcgctggtggccagagctaccaccggagatggcttccaatcgatggagctgcaccggtactcaaacatggtggcgacggagaaagagaaagagatgagagacgacgaagcaaattgcgtttttaggtttttcaaagggttttgacttttttttagttaggagcgcagtttaaaatcggtcgggtcgacccgacccattgggccataaatctggtttcaagttaaatacgttgtataatgccacgtaggcaaatacaaaataagaaggaaatacaaaataaatatttgtagagcctctagatgattacgcgggttccatatccaccatatactacttatcttaagccttacgttttaagatactactctgtttttcaaattcaatggacctttttcttcaaatctccagctttctgcatagatccatgaccatgagagtctgtttcttagaacgaaaatg

SEQ ID NO: 27852 - DNA, 3003 bp, Unknown; identical to SEQ ID NO: 27851
  misc_feature (1)..( 3003): 2750-1469P.txt file - cDNA_ID_2992461; gDNA_ID_1620769; Annot_ID_167442

SEQ ID NO: 27853 - DNA, 3003 bp, Unknown
  misc_feature (1)..( 3003): 2750-1469P.txt file - cDNA_ID_2992465; gDNA_ID_1620769; Annot_ID_50166
acctcaaaattctagcccagaatcttcaccatcgtcttctacctccgccacgtccacagtcccaaatccaccaccaccacctccgacaaacaaccacccaatgcgaacccgagctaaaaatcatataaccaagcccaaaacgaaactctccctcctagcaaaaacagttcaaacccgacctcaaataccaaacacggtgaaccaggctttacgagatgaaaaatggaggaacgctatgggagaagaaatcaatgcccaaatacggaataatacatttgaattggttccaccaaaaccaaatcaaaatgttatttccacaaagtggatttttacactaaaatatcttcctaatggtactcttgacaggtataaagcaagattggtggctcgaggttttcggcagcaatatggactccattactctgaaactttcagtcctgtggttaaatctctcacaattcgcctagttctacaattggcagtgtctcgctcatggacaattaaacaactagacgtaaacaacgcttttcttcaaggtacattgacggatgaggtgtacgtcacacaaccacctggttttatcgaccccgatcgaccacaccacgtttgtcgccttaagaaggcgctttatggcctgaaacaggctccacgcgcttggtaccaagagttgagaaattttgtttgctcgttgggattcaccaattctctcgctgatacatcagtgtttgtttacatcaacgacatccaaatcgtctactgcttggtctatgttgatgacattattgtcacgggaagtagtgatgcgttggtaatggctttcatcaccgctctttctcggcgattctcgttgaaggacccgacggatttggtatattttcttggtatagaggcaacaagaacctcacaaggtcttcatttgatgcagcataaatatgtttatgacttgttgtctaggatgaagatgttagatgccaaaccggtgtccacaccaatggcgacacatcctaaactttcactctactctggcattgctctagacgaacccggagaatacaggacagtgatcggcagcttgcaatacttggcgtttacacgaccggatattgcgtatgctgtgaatcgattatcacaatttatgcatcgtcccacagacattcattggcaggctgcaaaacgcgtccttcgatatcttgcgggaactgctactcatggtatattacttcgctcaaactctcctctctcgcttcatgcattctccgatgctgattgggctggggacaatgacgattttgtttccaccaatgcatatattgtgtatcttggctctacacccatagcttggagctcgaagaaacaaaagggagtcgcacgttcttccaccgaggccgagtacagggctgttgcaaacacaacttcagaaattagatgggtatgctctcttcttactgagttaggcatcacattaccaaagatgcctgtgatatattgtgacaatgttggtgccacatatctctctgcaaatccggttttccattcaagaatgaagcatctagcattggactatcattttattcgcgacaatgtgagtgccggtgcactacgagtctctcacatatcaacacatgaccaacttgccgatgctctaaccaagccattgcctcgtcaacactttcttcagttttcaagcaagattggagtgagcaaactccctccatcttgagggggcatgtagagtatataagtaaaggatagtttagtaaatcattaatccctaattcattctaatgtagtccctatatatattgtaattatatcatctaatgaattattcagccttcaatactatagtttgatcatgtgcttactttcccttcatttgcgatacttcaaggttcttgctgccactgtttctttgaatgcgtcacatgtttgaacatgtgtgttctttttggatcgaagcttagctctttagatggaactgaataagtaaaagaggtcactggataagctctgttactagaataataggagggcttctgcttcacatttgtaatcctctctctttctctgaattgatgttgcaattgcttgtcatcagtatctgtatttccatagataactgaactcattaaagggcaaccgaagctgcttcgtggtttatgtttcttctttgtgggctattttgctttgcactttcacttgtttcttagttttggtttgatttttcatactgggccctgagcaaaacaattttagttatatgacttgtgaaacttaaatgggttttaatcgaatggtaacttcatctaatttgtttgaataattcatcatggaccttaatgataatatcttgagtctactaatcatttcacaaatcctttcattttccaacagcaagtagcctgatttttgaacctcagcgatagacagcttaaagtgcggtcattctcgcaaaaagctatcagtctttatttgattcacgaacattatacacgaaagtcaaaattaaataaccaaaaaaattaaacaaaaagcaaacaagaaaacgacttctctggtatgattggaacaaatttaatagagagagaggttagataagaatgtggtagaagataagacccaactacgcgtcataactgggtcccatctttgtctctttcccttcttcactcgccaaccccatcgcgtgtccccacgctccttccctttactttttctcgttatccaaaacacgacgattcttcattttagatttttttcattaataaaaaaaaaaaagtcttttattgcagaaatttcgatcgtttttgttgtgtgtacagagagattatcgtgttttgttggcaatcgccattaaaccttcttccctctaacccaatcaaatttgcggctctttcttttatcttctcgcctcggttttagcaaaccctttagttatcttcttcctcaagcaatttttcttttggattagattggtgttttcttttggtttgtgtggtgatg

SEQ ID NO: 27854 - DNA, 3003 bp, Unknown; identical to SEQ ID NO: 27853
  misc_feature (1)..( 3003): 2750-1469P.txt file - cDNA_ID_2992465; gDNA_ID_1620769; Annot_ID_167420

SEQ ID NO: 27855 - DNA, 3003 bp, Unknown
  misc_feature (1)..( 3003): 2750-1469P.txt file - cDNA_ID_2992469; gDNA_ID_1620740; Annot_ID_49595
actaaacaaaagccgactcataccaaatgtctagatagcaatacctccatcaatggtgaatgcctgcaaaccaatattttcaaccatggttaggtcgctaacataattagaaaccaaggttaaccaccattcgacaggagtatgagatattaacctgtccggttatgtaactggctgcaggactgagagccaagaattctaccaagccagccacttcttcagcttttccataccgtcctgaaaaccaaaccgttttgctttgtatcagaattcttttttatctaacaattttttcatgtctcagatacatcctatccatataaattacccagcaacaaatgtaagagatgaaatgtccattacctaatgggattgttcccaggattttcttttccatgtcttctccaagctctgcagtcatgtcagatgcaatgaatccggggcaaaccacattgacctggaatagagcaaattgtagacggaacaagtttcacaatcatgtccaggaagtttaaaaaaaagacgaatatgatgagggagataggtcacatacatttatattcctgctcgcaccttctctggcagcagtcttggaaaacgaaataactccacctttagccgctgcgtagtttgcttgaccaatattaccaatgagaccaacaactgacgagatattgatgattcttccctgcaattaagtataccatgaattatgcttgtcataatatcacttcttaatcttatagaagagctcaaaaaaaaaaaaacgtagttgtctttttatatatcatttctccctatgcttcagggaaggagtaacatgtcaaaaccaatgacaaacgtgtgaggatatagacggtgacatggcatatgacaagtaaaaagtgttaccctttttttcttcatcatgatctttactgctgcctaaagagagtaaacgagtatcagtccctgaaaatccgagtatcaaaattttagcagtattgcaggaatacaaacctgagtacagagaaatacaccagtgagattcaaagcaatcacttcgtcccattgtgattgcttcattcgtattaacaaggtatcccgagtaattcctgaaaatatgtagccacgtcagtaaggtactaagtaaaacttaatgggaaccaaggttttcatttacctgcattgttaaccacaacatcaatggttccccatttgtcaagagcctgcagaaaaataacaaaaggaaaatgaaaagatgtataaggattagggaatataagatggtgtacagttgatcactcacggttttcatcatcgcatccacatcagtcgctttcgagacatcacccccaaaagtgatagcctggccaccatattcttcaatctacagttgcacagagaagaaatgtcagagattacatgaaataagttgacattgtaaacgaaaacactattaactgcagatgacatttgttagccaaaagataatatttcatttggcagtgtggatcaagagcaaaatcacaaaacgcatttgagaagcatagggcaataagaaacattttccaggtccagaaaattcatttgtctacatttcttgtcccagaaaccaaaactgtttaaaggtattatcaacgttaaactcgaaaggtaccacatttattttcgtaccaacaacaacatccttccataccaaacacctatgcattatttggtctaaaccgatatcccgaagcagaaaaagaaggaaagagctgaaaaccattctagatacttggtgcatgaatcatgtaaattgcagtctaatccagggcaatgaatcacctgtttagcaacttcttcagcctcttttgctgacctagcataattcaccaagacctgcaacagaaacagagtgtttgcttccagatcagaaaatttatgtgtagcaattacggatataaacctattgatgtctccatcactataatgacaaaagaaattgaaagcaatcctgtgttaaaatcttcataactcaagactagtaatatcatgcaaattgaatgctcgaagagtacatatacagatcaaatctaacaacaaggcgctccaatattccgaatagtgttaagcctaaccttgcagccagctttacccaaggctagagcaattgctttaccaatccctctcgaggcaccagtgataacgaccactggagattccactttttgaacaacttcccctggtgattgctcagtagcagtagcttgagctttcacaactgtaataccacaaaaatgttgagaattgagagagatcaaatctatgccaaaaccgcaaaggaagagagaagaggaatgaatataccagaggtagaaaacggctgccgcgatctacatcgcagcattccgaaatgaggtatcgcagagtgaagcggagccaattgtcggatttgagagatctcacggaaacctagcttcgcgacggctttcaaggagatgagtctcggtgctgcgacggcggcggccatggcgaatctgttgttaaagtgaatccgtacaagtgaacctcgtaaagatcgacccagtggagaagaagaagagagaaaagtcttaattttgtcttagtttctgctcaaacaataataatatatagaatttcaaaaaagcgatacaaacgaagttatgtcaagtgtgtaaaagtcatgtttatagttggggcaggtcgtcgaataagaggagactcgatttcacgaatagaactgacctaggtattcgggttttgtatcggatacggttcatatttgttcggatgcgggtaattgtataatatatagttttgtggagcagtgtttaaaaaaaaaattggtcaaagaaaaaaaaagaaagacaaagaggattgaacggtagacgtagacgccattggagtttgaaagggaattagtcgacgttttatggatcattgtcgtttcggtgtcattttcttcttcttctttcgctagcacgatttaaagcctgactagatccatcatcggccatg

SEQ ID NO: 27856 - DNA, 2733 bp, Unknown
  misc_feature (1)..( 2733): 2750-1469P.txt file - cDNA_ID_2992469; gDNA_ID_1620753; Annot_ID_166864
ttcttttttatctaacaattttttcatgtctcagatacatcctatccatataaattacccagcaacaaatgtaagagatgaaatgtccattacctaatgggattgttcccaggattttcttttccatgtcttctccaagctctgcagtcatgtcagatgcaatgaatccggggcaaaccacattgacctggaatagagcaaattgtagacggaacaagtttcacaatcatgtccaggaagtttaaaaaaaagacgaatatgatgagggagataggtcacatacatttatattcctgctcgcaccttctctggcagcagtcttggaaaacgaaataactccacctttagccgctgcgtagtttgcttgaccaatattaccaatgagaccaacaactgacgagatattgatgattcttccctgcaattaagtataccatgaattatgcttgtcataatatcacttcttaatcttatagaagagctcaaaaaaaaaaaaacgtagttgtctttttatatatcatttctccctatgcttcagggaaggagtaacatgtcaaaaccaatgacaaacgtgtgaggatatagacggtgacatggcatatgacaagtaaaaagtgttaccctttttttcttcatcatgatctttactgctgcctaaagagagtaaacgagtatcagtccctgaaaatccgagtatcaaaattttagcagtattgcaggaatacaaacctgagtacagagaaatacaccagtgagattcaaagcaatcacttcgtcccattgtgattgcttcattcgtattaacaaggtatcccgagtaattcctgaaaatatgtagccacgtcagtaaggtactaagtaaaacttaatgggaaccaaggttttcatttacctgcattgttaaccacaacatcaatggttccccatttgtcaagagcctgcagaaaaataacaaaaggaaaatgaaaagatgtataaggattagggaatataagatggtgtacagttgatcactcacggttttcatcatcgcatccacatcagtcgctttcgagacatcacccccaaaagtgatagcctggccaccatattcttcaatctacagttgcacagagaagaaatgtcagagattacatgaaataagttgacattgtaaacgaaaacactattaactgcagatgacatttgttagccaaaagataatatttcatttggcagtgtggatcaagagcaaaatcacaaaacgcatttgagaagcatagggcaataagaaacattttccaggtccagaaaattcatttgtctacatttcttgtcccagaaaccaaaactgtttaaaggtattatcaacgttaaactcgaaaggtaccacatttattttcgtaccaacaacaacatccttccataccaaacacctatgcattatttggtctaaaccgatatcccgaagcagaaaaagaaggaaagagctgaaaaccattctagatacttggtgcatgaatcatgtaaattgcagtctaatccagggcaatgaatcacctgtttagcaacttcttcagcctcttttgctgacctagcataattcaccaagacctgcaacagaaacagagtgtttgcttccagatcagaaaatttatgtgtagcaattacggatataaacctattgatgtctccatcactataatgacaaaagaaattgaaagcaatcctgtgttaaaatcttcataactcaagactagtaatatcatgcaaattgaatgctcgaagagtacatatacagatcaaatctaacaacaaggcgctccaatattccgaatagtgttaagcctaaccttgcagccagctttacccaaggctagagcaattgctttaccaatccctctcgaggcaccagtgataacgaccactggagattccactttttgaacaacttcccctggtgattgctcagtagcagtagcttgagctttcacaactgtaataccacaaaaatgttgagaattgagagagatcaaatctatgccaaaaccgcaaaggaagagagaagaggaatgaatataccagaggtagaaaacggctgccgcgatctacatcgcagcattccgaaatgaggtatcgcagagtgaagcggagccaattgtcggatttgagagatctcacggaaacctagcttcgcgacggctttcaaggagatgagtctcggtgctgcgacggcggcggccatggcgaatctgttgttaaagtgaatccgtacaagtgaacctcgtaaagatcgacccagtggagaagaagaagagagaaaagtcttaattttgtcttagtttctgctcaaacaataataatatatagaatttcaaaaaagcgatacaaacgaagttatgtcaagtgtgtaaaagtcatgtttatagttggggcaggtcgtcgaataagaggagactcgatttcacgaatagaactgacctaggtattcgggttttgtatcggatacggttcatatttgttcggatgcgggtaattgtataatatatagttttgtggagcagtgtttaaaaaaaaaattggtcaaagaaaaaaaaagaaagacaaagaggattgaacggtagacgtagacgccattggagtttgaaagggaattagtcgacgttttatggatcattgtcgtttcggtgtcattttcttcttcttctttcgctagcacgatttaaagcctgactagatccatcatcggccatg

SEQ ID NO: 27857 - DNA, 3003 bp, Unknown; identical to SEQ ID NO: 27855
  misc_feature (1)..( 3003): 2750-1469P.txt file - cDNA_ID_2992469; gDNA_ID_1620740; Annot_ID_166426

SEQ ID NO: 27858 - DNA, 3000 bp, Unknown; identical to SEQ ID NO: 12802
  misc_feature (1)..( 3000): 2750-1469P.txt file - cDNA_ID_2992472; gDNA_ID_2214573; Annot_ID_135102

SEQ ID NO: 27859 - DNA, 3000 bp, Unknown; identical to SEQ ID NO: 12802
  misc_feature (1)..( 3000): 2750-1469P.txt file - cDNA_ID_2992472; gDNA_ID_2214573; Annot_ID_186238

SEQ ID NO: 27860 - DNA, 3003 bp, Unknown
  misc_feature (1)..( 3003): 2750-1469P.txt file - cDNA_ID_2992480; gDNA_ID_2214570; Annot_ID_135047
ctcctaaaaaaaccaattattcaacatatatatgcctgatactgatcgaataaatgatacatgatatcagagcagaagattttaacttccatttcgtcagcaagttcacgagcctctgtagtcacttccacgtctaaagccaaaattgtagcaaattcctttttcctctcgagcatcactcccgccttcattacatccttcttttgcacaggccctatgccaataccaccaacaggtaactttacagctggggacttcaagaattcaagcaatgcttccaaagaacctaatgtagacgcttgtatataaactccttcaccacttttgtcaatcctgctcaaaactgagtttacatcttccataaccaactccttaattgcttcgatgtcatcatcaggtccaacgacatgcagggcagtaccaacaattacatgttcaaggtccttttaaacacaaccaaaaaatggaaaataatattcaggatgtgatcattaattaaaagagactagaaattaagattaatgtagtatcagtccaatcaccttggcaataatattgatacactctgcagcctttattacttcgtgatgtacatgattaccctgaaataccagaccaagaattctcattgtgtatagaaaaagtacgtaatggtatttgcatgaactataatttcttaaggaataacagtaataagtacattcacatgcaactcctttattggatgaggagtcagtaatgctctaatcgttgtgacaataggtccctaaaatataagaagatataagatcattatttaagttctaagtattatccaatgcattacttatttgagtttggataataagtttttacttgcctgtagaccacaaacgacgatttgaccaccttcatggagttcaccatttaccaacacaacatcaatcgttgtaccatagccttccataactttgacctctaggacagtacactgcttaacagtttcaagaaaggatcagaatccaacatgctgaagtattgtacaaacaagtgttacctaaaagagaaaaggagcaagacctgcactttgtcaacatatgtaattagtttctcaaccattgttttctgagtcaattgaaccaacaacaacaatagatctgggatcccttccccactgaaatatcaagaaccaaaattactcaaccatttaggataaattacaaacaataaacaaagagagactcatatacctaatagcacaagtaggaacaatactaaaagtttctcccatttctttattcttgtaataaagctcactgttgagtccttgctccttaaactggtttataatctgtaataccaatgaaacaacatatacacaaagtgatagctcaaacccatagatgatgataaactctagatgaataacttacctcattcagcctcatgttaaattcatttataacatctttagtttgttgcttcatcgcctccaagataggagcattttcacatattctccatccatatagcctatccacctataagtacattgaaaattttattttccataaaaacatttacaccatagaacaaaacaaatcacaaacagttttaccttattcaatgcaataatgaactccgtattcttcattctcagaagatttagacattctatagtttgtggctctaacccatgcattatgtcaacaaccaaaattgcaaagtcacacaaacctaagcctcttgagcgaagatttgtgtagaactcgtaaccaggtgtatcgataaacagtggacgtggcaccttaagttttgtatcggatttcagttccatggtcttctctaggatgtttctcgctgagagatatgttgcacccatcttctgagtggtacctccagcctcgccttcttgtacatttcctgtgatgtaatctaacagctttgttttaccagtatcgatatgacccatcatacagcaaatgggagaacggactttgtcttcctcggagagcttattacgtctagagtgttcatcgccaacaatttgctgcttatcatctccacctcgagcactcggcttcttcagatccattgctaaacaatcgaataagctttaccttatatgggagatgacttgatcgacaaggttgagacagaaaacgagaattagctatgattttttctttgtgaaacttcctatacggtggagcaaacacgttgtgtagatatataccgattctaagtatgtaacgatgctgcttaaataatttctagaccatgcaagatataattgttttttctcggattaagattcatttacataaatgattttaaatggaatgaaatctactatatattaaaaggtaaatttttgtaaatctttaattattattcatatccaatgccattaatgtttttatataatacattttaaagatttttctaacttacttaaaaggataaaaaataaaaaagattacacatatagacacaatctagctactgcaaaaaagatttttttaaaaagcataaatctactttatttactaattataaatttaatttgtttcacttttattagtgataacaagattaattgttttgtttacacaaacaatattgttttatgatttcacttatatgaacattattatcaagagttataaagtttgcaaaagaaataggtttttattgactgaagaattgagaaattttctcatcacctttaaaattaatattgggcctagcgatgaaccgggccaacgcccattaaacatatccgataatagtttaaacccggagagactcaaagtagagaaaaccctaattgtatataaactaaaaatacttccttaattcttcacttcttcatcgccgtctgcacaaaaccctaatctcacaatctcctacgagatctatcagtctccacggtaaacgacactaatccatttcaatttctccatcgtcttctccgatcaaattctccatttacttatctgttcactatttttccagaagatg

SEQ ID NO: 27861 - DNA, 3000 bp, Unknown; identical to SEQ ID NO: 7255
  misc_feature (1)..( 3000): 2750-1469P.txt file - cDNA_ID_2992483; gDNA_ID_1621135; Annot_ID_56543

SEQ ID NO: 27862 - DNA, 3000 bp, Unknown; identical to SEQ ID NO: 7255
  misc_feature (1)..( 3000): 2750-1469P.txt file - cDNA_ID_2992483; gDNA_ID_1621135; Annot_ID_172629

SEQ ID NO: 27863 - DNA, 3003 bp, Unknown
  misc_feature (1)..( 3003): 2750-1469P.txt file - cDNA_ID_2992491; gDNA_ID_1620762; Annot_ID_50021
tgtcttgaatctcaaccacagtttccaagacctttcctttaccatgttcctgaattgctcgcgtgagaaactcttcacctccagcgttatcagtgatgatcttctcaatcatctcatcattagcatgttctccagtgacagtgaagtaccttctctcaacagtctccttgtactcactcatcatcttttgcctcagcccctgaaactccatcatcacttccttaagtttcttcctcagcccattagtcacagcggttctgctcctataaaccggagtcccagagagccttttaatctccttgttggctttatccatctcttccagcttcgacttaatcgatttcgccttcctcaaaccagacacaatctcgttagagatcttgttacgaagagacttcacagactctgccttgtgaacacctttactctcttcatggtactgttcgatccgagccagcgtctcactaatcaaacccatctctgctttcacatactctgcttcttctaagaaagatgacagattctcatccatcttgtctgctttcgtagaagccatctcaagatcaaagtcaggtcctgcttccatatccttcatcgctgcttttttcaagtcaacgtaactcataaacgatttcgtcatcaagtcgttcatctttttcacctgaaagtcaacaattttacaagaatcagagagaatcgcagtgattgtaacagaatcaaacaagagaaaatcaaagaaaatacaacatactcttctgattagtgtgttcttctagatccacaaagtttctgcccagaaagtgagagagtagtgtgaagtaaagcttactatagaatttgattagcgatttgtgagatgagagaaagctttctttctaatataagaaaaaggagaaattagccgttactgtgatttcttcgccccaacggctatattttggcgatgtatccgttgtcgtccatttgtctatctgtttctgtttcttcaaatctatttttaaattcatgtgaatttctttcgaaactttaaaataatatagggactaaattgtaattagatgtatgttttagtgccgacgtgtgtgattgagacagctttaaagatatcgaaactgagaagaaaatatagggactaaattgtaattatgtgtatgacatcgcttttgtcgacaaatcatcattggtgacgatttacgaaagcaaagaagaggtgttcttagctgcacatttgtcaccatttatacaaaaattgtggttcttgtgttttgttttttatgttggaaaacttatggtatagtttcttttgttacgatacaccttagttgaaccattcaaattattaggatattttcaaatatataatattttaattctaatttcgtatgtaaacgactctccaataaaacatctccactagcttgttggtctctaaacttgaaatcagtttttatttttcttgtaatattttcaaaattgtttcaatatcgtagacaaattttaaataaaatgtacatcatatctctataaacttaataatacccaaaattttgactaatcacattaaattccttatgatattcgaataaaaaaataatttaataatatttattgtagtcgcaattcaatatttattctgtaatgcttgaaaaatgtttttaaaaactgtgtcactacattactataacgttagtatgtactaaattttgtaacgtttcatggttataaaatagtattagtttaccgacaaaaatatatagattacgtaacgcttgttttacattaaaacaaatttgttaggattgttttgtctattctacattcgtcacatttgttttgtttaaactttttgttttctaattaaaaaattattctgtttttgtaattaaatatagtaaatttgtttgccgcccaaaaaaatattacataacgcttgttttacattaaaataaagttgcttcgattgttttggctgttcaactctagtcacatttgttacgtttgttctacttattgtcgtgaatcgatcgaaaacttgtgcaatgtggaattgagggggttagatgtaaaccaaaaaactaaaaagggcaatctccaattattttgttaaagaggtggcaattgcaaatctccaataatataaagttcataaaaaaggttaaaggagagagttgtggtggagagagtgagacccacgtgggtgatgtgttggcaaactatcttccttaaaatccaaatccatttatccatcactacttttttttcttttgtttggtagtaaaatccttcactagttgattgcagatgactaataaagtaataatctttcattttggtggttcatcgcctaatttgttgtttacttgattgataaatgtttgaggatgaaactgtatcatttatttttctcaaaattgtttggttcatgacctatataatccatttgtttaatattaatataggtaaatttaaaattcgttacttaaattggctaaacatactcttcaaaataatatatatccacttaacatagttaaaactctgtattcagataaaagcatggtaaaaaaccaaacatatccatttaaatgtattcaaagtcatgagaaaatttcctatacttgttcctttatatctgcgagaagtcatgaaccttatccatttattagttttcttctgaccgactaaacctgataatcactaatccaccgttagatcttaaaattccaaatccaaaatggacggtcaagatcacttaacgaaaaagaaaacagtttcctgtccagaaatgtctaaccttgaggcctttttctctttcctttaaacttttttttttcgattataaattttctcgtgaagctaatttttcctgagaaagaaagcgaaacttcgctggcgactaaagattgctgagaagacacgtcgtctctgtgagaactttttctttttcttctggtatattctggagacagatattgttttttcttctgattagagaataatatg

SEQ ID NO: 27864 - DNA, 3003 bp, Unknown; identical to SEQ ID NO: 27863
  misc_feature (1)..( 3003): 2750-1469P.txt file - cDNA_ID_2992491; gDNA_ID_1620762; Annot_ID_167177

SEQ ID NO: 27865 - DNA, 3003 bp, Unknown
  misc_feature (1)..( 3003): 2750-1469P.txt file - cDNA_ID_2992494; gDNA_ID_1621150; Annot_ID_56864
cttcaggtgtggacactgcaagcagcttgctcctgaggtactatgactttttcaatcacttaaaataggatttgcaagtggagttttttttttactggtctaattcatgtagcgatggctaatgggtggttttatttttgtttacagtatgagaaggctgcgtcagctttgagcagtaacgtcccaccagtggttcttgctaagattgatgccagtgaggaaacaaacagagaatttgcaactcaatacgaggttcagggtttcccaacaatcaagattttcagaaacggaggaaaggctgttcaagaatacaacggacctcgtgaagctgagggtattgttacttacttgaagaaacaaagtggacctgcttctgctgaaattaagtcagctgatgatgcttctgaggttgttagtgacaagaaggttgttgtggtaagtacaaaacatgttcttcagcttttctctctgttttatgattttaatcatgtatggtagttaaataatgtctatttctattgttttaggttgggattttccctaaactatctggctccgagtttgattctttcatggccattgctgagaaattgcgctctgagttagatttcgcacatacctcggatgccaagcttcttccccgtggagagtcatctgtaacaggacctgtggtcaggctattcaaaccctttgatgaacaatttgttgattccaaggtttgtatattacattggttctgttatatagtatattgttgcggaatgtttgtttgatttgcttctttgcattcaggatttcgatggtgaagctctggagaaatttgtcaaagaatccagcattccacttatcaccgtctttgacaaagatccaaacaaccacccatatgttatcaagttctttgaaagcactaataccaaggtaactcatcctagagttatcaaatatctcaattccattatgctgtaaccagttcatgatatactacatagatggattcatattatgccatttaattttactggagaattatgtttaaatttatgaaaattctgaaatgagtttatttgtaaaagttgatatttcgtactaaattatgttatggctatggaaggagctgcgagtgtgtgccatattagctgagtcggactctagtgtctataatttactttttgaatattctcagtaaaagcttcaagaatcctcagtctctgcaatattttgattttcaggcgatgttgttcattaacttcactggagaaggagctgagtctcttaaatcaaagtaccgtgaagttgctacatccaacaagggacagggtcttagcttccttctaggtgatgctgagaacagccaaggtgcattccaggttagtcttattcttctatcttcaatcgtttatctccaaggtagcattggtttcaaattgctgaacacatttctctcctttctaaaccattaacagtactttggactcgaagagagccaagttcctctcatcatcatccagactgctgacgacaagaaatacctgaaaacaaatgttgaggttgaccagattgaatcatgggtcaaggacttcaaggatggaaaaattgctccccacaaaaaatctcaacctatcccagccgaaaacaacgagccagtgaaggttgttgtttctgacagccttgacgacattgtcttaaactctggaaagaacggtgagttactttacattgttaaatcacaaatacctgtttgctcgtagcaaaaacttataaatcagttttcattcctcctatttacttgcagttttgcttgaattctatgctccatggtgtggacactgccaaaagcttgctccaatcttggacgaagttgctgtgtcgtaccaaagcgactcaagtgtagtcatcgctaagctagtaagtcctttctctttcttcacatttgagagtatttgttcttgatcaccggattcttactctttcacttgtccaggatgcaaccgcaaacgacttcccaaaagatacctttgatgtgaagggattcccgaccatttacttcaaatcagcgagcggaaacgttgtggtttacgaaggagacaggacaaaggaagatttcataagcttcgtcgacaagaacaaggacacagttggagagcctaagaaggaggaagagacaactgaggaagtcaaggatgagctctgaaaagagaagtgtgttgtgtctcttagctgctagcttagtttggtagttttgaggaaaatacacagaagaagacagagcattgagtagactgagagacagagagagagagacgacagacagacagagagaatctctttatctattcattaggtttttatatgtgcactcttcagaacaataatggctgcctccttttcttttttttggttgatgttacctttttttgtttgaattcagttctcctttaatatagtttttgaggcatttcttgggacgagttctaacactaaaaatatattaattctgaagcatataccaagataatatactagttgactcttaattggttccactatttgaaaagaaaacaaaaggctaatttggttgttgaggaaagtatgagagaaaggaaactcaagcagatcgtcgaggagatcaaacgttacttttactgtccaagcgtttatcaacatttacaattttattgacttgttcaacatgcttgttccttttttggtcctaatactttcagttttttcactaaacaatctaatggaagaacgagaaacagttaaactaaaccaattggttaaagatattgaaaccgaccttgaactgatttaactcagaaatgtcggtttcgttgtttgtctgaattttgtgaacctcgagaaaacaataaaataatattaaaaaaaagacagagaaagagtctctgtttctatcttcttctttttttttcccggtaacagggagctcgcacgggcggctacgaaatcgctgtattttcaaatcgtctctcagtttccatg

SEQ ID NO: 27866 - DNA, 3003 bp, Unknown
  misc_feature (1)..( 3003): 2750-1469P.txt file - cDNA_ID_2992498; gDNA_ID_1620743; Annot_ID_49660
aaacataatctcaaaatcttaggtagaagctttccactttatataaatgtttttttttgcaaaatcattatgttcaaatactatatttttgggtttacgcaacaaatttaacgctgtaagccaacgtgagaaaaagaaaaaatatagccctatcatttgtttttcttaaagaaccaccatacaaaatgaaaggcaaacgtatagaggaaataatttgccaaccactcattccaataaaagaaaggtcaaaaataaacacaagccaaactattcccaagtatataaagcaatgttcactagacaaaccatcatcaaccagtttaaccgtagacatcattccttattgtcccatccaaatagtaaaaaaaaaaagaaaaaaaaaataaaatgaaaaagtcaacaagactcttatggctattatccatcattgttttggtggcagccgtttctaaggcagtcgcagaggtagacaacgatgatgatgacgataatacttcattggaaggcatgacgacggctaaacgtgaaaccctcgaagttgaggatcatacttcattggaaggcatggttaaacgtgaagccctcgaagtaaaaccaccaaaagctggcaaaggcaaaggcaaaggtaaaggtcgtggcaccgttgccgcaggacctgagatgaattggcctggacaatgggagttattcatgaagaattctggtgtttcagccatgcacgcaattttgatgcctttgatcaataaagttcagttttacgacgcaaccatttggagaatttcacaaatcaaattgcctccaggcgtaccttgccatgtttttgacgccaaaaaaaataaagttgattgttgggctcactctgtcctcgtcgatattaacaccggagacatcaagcctcttgcggtaacaaaattactaattattactccctccgttccttttttatataacgttttagttaaaatcacgcagattaagaaattacaaatataattcattttacacattagtaattgttgatctgatggatttaatggaaacatgacagcttacaacagacacatggtgttcttctggaggtttaaccgtaaacggtactttggtaagtactggaggattccaaggaggagcaaacacggcaaggtacctatccacatgcgaaaactgtgtatggattgaatatccaaaggcactcgctgcaaggagatggtactcaacacaagccactcttcctgatggaactttcatcgttgttggaggccgtgacgctctcaactacgagtatatccttccggaaggacaaaacaacaagaaactctatgactcacaacttcttagacaaacagatgatccagaagaaaacaatctttacccttttgtttggcttaacactgatggtaacctcttcattttcgccaacaaccgatccattcttcttagcccgaaaacaaacaaagtgctcaaagagttccctcaacttcccggtggtgcccgtaactaccctggttccgcctcctcggctcttctccccatccgcctctacgtccaaaaccccgctatcatccccgctgatgtcctagtttgcggtggtgcaaaacaagacgcttacttccgtgcagagaggttaaagatttacgattgggccttgaaagattgtgcaaggttaaacatcaatagtgctaagcctgtatggaaaacagagaccatgccaacgtcacgtgtgatgagtgatactgtgatccttcctaatggagaaattcttatcattaatggtgcaaaacgtggctcctctggttggcacttagccaaagaaccaaattttgctccactcttgtacaaacctaacaaacctttaggccaacgtttcaaagaactcgctccttccactatccctcgtgtgtaccattccatcgcaatcgctcttcctgatggtaaagttctcgtcggtggaagcaacaccaacaacggataccaattcaacgttgagtacccaaccgaactccgcatcgagaaattctcaccaccttaccttgatccagctctagccaatatgagaccaagaatcgtaaacaccgcaacaccaaaacagattaagtatggacaaatgtttgacgtaaagatcgagcttaaacaacaaaacgtagcaaaggagaatgtaatggtgacaatgttggcaccatcatttactacacatagtgtatcaatgaacatgaggttgcttatgttgggtattaacaatgtgaagaatgttggtggcgataatcatcaaatccaagccgttgctcctcctagtggaaaacttgctcctcctggttattatcttctctttgccgtctacaatggtgtccctagcgttggagaatggattcagattgtctaattttgatatgcatatattatcaatttattttttgaaacgaaacctatataacatgtttgtaaggttaattttttttctttatacttacatgtatatattctttgattcttgtaattattatattttttgaataaatgtttttttgatagatataacaaattggagaaaattgtcataatgaaatcactatatagaatggttatttattattttatattttttcaacagtcttgtagtcctttattaataaatagtgttacttatgacatttattttccaacatcgattccattttttattttttgtaagtaagaaaaaattcatttcattttaacattacaatacaaaatctaaatatataagttccaataaggcagtaattaactaattaatcatttaactaataataattatgtctaaatatcacgaatcgttcaattttttgtttttgtttttttgttttgtttttttaatgaatctccaaaataaaaaagaataaaaaagctttatctctagtctctaccgttgtcgtcacttaatctccgacggaggaaaagtagccaccgcttgacgaatcattcatcaacacacgcagagagctctgaatctcgaggaagaagatg

SEQ ID NO: 27867 - DNA, 3003 bp, Unknown; identical to SEQ ID NO: 27866
  misc_feature (1)..( 3003): 2750-1469P.txt file - cDNA_ID_2992498; gDNA_ID_1620743; Annot_ID_166537

SEQ ID NO: 27868 - DNA, 3003 bp, Unknown
  misc_feature (1)..( 3003): 2750-1469P.txt file - cDNA_ID_2992506; gDNA_ID_1620813; Annot_ID_50620
acgttattcccacgagtggtaataacaggcaaaccataagatctaccataagccataacaagcatctcagcaccagctttcgtggcagagtaaggattcgtcggaagcagctgagaagcctcatggttaccaacaagagcatcctcatcagtttcaccataaacttcatcagtactaacatgaataaacctcctaatctgaccagtaactttacaagcctcaagaaggacatgagttccatagatattattcttagtaaactcgaaactgttaccgaaggaattgtcgacgtgagtctgagcagcgaaatgcatgatggtgtcaataccttcagtgatgagaagatgattcaccaagtcagcactagcgatatcacctttgacaaacttgaagttcggagagtgcttagaaggattgagattcttgagatttgaacagtaatcaagcttgtcaagcacaacgattttgtaatcaggatagcttcgtatgagtctgttggcgacatgagacgcaatgaaaccagcagctccggtgatgagaatgttcttgggagtgtacgaagccatgatcaaacgctgcgtttaagaagaatgaaatcataaacactcaaatacgcagaaatgaatcagtagatctaggaaatcaaacgcataaaagcttagatccagatccgaaatctcgattctgtgattatgaccatcggatcaaagagagagagtacgaaagggtaaatgaaactcagtgaagcattatgatcaatgtaaaattcgagataatggagtataaaggaagacgagagattcaggaaacataccttcgaatttttcagatcttcaacgatcgcaagagaattggagaagacaattggaaaattccgaggaaaacgtgaagaattttcgacggtgacgaagctgaggaagtagcgaaagaaacggagaagaagaagaatcaaaattcaaaaaagagtcttctcgttcgtcacacagcaaaaatagaagaagaagagaacgaacactaaagactcctggagagggaagagtctacgggaattcattatatactgcttgcacttacgaaaatacccttctcgttttcactcttttacaatagcgggtaggtacacgacttgactcgcgtgttgatgatcgcgcgttttgtcaaacattaacttcgcatgtcagctaattactaacatgttatagtctaaaattagtctagatttgatttagaaaatggaattttataattataaaagactaaaaatgtgaatatgaagtatgaagtaacgattgtacgaaaaaaaaacaagaatagaaaatgattattgacgatttttaataaagtcaatgaagttaaaaacaaaattaggtaagtaaaacaagggacggttggctacagtgcgtttacgtttgcgattgtggtatacgtgttaggtaccatgtgtggctctcaacttctcaaacctttcatttacgatctagggtcattttcgtcattagatagcaatcgaatttgtatttgtaatgatattcttactatattttaataatagtcttttaatatgggatatgtaatcatttattgcacttgcccatatgcttaattagagatcaccgacacattccattattgtcacttgtgatcttgtgagagtgaatgattaactaaaatatttgtaattgatttgattttcctaatttctttgatcattaacatctaaagacgccttggatgatttgtgtgaaaaatagtttaacgggggtagagtagagaaacaaatttaattcagggaccattttagcaaacaacgtgtttaattgacaaaaggcacgtgagaccacgtgagtacttgttttggtttcttcttcatcggtccgatcagagagagagaatcgccggtgagaaaagaaaatggcgtcggcgatttctctttctctcttaaacggagcaacgcctttgaaatcgaattcgctccacaaatctagactcactccacttcatcttcgaactatctcttgttctagactatcttactctccctcgagtcgcgaaatttctctcaaaactcaatctactgttcctatttcgtgtaggcgtagtaggtttgacttcgttcctcgttgcggcatttcgtcgaacgatttgcctactgagaaaaagaagagctttggggagtgggttgagtttgtgggagaggcggtttcgacggcgtttccgatatgggtttctctgggatgcttgttgggactgatgagaccaagtactttcaattgggttactccaaattggaccattgtaggtcttacgatcactatgcttggaatgggaatgactttgacccttgatgatcttcgtggcgctttatcgatgcccaaggagctcttcgctggctttctgttgcagtattcggttggtttgcttctcaatgctctatctttagtgttcgattgttacgaattatgcacaagttagaagagaaatcgagaaagatgagatcttgaaggaaccggtatagatgatctgataataggtttgtttggtttggtaacataatcttgtggagtagttagagttattgcttgagctcatgattcctgttttatgatcttaccaaattatagttttgaaagagtagtattagagcatggataagttcatagcttgctgatgaatagtgttgcaggtcatgccactatcagcattttttgtgagtaaactcttaaatttgccaccacattacgcagccggtctcatattggttggttgctgtccaggcggtaaaatacaattctttacttgattgcattatattaacacttgtatggtgctctgatgcttttccgtttgttgtttgaaggcacggctagtaatattgtcacatacatcgcgcggtttgtaatccaaacaaaaagaaacgacttttgagttccataatacaactggatgatctgagtttcttttttttcattgtacagtggaaatgttgcgctatcagtgttgatg

SEQ ID NO: 27869 - DNA, 3003 bp, Unknown
  misc_feature (1)..( 3003): 2750-1469P.txt file - cDNA_ID_2992510; gDNA_ID_2214706; Annot_ID_136964
tcaattctcacctaatttggtcacattgagttctgggtaggtttcaaaacttaaagcattggacttttctattgaatatgaaaagctactccagataaactcgaactttacatgaaacaactgaggaaatagtgaataatttgagcaggtttgggttacaagagttaattttctggttattgtgcgacatgataggagaatgaaactcaccagaaatcaagagaggtaagcaaatcggagaaaatattaccggcgaacaatatcgatgggagcttcgcggtactcttctctaatttacactgcttgccgttttgtcgtagcaatgttggtaaaatgtgtcatagtaggtgttgcccaaaagccaaaataatatttaaataaaaacaatgtcaatgagttttacatctctataaatagataaatgatattaagtgacatgtttcttgtgttgtaatattcatattttcagttcctattctgctattcattcgaaagttttaatcatcttcaaagtaattctatctagagctgcttatttgttattggtttgtggatataaatttgatagtagtctaaattgtgaattatatatatgaaagttggtcaactctctccataaaatgacatgtgtcattcgattttttttaaactaaaaattaataaaattaaataagcaaattaaatgtatcatcaatcttactcttaattgatttctttaaaataaaaataaaaaacaaaaaaatatgttaataaattaagcactactttcattatattctttttattactattttttataacaataatcactactctataatgactaaatttttttaatacactataataaacttttaaaacataagacctaccaaataatttaatacgcgatcatttctcttattcactgataagattgagtgtgtataattgaaatagaatacataagactgaaattttgtttaaaacaataattattaaattaaatatgaagaaaaatatattgattaccatacaaaattcaaatactatctataaaaatatatttttatagatagtatttgaattatataaagtatggttttcaaagttactaattcataagatcgtgtcatgtgtcaagtcaaacgatcagatgtttacatgtgtcattaaaaatttaacttttttattctcttaaaaaaatagaaaatctaaaaaagtaaacaaatttacatatactaatttatatgtctctatatataattatatatatatttaacttttattcaacaaaaggaaaattaacaaatttgtttttacatgtattattgatcatttaaatgtagcacatattatttttttttttaaataatttagtatggataataatactaattaaaaagaccattgaagtttaaaatagtaatataatttatttaacattagtttagttggataaaattatatttgtcaatgtaatataatgttttcattcgttaaatcaaaacacaaaatattaattataagaataaatttttgaatacctatgttttaacctaagaattttaacgcatcgtacgatggagcgtcttgcatcctttgatgtgttactatacctatgttttattctaaaatttttaactcatgtaatcataagtgaaaatagaatattttgagaaaaactgcttataggatttaacttttcaattacttttaatgagaatatttttatttattaattttaactcatttaaaattaatttccatgatgtaaaattaacttacgagattatggcatataaaaaataaatattttcaacaatgtttggtttctaaatatttttgtggatttctgttttttagttaattatgttttgttaattgttaattatttttaatacccaacaaagatcatttctcttatatggatatatgcaatgacagaagatttaaaagtatttacttaaatgatactttcatttttgttttatttttagtttttcatatgaatactcttgaaatcttgttgagtttatatcaattctatatatttaatcatgagcctataacaatgttgttggagtattatatcagaagaatacataaaaccggaaatagtttatttataatcaagttagacaattttcaattcattcaagacacgatcatttttctaatattatgaattcaaaccaaagtgattcacacttttctttcacaatttatgccggatctagtacccataaaacataaagttaaatcaaactaaagtgtgaattcaaaagaacaacaaaaaaaaaccattaaaattagtttagctttgattgtgcctcaatgcaacctgatacaccactgataagacgacatgtcatcaaaatgacacgtgttaaaatatcattcgctatctaaacgtacacctgcgtgtcaacataaactgaggaagttaatgaactttttttacactgcacgaagaagaccctctcaaaagcacgaggaaggatcaaatcggaaacttaacagaatttagctaccaattactgtctccggcgagatctcaatttgatccttcacggtggcgtcgacgtccgggcaacaacaagctctctcgagaagaaagccattatcatcatcatcatcatcttcatcatctcctcctccgtcttcctcacctgttcgagctcctgcggcgaagaaaccgagtccggaatacccattttggcagcagaactggtttatcggtctgctattcgtgatggctttaggattcttctgtctcgctatcttcctttacctaagtctcgatcctgattccggttacacgtctgcctccgccgctgcttctggtaaagaaggtgtcgaggttcgttttcgatttcattgcttatgattttcggtgaatgtcgatttgtttcaatttcccatagatttgggggatttgtattgaaattcgaattaggtttgatcatcttctcgttgctgtgatattgacagattacttatggaagtgcgatcaagttgatg

SEQ ID NO: 27870 - DNA, 3003 bp, Unknown
  misc_feature (1)..( 3003): 2750-1469P.txt file - cDNA_ID_2992510; gDNA_ID_1620626; Annot_ID_47139
ccaaaagccaaaataatatttaaataaaaacaatgtcaatgagttttacatctctataaatagataaatgatattaagtgacatgtttcttgtgttgtaatattcatattttcagttcctattctgctattcattcgaaagttttaatcatcttcaaagtaattctatctagagctgcttatttgttattggtttgtggatataaatttgatagtagtctaaattgtgaattatatatatgaaagttggtcaactctctccataaaatgacatgtgtcattcgattttttttaaactaaaaattaataaaattaaataagcaaattaaatgtatcatcaatcttactcttaattgatttctttaaaataaaaataaaaaacaaaaaaatatgttaataaattaagcactactttcattatattctttttattactattttttataacaataatcactactctataatgactaaatttttttaatacactataataaacttttaaaacataagacctaccaaataatttaatacgcgatcatttctcttattcactgataagattgagtgtgtataattgaaatagaatacataagactgaaattttgtttaaaacaataattattaaattaaatatgaagaaaaatatattgattaccatacaaaattcaaatactatctataaaaatatatttttatagatagtatttgaattatataaagtatggttttcaaagttactaattcataagatcgtgtcatgtgtcaagtcaaacgatcagatgtttacatgtgtcattaaaaatttaacttttttattctcttaaaaaaatagaaaatctaaaaaagtaaacaaatttacatatactaatttatatgtctctatatataattatatatatatttaacttttattcaacaaaaggaaaattaacaaatttgtttttacatgtattattgatcatttaaatgtagcacatattatttttttttttaaataatttagtatggataataatactaattaaaaagaccattgaagtttaaaatagtaatataatttatttaacattagtttagttggataaaattatatttgtcaatgtaatataatgttttcattcgttaaatcaaaacacaaaatattaattataagaataaatttttgaatacctatgttttaacctaagaattttaacgcatcgtacgatggagcgtcttgcatcctttgatgtgttactatacctatgttttattctaaaatttttaactcatgtaatcataagtgaaaatagaatattttgagaaaaactgcttataggatttaacttttcaattacttttaatgagaatatttttatttattaattttaactcatttaaaattaatttccatgatgtaaaattaacttacgagattatggcatataaaaaataaatattttcaacaatgtttggtttctaaatatttttgtggatttctgttttttagttaattatgttttgttaattgttaattatttttaatacccaacaaagatcatttctcttatatggatatatgcaatgacagaagatttaaaagtatttacttaaatgatactttcatttttgttttatttttagtttttcatatgaatactcttgaaatcttgttgagtttatatcaattctatatatttaatcatgagcctataacaatgttgttggagtattatatcagaagaatacataaaaccggaaatagtttatttataatcaagttagacaattttcaattcattcaagacacgatcatttttctaatattatgaattcaaaccaaagtgattcacacttttctttcacaatttatgccggatctagtacccataaaacataaagttaaatcaaactaaagtgtgaattcaaaagaacaacaaaaaaaaaccattaaaattagtttagctttgattgtgcctcaatgcaacctgatacaccactgataagacgacatgtcatcaaaatgacacgtgttaaaatatcattcgctatctaaacgtacacctgcgtgtcaacataaactgaggaagttaatgaactttttttacactgcacgaagaagaccctctcaaaagcacgaggaaggatcaaatcggaaacttaacagaatttagctaccaattactgtctccggcgagatctcaatttgatccttcacggtggcgtcgacgtccgggcaacaacaagctctctcgagaagaaagccattatcatcatcatcatcatcttcatcatctcctcctccgtcttcctcacctgttcgagctcctgcggcgaagaaaccgagtccggaatacccattttggcagcagaactggtttatcggtctgctattcgtgatggctttaggattcttctgtctcgctatcttcctttacctaagtctcgatcctgattccggttacacgtctgcctccgccgctgcttctggtaaagaaggtgtcgaggttcgttttcgatttcattgcttatgattttcggtgaatgtcgatttgtttcaatttcccatagatttgggggatttgtattgaaattcgaattaggtttgatcatcttctcgttgctgtgatattgacagattacttatggaagtgcgatcaagttgatgcacgagaaaactaaatttcgattacattctcacgatgtgccgtatggatccggcagtggtcagcaatcagtcactggttttccaggcgtcgttgattccaacagctattgggtaactttcttcatctagaaagattatctcacacttttaatcacatgtgttttagctctgatttagatgaggaagtttctagctatggtgtggtttcttggttttattaagtgttttagtgagggatggtggagtgattgaggaattgttttgttttgatagattgttaaacctgtgcctgggacaacagaaaagcaaggtgatgctgtcaagagtggagcaaccattaggttgcagcatatg

SEQ ID NO: 27871 - DNA, 3003 bp, Unknown
  misc_feature (1)..( 3003): 2750-1469P.txt file - cDNA_ID_2992510; gDNA_ID_2214706; Annot_ID_189841
gagaagcaagagacgactgataggaaatgggacaatacatacatccataaaccataggacctgtaatatcaacagaattgaatcagattctgcttctcactcaccaaaattgatcagatacaagtataagaagaagaagaacctagaacaggaccccttccggcttcatcgatacccattagacaaggttgagatgcccattctggtgtcaaacattcagattccattccttcaacaaaacattcatatacattagggttttagcctcaattctcacctaatttggtcacattgagttctgggtaggtttcaaaacttaaagcattggacttttctattgaatatgaaaagctactccagataaactcgaactttacatgaaacaactgaggaaatagtgaataatttgagcaggtttgggttacaagagttaattttctggttattgtgcgacatgataggagaatgaaactcaccagaaatcaagagaggtaagcaaatcggagaaaatattaccggcgaacaatatcgatgggagcttcgcggtactcttctctaatttacactgcttgccgttttgtcgtagcaatgttggtaaaatgtgtcatagtaggtgttgcccaaaagccaaaataatatttaaataaaaacaatgtcaatgagttttacatctctataaatagataaatgatattaagtgacatgtttcttgtgttgtaatattcatattttcagttcctattctgctattcattcgaaagttttaatcatcttcaaagtaattctatctagagctgcttatttgttattggtttgtggatataaatttgatagtagtctaaattgtgaattatatatatgaaagttggtcaactctctccataaaatgacatgtgtcattcgattttttttaaactaaaaattaataaaattaaataagcaaattaaatgtatcatcaatcttactcttaattgatttctttaaaataaaaataaaaaacaaaaaaatatgttaataaattaagcactactttcattatattctttttattactattttttataacaataatcactactctataatgactaaatttttttaatacactataataaacttttaaaacataagacctaccaaataatttaatacgcgatcatttctcttattcactgataagattgagtgtgtataattgaaatagaatacataagactgaaattttgtttaaaacaataattattaaattaaatatgaagaaaaatatattgattaccatacaaaattcaaatactatctataaaaatatatttttatagatagtatttgaattatataaagtatggttttcaaagttactaattcataagatcgtgtcatgtgtcaagtcaaacgatcagatgtttacatgtgtcattaaaaatttaacttttttattctcttaaaaaaatagaaaatctaaaaaagtaaacaaatttacatatactaatttatatgtctctatatataattatatatatatttaacttttattcaacaaaaggaaaattaacaaatttgtttttacatgtattattgatcatttaaatgtagcacatattatttttttttttaaataatttagtatggataataatactaattaaaaagaccattgaagtttaaaatagtaatataatttatttaacattagtttagttggataaaattatatttgtcaatgtaatataatgttttcattcgttaaatcaaaacacaaaatattaattataagaataaatttttgaatacctatgttttaacctaagaattttaacgcatcgtacgatggagcgtcttgcatcctttgatgtgttactatacctatgttttattctaaaatttttaactcatgtaatcataagtgaaaatagaatattttgagaaaaactgcttataggatttaacttttcaattacttttaatgagaatatttttatttattaattttaactcatttaaaattaatttccatgatgtaaaattaacttacgagattatggcatataaaaaataaatattttcaacaatgtttggtttctaaatatttttgtggatttctgttttttagttaattatgttttgttaattgttaattatttttaatacccaacaaagatcatttctcttatatggatatatgcaatgacagaagatttaaaagtatttacttaaatgatactttcatttttgttttatttttagtttttcatatgaatactcttgaaatcttgttgagtttatatcaattctatatatttaatcatgagcctataacaatgttgttggagtattatatcagaagaatacataaaaccggaaatagtttatttataatcaagttagacaattttcaattcattcaagacacgatcatttttctaatattatgaattcaaaccaaagtgattcacacttttctttcacaatttatgccggatctagtacccataaaacataaagttaaatcaaactaaagtgtgaattcaaaagaacaacaaaaaaaaaccattaaaattagtttagctttgattgtgcctcaatgcaacctgatacaccactgataagacgacatgtcatcaaaatgacacgtgttaaaatatcattcgctatctaaacgtacacctgcgtgtcaacataaactgaggaagttaatgaactttttttacactgcacgaagaagaccctctcaaaagcacgaggaaggatcaaatcggaaacttaacagaatttagctaccaattactgtctccggcgagatctcaatttgatccttcacggtggcgtcgacgtccgggcaacaacaagctctctcgagaagaaagccattatcatcatcatcatcatcttcatcatctcctcctccgtcttcctcacctgttcgagctcctgcggcgaagaaaccgagtccggaatacccattttggcagcagaactggtttatcggtctgctattcgtgatg

SEQ ID NO: 27872 - DNA, 3003 bp, Unknown
  misc_feature (1)..( 3003): 2750-1469P.txt file - cDNA_ID_2992526; gDNA_ID_1621160; Annot_ID_57127
attgaaggttcttcttcttcctctctatctctactaggtaatctctaacctaatctctgaactctctttcatactttggattatgtttgattaattaataataaattaatagtgtagctttgtccgaaatatagggtttccgggagaagtcatggctagaaccgaagtctcagggaaagataggttaagcgatttaccgtgtcatttgctatgtcgcatcctctctaatctctctaccaaggaatcggttcgtactagcgttttgtcccctcgttggagtaatctctggtcgcttgtttctgttttggatttggatttccaagattttaaaggtgaacacgacatgggagaattcatagatagctttatggaatatcacgaagagttaggcttgaagttgaagagcttcaatatgttttatgatgctaatgagcacttgcatgagccatttgtgaggaggctaaataaagtggttaggcgtggagtttgtgatctgaatattcagaatatggtggatgttgatgtagcattagttaggatgcctccctcgctttattcatgtgctactttagtgaatttgattctctactgtgttgtctttgatcatccaagatcaaaatcggtttctttacctagtgtgaagaaaatgtattttgagggggtcaagtttgatggtgattctgttctggagactctcatatcgcatagtccggttcttgaggagttaaccgtgattccgcatccggaggattatttggaagtcatatgtgttcgttctcaatcactggagagctttagacttgagtctaagcgttttgagtgtgacaatcccaaagttgaaatcgattctccaagccttgagtttatgagtatctgtgataagaaacctgaaagccttaaaatacatagaattggtccttttgcggaggtaaccgttgatgttgagtttgatgttgaggatgatgatccattggagatatctaagatacgtaagtttctcgtcgggttatccacatttcacgaactgaccatctctgctcgaactctagaggtacacatatgattggtggattaaatataacattaagcttgtacaattttgtatatggtgttgacttactttttttttggctatacacagtccatccatgactactccaaggtgggaccattgcctccattctctaacttgtttggcttggatgcttcgttagtcgaatcttcttgggaagttttaccagcctttcttagttgctgcatgaatctagattcgctcgtcatagtgagtttcatttatttgtctatatttcacgtagttacattgagattcatatcccaagaaaacttatcaaaagttttatgttactaggaacttgactgtgttccagagatggaggagattaaactctcaccagtgcctcaatgtgtcttatcctctctcgactttcttcagttgaaggcaccatcgacaccaagtaaaatgaaacttgcgacatattttaggaagaagtgtacacgcttgacgaaaatgcttttaagtgggcagtaacatcatcaagaaaatgaaaaggattccaaagatatgctgaaaggtgtcaagttgttatgtgtataatgtcgtctctcctaaatcaagtttacctatcaacagttaattatcaaataatctattgtaagactttttagattttcttgttagacatggctttatgttttctagtttttttttatggatgttctttagtaaatttctatctcttaaaacaaaattgaaattctatgttgcaactatatgtaggattgattataaatttttatattctttcattgattcttactcgtaaactatattgcaatgagtaaacttaaaagtgaagtatcttggacttcatccatgttgttacgggttggattcaacgtcaaagtttcgttgaaagtttgttgctatagttttctatatatatatcacatgcattgtaattaggttgctatagtgtacaatacatgtaaaatatacaaaactatagcaacaaagttttagatacttaattgcttcctttaatctcaaaccatttggttgaatctatcaagtacacaggacatatgctcattcaaattgggtaactaagagcacccccaacgctggactctatgaaaatcccttaaaaacatacaaataataatattttaatcttattagggcttctgtataatttgaccaataataaaaacacatgtatataattttctcgagactgtcccttaaataaagaattttagggcctctctctcttcttacacttaccttttaattatttttcattctttttatcattagaaattttgttaagggaccaccgttggtggtcctctaatcacgcatggagtctagacgaaataagaaacgcattaataagacatatattattttttggtgaaagtataatgtagacaaaaaaaaaagataaagcttttgttttcttagacataacccaaagaacataccatatatatagcagaattagattaaaaacagtcagatcagaaaacaaaacaatctgaatagctaattgcacaaaaagctagggttttgttaaggattttccgagtttaataccgggaactgatcctcgtgaattgtcgagatagcgcttaatgttttgtaaatatttaatattaaccccaaatattcgattttgaccaatttataccccatcgagatatttctactgctgactttttagtgttttgtatttgacctcgtttgatggacgaaccggaatataattgtgttggttggtcaaccatttgtttttagcattttctggtctttaattaatcgctaagtaatctaattctggattaagaagaaaaaaaaacttcaaaagagacgcttttatacaacgctttgagcattacttggccctctcaaaagaatacacagaccagtcttcgtgtgctcgtaattggcgattctcaaattcgatctccgtacaaacaatg

SEQ ID NO: 27873 - DNA, 3003 bp, Unknown; identical to SEQ ID NO: 27872
  misc_feature (1)..( 3003): 2750-1469P.txt file - cDNA_ID_2992526; gDNA_ID_1621160; Annot_ID_173694

SEQ ID NO: 27874 - DNA, 3000 bp, Unknown
  misc_feature (1)..( 3000): 2750-1469P.txt file - cDNA_ID_2992530; gDNA_ID_2926207; Annot_ID_141797
ctattttattcggatttgaacagaagcctgacctcgctggattggctggatttctcaaaccgttgaatgatgttacaatgaaagctaatgcaatgactgaaggaaaaaggtcggattttttcaatcacttgaaggctgcatgcgatagtttatctgcattggcttggattgctttcactgggaaagattgtggtaagcaaaaagcgatcatgttgaaaaagattctgactttatgaaacttttatgatgtaaattttctttcttggttattttgtctgcaaggtatgagcatgccaatagctcatgtggaagaaagttggcaaatggctgagttttacaacaataaggtgctaatcttcgatatctctatgcttcaatatgttatgatgttaggagcttatggaaaacaatagcgaacgaggactttatagttacttgttcaggttgcagaagcttatattgctgtttgatgctctttgtacagtggtaattctgtgatctccatgttcttcttcaggttctggtggagtatcgtaacaaagacgcagatcatgtggagtgggctaaagccttaaaagaactttatttacctggtttaagggaatatgtcaaaagtcattaccccttgggacctgtatggaatgcatcagggaaacctgctagtgctcctgcaaagggtccacctggtgctcctgctcctccaccagcacccctcttcagtgctgaatcttcaaagccatcatcatcgtcaaaccagaaacaagggatgtctgctgttttccagcaactcagctcgggtgctgtgacctcaggtaggtttgaagctgtacctcttcatatttctggcatggtgtttatttagaatgtgaatcattagtagcttacaatcattgtgctttgctttccaggtcttagaaaagtgacggatgatatgaagacaaagaaccgtgctgatagatctggagctgttagtgcggttgagaaggaaactcgtaccagtaaaccggccttttcgaaaactggaccaccgaaaatggaacttcaaatgggtcgcaagtgggttttactaacaatgactatatattttagtttttcaaaactatgatcaaaatgctataatactgattgttggcttctactgtattattaggtgggctgttgagaaccaaattgggaagaaggacttggttatcagcgagtgtgattccaaacagtctgtgtacatatatggttgcaaagattctgtcttgcaaatacaaggtaattttgcgccattccaatctcactgtgaaagttggatatctactcaaaagtctatgaagcccttactgttgttgcctaatctgtaggaaaagtgaataacatcaccattgacaaatgcacgaaagtgggtgttgttttcacggtgagtggaataatactgtttcctcttacattcttacagtatacagttatgtgatttctaataaagtaaaatataacatgtctgtataggatgttgttgctgcatttgagattgtgaattgcaacaacgtagaagtgcaatgtcaggtttgttttctagattctataagcttttctaatggttgcagatgtatattcttaaggaccatctcttttgcttctcaagctcatgatatagctctaaccatatgcaacatttttccgagacactgattgctcttgctactcatctatggctgatctagggttcagctcccacagtttctgtggacaacacaactggctgtcagttatatctaaacaaagactcattagagacagctataacaacagccaaatcaagtgagatcaatgtaatggtgcccggtgctacccctgatggagattgggtatggctttcctctctttgtaatcatcaaaacgttttggttttcttatattcttcagattcattcaccactgtaacgaagatagtcatgtgtgtgacactgttcatggaaggaatcattctcaacattgttttgttgcaacattgtaggtggaacatgcgctgcctcaacagtacaatcatgtgtttactgaagggaagtttgagacaacaccggtctcgcattcaggtgcctaagcaaaggagaaactattatcactctggattgtgcttgaatatcaggcctttttatactcatatactttgtttcttcagattataatagaggaaagaatctgtttgtttgtttgttggttttttcttttgtctctatcccccaattttgggtttggaggttgtgggtttttgattttttttgtgtgatctgatcatcttgtgtcttgttcgtccttggggttttggatttggatttgggtttctcgtttcttttgtttttacttgtgggcttgtcccgagtccttgctgatgacgttgtgcacaaatcatacttatcatggatagaaaaagttgcaatcctgtttttggaatatgcagttatttatttaacctttttctttggttttgttttgtatatgatgtgaccacagtcaacataataattgtgagttgtacattgtggaatcacgaaagctaaaattattggtggttgtgggtgaaactttgaagaatgtttaacttggactactgagaaatagcatggaaacgaacaaatggtgtatttacacactgaaatatgtgttttgcgatactaatcatcctatggaatacctcatgcttcaaaagcaaactcaaaaaacaaatgctctcttttcgattctcctaaagatttcctctccagaaatagcacttttcagtttccaaattagatgacgagaaaaatcaaaagtataaaattacaaaataaagaccgaaacgaagacttaagctcaagacttgtgaacagaagtcaacacgtgtagtgtggaaaaacaagcacaagacgtgtctttggagtttgtatataaccgttacagtaaaaaacctcttctttaagtaacaacagcaacaacaacacaattcctaaatctctctctctctcaccatcaatg

SEQ ID NO: 27875 - DNA, 3003 bp, Unknown
  misc_feature (1)..( 3003): 2750-1469P.txt file - cDNA_ID_2992534; gDNA_ID_1620767; Annot_ID_50132
cttggtatggaaccgggagctggtagacacagttcaatttttatctgatggggaatctctctcccttcggcttgcaagttcagaattgggtaggaatgaaaggcccttattacatttgaagtttcagctttctttatatgatgttttttccctctgcagcatggttttaagtttttgtttttctggtgattatttcagctggtagcaatcgaacaaagattattctaggtactactgtcagcctatctattttcgtaatcttggtctttgccgcttataagtcctggagatacagaacaaaacaaaatggtgagacacaggcactttgttctcactcactctctttccttgtcctcttttttaatctaactcggtaccaaatccgaagcaaattaatctcttcctcttcatctgatacacactacatttctagaattcttaagttgtgtcccaaggtacagtctcaggttgacagttcttttgggaagtctatatggtcagtttaaagctagatgtcctaacggttaatatgttcgcttctattgaaagtcaatgcttatgctaataaactgctacaaattaagcactaatacatgcacacttgttactcgtagaaccaaatcctatgttcatccacagttcacaagatgcatgggcgaaggatatggaaccacaagatgtctcaggcgtaaatttatttgatatgcatactatacgtactgccaccaataacttcagttcctcaaataaacttgggcaaggtggatttggtccagtgtataaggtaatgtatcattctgttctatttaccttttcttgttttcctattctgtattttcttcttctgtagatgactatgtgcaactattcttccagggaaagttggtagatggaaaggaaatagccgttaaacgcctttctagcagctctggacagggtacagatgagttcatgaatgaaataagactaatctccaaactgcaacataaaaacttggttcggcttttgggatgctgcatcaaaggagaagagaaactgttgatttatgagtatctggtgaacaaaagcctcgacgtgttcctctttggtcagtcctctataactctattccattgacctcttcgttcttccatcatatgagaattatgaaatgtgtcgttgtcactactatcactgatctgtactatcttattggatagattcaactctgaagtttgagattgattggcaaaagaggttcaacatcattcaaggtgttgcacgtggacttctctatctccaccgtgactcacgcctcagggtaattcaccgagacctgaaggtcagcaacattcttctggacgagaaaatgatcccgaaaatatcagatttcggattggctcggatgtctcagggaacgcaataccaggacaacactcgcagggtcgtaggaactctgtaagaaccattcttcgaaaacattctctacaagattcatagtcatgatattccatataggtgaacctatttgatgtttgaacagaggatatatggctcctgagtatgcatggactggggtattctctgagaaatcagacatctacagctttggagttctactgttagaaatcatcattggagagaagatctcaagattcagcgaagagggaaaaactcttcttgcatatgtaagttttttggtaaacttgcatatgtaagttaagacttaggtttcctacacttgcagagtttcttgctctaatattcttaggatgtgaaactaaataacaggcatgggaatcttggtgtgaaaccaaaggagttgatcttcttgatcaagctcttgcggattcttctcatccagctgaagttggaaggtgtgtccagattggtctactctgtgttcaacatcaacctgcagacagaccaaacacacttgagttgatgtcaatgctcaccacaatatcagaacttccatcaccaaaacaacctacgtttacagtgcactctagagatgacgactctacatctaatgatttgatcaccgtcaatgagattacacaatctgtgattcaagggcgttaaagaaacagtgtgtgatcgaaatttgttcgaatttgaagtgtgggttctgctcaggtaaattaaagtgatcaacttttcttcattaccttttaaaaatattttctctacttgtaaaagagtttgtactctttattgttgtccatgtgctcatgaagctccaatgttttcgttgacttggtcacaaactcaaacaaacaggtcatcatcatttttttattatattctttaacggttttataaatttaagataaacggtcgaaattaaaatcacaatggttaagttcgagtttttgaggcaattgtgaatttgtgagttcatttattcttcttctggtcaaagtttgcaacttttggctacaagcacatatttttctgagtcgtcgtcactgtctctgtctcttcaaagtcccacgatagttgaagtttactttgaatctggctcatctgaattatgcattgaatgtgttcgatgaaatgcctaaacgagaatttaaattggttttatcattcttttgttttttgctggtcttctaaggttttggatcttcactttgcaacttgcaaaacgtttgtcggtaatttccagttttgtgttgtccttctcgaagaatgcaaaagctcaacttcttggcttagtagaaacgagaaagttgacttatgagtaccacacgttattttctgtggacagtaaggttgggagattctttgtcaaggtcgtctattattttattatttttgtttctctctttgctggtcaatagggtattgtttagtacttgtaatattcaaagaagtagtgtgaaccaagatctagatatttaattatctcaggatacgttaacataaaagtttttttttctcttggtctcaatgctcactctatccccatgaagttttgctcatactcaagttatcttgcagagaaatagaaaaaagatg

SEQ ID NO: 27876 - DNA, 3000 bp, Unknown
  misc_feature (1)..( 3000): 2750-1469P.txt file - cDNA_ID_2992554; gDNA_ID_1620422; Annot_ID_156633
ttaagaatggaaaaggatacgcaagaaatatactttttaaagaccttacattcagagaatccaaaaatccgattataatcgaccaaaattatgtcgataagggtcgcctagacgtggaggtaaatcatcttagtattctttctattaaaatttcaaaagcataactagattgcaaacaaatttgtatattttgtgtttaggaatcagcagtggcaattagtaatgtgacattcacagatattcgtggaacgtcacaacgcaatgagattataaagatagattgcagcgaagtcacatattgcaaagacattgttcttgataaaattgatattgctacggtcgatggaaataaaccagttgttgaatgcagtaacgtgtatggaaagtctatcaatactaacgatgctaatggttgtttcgaagattagtatccattttcatagaaaatatgagaaatagaaattattgtatattaataatgttgtaagaatatttgatcatttgttttatatgtatgatcgaataaaataattttatatattaaattatttcaatatactcagaaatgctaataattaatgagataatctgaataaccttggtttgattttcatttactttactttagcttacatctgctgtttcttgtttatgcaaatcaataagaacttgcaattaattgtttctccttctctttaattaatatgcatgatagaggtcccaatcacaacataagatcaatcaacacatgaattgttttaaagaaatacgtttgcaagtccaatattacacacatatctaataacaatgttataaacttatatttaatgatttgagtaaacttgcaatatacaaatcgcttatcgagcttaaataggcatgaattattggtggtaaaatattttctctgtttggacaacaaaattgagtcgtctttccatttattttctgatatatatttctcttttatatctattacaaagttttctctccaaaaagagagcacaccttgtgtttggatgtggttatcctgaaatattcagatttggatctgaaattcaactatcaagatgatgatccatagcttttacatatcatagttttggatatatgtccaactatcaaagtacccacatatatccaaatctttatcagtaaaaaaaaactaaaaattaataaataatatgtcaaaacaattttctataaattgttttaggataaaatataatatattaaaattaaatcactactttatataaaatcactaaatattatttaataatatatactttttaactcatatgaatactgatatcaaaatctttaaattaagatacaataaaatcaagagaatttcttgtccaatctctgatctggaacatcttacgtggacaattcagtatagaagatcttcgcagttacgaaaattcgtggagtttggaaaggagatttggagcaaaaataaaaagggtgtaaggcaatgctgatagaattagctgttttgaaagaagaaaaagcaaaagtagtattttacatacgttagtcacttaactaagtgactatgttagtgtctagtgattgatttgcgtgtgtttcaaattcaataggtcggattaaaaaatacaatatatctcccaaaaaaaatgaaactcaaaatgccaagatattttcccattttcccccactcattactatcttgatatttacttttgtttatatattacaaaaatatgtatcaattgaaggcatgtcatatcattatatcaatctcttactatcataaaaagttacgaaatccaaaatttaaattttattgctaaggtaatggtgctctgagatttccttacaatatgtagttgaaagaaacaatattgaagtagagctactcgcatatccccctggttagctttgaccaaatttttttttctttggttaaagggattttgatcaaaacttacaatacaatagaaatagccacaatactacaaaagacagccgctaaattccaaatctcctctaaaatgccacaacaaagcttaaaaattcaataattttacagatgtagtaatgttgaaaggtcgtcgcatattttttcttttgtctacattggagagaatccaataaactcttctactttggtttaaaccttttttaattttttttttaattttatggtttaaattttaaaattaggcttaaggtctcttttgtacattaactagtaaatcacatctttacccgaaaaactcaattcacatttttgtcaacttattgacttatatatcttttgaaaaataagaaacgagagaaataaacaaagtctatcatggcagccacaaacatttgtttatgaaattattaataagtactactaataggaaacacccacgcgtttagactgtagtggactaaatcgatctagtgattctagtcaaattattgtatagtcttctattaataattaattataactattatactaataaagccgtctttatgaactttctggtgacatgaatctgaaattttgttctgatattattgtttgatacatgattttagtctaattttgtttaataaataacattctagttttttcttaattgcaaaatatattttaaaattcttgcaatttttgaaagatatgagagtgtcgttttgaatataaaattttatttttcatccacgtaatataagaaaatcatttcatttcactcgaaaattattgaaaaaaatcagctattatttaagattcataatataatagcaatgcacgattcgaccacttgtattaatttttggaatcagtctttttaattaaaaaaatcataaacaaaataataataaaacattgcacatttttaaaaaataaattaatattgcacattgctgttacaagaataccaatgatgacttttgccttgctcatgtacgttattataagaaccgacaaaaaacgaagactaaagagaagaaaaaacacttccaaacaaaataatg

SEQ ID NO: 27877 - DNA, 3003 bp, Unknown
  misc_feature (1)..( 3003): 2750-1469P.txt file - cDNA_ID_2992554; gDNA_ID_1620863; Annot_ID_170388
tatagtttatttaagtgatatttatttttatttatttttgtttagaatggaaagggatacgcaaaaaatatactttttaagagtcttacatttagagaaaccaaaaatccgataataatcgaccaaaattatgttgataagggtcgcctagacgtggaggtaaatcatcttaatatattttcttctattaaataaaaatattaaaattataaaagaataactagattgcaaacaaatttatatattttttgtttaggaatcagcagtggcaatcagtaacgtgacatttacagatctccgaggaacatcaaaactcgatgagattataaagatagattgcagcaaagtcacatattgcaaagacattgttcttgataaaatcgatattgctacggtcgatggaaataagccaatcgttgaatgcagtaacgtatatggaaagtctatcaatgctaacgaggccaatggttgtttcaaaacatagtatccattttcatagaaaatatgagaaatagttataattttatatagctaataatgttatgtaagaatatgataaattatttttacgcatgatcaaataaaataattttgaaatattagattattcgatatactcaaaaatgctaataattaatgagatcatttgaataaccttggtttgattttcatttagtttacatcagttgtttctaatttatgcaaatcaataagaacttgcaatgaattgtttcttcttgtgtttaatcaaattgtatgaattattacttttaggttacatctgctccattacctcgtccatttcttttgttccagacatgatatatagttgcttgaaaaacataccaattagtatactgaagagttgtaccgatagtagtttgaattgtttagtagagcccaatcaatagagtaaacattggcaaagaaccaacccatgagagaatgccaaactgcagctgagtaacgacatgagaagaaaagatgactataagtttgaatacgatctctgttgaaagacgattgttgatagctaaccatgtgaagaatgagtatttgggagttgcataaggaccagacccccttatatatacaattctttccgtggatgtgttgttcgaataatttctaaacttttatcgtatatcaaaccaatctttcaattttataatcatcgatacattattaataaattcatgatatcatattttattttaaattactgtctaaatatttcaaatttactgtttttctttttttctatttatatttttcgtttaggtaattccacggcatattgtttagctagtttttctagtttattgttttctgaggttaattttgtaaactcttcttctccaaattgggaaaccaattatcgagttacctttaatatatgtgtggttaataaaaataatgacactacctaataatcagaaaaacatttacagtagaaaccctataaattaatactcgataaattaataaacacgataaattaataaaatttgttggtcccaagtcgggccaatgtaaaaattaaccaaaatcgataagataataagataataatttttttgaaatccctatgtaaaattatagtcccaataatattataaattaataatcatagatcttaagtatatattttaagactcatttttatatgaaatttttgttcaagttacaattacaactttaaaaaaaatacaactagtatgatctttgttgtactcgcataactatttgcatatttgatccgtcatagttgattttgtaaaatcttttatttgagaaagcattgctaagatttgggtaaagagaaattggattaagcttcatgtttacgttcacgttaatgtcgtagatatacagacacaatatcttgccgaaaaataaatttaaaaagtcaaagaaaaataaaaatctaacataagtatatatgcaaacaacaaaacatatagaaaattaaattaataacatttttaaaaaaatatagtattgtatttacgtaaatatacctataaattaatttttattaacttatacgataaattaataaatattaatttataggataaattaatatcactataaattaataaaattgcatggtcccaacattattaatttatagagtttctactgtagttggctatttagttacacatgatattattactcgtatttgttaaatataagttaataatgcaatgagatcacaatatgcatccaaatttgattctgtctttgatccaaaatggtttttatttatttccccttactcaagaattttcatttctcttttaacttatattttttaattatattttatctatttgactagataaaatccacttaaataggcgggcgtaagaaataaataaaaaatttcttataatatttgaattctaatagtaatccaaacttttttcattttatctaaatattcttaaaccaaattttaatcttatccattccattttgcagtaaaatttaattatttacgtcatgacaacaaactgaattttaattctatatattttatcttaatggataagagcctcaaaaaaattaattctacatattccatcttcttgtttttattttttatgatatttaaattctaaatagtaacccacacagtttttcaatatttagtgttctaatgtttatctcaatttatctattctctctaaatataaataattaatttatataataagatgctatgattcatttctaaatctgatataataagaaagataatatcacttatatgcaaaataatatccattatattaactaatgattttaggcacaaaatatgtagagtttaaaactatatccatgaacctgtttaaaacacatatacctatgattttgtatgtgtatatttaagtgatcaaaatcacatacatatacactacattacatttcgacaaaaaaatacaaaaaaatacactacattacatctgatcatttgatcatcagcacccaatg

SEQ ID NO: 27878 - DNA, 3000 bp, Unknown; identical to SEQ ID NO: 5746
  misc_feature (1)..( 3000): 2750-1469P.txt file - cDNA_ID_2992558; gDNA_ID_1620814; Annot_ID_50631

SEQ ID NO: 27879 - DNA, 3000 bp, Unknown; identical to SEQ ID NO: 4422
  misc_feature (1)..( 3000): 2750-1469P.txt file - cDNA_ID_2992562; gDNA_ID_1620705; Annot_ID_48862

SEQ ID NO: 27880 - DNA, 3000 bp, Unknown; identical to SEQ ID NO: 4422
  misc_feature (1)..( 3000): 2750-1469P.txt file - cDNA_ID_2992562; gDNA_ID_1620705; Annot_ID_165245

SEQ ID NO: 27881 - DNA, 3000 bp, Unknown; identical to SEQ ID NO: 4422
  misc_feature (1)..( 3000): 2750-1469P.txt file - cDNA_ID_2992562; gDNA_ID_2926196; Annot_ID_141273

SEQ ID NO: 27882 - DNA, 3000 bp, Unknown; identical to SEQ ID NO: 4422
  misc_feature (1)..( 3000): 2750-1469P.txt file - cDNA_ID_2992562; gDNA_ID_2926196; Annot_ID_201454

SEQ ID NO: 27883 - DNA, 3000 bp, Unknown; identical to SEQ ID NO: 5793
  misc_feature (1)..( 3000): 2750-1469P.txt file - cDNA_ID_2992566; gDNA_ID_1620818; Annot_ID_169341

SEQ ID NO: 27884 - DNA, 3003 bp, Unknown
  misc_feature (1)..( 3003): 2750-1469P.txt file - cDNA_ID_2992578; gDNA_ID_2214700; Annot_ID_189626
cctcaacctcgacctatctactaaacagtgttaatggcccactctgggtcaaagcccttgctaacgtctctgctatccttcaatctgttatctctttgcacgtaagtttcttagcgccaagtctacgcttttttaacaaagactgtcgtctctaactatatgtctgactcaattctttgttgtagatatttgcgagtccaacatatgagtacatggacacaaagtatgggatcaaaggaaacccatttgcgataaagaacctgctgtttaggatcatggcgagaggcgggtacatagcggtaagcacgcttatctcagcgctgttgccgttcctcggtgacttcatgagcctaactggtgcagtgagcacattccctctcacattcattctagccaaccacatgtactataaggcaaagaacaataagctgaatgctatgcaaaagctatggcattggcttaacgttgtcttctttagtttgatgtctgttgctgcagccattgcagctgtcagactcatcgccgttgattccaaaaatttccatgtttttgcagatttgtaattcattatattatatagtcaattgtgtatcctttattcttaggcaggtttatttctcctgtaagcttgtattctctctctatttgtcttaccattagagcctaaataaataaatcaagttctaaaatctaaaaagcatataaaagaccactttcatcataatcattctgaaaatttaccaacaaagaatactaagttgcatgattaaagtctctattagaaatgtaaatcatagtattagagaagaacataaaaacacctaacttaaaaaaaccttaatttagtgagatagagaagagaagaaacagaattgttgttggtttaacaaaaacctaatctttcaatgattagctgtttaatttgaaattataacaataatttagacaggccaaagtggaaccccactgtctccaccaaagctctagataaaaaaaaaaaaacgaaagcgttagatattttttatcaatcgtgctccgtaatcattacctttcttcttcatcttcatcttcacgcagcgacttctttgattctctctttttattctcagctccaatttcaacctgcatttctctcttctcaattttgggtttctttttttgatatctcatttgatcagatcgacgaagaggtaaccattttgccgtttgttagttcttaacgattttattctgttaaaaatcagatttttttttgcaatgcttgtagaaaaagattcgatttttgtgtactgattgaatcaaaatatgtggttatggatccatggattgatttgtttgaactgatgcaaatggctaatgtgaaaagtcaagaatgtgttaatgtagttttttttgttaaacctctttgtgttgttgggttttgaaatgttgttgttacagaggaagaaggtttgagctgagagatctttggaggtagaaagaagatctcaaaaacgatgtcgtttacaggaactcagcagaaatgcagggcgtgcgagaagacagtgtaccctgtggagcttctctcagctgatggaatctcttatcacaaggcttgcttcaaatgctctcactgcaaaagcagacttcaagtcagttttcctcttttgcctttcctaaatgtagttattagtgttttgagagtttcatttagatatttagctagagagatacttgatctgaattggtcttcgttaaagtgataaagttaaaacgtgttgatggtttctgaacagctgagcaattattcatcaatggaaggagtggtgtattgtaggcctcattttgagcagcttttcaaggagtctggtagtttcagcaagaactttcagtcacgtatgtaaaactcttttcttcaccttctggtccagcttttacatgtggtcactttaattttaatcttcaaactttttttttcctttcacagctgcaaagccattgactgataagccaaccccggagctggtaaacgcttcttaacaacgatgtttttatttagttacacgacttgagatacatgactctatttctcttcttggttgttctcagaataggacacctagtcgacttgctggtatgttctctggaacgcaagacaaatgcgctacttgcactaaaaccgtgtatcctatcgaaaaggttagtatacatttaagcttgtatatgtcattaccattgctttccaatacacttttgtgttctctctgtgattgttgtcaagaaaatcacagttaaacttatttggatcatttgcaatatgagttacatggatccgaatcacataaagttgagatctctttaatacagtcaattcttatatctcattgttctgttttctaaaaattgtaggtaactgtggaaagccagtgttaccataaatcttgcttcaagtgttctcatggaggctgtccgatatctccatcgaactatgcagctctagagggaatattgtactgcaagcaccatttcgctcagcttttcaaggagaaaggaagttacaatcatctcatcaaatctgcttccatcaaacgcgctactgctgctgctaccgcagctgctgcagctgtagcagccgttcccgaatcttgaattcaaattctctttatttttgtgtatgtgctgtgttgtttacatgtattcgatatgattcatgttctttgtcttccataattgaaccaggcataaaattctcccagttttctctgagtttcttgtttgtgatactactacatctataataaccgaggacttttggctttgatcttggtcttttgagctggaccgaaccggaatgttagaccggacaaatctctatcgttactcgtcgttagtcatctccggtccggttcttcactaaagttaaaaatccagttaaacagaaatcaattaagaaaacacaaaacccaaattgaattgtgtaaagatatgaactttacaaaagaaaattgtcaatttcgaaaaatg

SEQ ID NO: 27885 - DNA, 3003 bp, Unknown; identical to SEQ ID NO: 22896
  misc_feature (1)..( 3003): 2750-1469P.txt file - cDNA_ID_2992586; gDNA_ID_1620742; Annot_ID_49638

SEQ ID NO: 27886 - DNA, 3003 bp, Unknown
  misc_feature (1)..( 3003): 2750-1469P.txt file - cDNA_ID_2992588; gDNA_ID_1620813; Annot_ID_50614
gaaaagcgagatcttcttcatcatcaaaaattgcagtttccgcccaagtcaaagacgaagagatgggcttcagattacaacgaatgggctttagtaaacaacaatccatgagtcatgccgagagagtcataattagtccaccatgagtcaggttcgttgattcttaatttccttttctttttttttttttttaataaagattttgatttattttatgtttgttattttaaaagtttttatttttttggatgctaaatttatataatgatacgaaaactaaccggattttagatccagcattagtcgttagcgattccaaatattcaacttgttttcatattattatgtagatttagcattcaagtttttcattcggatttttaaagtactttttaaaatttagattttgtttattcggattttaaaaatcttttttcatgtgtttattttttaaaattatattatttaatggatactaaatttatataatgatatgaaatctaaccggattttggatccagcaatagtcgttagcgattccaaacattcaacttgtttttcctattattatgtagattaaacattcaaggttttacttcgcattttttaaaatagttttaatattatttttttggatgctaaatttacataatgatatgaatactaaccggattttggatccaacattagtcgttagcgattccaaacattcaacttgttttcatattattatgtagatttaacattcaagatttttatttggatttttaaaaatagtttttaaaattttgattttgtttattgtcggattttaaaaatcttttgtgtttgtttgtttgtttttaaatttatttggatgcaaaatttacataatgatatgaatactaaccggattttggatctagcattagtcgttagcgattccaaacattcaaattgtatttcctattattatgtatatttaacattcaaattttggatccagcattaaaaatttcagttttaagtaatgactcgattaaggcatgaatattagattttccttgcatctgtgatctcattgggaaggtttgttaccaattgaagaggaagtttttgttaatggtgactactgttgcttatggcatttgtattcattacatgtcatctttttcatgttgaagaagatattcagtagcaaaaaaaaataacgagaaatatttcaaattagaaagttttgtagcataacagagttgatagaagcgaaaacaagaatctgtaaagcctcctctggttttgggatgaagaaactacagaaacctgagaagaaaaaactctctgcgcttggcgataatggaacagtggtggagcttctatttttgcagctgtattctcttgtccctgataggcagatcaagcggtttctgggcctcgtgaggatggtcagggcctttgtacaccttcaggtgattgaacagagctctcccaagctgccacaaaatggtcagaccaaagttaagagggagttggaaaactagtaatcaatcaataccaatatcgcaacaagtagtttccaagttcaatccataagtttgaagaaacacggatttgctaagtgttaagacttaaaggagactaataaagagctgtggattatgtatctaacccgtccctttggaagcattccacgaacagcatgctcaacgattctttcaggaattctctgctgcaattgatcaaatgtctctactgtcataccaccaggtcgtcctgaatgcctcctgtacagcttttggttacgcttctttccagatacagcaactttctcagcattcacctttaaccaaacaattgaaaacagtattagaggtaccaagttacaagcattgcccaaacatctacatagaggctctacatcttgctgctaatgtgaatcttactaaaaccaaatcccaaggctcctccttcaggaagaaattaactaaagcagcacatcaaatttcttattctctacagatagctcaaagaaactcataccacaatcacaaaagctcccatgtcgacactaggagtgtaagaggcaagattcttcccacggatgtgattagcaattgtcgatgccaatctaccaagaattttgtcagttgcatcaaccacaaaccagggcttgtccgtgttcacatggtctgaagcttttggataccatgtcgtgttccagatgtcctgtaaaccatagaatacactcaataaaggtttcaagccaaagacttttaacttctctccaaccaaacattaataatttcataaaacgtccaagttaacaaattcagaagaataaacatcaattttcgaagccaattgatgcagacaacacagctaatgagtcaaaggcaaaatccactacttaataaatcgcaattgggagaagaaaaaaacaagccatacttcaaattcaaagcaagagctaaagtgcgacactttataaatgcgtagatgctaaacacagagggagatagaaaaattatcgttacagggccattagcttcttcttcgtcgaacatccatcgttgattcgccggaacaagagaagtcgtcgtcgtcggctcagcttcacacttcacttgcaatcctcttttcgaattcgcataaatgccgactcgtaccgacggcttcgagatagccgttaaagagaaccctaaaaacggagactttctctcacttccggaggatttcacggaagaagaagagagtatcaccgtcgaagacgagcaaagaaccgccatttttgtttttctctcttctgcaaatttcttctgctctttccgatttctcggataagattgggttctcagtaaatagtagtagtggcaacaccgtaaataatctgatgaatacgaccgaaaaataaacacaacacgggttaaggatccgggtttttttcggagctccggattcaacccgaaatactgttttttttttctcaataggagagaaaggtcttcttcggaagcaagctaagtcatg

SEQ ID NO: 27887 - DNA, 3003 bp, Unknown; identical to SEQ ID NO: 27886
  misc_feature (1)..( 3003): 2750-1469P.txt file - cDNA_ID_2992588; gDNA_ID_1620813; Annot_ID_169132

SEQ ID NO: 27888 - DNA, 3000 bp, Unknown; identical to SEQ ID NO: 7390
  misc_feature (1)..( 3000): 2750-1469P.txt file - cDNA_ID_2992592; gDNA_ID_1621143; Annot_ID_56680

SEQ ID NO: 27889 - DNA, 3000 bp, Unknown; identical to SEQ ID NO: 7390
  misc_feature (1)..( 3000): 2750-1469P.txt file - cDNA_ID_2992592; gDNA_ID_1621143; Annot_ID_172915

SEQ ID NO: 27890 - DNA, 3000 bp, Unknown; identical to SEQ ID NO: 5345
  misc_feature (1)..( 3000): 2750-1469P.txt file - cDNA_ID_2992596; gDNA_ID_1620781; Annot_ID_50360

SEQ ID NO: 27891 - DNA, 3000 bp, Unknown; identical to SEQ ID NO: 5345
  misc_feature (1)..( 3000): 2750-1469P.txt file - cDNA_ID_2992596; gDNA_ID_1620781; Annot_ID_167944

SEQ ID NO: 27892 - DNA, 3000 bp, Unknown
  misc_feature (1)..( 3000): 2750-1469P.txt file - cDNA_ID_2992602; gDNA_ID_1620790; Annot_ID_50464
agattggatacataccgtttactaatgtcttcccatgtgagacattctttgtctagaccatagtataatcgaatgatctctttttcccgttctccgagtgttgcacttataagcttgcttacttcctcctgcaattttatcatcaatctcatatgctcaaactctagtgtttcatgatagagaaaatcagaaccattgtattaaatgtagcttcacttatgacttgttctttttttttttttaccttgagtgccaaatcatcatacccgtgccacggattgttctccaaacgagtatccgcaatgtactggaaatagtgaaacaaacaagcaaatcgttataaactggagaggagagacacatggaaacatggatggtgaaaacaaaatcgtcgttttgttttaagagaaaccgaaaaagagactcacactgtgatgagtttctccagggagaccattcaaagaaggaaatgcatctctgtctagagaaaatactttgcttacagcctgtattttgcaaatgcaagagagtaagcacaaatacacatagatcccctcgaaaacgaaagggacatgaactaaaaatttagttttctttacctctgttgcatttctaactttcttctgcgacatgtttagagactctgcaatcctctggaaagaacaatcactataagcatacacaatgtagacttgagaaaccataattgtttaaatgttacacttacatcaatggagggtgtgattcctttctcttgaagtctaagctttgcatttcggattaaaccgagtctttcatgtaggtgagtaggtaacctcaaggttcttgagttgtccactagtgctcttgagacacccttatagatatttgaaacatagagtatcacttgtcaggttttacattctagccatattggcaagcacaaaaaatggttattctcacctgtcgaatccaccaatatacataagttgaaattctgaaacctttggaagaatcaaatttctctattccccgcaaaagtccgataagaccacccttcatagtagaaaacaaaaatctatcttatagaaaagttcatgaaaagctataacaaagagtacacaaaatgactttgaaattacctgaacaaggtcagacatttctgctcccaaattatcataacgctgagcaatagacataaccaaacgcacattactcatagccaacttctctctagctagatgacactccatcaaccacgcctgaagctcggcccgagatatcttcaaagatactgcaagctgttcatcagaaggctcacagcctaatctatccttcaatctaatatttcacaagacaataatttagtcttgcactataatacactttcagctcttttttctaagtatagtatgtttactttaccttgacttatgatcatcaagacgaagaccagatttgattttcttagacaagcgcacaacttccacatgactaagcacatcttcacttattacacctttcacataacctctaacttgctttccactagaaacatcagaaactgctttaacatgagtcatattagttttcttcttagcaccaatccttctttgacgagctgaaatccctgaacaggtgataaccggaatcttcttcttccgtatagtccccttgcccggatactcactcgacaccgccttttcaaatgaaagattccaacttttctctaacatagacttctgtaacagtaaaattgcctcaacagaatgactaattagatcatcatcatcataacattcttcttccaattccttatcagttccattaggtagccatggcttctcagtagaagcaacatctacactctctttcaaagctttagcagattgtgtgtgacgattcgacgaaggaaaactcggactatagttcgacgcctttttcgcagttatcccgcttttcgttgaagcaatatgatactgtgatgaacaatgatcatttacagatagaaacttctctgtaacatctgagtgataaaacgatgaactcaacaatcttttgccagtgttgagtcctataacagctgcagtagccattatataacactcttttgcactcaattcatcaataaaggaacaatctttgctcttcaagatcgtattctgctaacaaaaatcaatactttagatatcataacacaatttcagacacaaagaatcaatatcaacttgtgggtattgaaaattacaaaagttaataacgtaatccagcaaaagaattgtactttattctagttctgagctcgaagccaatcattactacccaaatttgactaatccattgaaacccaattaagaagatgaagaatcacttcaaaatcaaattttgcatctatggatagattccaaagacagagattttgagtaagatcttaaagagcaaagccaataacgcacctgagagtattgtcgagacaagaatgtgcaagagagtgtgtgtggcacagacaaatcgagaatgtgtgttttgttttttcttttttctgtttctcagttttttttttatccaagagttttttggtggcctaattcaaaccaccatgcagaaaataagaagagataaatataaaatggtttcaacaattggagaagtttagattatagtgaaaaaaacgaatatgataattaggagatataaaaaaaaatggagatatggaaagaagagatgggattggtggaagcagatactggctccatgtttctgtggtattcagctacgtctcttgtttcgctttcgctgccttctctctcccatttacatttcttcaccattaacgattaaggcccatttgagcccatgattcattagcttgcgcaaataaatgggccgttgaccaacatataaattggcccaaattcgtcacgctcacgcctccacccccactcagatccacatattaaaaaaaaaaaaaatcatttttgtgcaatcaatcagacgagaagaagattatccatcgccatg

SEQ ID NO: 27893 - DNA, 3000 bp, Unknown; identical to SEQ ID NO: 27892
  misc_feature (1)..( 3000): 2750-1469P.txt file - cDNA_ID_2992602; gDNA_ID_1620790; Annot_ID_168251

SEQ ID NO: 27894 - DNA, 2865 bp, Unknown; identical to SEQ ID NO: 5628
  misc_feature (1)..( 2865): 2750-1469P.txt file - cDNA_ID_2992610; gDNA_ID_1620807; Annot_ID_50571

SEQ ID NO: 27895 - DNA, 2865 bp, Unknown; identical to SEQ ID NO: 5628
  misc_feature (1)..( 2865): 2750-1469P.txt file - cDNA_ID_2992610; gDNA_ID_1620807; Annot_ID_168916

SEQ ID NO: 27896 - DNA, 3003 bp, Unknown
  misc_feature (1)..( 3003): 2750-1469P.txt file - cDNA_ID_2992614; gDNA_ID_1620782; Annot_ID_50370
gtgtctatgctgactaatgttgtctctggtgagaccgaaccctcggcatctgcgacatggacgatgggtcataagagagaaagagaagagttttctttgcctcctcaaccattgattaccggttcagctggtatgcatgtttttctaaatcgaatttttttttgttgagaacactatactaaccaataaaacattctttaaccaaaaacaaaaatcaataaaacagtgactaaagaatgtgaaagctcaatgtccttggagaggccaaaaaaatatagaggagtaaggcaacgaccatggggaaaatgggcggcggagattcgagacccacacaaggcgacacgtgtatggcttgggacattcgagacagccgaggccgccgcaagagcctatgatgcggcagcacttcgctttagaggaagcaaagcaaagcttaatttccccgaaaatgttggaactcagacgattcaacgaaattctcatttcttgcaaaactctatgcaaccttctctgacatacatcgatcaatgtccaactctattatcttactctcgatgtatggagcaacaacaaccattagtaggcatgttgcagccaacagaagaggaaaatcactttttcgaaaaaccatggaccgaatatgatcaatacaattactcctcttttggttaactaacatattgtcaacgctttgtatttctacttattcgatctaccaattttttctctcccaatacaacttcagtctgattattgccttcttagatatgtcttcgaatgttatgactatacatgggtgtatataaaatttgtgatcaaagtcttgtaattagcgtgtgattctacatctttttcattagaaaaattgggttttcaaaattactaactcacgtgatcgcaacacatgagtataacataagatgtcgtcactaaccaaatataattttgttaatatatttaaagatagaatcagaaaatttcttaaaaaaagaagtatatacaataaataagaaattattttgtttatatattcaaactctttttattaatatattaaactattaacctctttctattaattttgttgttcttaatatattaaaaaaaagaagttaaaattctttattgtatcggaaataagaaaatgaaatttgttaacaaactattaaactaattttgttattttgttgttgttaatatatactccaaattgaattagttaataagtaaaaggctttagaaatcttttccaaattgtcaagataaatgaactgtaatcttcagaatagagaatagtggcttacaaagagctctcaaaaaagttgcaaaaaaaaaaaacgtaaaaataaaaattaggtctctatgggttttatacccagttaaataaaataagttatgaaactggataaaaaaaatctaatcgtagcatcaagaactggactgatagatctagtaggtggaccgcttgaccccaaggtgtttgaaaaacaatcttcgacgtcgtgacacttagttaatcgatccactctttgggatcaatcaatcccatcccttctagaaatctggtgctcgacgattaaaacccgctctttgtgaatttggcacttagatgggtgaaggttggaccgctcggtcccttataacctctcaaccacaaaggttcagtcttatcgcatgaaatcaattagtaaactacaattcatcctaacaaaaagaaagctatagtagtccatatattatgtagtttttgcttatgagtgcacataatgatgataacacaataaaacatggggtttcatacatgagcggagtaagaggtgttgtactagactaaagattagtttagcgatttagaattagcaaatagtgttaaaaatgacacaaagaaaaattttgaatgtataatctaatacatgattctcaagcctctaaatgagaaatattaaatctagattaagtttaaatatataaaatttagcttaaatctaaatttcaaaatgataggaactactataaaatcatatagtaacaagatacaaaaaaacatccatgtgttaccttaagttatatttattccctttagtaaccaacaaattttaactttctttcacgacaaaacttttgccgtctacaattcacacacacttccaactttgaagcttacatacaatacggtggcagcagtaacacacaccattatactacaaacatcgataaatttttatcaataaccatatcgatcatttgacaaaaccacccacggagtaaccatatcattataagtaaacataatgaaatttttgcttcaagtgaactgtgaacatgtgagtgtgttatcggatttagctgttgtcttttctttttatacgaaacaaaaaataaataaaacctttatcaaatttgtacaaacctctgggctttatttaggcccaataacaaaattcggcccatatttgagaattcacaaaacctagatactcttactataaattggaacatcattgatctaatacaattaattactgtgttaatattatttatactcaatctgaaatgtctttttttagctgtccaccagtttccaatctttgaaatacgaaacaaaaaataaataaaagtataaaacctttatctaatttgtaaaaacatttgttgggctttaggcccaaaacaaaagtcggcccatatttgagtgttcacaaaacctagatactcttactataaattcaaactagggttttaaagctcatttctctcttgcagtcctcatcgttggagcttagaagccgtcggcacaaggttcgtctttctctcatccctttcctcttcctttgcgtgaattcaccagaaaatgtatatctaccttagcgagtctgtctagtttagcgaatctaggataatctccggaagacacttttgaatcatcactgtttttgatctctgtttctttctctaattgtgttgttgtattactgttgatgtagaagaagaagaagaagaatg

SEQ ID NO: 27897 - DNA, 3003 bp, Unknown; identical to SEQ ID NO: 27896
  misc_feature (1)..( 3003): 2750-1469P.txt file - cDNA_ID_2992614; gDNA_ID_1620782; Annot_ID_167989

SEQ ID NO: 27898 - DNA, 3003 bp, Unknown
  misc_feature (1)..( 3003): 2750-1469P.txt file - cDNA_ID_2992622; gDNA_ID_1620758; Annot_ID_49943
caacttgtgtgttcccagctgtcacttagtcagcctgtccactcattttgttcttttttacaaaaacacacacatcatatattcttctaacatacattacatgctacatgtctacgcatctatatgtatgaatgcatcaattgtatgtatattgcggattacgttaattacattatttgtaagtcatttatgctgtaaagttttgtattctattctcagttaacttctaatgatgatatagtgatgatactatctataaaaaaaaagttctgatttaataggacctatctaggtgtaggcttgtagcaataccaaatgtagaaggttttatgtccaaggatttttcaattttctccatttcattccctaaattcctatcccgatttacgtccaccttacaccgtaagttgtgttgtcgaacattatcttccacacatattttatgtaaattattgactctctcgatcccattacatgtgatgtgggctctacctacggttccaccaacctcatattctaatctaatatttttctcatatgctaattttaaatactaaacgaatcttaacggctgatatattcgtatatgaattcatctacacaacatttatgttaatgatatatctctagtctagacattatttgtctacaaacgttttgtattgacttggccatctcattccaacaagatacaactcatcactccaaacattcaacttccatataaaccattcccttccgatctcactttccaaatcactcttcacactttaactaagcaaaccaataatggctaccactcgtctaactctagctcctctcctcctcatcgcagccgtactactcgcaaccaaggcaacggctcagccggcagcccccgctccagagcctgctggtcccatcaacctcactgcgatcctcgaaaaaggtggtcaattcactactttcatccatcttctaaacatcactcaagtcggtagtcaagtgaacattcaagtcaatagttcatccgaaggtatgacggtgttcgcaccaacagacaatgcttttcaaaaccttaaacccggaaccctaaaccagttaagccctgacgatcaagttaaactcattctctaccacgttagccccaaatattacagtatggatgatctcctctccgtgagtaacccggttaggactcaagcttctggccgagacaacggtgtttacgggcttaacttcaccggccaaacaaaccaaatcaatgtctctactggttatgtggagacacgtattagcaattcgttgaggcaacaacgtcctctcgcagtttatgttgtcgacatggttttgttgcccggtgagatgttcggagagcacaagctttcgccgattgctcctgcccctaaatctaaatccggtggggttaccgatgactccggctccactaagaaggcagcgtcaccgtcggataagtcaggctccggtgagaagaaagtcggactagggtttggtcttggacttattgtcttatgtttgaaatttctcttttgaaaatttaatagcaaagatttgttttgctttctattgattttatcctgcgatgtgaggtataaatatgaaatttgttgattaagttccgtgaaataaaatgtgagatttttaataacatacgtcgtctatagttgtcaattgtgcctgtcgaagtggataactcttttcttggcgaacccaaaacaacaaatttgtgatgtgaacaaaatattttgttaacttaattactaaagtacgtatacaattgatgagatgcttatttgttttctgttttaattgcaagttccattcacgacattttaactctagctacgtgaaaaatggatcgaaggatcggtagccgatccgaaaaactagccatcacatgcgattactagacatagattagtagtattatttaattctgaccagcagtatagatagtattcataataataaagtgttcagataatcgttttactgtaacacgctttaaaataaacatgataataactacccagttgccattaaattataattcatcgtccttagcccatgtgataatgggcttagtgaaacatattttaaaataatgggcctgagcaatgtctttaaaatttgtcaaacacttgaggacggaaaacaaaaacataactaaatgcctaaaatgggcctctcgaaaaagataatgtgtttaatgaaccatatttgaaagtaatgggcctaagcaaataggcacgaacatactagaaggtagtttgccaatgcatatctgaccgatttctcatttctaaaaccctaagcttcgccggcagctccgatcgtgatctttcataaatcctaccatcgccgtcgattaagagctgagctcaggtttatctatctgctttttcctcccagttttcactgtgtttcgttgtatgctctgtttggttgtcgatagtcacacagtgcctgatcgtcggtcaatttgctaatccttgtgtgatttagagttggaatgatcatttggtgaaatctcgtggatcttttcttgttgaaagcttgttgacttgctcgtcatatatattcgacgatctatgggtactgtatctagttgataatgttcaaaggcttgatcgattttagccttgggatctgctaccgatgctttcaatttctgacgcttttctatgcgatcttttcgaattcgtttttctctccagtttttgccatgtcaattgattctcttagtaacactacttctttgtttgctctcttggattttttgtttcttctgaaatggaggcttgtgcattgattgttctatgtgtgtgatttcttatgcggtgttaagtcctttggatcttcgtataatgatgtttttaatctgctgacaaacgaatttatccctgcggcgttttagtttgctacatataaagttcttagctgtgaactgtttctcctgggtatctcattgcggtttgaattctgttttgctatcaggaaatg

SEQ ID NO: 27899 - DNA, 3003 bp, Unknown; identical to SEQ ID NO: 27898
  misc_feature (1)..( 3003): 2750-1469P.txt file - cDNA_ID_2992622; gDNA_ID_1620758; Annot_ID_167072

SEQ ID NO: 27900 - DNA, 3000 bp, Unknown; identical to SEQ ID NO: 5228
  misc_feature (1)..( 3000): 2750-1469P.txt file - cDNA_ID_2992626; gDNA_ID_1620774; Annot_ID_50243

SEQ ID NO: 27901 - DNA, 3000 bp, Unknown; identical to SEQ ID NO: 5228
  misc_feature (1)..( 3000): 2750-1469P.txt file - cDNA_ID_2992626; gDNA_ID_1620774; Annot_ID_167630

SEQ ID NO: 27902 - DNA, 3000 bp, Unknown; identical to SEQ ID NO: 7260
  misc_feature (1)..( 3000): 2750-1469P.txt file - cDNA_ID_2992629; gDNA_ID_1621135; Annot_ID_56554

SEQ ID NO: 27903 - DNA, 3000 bp, Unknown
  misc_feature (1)..( 3000): 2750-1469P.txt file - cDNA_ID_2992633; gDNA_ID_1620785; Annot_ID_50417
aacgtacgatctattatgagatctcaaatataatacttgctaattatgtttgatcatgagaatggaaaattggtgacttttagagccggctcatacttatcatatttttatcgtttatgttgctttttaagtgattatttactattggatcatagtacaagcccgactcaggagactttccaagagccaaaatcatatcgaaacagttcgagattacaataatgttattacgaatacacgactacgactttaaccaaaaagttcacaacacttttgattaatataagaaagtgcatcggaaaattgtgtacactaggttgttctagataatgtaaagaacttacctgatcatgattgctaaaaataagaaaattagaagaaatttaagtcttctttcaggtttagcgaaatatctaattctccatatggctatatataaaaatctgtaaacagacaacttgtattctttgttaaaatttatcttgtgtagttgtacaaccaataattggaatattcgttgtcctagattcaggttatcagacccctaaagattaatgtcttatggaatgcttgtatagttgtatattctccagtttaatatataccagtctcgtatttaaaccttatactatttatccagcagcatgataatgtatagtttacaaattataaaatatttcaatgcttctacggtaatcatatttaaataggagaatttggcgccgtgatatgattgtagttttaaattttggttcctttaatcaaaatacatacatttgtttttccaaataaagttaaatttcagttcaaattatttcatggtgggtttggtttccacttttcaggtacgtataaaaaatctttttatatttaggtaagatcgatatagtttgatatttagatcaattttttggtttaaattaggtaggaagtttccgatctatatatgtatactgaaaactgagtagaatcgaacgttaccgttaatcaaccattacttaatcttggttataaataaaacaaaatttgttgcaatttcagaactatattgcaatcttgaggctttctacaaaacataataaaaaacttacacacaagacagttatatttttggaaaaataagaattgaaagcttgatttaaggatctcttttagttaggtaaatctttaagatcaatctactatcagatggcaaaaataatactagatactattccaacttcaagcgaggttagcagttagagtgtgggtcacgtacaaataatttcttttcatttgtgtagcttagaattggccggcattataaactttccatccaagaaatctataacaaaaagatataacaccagacaattgattatcgttggagaattttcatattaactacatcttcttacaacgagtctatataaccatttcaaacttaataccatcagaaaatgtaaaatttaaaatagttattcaaaacttaaaatagttattcaattatataatcggttactagctagatcaagttagtcggcgtagaagtgaaggatccaataatatctggttaataatgtcgacaaacattgtatacttacatgcaaacatatacataagcatatatatagtttatattattatcaatttggtcgtatatgcaaagagcaagttgatctacataaaacgaaacacaacagataagtgtttattttttcgccaactcatgactctaaagataagtatgccattgaataaaggaaagtttcatataaactattacattgatttgacaattacctgcttacttgagttagacatatatttgggaaaataacacgagaatgactcattacgtcattcgtttcatcatctttcgattaaaacacataagtatatttactccccatcaaaaaagaattaaattttacttgcatgtggctttggaggtttatggtatagttttttgcatgtgggtttgacattagagaaataaactgtctgcatgtggtcggaacatggggatttccaaaagatataaaattttacacttggcttgtgggttaacctatatgggtttcgagagacgaacgttaaataaagcatgttgcaagtaatatatcaaaattttataatatctcttataaaactgttttgtttggaagaagctaaaaccagactattagtattgagccgttcatgatgtctggaagtttctaggtaggtactgtctaaagtatcaatcagagaaattgaaatcattcacttatcattttgttcttctaagtgatgaagtgaaccaatactatcacttatcatttactaatattgatagttataatactctgttcgggttgaaaaagcagacaaaccaaaataaaactatatatatgtttactttaatttcactcaaagattaaagaatttagtttttaattgaattgaaatgtgatttagaaatttatatagtctctttaactgaaattttattgttaatgaaataatatttttttgaggctaacagttttcaaaagtattgtagatattaattatatttatattttttatataataactatataaaaaaatctgtagcatatttttaaaaaatacaaaagtctcacttttaagatcagtggatcttatttaaataaaagtctcgctcctaagttattctggttttacataataatatttaacaagtatgagaaagtaataggtaatggtgggagcaaataacataatgcccacacaagttctatgtggtattatttcattttctcaccacttgccaattgttgatttgtctctttttatcttcttctttctatttctatttctatttctatttaatatattttttttttctttctacttgacaatccaagcatcacacactctcctatatggctatatataaagtgttataaacagaaataacatacataaaaatcccaacatctcctaaaatctcccaaacttttaaaaagttaaccaaaacccccaaacaaaaaaatg

SEQ ID NO: 27904 - DNA, 3000 bp, Unknown; identical to SEQ ID NO: 27903
  misc_feature (1)..( 3000): 2750-1469P.txt file - cDNA_ID_2992633; gDNA_ID_1620785; Annot_ID_168113

SEQ ID NO: 27905 - DNA, 3003 bp, Unknown
  misc_feature (1)..( 3003): 2750-1469P.txt file - cDNA_ID_2992637; gDNA_ID_1621167; Annot_ID_57215
ttactaccctttcgcgggtcggataagagtctccgatgaagggagcaagctcgaggtagactgtaatggagaaggcgcagttttcgcagaagctttcatggatataacttgtcaagattttgttcaactttctcccaaaccaaacaagtcttggaggaagctcttgttcaaggttcaagctcagagtttcttggatattcctcctcttgtcatacaggttcgtaatcatttattttatttttttcttgctgggaaacttatgatttcaatttcaaaagtcaaaaccatgactcgtattgtttccatattagttaatttcgtgaaagaattatattcgaatttgttttggagggggataaacgtagctcgaatattttaggtttcttaaagttagttggatcgactgttctgtttaaatataattcgtaggaataatctaaattgtttttaaattcctaactcctaaattgattcggccactttgttcttttcaaattagaaatgcatacttttactggtcgtgcataagcattcgatgtatcaataacataaagttattttctactcttaaaatacgtgaactttaataaagagattatatggaagaaaaagaagggcgcatagagaataatttgtctgttcaatcatactctttttcttttctcgtttacacgaaaaacaaaaccctttttttcttgcattgaattagttcattctataagtcgttttgttcaactcatgttatgtgttttattaaaactgcgtttctatgaacttacgtataaagtatcagcaagtttgattattaacgcttgaaagctagtcgaatgtaataataaatcgacattttgatatcttacgaatattaatgcctcaggtgacgtatctccgttgtgggggtatgatcctctgcaccgcgatcaatcattgcctctgcgacggcattggcacatcgcagttcctacatgcatgggcccatgcgaccactagccaagctcatcttccgacccgaccattccactcccgtcacgtattagatccgcgaaaccctccacgtgtcacacactcacatcccggtttcacccgaaccaccaccgtagacaaaagctccaccttcgacatttccaagtatttacagtcccaaccattggctcctgccaccttaaccttcaaccaatctcatctcctacgcttaaagaaaacctgcgctccttcgctaaaatgcaccacgttcgaggcactagcggctaacacttggcgctcgtgggctcaatctctagatttaccaatgaccatgctggtcaaactcttattctcagtcaatatgagaaaacgactaactccagaacttccccaagggtattacggtaatggattcgtactagcttgcgccgagagcaaggtacaagacctagtcaatggtaatatttaccacgctgtaaaatcgatacaagaggcaaaatcaagaattaccgacgaatatgtaagatcaacgatagatttactggaggataaaacggtgaaaacggacgtctcgtgcagtttggtcatttcacaatgggcgaaattgggattagaggagttggacttgggaggaggaaagccaatgtatatgggtcctttgacgagtgatatctactgtttatttttacccgtggcgagcgataatgatgccatcagagttcaaatgtccctgccggaggaagttgtgaagagactagagtattgcatggttaagtttttagacggaaaagataacgaagatgagaattctcgtgcatgctaaagtttctatatacatttcagtggtctataataaaagagtacttcacttgtcgatttttgattggttttaatatgttttatgtacgaaatattttcttatatataagtttgaaaacagaaaatagacatatgaaccccaataaagactaattaaagagagtactagagtagctcacttgtcgatttttgattggtttttattaaacacaaaatggataatatgatgagtttaaaaacagtctttctccatgctagtatgataatgatattgactgatcgatgaattcaaaggaatacatgttttagtttagttcatcaactttagcttaacgtacggttcttaaatcgaagccaaaattcaaataaatattaatatatatccaattttggtaatctctatcagattatagctttatgaaaataaaaaatttaacaatgattcaaattgctaaatgctaatatattggttaaagtgttattttctgcaaaagttcaaataatgttaagactatttctatgtagtttgatcatttcaatctcaaccacataaaaaacgacactatatattaattcgaagcccatatccattatcgaatatgatgaattgcttacaatcataaagtcaaagcccatatccattttataaatagagttagatatttatcttttttaggtcgcaacaccgcaatagatcttttccccaagtttcagacaaacataaagcagcagagaaaattttcaagtttcaaagagcttttccctcaccaagcaaaatttgggttagtgaaatctcaaattttgctatccaatttcgttaatccttcctttgttagagtcgatttcgttgtcctctgatctcatctcttgaatcaatcggctcctctaatcctttacctccttcacgtttcgtaattattcgatctgttttctgcagatttcgtgaatttaatttaatcgcctcctcgattttaatatttcgtgatttgatagaatctgttggaaatttcttgatgttgcgataatgggtcaaaaaatatatatgtgaagctgagatcagatttgtgtcgtattatgtcccaaagctatttaacaatgaatctgtgtttgctatttgcagatatttgtcagcaaaatctgcagctaaattgggacttgtcttgttagttcaaagattgaaacttttttggttaattgtttggcggaagaagatttacaatg

SEQ ID NO: 27906 - DNA, 3003 bp, Unknown; identical to SEQ ID NO: 27905
  misc_feature (1)..( 3003): 2750-1469P.txt file - cDNA_ID_2992637; gDNA_ID_1974075; Annot_ID_180353

SEQ ID NO: 27907 - DNA, 3003 bp, Unknown; identical to SEQ ID NO: 27905
  misc_feature (1)..( 3003): 2750-1469P.txt file - cDNA_ID_2992637; gDNA_ID_1621167; Annot_ID_173880

SEQ ID NO: 27908 - DNA, 3000 bp, Unknown; identical to SEQ ID NO: 4578
  misc_feature (1)..( 3000): 2750-1469P.txt file - cDNA_ID_2992641; gDNA_ID_1620715; Annot_ID_49108

SEQ ID NO: 27909 - DNA, 3000 bp, Unknown; identical to SEQ ID NO: 4578
  misc_feature (1)..( 3000): 2750-1469P.txt file - cDNA_ID_2992641; gDNA_ID_1620715; Annot_ID_165628

SEQ ID NO: 27910 - DNA, 3003 bp, Unknown
  misc_feature (1)..( 3003): 2750-1469P.txt file - cDNA_ID_2992645; gDNA_ID_1620790; Annot_ID_50465
tgacacatggtgttccaacttccaagccactttcatggctataaacttgaaagactgtacattctggataataagatgggtcatgtccatctcttatttatgccttggagccgaagttgagccgcacaagagattgaatgagcttcagccatttctttctcagtagaactttgataaggcattattttagtgtagtttaagcatagacatagatttgttgggaattgttgctttgtttgacagcttaccaactgagttggattttgaaaggaaactaggggaaactggtaaatttctgctaaataatgaaggaactcgattgttttttattccaaacttgtgcagctttcatgtcgtcccctctgccataccctttagacagcttctgttcttgcttttgactctgtttagagcctcttgcttgttgtagattgattttattttgtgactatggctacattatggttcaaagtagtgctgcgcctgcctagcatattcaatgggtaaaaaatccagagtcatcttcatgtttaaactggtccaaaagctgcaaagagcaacacttctcctgtagttgtattcttcagatggtaatgattaagataaacttggtaggcttgagttgtcttgtacttttagatttgtagtgatgtaccaaatctgaggtttaggcgtggaagctttgaccgtgtatcagggaaggtgttgaagaacaagaccatagattaattgtcaggttgtttctgatgcagagaaacttgaaaggataagaacaatcaagaatagaagcagatcttgtttagttcatgcttgttttgttgtcctaaggagagataaacactggttttgttaattcatttcagtcgtaaatttttacatcaaatctctcatcttgtaactcttttgtttcaattacttccccaaccatagagtttgagtaaatcagaaaaaaatagtattatccaaccgttcaaccaatccgtgcgttgtttctatattttcgtagcagttgagttataaacacatttattatggtgacaatatgagaagcttaacttgaatcagaattcacccacataactgcaagagtcacaagagaagcatagattgaagtaggcagcttctgcacaactttgccaactccagggacaccttccgtggccttcttcgtcgcaatagccacagtgggagcaacaatcaaagctatgatcaaaccctgactaaccacgttaaacgtctcagccgtaatctgctcaataaacttcacaaactcttccctatcaagttctccatccaagttgatatcacagtcctgttacaagaacatcacacaaccattatgaccactcaagttgcctagaccgaaaagaaatagtaacattatctgatttttcaacctattcttccaaaatcagagtccagatgatttcaagtgtagtgttacaaacagtggttaatactaaacgtttaaagctaaacgcaatcgccaaaagaacatccgtttctgctttaaaaattgcattttgactttttctttacacaaataaccacaaacgcaaaagaagtaattcagcgtttgcgttttaaaagcgtttcaaggaagtgaaagtaccgtcataatgctattgactagatccttagaaggtggatcgaaatgaggaccaggcaatctcttgtttatgtcactgacaagattacacaacaagacaaaaattgtcagagattaaacataaaagtttctaaatctgtaaattaacactaaaaaaatgttatggaaccaaaagattttacttgtaaacgagaagaacagcgatgtataactcttcaaacgtaagattggctcttccggtttgcatcttgaaccgatcgaaaacacgatcacatatcgcttgtacctgcttatgtctccactctttacctgcaatttaacattgccatatacatattatacataacaaaagaagcaattttattacatatgcacaattacttgaccataaaactgattataaatgaaccaatgtgagaaactgaaaacaattttacaaacctcggagcttgttaaagacttgtcccatggcgatggataatcttcttctcgtctgattgattgcacaaaaatgattttttttttttttaatatgtggatctgagtgggggtggaggcgtgagcgtgacgaatttgggccaatttatatgttggtcaacggcccatttatttgcgcaagctaatgaatcatgggctcaaatgggccttaatcgttaatggtgaagaaatgtaaatgggagagagaaggcagcgaaagcgaaacaagagacgtagctgaataccacagaaacatggagccagtatctgcttccaccaatcccatctcttctttccatatctccatttttttttatatctcctaattatcatattcgtttttttcactataatctaaacttctccaattgttgaaaccattttatatttatctcttcttattttctgcatggtggtttgaattaggccaccaaaaaactcttggataaaaaaaaaactgagaaacagaaaaaagaaaaaacaaaacacacattctcgatttgtctgtgccacacacactctcttgcacattcttgtctcgacaatactctcaggtgcgttattggctttgctctttaagatcttactcaaaatctctgtctttggaatctatccatagatgcaaaatttgattttgaagtgattcttcatcttcttaattgggtttcaatggattagtcaaatttgggtagtaatgattggcttcgagctcagaactagaataaagtacaattcttttgctggattacgttattaacttttgtaattttcaatacccacaagttgatattgattctttgtgtctgaaattgtgttatgatatctaaagtattgatttttgttagcagaatacgatcttgaagagcaaagattgttcctttattgatgaattgagtgcaaaagagtgttatataatg

SEQ ID NO: 27911 - DNA, 3003 bp, Unknown; identical to SEQ ID NO: 27910
  misc_feature (1)..( 3003): 2750-1469P.txt file - cDNA_ID_2992645; gDNA_ID_1620790; Annot_ID_168253

SEQ ID NO: 27912 - DNA, 3003 bp, Unknown
  misc_feature (1)..( 3003): 2750-1469P.txt file - cDNA_ID_2992655; gDNA_ID_1620654; Annot_ID_47824
ttcatcagttacatgaaatggattgaaatcagtaaatctctttaatctgataaaaccctaattttacaaaccctctttggatgtggttgcagtagcggcggtgtcgaagtcatcggggtctttggttgggtcagatttgtcgattgaggagcggaatttatcgaggaaaggcttgaaagcgatctctatggctaaccatcctaacgccatcgctgcgaccaccacagtcgcctgtttcgctcccgaagtttttcccatcgctgcgtcgtcgtcttgttcgcgtgtcggtggtatcaaccgatggtttaagatcgggagatgggttttactaggatgtttaaaatgggccggtttgggcttctcattggataaagatagtttgtttgttaaactatggcccaactttttatccgtctattggttaattaatacaaactttttatataattgtaaatataattgaaaggatccctattttattttcttgggaatatatatatggaaaaaaacaatcaatagaattagataaatagttcaatatatcaacaatttcttttttgttaggataaggaacttttaccttttttctaatatagttacaaattgtgtttttttttttcttaatttattatcaaatttcttttttacttatatataacctcctttttcatatagagttattaactttttcattttctcagtaaatgtattaacaaatttagacttaatacatgaagacatctaatatttttattgatatgtgtcgtgaactcgtgacatgttagttagtaatttttataaaaaaaatttagataggttaaaattatttgatatgtgtaggggtgtcaatgggtcaaaatttattggtcaactcaactcaacccataaaccctaatgagttgaaaattttgactcaaatgagttgatgggtcaaatgagttgatgagtcaattggtttgatgagtaaaatgagttgggttgtaatgattaatggtttcaatggtttacccaattaacccatcaagttttgtaaaattgaattaaaccaactaaaatttctaaatcaatgtcaatttaagtctaaccaacacatctaaaccaatttaataaaattaatatttttccaaatttcttaaatatacatgcgatgaaattgagaaaaagtaaactcgtaaattttccaccaaaaaacataaacccgtgattttcccgccaaaaacgtaaatccgtgattttctcgccaaaaacgtaaacccgtgatttttccgccaaaaacgtaaacccctgatttttccgccaaaaacgtaaaccagagattttcccgccaaaaacgtaaatccataatttcccgccaaaaacggaaacccgtaatttttccgccaaaaacgtaaacccataatttttttccaaaaacgtaaacccgtgattttcccaccaaaaacgtaaacccgtgattttcccgccaaaaacgtaaacccgagatttttccgccaaaaacataaacccgtggttttcccgccaaaaacgtaaactcgtaattttgacgctaaaaacgtaaactcgtaattttctcgccaaaaaacgtaaactcgtaatttttccaccaaaaacgtaaacccgtgattttcccaccaaaaacgtaaacccgtgattttcccaccaaaaacgtaaacccgtgattttcccaccaaaaacgtaaacccaagattttcccataaaaaacgtaaacccataaaaagtagaatccgtaaatatcctaagtttgatgataatgaattaataatgataattatttattattattttataatagtaattaagtaaattattaattaaatgggttaacccatttaacaactcaacccatcaaattaaatgagttatgagttgacccaacccatttaacaaaatgagttgagttaacacataactcatttaactctaaactcatttgattatgagttgggttgagttgggttacccattttgacacctctaaatatgtgtctctagcctctactatttttaaaaactaaattttatataataaatttttttatcttaataataaccaagttgaacatattttagttctaaaattaactactcggtttaatattaaactttagaccaggacatgccggataacatggtcttagtgttgtcgtacgtcaccattagagtttcaatttgcataatacaaggtggttgacccaataaaagaaatttgattcaatttcgatataaacaggtttgttttggttcagttttacctattactttttattttgtccaatcccaaaactattatttcaaagacaaattggagaagaaacaaaaaaaaactaatggttggacaaaagattattatatatcaatttcaccacaaaaaacttagcattaaaatattcgaaatggacagcgacgaattcaaaccttcgtgttaattgtctccggcgactatgaattctaaaatcttccactttgcctaaaatatcaatacatcacattcatcctagccttatccactctttcttggaaattctggtctggtttcccttcagcaattcaattaacttcatcaaaccgaccggttcaaacaatcatctagaaattctattttattgttagactagatcatgaaattttgaccgagtcagcacacataaaatctggtacttgacgtggtttagttaacccaacaaagttgttttggttaaacggatttattgacaaacgtgtttcggttcactcactaaaaaacccggttaggtagatactacttcattgacaacaaacgaagcatcctttaatttcaaaaccgcgttttaatcagacttttccttttttattttcagttctaatgtttaaaactttccttttctttttctccatatttgactcgtcaatataaatacaattgtaacaaacagattttgatcaaaagattttacttttctcaattcctttcaactttcaaaatcgaagatctcttaagccatg

SEQ ID NO: 27913 - DNA, 3003 bp, Unknown; identical to SEQ ID NO: 27912
  misc_feature (1)..( 3003): 2750-1469P.txt file - cDNA_ID_2992655; gDNA_ID_1620654; Annot_ID_163598

SEQ ID NO: 27914 - DNA, 3003 bp, Unknown; identical to SEQ ID NO: 24301
  misc_feature (1)..( 3003): 2750-1469P.txt file - cDNA_ID_2992663; gDNA_ID_1621101; Annot_ID_55887

SEQ ID NO: 27915 - DNA, 3003 bp, Unknown
  misc_feature (1)..( 3003): 2750-1469P.txt file - cDNA_ID_2992669; gDNA_ID_1621117; Annot_ID_56210
aaagtttcaattctttaaaataataaatccgagtaaaatcagataactattttaattttggacgcttgataaatcaagcttcctgctcattcgtaatcagaatcattttggtccttttataatatgggtctgaaccattgtccaatttttctaagcgatgtgggacattgtacacatattatttcttcataggttgaataatatatgtccgtttaaaaaactttgaattacatcatattcagaaaaaaatataatattttattaactatatatattttatataaattcaaaataaataaagtataagatcaaataaaaatgaaagaagaattatatatttatgtttaaattaggtagaaatattttaggaaattggttaaggtaaataagaaatatggttagtttagagatattgtttatattaaatcattaattttcgtttttaattattagtttttaggtaacttttccaaaaattaatgttatccaatatcagaacagaattaaacatgttatccaggatccgaacagagttaaaccgggtaaaacccaaccatttgaattaattgttgaattatggctcaaatcttcaacattatcttcaaaaatctcctccaaaaatgtatatatagattaaagtttaatcaaaactaattataaatttgtgtggaagaaaacgaaacataatagttcaaatacgaaacaacaggaatagtaacatcatctaaaggctcttggagaaatttttaatgcagataacaattgtgaaccaagttagggtcttaatcatactctaattcatcaggtgtgataggtctcttgagaggaatcacagactttttctctacatctcttgataatgccttcctcatatctgtttttttagatcaaacgatttaagatttaaacaaaagaaaaagttaagcgcgaatcatagataaaaagaagttaatcaaagcctcacctaatccatcttcctctcctgaataatagcgtaaaacccgcctataaattatgtatccaagctgccagaaaaaggagaaacggtttgtttcatcaaaatggccatcaagaagaagcctatgaaggagatttgacactaataaatggaaatatgtaaaatgtgtgcatgtcccatttacaacttcttctttttttcctacaatgtcatcaacattatgaggcttctaatcaatttcataatcctaatatattaccttttcatacatcttgatggctggtgtgttggaagctcttacaaaaagatccacaaagtaggctttatcactgcaatcaataaccacaagtataataatcattagaagaccagaaattaccagataatatataaaatcaatgaggagaaattcaagattttcttcctttgaaacaatctaaatatatcggttttcaaataaataaatggtccactcgaaagccaatatcaatatattaaggctttcatattttatatcataacgatccatatcaaagagaacactaaaacttgagatgctttgtaattgttaagtcttacatcttatcacttatatcttccagaaggttcatcagtttctttgcaagttgctgcctgcggtattctggagagacagtgacggctgtcacatgaccatgccaagattcaccctgtccttcaactttacccataactgaaaccatgtagaatcttagttagacacatgcttttaaaattatatttataagaacaagttttacatatgtcacttacgttggattctcaagaatatcaaccataacatttcaactatacaaaagaacatttcagtgacactgcttaattttcaaatgtgttaatatccaaaagcttagttttactctcagttctttcaatggtttcactatacttccaaggtctctttccaaactataccacgaaaagggagaaaaacaggtatagtaatagggcaccacgagaacagaacgtcaataatgaagcatatatcgtacttgaagaaaataaagaaagataaagccttgtataaatcacatttcgaaccaatccaataaggtatagcatcattatactacaaacactgaaagacagaaaaatttgagccttgatataactcataactcattctctggacatttagaagttagcacaaacaatcttaagccatgcttcctatgcatcttctaccccatatcaagatttctaaaaccgctaactacagagactaggactaatacaagcagaatttgtttaaacacttatacatcctggtttgtgttaatcagttttcaaacagagtcactcttcctggttttaacaacattcaagctatctccatctgataaccaaaaaaaatcaatagtggcttttacactaacagtttatcatctaagtttcaaccctaaaagtaaacataatctccacgaatttcaaattcctaaaccaacgaagacataaagaaatcaaaacgaagagaacaagaggattacttactataacccatgacacgattgccgggaccttcagcaacatgaaaatagtcaggccatctcgctaaataggtcatgtagaaggacatattgaactgtttcacgaaacaaaattcgaacaaaaatcaacaaaatcgccatagcaaaacaaagcaataatcagacgaaaccagataataagaagaagaaacacgagattactgtttcagtgaggtggtccagattcacggaagtgaatcggagaaggtcattgcagctgaatctacgtatcgtcgtcatctcttctttttctcaaatcccttcgagcttcgtcagattctctggaaaaagaaagaggagacaacaacaaagcaatatacatggcccagttagaaaattaataaagcccatttatatttgggcctataacactgatgacgtcatgtaaaagatgatcaaatttcattatctcccgtcgtcgcgaccttctcagacaacagaaccaaatcctcggcggcgattgaagaaacctttccgatg

SEQ ID NO: 27916 - DNA, 3000 bp, Unknown
  misc_feature (1)..( 3000): 2750-1469P.txt file - cDNA_ID_2992675; gDNA_ID_1620818; Annot_ID_169365
aactttttcataatgtttttcataaccacagataccatatgtgtcaagcttactttcatctaagtgttctaaccttggcaagatactattgatcattacgattaacttttagtttctaatcattattattactacgtgttctacgtgttttattatttaaggtatcccgaccttccatctagatggatgagtcaatgatagtttatttctatttctaaaaccattttgaatccaaatccaaagaagaaagggtaacaccaatatggtttcatcgaagaaggaaaagaaaaaccttgttcttgtagtatattaatcggtttaaaactgcatttattctaaaacaacacttcatttaaaacggatggagtatatcccacgtaataacaaaaattctaaaaacgacaacgatacagttatctatgaactaatcatattttcatttttattttgactaataattaaattgctacgtcgattttaaaaagtatacaacataaaaatatacatttttaaaactcaaatataattacgatgtagattttgtaattaaatcattcaacacaaattctaagtaacatgaccttagataaaacatttcggagcgatgatgctaatggaggatgttggcacaacatcttcttgattatttgacagactatactaaatcaaatatcctataacaaaagaccaaacaaataaaaaaaactatcaattaattaataataattaaatatatagaaactgataattagccaatcatatattatttttttattttatcttatgaatttaattatacatagatatacatttgttcttggaagttttccggcgttatatttctcaaacattgtatgattcaaaatatataaaaataacaccaactagtaaaaaagtaattgtactcgccaatttaaacatatattaatgtgtagcacaataataagattgacgacacaattttattagataaacaacaacaacgacaacatcaacaagcacaacatgtaaataagaagttcagaaacactcaaaaatgagtagaggatgaagctggataaggattcttgcgaacgtacttacgagcccaaacatgtttgccatcgatggtgaacttgtttctaaacctcgcactcacaatctcatccatcatcgacgcacactgcagtttcatcaccatcttcgcaaacaatggctgctcgtttgcttcaacttcttgcatctctaccgcttctatcacttccccgaatctcctagtgaagtaaacccttacttccgcttccgagatcggatacccttttgaaaacgtcaggaaaaccgtccgatcatctgccgccagcacaccttccttctcttttacctccattgtctctttctctctaagggccttttctgtttcgtcttcaactggaggatgaggacgaggaggaggaggagaagcaatttttacttgttgtacacttaacctattagatttttcttgttggagactcaacctgagtttcttcatatcctctatgaatttctctctctctaaagccaattgtttctccctgttgatcctatgagctgtctcgcataaatctgagaatgctcgagtgcaaacatcggtccaactctttgtcactccagcgcaaaagtttttgcgttgttggttgatcaatctgagagtaaactttcctccagtaatacgtaagagcaatggtatcatggagttatcatcgttgtcagcagcgaagaacgttgatgcaaactctacgttgtataacaaatttatacacacaccgatttcgttagccaccgcgtcgacaaaagcgtttggtaacgagacaaggtacgcgattatgtcgcgggcataactggattgctcgaggaacaagagaaaacacatggctagaaacgactggtcaacgtctcggtttagattgaagacaagacgactgaacaaggttctgtcgattgtgtgaaaagcattgaactcgtctcgtgtcaccacaattgaagataaaggattgtttaagacagacggatacaaaggagaagccatgactgattttttatcgatatgtggtggtgatgggtgatgttatctatgtgattagagagggtttataaagagaatccattgaaatgttgaaaaggtgtaatcatatttttccttaataatttgtatttcattcctaaagagtttttgtcctcgttcatgtatctaattaattacatacaacagtcataaccttaaagaggcttggtatcgttttggtgtgagacattgtgacccttggatcatcatcattcttcacccataacccttcgatcattatcgtcatctatcacccttccctaacatttttgtttctttatgaagggagcctaaattattaagtattactattttctgacgctttactgtttttttttaaattaagataaaatatacagggtcaaacatttgataaggatattttaatcttgtcattaaggaaaataaaatatttgactacagtataatctcgatttaattaaatatattaattgtacatcatttgatttctccaaaataaattatatttcataaaggttttgtagtcaaaaatacttattttttgctaatagttaactgtatttttatttatttttataatttaagaattaaattttttatactttttcgtatatttccgtacatttcctatcttttaagttatttacattgcgttaatataaattaaaagaagaaatttagtagttagttaactataattataaaatggtaaaaaccgatatttgataaaataatatgtcattgaacgaattagcaaatacgtatcgtaaataaaatgtgtacggctccgtactgttttgataaataaaataatatcaaacaaaataatattatttatttaaaagtaatcacaaattttttattaaatctgaagataaaattctggataaaccataagattctttacctaaaataaaggtcaaagttttagtatg

SEQ ID NO: 27917 - DNA, 3000 bp, Unknown; identical to SEQ ID NO: 3940
  misc_feature (1)..( 3000): 2750-1469P.txt file - cDNA_ID_2992728; gDNA_ID_1620675; Annot_ID_164232

SEQ ID NO: 27918 - DNA, 3003 bp, Unknown; identical to SEQ ID NO: 19578
  misc_feature (1)..( 3003): 2750-1469P.txt file - cDNA_ID_2992728; gDNA_ID_2926203; Annot_ID_201974

SEQ ID NO: 27919 - DNA, 3000 bp, Unknown; identical to SEQ ID NO: 9237
  misc_feature (1)..( 3000): 2750-1469P.txt file - cDNA_ID_2992732; gDNA_ID_1972024; Annot_ID_178178

SEQ ID NO: 27920 - DNA, 3000 bp, Unknown
  misc_feature (1)..( 3000): 2750-1469P.txt file - cDNA_ID_2992736; gDNA_ID_2936586; Annot_ID_195099
gggtttgtgtgaggagagagatcaagtggacaaccatgtttgagtcaaaactacagggaagagagatatatttttaattcattgaatatatacattggtgaatggagagggaagttgtggtagattagattttgtctacgtatgtctaccacttgtctacatatgttaaagatttagttgtgacttaggaggtcgtcaagcgcacgtgctaagcacaccaacgatttcttgatcttttcttcttgttggtatgaatatgatcctagaggttagtttaacaattttctaatgattttatgtatagtgaaacagtaatattattcacaatttgtggaactggctgatccaaaatatgttaaaaatgacattcggctactagcggaggtctgattcttagcctaacccttattcaattcttttaatactactagtgttggtttgaagtaagagaataataatgtacgtaaatgtatgtaatttgaaagtaagaaaagctttcgatgaagtcttagacagtaacaaactaacaaacatatccgctcaactaaatttacctaacaaatttccatagttttcaaccaagatttaaattaaaaatacactggaaattctaaacaaccctaaattatgttttttttttgttgtgtgagagcgaaatagtcggaattagagtaagaccaatcaaattttaaatatttatcgtaacttttatttcaagttgctttatatgatgtcttgaatctcaattgccttgccaagaaaaacaagcgctgacatatataaaaagcctaaaattacagaagaaaaatacaaagagctagaagaaaaagaaattcccctgttcttccgtaaatatcgttaattcgttatgacagagtttcattctctttgactagatctttatttttttctttacaccgatacaagtcaaaactcttaacaaacaaatatttagatcaacatagaccaaagagtcaaagaaataatgtctgtctccataaagtctccaacttttataacaaattttccgttgaatatgacagtaaataaaccaacggtctagttcttatcatgtctaaaaaccacaagctccttcctcatcttacgctcccctctttacctctccttttattctccttctcattctcctctcaacaactgatcgtataatcattctcacggagacgagtgaccaaaacaaggtctcccgcttcttgcgaagattaaacgaatccatttagattttaaaaaccacacaaaaaaaatatgggtcggctcaagttcgcatgtccggttcttgagatcaatttaatctcagctcaagacttagcccctgtctcaagaaacatgaaaacgtattccgtcgcttggatcaacaccgatcctatgagaaaactcaccacgcgtgttgatcaatccaacagagctaaccctatatggaacgagaagtttgtgtttcgtgtcaacgacaagattctctacgttgacgcatcagcgattgtgattgagatctacgcagcggcttgggctaaagatgctcttgttggtactgtgaatgttcttctcagcgatctttttgctccttggtctggttttggtgatggtaacgacggtggtggtgggaataacaacatgaggcttgtgactcttcagattcgtcgtccttcagggaggctacaagggtttttacgtctcggtgttgcacttcttgacggtggtcaacggagtatgcctttatctattgaggttttcgatggaagtcgaaaaggagagaggaatagtgttaaaagagaccaagaggcttcaagaatgatgcatcgccgtacgaatagcgatcaaacggatttaaccacgtctacgaatgattacggtgtgaaaacaggggttgttactggcaatggaggaggaggtggtggtggtggcggtattgttgttggtgcggatagtatggttaatggttcgctttgtagctctgatattggaccatcagcgtctgtggttgcggctgcgattgcgcaagggctttacaatagacagaaaacagcggttaaagcggctaacaaagaggacgcaagttcgatacttgaagggaaaacagagggaattgagcatagagttgaacggtggagagcagagaaaaatggcacgggtggagcgggtggagcggctggatcaagcgatgattctagcgggaaaggaggagcgggaaggagaagaaggaggaggagaagaaaggagaaacaacaagggaggagaaacggtggaggagagggtaagaaagggttgttttcatgttttggaaacgtgtttggatgtgagatttcgataacatgtggcggtggaagcggcggagaaggagacagcacaaagaagagatataataacaataaagtagtaaatcttagtgctgtagacgaaacgtttagtcattctgcgacttgagataagagaaaatgtttacttatttttggtttcttttggtggtgtaaaacgtttgatgatgggttaaaccatacagatttgaaagtattgaggttaaaacgtatgaataaactttcccgttacatttctggtaaatggactaatttgaatatttgtataatactggggttattgtgaaaagcttttaaagaaagggaaaagaaaagagagctttttgagaaacgcattaacacaccataacttcatcatcaaccttctcctctttcttacgcaattacaacttcaacgcctctctatctcttcgccgtgaatgtcgagatagtcgtaagctctctgcttttcaaatttctctcaaattgaggtagagagagagggcacagagatagagagagaggggcataggaaacggtgattttcccagttcccggaggaacaatcggctgatttctctgtaatcgaagaatctaaacctcacccactcgaaatcagctcgtgggttttggggggtctctattaatttccaaattctggagaaaaatcttgtatttcttcaagatg

SEQ ID NO: 27921 - DNA, 2522 bp, Unknown; identical to SEQ ID NO: 426
  misc_feature (1)..( 2522): 2750-1469P.txt file - cDNA_ID_2992736; gDNA_ID_1590940; Annot_ID_150290
  misc_feature (11)..(11): n is a, c, g, or t
  misc_feature (30)..(30): n is a, c, g, or t
  misc_feature (123)..(123): n is a, c, g, or t
  misc_feature (133)..(133): n is a, c, g, or t
  misc_feature (1429)..(1429): n is a, c, g, or t

SEQ ID NO: 27922 - DNA, 3003 bp, Unknown
  misc_feature (1)..( 3003): 2750-1469P.txt file - cDNA_ID_2992740; gDNA_ID_1620343; Annot_ID_154076
tcttttggccggcaaaattagacatttgtaagatgaaatgaactgatataatctgaggttagagaaacttttggtatatagtttttttttcaacttatttaactggagtttaggcttaacaagttcccacataaaagcggaattagaattctaataagatacgaaaatacacgagccatggcttgggtcggtagaaacttcaatgccagtgttatggaaattgcattgttccttggtggcaccaaggttctggtaatacaagttcattgcgaacgacgcgtgatctcttaccgtgtttggttcaaagcaaggtccaccggaattgagcgctccacagtcacggaatcctccttcgtcgctgcaaacccaatctatattcgcttgcagttgcttatctgtcgctttgtcacccgctatgcaccatactcctttgttttcagcagcctgcgagaggtttcttggtgtcgagttcacggatacggtagatacgaggaggacgaagatgagcgtcaatgatagagacatcagttttgtgaccattatattattgcttatagattgatatttgttcacagactaaacattttatgtgtttgtgtcaatttatacgctaaatcaaaaggtgataagaagaaaagaaggtttggtcataatttatgcaaaaatgtgtaacttctcacttgtttgtttttcctcgtcatatatatatatattattaaaatttatttcttttgttatattataagtaaaatttaaaaggtataaaggaaaattcaatatagtttaatgcatcatttaagaaaatcacattttctagcaacgtaactgaaattttcaactttcttgactctttttttgtcacatccacgtaactgcaatgtaatccaactttcagtccacttgtctctaatcgataagccacagcatgtgctcctttccaatgtaatactctcgtgctaaagattccataccttctttttcataggattaatcgaaattttagcctatttttttttttgttacgagtccagcaagaaaaacctttcctattagcatcaggtttaatgtatattatcacctcaaaaaacttgaaatgctctttcaagatacataaagtcattttatgagttggatcttgcgtttatgaagtctttagccatcaatacaagtattgatctgatcatgtactaaaaatgattaattcatcaacaacatttgagaaatatgaagatgttctataagttgagaatatactccaatatatagttacatataaacttatacagagattagagatatttgatcaatatatagcattttcaacttatttggagattcggcttaaaaatctaccacacatacattaatcataagatatgaaaatacacgcgtcatggcttgggtctttagtaacttcagagccagaaccgttgaaagtgcattggtctttggttctaccaaggttctggtaatataagttcattacgtacgacgcgtggtctcgtagagtatttggttcatagcaaactccaccgggattgatctgtgtacaatcacggaatcctccttcgtagctgcaacaccaatctatattcgcttgtagctgctcatctgttgcttttttattcgctacacaccaatatcctttgttttcagctgccggtgaaaggttttctagtgttgaggtcacggagacggtagaaacaaggatgaagaggaggagtgtcaatgatagagacattgtttttgtttttgtgaccataattgcttgtatatgatttgttgtttgattgatattgttcaagagtaaatattctggatatgtgcttgtgtttatatatatactaagtcaaatggtgacaaactaaaaaataaggcaaaaggttttgtaaaaatttctatcattaaaaattaattttattttgttatatatattataaataaaaatctgaaagatagattaatactccctctatttcattaattatatttgtagtttaaggttttttcatacatattaaaaaaacacaaaaatctcatttagtttctctattttctataaaaacatcattaactacacctaattcaaccaataaaaaactatcctgtaaaatataattggccaaaatttattaaatgcatttaatttttgcatagataatgaaaacaacacttattttgtaaaaagtaaaaaagtccttaaactacatataatcagaaacagaggaaatatctaataaagtttaataaaccatttatgaatctgacccttcttttattttattttataaatacgatcttatcttatcttgataaaataagaaacatgataagtgttgtttgacacatcagatctattatgatgatgactttccgaccgatttccgatgaattctattcactggaaatcttcgactgattcaacgaattcaaatttcaacaagaatcagtcgaaatatcataacagaataatgacaaatgcgtaatcatcagacaaaaagtcgcaaattgacatttaagttaacttcatacacatagttgaagatccaaagatttgaagtttgaatgcgataaaaagaattgagtcttaaaactcttaatttgacattctacgttttaaacatgaatgatatttagttatttaccctcggtcaagatttgctaactatttgtaaaaatttcaaacttaagaatcgaacatcattcaaaattatataatgtgttacgagagatgcgagtggagagacaacttcagggtctaaattgcaaattttaataagtatattgctttttgaaactaaactatcaattattacacttttgagacacagtttctttctgattctcacttgtgtcgcttttataaaaaagataaaacgcaaattgatttcttcttattctgcttcggtcttcgtttttctttacccttttgatttgatcttctcttctcggttgaaattagggatttctgtaaaattgtaatgtgtttctgagtaaatcatg

SEQ ID NO: 27923 - DNA, 3000 bp, Unknown; identical to SEQ ID NO: 14268
  misc_feature (1)..( 3000): 2750-1469P.txt file - cDNA_ID_2992752; gDNA_ID_2684096; Annot_ID_190124

SEQ ID NO: 27924 - DNA, 3003 bp, Unknown; identical to SEQ ID NO: 26779
  misc_feature (1)..( 3003): 2750-1469P.txt file - cDNA_ID_2992756; gDNA_ID_2213664; Annot_ID_182025

SEQ ID NO: 27925 - DNA, 3003 bp, Unknown
  misc_feature (1)..( 3003): 2750-1469P.txt file - cDNA_ID_2992760; gDNA_ID_1620669; Annot_ID_164035
tgctattgtggaacgcatcttttttttcataaactttatcatataagaaagaacttgaaaaaaaaagagattctaaagaagaaagatcaagatgtctccaagtaacaagttgcagaagattcaacagcttcatcgagctcaatatctccacaagtagagagaattgttgcaaatatataatcatcaacttcaaatccctctgcctccattctatacattagcttcaatgcttccctgcaaaacccattcctcgcataacccattatcatcgccttccatgaaaccaagttcttctcaggcatactgtcaaaaacccgaaaagcttccgagacaaatccacattttgcatacatgtgaatcaaagcacttcccacaaagacatttgatagagcatgattcttctttgcaatggaatggattgatctaccgataagaagagattctgaattcgcacaagcttttaaagccgaggagtatgtaaatgggtttggctctacaccttcttgaatcatctctttcaagaagtctagcgcttccgattcatgtcctaagctcgaacatccagagatcatagcggtccatgaaaccacatctctagatggcaattgctggagaacattgaaagcgtcacgagattctccgcatttacaatacagccacaccaaagtacttcctatatagacattcttttcgatcgaattcttgataatctgtgcatgaagttccttccccaacaataaagctccaacagatccacacgctctaagaatgcttactactgtcaaattgttagcaatcaaatgccgcctcttcattatccggaagaggctgatagcttcctcaccaaaaccttcccgagcatgagcagctataatcgaagtccatgtgaccgtgtttctattactcattccatcaaacacttttctgcaatcagaaatctccccacacttagcatacatgtccatcagcgaagttcccacaaaaacatctgtctttatcatcctcttaacaaccaagctgtgtacttgccttccgaatcttaacgctttctcctcactacaagccttcaaaatactgcacaccgtaaactcgttaggcaaaaaccagtgattcaacattccgataaacatgcctatagctttaattccatgcccttttctcgaacacgccgatataacagcagtccaagatatcacatctttctcctccatcatatcaaaagctcgtaacgcacttgtcaattcaccgcattgcgcataaaaataaacaagagaactctccacaatgagattccccactccaactttcaccatattaccatgaacttgtctccctaactcaaactctgctctcctactacacagattcaacaaacacacaaacatcctctcgttcgtaaaacgtattccatgcttcacataatcctcaaacagtgcaaaagcctcatcctcaagaccatacttcaaatacccatcaatcatagcagtccaagtaacagtatttttctcaggcatactgtcgaacactttacgtgcataaaccaaatcaccaagtctaacacaagaactaatcaaattgttcccaaaatagataacttgatcatcaaaacacttcaacgccatcgcatggatccttttaatgagtcgcatcccattagaagactgtagccactccgctaacagagcataatcaactctttcgctatcgaaagaagacgaatcatcctgattcacattctctcctttgaaaccactaaaacccgaatcgaaagatgctctctttccagaaactaatcgaaacccaggtaatctcacgtgtctctgttcctctcgcttagttcttgaatcgctactgtaacatatcgtcggagatttgtaggattgagtcaccggaatctctgaaatccggagacgcggttggattaacgataacgaaaacattgtcggcgatggagaaagagaagaagcttcacacagagatctcccgccggaaaaaaaatcagataaagttctcttttttatttattttggtaaagagaattaaaagtttataatctgatctggtaattatgacgacaacaaataatatctcggtcggtttcaaattcctaagcgagagacaaatatacagtacacacacgacttaatatcaaaaccaataaacgtaaaacacgtgtctcatcacttcccactttcctctctgcatttgttgtctctctctcctgaaaacccttgaattttgctacacgatctctgaaacgtgtctctttgactgacttcaatcttctttatcacttaccgtttctgggttttatgaagcaactgagctaataaaaagcttcttcttagactcggaagaagataaaaaacagaatctttattgtttaaagcttccaaattcgagaagagaatttgaaacgaccaagttcaggatattcgtttcttcgtctactttggtctcttcctcttctctttcgaaaagggtttattctgtcttaaaagaaacctttttgagagggtaaaaaaagcttcaattttcagagaaacacaaaaggcagaaacagagaaaaacaaatcatctaattcatgaaacaggtgagaatacatattttcttcttccttggtctcttctttttttattgatttcattcatatatccaatttttgtgtctattggctgtttaattgttgacgatgatgaattcagttagataattatgtgcatagtttaggaattttttagctatatcttcttctcatgtgtaaacatagaggaaaatctaaaaaaaatatctgtcaaattattgtcttttccaaattgtcctcattgtcctattgaatcaaataagattttttattactgatgattcaaatattgttaatagtttataaccttgctcagtgttcttctgatgtgtgatttaaaacctcttgtctctaggctctgatctatgttttcgtctcaaagtcttattatcaattctctaaattgcagggttcaatg

SEQ ID NO: 27926 - DNA, 3003 bp, Unknown; identical to SEQ ID NO: 27925
  misc_feature (1)..( 3003): 2750-1469P.txt file - cDNA_ID_2992760; gDNA_ID_2926170; Annot_ID_199462

SEQ ID NO: 27927 - DNA, 3000 bp, Unknown; identical to SEQ ID NO: 5385
  misc_feature (1)..( 3000): 2750-1469P.txt file - cDNA_ID_2992819; gDNA_ID_1620784; Annot_ID_50404

SEQ ID NO: 27928 - DNA, 3000 bp, Unknown; identical to SEQ ID NO: 5385
  misc_feature (1)..( 3000): 2750-1469P.txt file - cDNA_ID_2992819; gDNA_ID_1620784; Annot_ID_168080

SEQ ID NO: 27929 - DNA, 3003 bp, Unknown
  misc_feature (1)..( 3003): 2750-1469P.txt file - cDNA_ID_2992878; gDNA_ID_1621147; Annot_ID_173079
ttttttctttgagcacttgtgcaaagataagcgtgtttgtgtgtcttggtgatgttaggcaaaagcacaactgtcaagacacgctacacagtcatgtcacgggagacgctgcacaaataccctgaactagcaaccgagggttccccaaccatcaaacagaggcttgagattgcaaacgatgcggttgtgcagatggcatatgaagcgagcttggtttgcatcaaggaatggggaagggcagtggaagatatcactcatcttgtctacgtttcctccagtgagttccgtttgcccggaggtgatctttacctctcggcacagctgggccttagcaacgaggttcagagagtgatgctgtattttcttggatgctatggaggtttgagtgggctgcgcgtggccaaagacattgctgagaacaacccagggagccgtgtgttgctcaccacctctgagactaccgttctggggttccgcccacccaacaaagctcgtccttacaacttagtcggggctgcactctttggagatggagcagctgccctgatcatcggagcagaccctacagagtcggaatctcctttcatggagcttcactgtgctatgcagcagttcctgccccaaacacagggggtgatcgacgggcggctgtcagaagagggcataaccttcaagctaggaagagacctccctcagaagatcgaagacaacgtggaggagttctgcaagaagctagtggcaaaggctggctctggtgcgttggagttgaatgaccttttctgggcagttcatcctggtggaccagccatcctgagcgggctggagacaaagctgaagctgaagccggaaaagctggaatgcagcagaagggcgttgatggattatgggaacgtaagcagcaacaccatcttctacataatggacaaagtcagagatgagcttgagaagaaaggcacagagggagaagagtggggtctgggcttagctttcggaccgggaatcactttcgaaggctttctcatgaggaacctctaaatgtatatgaactggacatttctcaacaaataaaatatacaggaaccgatgctaacacacatacatcatgtaatggttgcattagttttgttctttaatggtaaatcacagaaatacatcaatacagtaagtttatatacataattgaagtattcttcaatggcatcttacttcatgcatccaaaaagtaatttcaaccttacataattcagatgtcgttttctctggctttcaaagattcactcgattctagcaaaggaacatacgtaacatagtgtgacacactagtctatatatacatttttgcaatatttttaacaaataaatcatagagttgagacttatttacaactcaatgctattgacattttattattatcaattaattaatattcctaattattaggatttccttatctaatatatctccatcaattctaattatttaaaaaaagagaaattttaggacattattaatattatactttattaaaccttaccaataaaaaatatatactttattaaaggtaaatattttagttatttaaagtttattaaatattttcacggaaaaaacgtttagaatatttataatatggaaaatctataaaattaaataaacatttgaaagaaaactttttaattgatttaaattataaatcttttaataaagtattattaaaacaaaaaataaaaaataatgtttaattacaccgaactggattagatggtataatgggtttagaatattataatatatgaactttagaacaattaaataaccatttgaaagaaaactttttaattgatttttgaattataaatcttttaataaaagtattattaaaacaaaaaataaaaaataatatttaatttcaccgaactggattagatggtataatgggtttagaatattgtaatatatgaactttagaacaattaaataaccatttgaaagaaaactttttaattgatttttgaattataaatcttttaataaaagtattattaaaacaaaaaataaaaaataatgtttaatttcaccgaatggtatagatggtaggacgggtttagaatattataatatatgaactttagaacaattaaataaccatttgaaagaaaacttttatattgatttgaattatatatcttttcgattaaagtattattaaacaaaaatgacaaaataatatttaattttattgatcgggtttagatggttaggacgggtttgagtcgatagaaatacaagacgatatatcatgggtgaaatccataagatatgtttgatattcactgaacgagattagattgtaggacgggtttgagtcgatagtaatacgagacggtataccacgggcgaaatcatatatataacaatcaaaatacaattatattatcttaaacactatacaaaacaaacaatattaacaaaataaatataatttaaatttaaattatttagttataatctaaattttaacttaatggacggtatgttattgttcctatatctttaaatagtaaaaatcaaacaagtaattatacagtaaataatatataaaaataagagttgtacatttagaaaatataaaacattaaatcatatatattttaatctactaaacaaattaaatttataccgcgggataaaaactagtattatatgttagcgaatcctactaaactatgacaacaaatatacatgcgagtcgtatacagaattgattctcacatttaagctgtcaacaaaacattcaacaagtcttaagcaagccattaaagaagggacctgaacaatttaatatatatggttaactatttaagtatcatgtccccacttgtccattacgtgattactacaaaagttcacataaaagttcctttttatatatataggaaagggaagaagatctcaataacacaaaaccttttaaactagtaaaatacacagattttaggatg

SEQ ID NO: 27930 - DNA, 3000 bp, Unknown; identical to SEQ ID NO: 14136
  misc_feature (1)..( 3000): 2750-1469P.txt file - cDNA_ID_2992886; gDNA_ID_2214702; Annot_ID_189711

SEQ ID NO: 27931 - DNA, 3003 bp, Unknown
  misc_feature (1)..( 3003): 2750-1469P.txt file - cDNA_ID_2992890; gDNA_ID_1620764; Annot_ID_167287
gatctaattaaagcgtatatttcgatttgattcctcgggaaaataacataattagaaataaaataaaaaattgatatcacaatttccgataattatggtgaacattgatttgatttgattggccggaaaactaaccttgatctctgagtacgatcaccggtgtgccggcaactgaatttgcatgtgaaaactggttgccggatattgccttgaatctgaacgacttgaggactacattcaggctcgccgtcaaactgaaaaacgaatctaggatcaggctccgccttcacattcaggtgaaactgagcagacgacgacgattttccagctccttttccgactgatatccatccgttgtggaagacgcacggtttcgattgcgtaccagatagatccaacggtacggagactttcgccagaagacgaccggagtgtacgccgcaagcagcgccggctcttccagtgtagatcaaaattttaagacaaggcttagaagtaaatatagatctggaagctaagcgttgaatatcggagctgctgagatgaaacgtggcggctagggtttggatctccggaaactgagtcgtctccaaaggaatgtacgggattgcggcggtttgcggcgggaagtttttgagtttgattttacaaaaacaaggagaagacgacggatgcacgacggagctcgttgtcttcgccgctaacggaactttcaaagctaggttcccgattgtaagacggatgaatggacaaggatccatttcaatcgcaacgagtcaattagggtttttcagagagagacggaggaagagaaagagaaggaaatgtgaacaaaaagggtttaggaagagttcgacattaatggcaggaaccgttcaagagacgatgacttaggggaattaggcaaaggaaaaggaggtgacgacgataaaacgcagcgttttaatggcgccgtattcacgacctaaccattggaggaagcagtcgtcttcttggtctttctgtgtatgtctctggtttttaagtggagacaaacaagcaagcacaatttacatttttcccatttttgcattccctcctttcgtttgctgtattttcctaaattgtccaattcgcctttattataccacaactttaatattggtaccaaacctttttaattttgttctttaatcccctttttcattaatatagacggttaagctacatccaccgatgaaaaaatcatttgaataatttttaattacattctataactataagtcatgttgtaaagagtttgttattagagcatgaatattccattattctctcataaaaaaagaattaaatgagaaaatttgtccctaattcttttttatttcaagtagccccctaaattgtggctaaacatccggtaatcgtaacaatgatgtagattgggtaactctctgctcgaatgtgacgcttattttggcaaataatgtttctttggtaaacatttgaaagtttttaaacaatttgttttgagtatttaaaatacgtacggataaagggtaaatccgaaatttagagttagttgagggctggtagagaaaattaaaagacattggagcacagctgggaacaggctggcgaagaagtgccaggtcggagagaggttgacgtaattttcttttgtttggtttctctctctacctgataagtgaccaaccacacaaaaacatagggctccacttctttgaagtttacgaaattacccttgatgcttacgtgtacattcgaggctctgattagtgccttgatcggggagaatctttccgcctctatgcggaactcacgttttcgtgtcagtctcatagttttctggtttttccttaacacacattttattcagattaagagatttcttttttcttctgttaaatttattttatttttagttccgtttcataattggcgtagctagtttccaatgtatttgctaacagtgatgaaagatgaacactacgaaacatttaaattttcttcatgtgcatgagttttggaatgataaacttcctaacattatttacaccatagtgaagtgttcttggttattttccacaaagtattcttgaattgtctttggttattaatagccatcggtctaacttttctacattcacctagaaacaaaagtttgatcaaataaggaaacaaacactttttagagccacaaaacttttctacatttgtgtacagtatgaaattagtaaggtgttttaaagtttcgaggaaccgtcatttaaaaatgacatcaaatagtcaccttttcttctactgcaaaggtaaactcaccactctattcgctctgagaatgcagcttctgtattatatagaatacaaaatttctaaattaagaaattaaataatgcgtgcgagtcaataaaataaaaataaagtagaattctttggggattgggcgagagatatgcgtgcacgtttacgacaacttagattcaatttcttttttatatagtagtagtatttgtttagataagtagctgaacgaggatcgtggatgatagctgtattttttctgctttttttgttttttaatgacattcatttatagaggatgaaggaaatgtcttcttcttgcctcagcaacacaaaattacgtaaaccatatttttgtttttacagtagtaactgtagagaagtccatcagaatattacagaagcccaattgaaaagcccatttgaaacccactgaattaaataataatcgaattcggcggagactccaactattgtcggcccatcaaacagtttctccggtggtttgagaactaactgaaatgtacgaaattaacctccgtggcttacgtgttctgatcggggaatctttccgccgaatctgagtttacgtttttttttggtgtcagtctcatagttttctggttttaaaacggaaaatatatgcgttagggtattgttggataacgaggaaggagtaaacgaaggaagaagagggagatg

SEQ ID NO: 27932 - DNA, 3000 bp, Unknown; identical to SEQ ID NO: 12819
  misc_feature (1)..( 3000): 2750-1469P.txt file - cDNA_ID_2992894; gDNA_ID_2214573; Annot_ID_186250

SEQ ID NO: 27933 - DNA, 3000 bp, Unknown
  misc_feature (1)..( 3000): 2750-1469P.txt file - cDNA_ID_2992900; gDNA_ID_2926236; Annot_ID_142758
tacgataactaatacgtgagaagcatacaatgtcatttaagcatcagacttgtcaaaatacagaacgatgaaagaaaaatcaaagattccagaacacatcatccattagcttcaacttattgactatcaaaatcgaagcaagtaacaaaagattttagcaaaacatgcttccatggaaaaacaaactagcaatatagtcaaaaagagaaatggaatctgcagggaagaagactaatctcaactagagaaatcaacgcaaacaatttcgtatgggaaatactaaaaataggacttacaaagaagatcaacacacataacaaaaactccacgaatttatgagaaagagcaacgaaaaagcaaatggcgaaaggtagatctgcgacactaaatctcagataaaaaggcaatcgccagcgaatacacagagagaaagagaaaacgtggaaaaagtgggagagagagagagagagagaaatagagatagagatgtataatgatgagaaaacgcgtttgttccagaagaagcaaaaaaaatagaaagaatcatcgtacaaagtgaagatgaaatttaccagaagaagaatgataaacacttcctcgttctagaccttgtgaaatccttctcactgctacgaacgatcctcctctatcatccatctctctctctcactctcttccgagtcacctcaatcaccaaatatcttctatcaaatgcagaaacaaacaacaaatacaagttatcgaatcaatcggaactttcggaatctgaatcaaacagagacgcaatgcgaatccatatcatgagaaactgatcaaaaacacctaaacagagataatcatactatatgtacccgccggaaaacgaacaaatcggcgtcgctgcttttagatacaacagagagatagacgaaaacagttaggattgagagatctaccgagagagtcgccggagtttaggcggcgattgagcttaacagatggcggaatttatgaagattcggccgtttctcttcttttttttctttctttgggtttaagaaaataaaaatggggatttacaactaaaggatctggcgcgtgttgttcagtcgctatcaaaagcttagtaacggaaaataatgactcgtgcggtcatcggtatttaagtcggacgacgtcaacgacaatcttctaattcattttttttattattatctttcaatcttctctatttttaagcatctttttaagattctgttttctactgttgtgaacatcgtgaatattgctgtaacacaatagtaattcgaaatgaattacataattaacttatggttatttgttttcattttttctatatactaaccaaccattagaaagttatactttaaaatcaaagatctacttggttgttaacacattcaaaatagctgagcggttaaggaatggttaggcaacaacaaaattttgaattacctgatcaaaatattgaaatctaatctcacagaattatatgattagtaaagtcttagtgccacacttccgtttgcaactagtgacgcttcgagtttggaaatgcattatcgaaattaaactttatttaataaaatctatctaaaggttagctttcaatctagtttttgtttactttcttaataaaacaaaacatcgaatccgagtaagataatatagcatgtagagtaataatgttgtcttacaaagctaaccacataagtgagatcacggtatcatgggtgcgacaatttcattaaggcgtgggccaatactatcaccggtatggttcaaatatagccgacccgcgtgtaaactgccttttctttttgttcgtgtgattagacattcacttagtaacatgtcaattattagtagatccttaccgtttaatgcaaaaataaaatttcaatatacaactactagtattaaatttacaacttctataaaacttttgggaaattgtcaaaagtcgttgtaacgaggcatgactactttctccgacaaaggctccgttctgcaagcaaatgtttctagatcccaaaaattatgtttgggtgtgtatattacatgatatgccagtccaatttttatctatcaattttgtatataaacgtggatcacaaactttacttgaacacaaacgaagaaatacaaaatatttctcaaactaaaaaaaataaaataaatacaaaatatttctcaaactattgtagtatttaactaacaaaaaaagtcgagatctttttttttttttttgtcgtaagtcgagatcttttaaaaatgaaacttgtgttgtctgaaacaaatgcttagattttgaatagataatataatgagttttatgcagagtcgtgcaccacgccaccacaagctcgtgtaccttcagtttctgaaacacgattcaactctagattttgtatagagttcaattcgtgctcttcatgtccgattttttaaaattaaaaagtttccttaatgtttacgatattattattatccgaagacctttgtcaggtctagctccgttgaccaatgcatcttccaagttccaacatgtatatgtactctaattccaaaaatcgtaatcttgttggttgtcatgtttgttcacgatttatggatttcatcttatgtgggctgtggcccatctgttttggtcgtttctgatggaagcaagcaatgagactaaactgactttagctaacacaaggcccaattatagaagcccattgtaaaatagaaagaacaaaaactggaaagcaaaaaaaaacaaaacagttgagaggagaaagagagaccatctttacatcgcctatgtcctgtcctccactctgttaccaaaattatatataatttttttaaaaaaattaaaattaaaaagaagaaaaccctagatttctccgtctctctaatttcctttctctctcaagcttctcagaaagtctgacactttcgagaatctaatctccaaatttcttgtctttttggagaaggaatcgaattatg

SEQ ID NO: 27934 - DNA, 3000 bp, Unknown; identical to SEQ ID NO: 27933
  misc_feature (1)..( 3000): 2750-1469P.txt file - cDNA_ID_2992900; gDNA_ID_2926236; Annot_ID_203877

SEQ ID NO: 27935 - DNA, 3003 bp, Unknown
  misc_feature (1)..( 3003): 2750-1469P.txt file - cDNA_ID_2992902; gDNA_ID_1620516; Annot_ID_159297
aagaacccacaagttggtggttttcaggtatattcaactctcagactgtaacttgtcataaatttgggtattgaatctttgatgtatgacattataatcatgtgcaggtaacaccgatgaccctgacttcaccaagattccgcaggaaccaaactccaggaaaagagaacataaaaaaacctcatcaaactcctcataaagcttcctcaatgaagatcatcaacaccaaaaaagtagtcatggagaagcacaaaagcagcaagatccatccctcctccaaacagcagacaacaaaaagaactcaagaaaatatgtctcctaatattcttcagaactaaccagagacaaaccagatcaatcgattcctcttcttcaagtctctagatcatcgtaaagattcgacttttcactttgaagattccgaaagttttgtcccttcagctagtaatctcatctcaagcttatggtttaggtgactagcccttgattcagattgtgtaaccacaagcttttaaggagctgtgtagaatagatagaactcaagtctacttactcttcaaagtaactatgtactcaatagttctgtagtatcaatcttgtatcatttgtatacatagagatttgaaataaagaattatgtctacttttcaatttctcattgtgtttctttcttgaattagtatagacaggaacatggcaaagctttctgttttacatttgttttaaacgacgacgttttggtatgatgttgtgatgttgtgttgttgtggtgtgggcctctcgtttcagaggtgagagaaaaaatcttatctctgtggactgtgattgtgtgatgtttccatatcttcagcttttcttctactacatgctctaatcacgtccttgtagaggaaaagaaaaaaaatggctgcttcatcttcctctttcactctctgtaatcacaccacacttcgtactctccctctgagaaagacccttgtcaccaaaacccaattttcagttcccacaaaatcatcagaatctaacttctttggctccacactcactcactcatcgtatatctccccagtctcttcctcttctctcaaaggcttaatctttgccaaggtacatttctcgactcttgcattgatagattgtttgctacagttgggtaacaactagttctgggaattagcttctttgttagaccaatgttttttggacaatctaagttctgttccatttcttttttatatgtttttgagtattacgatataaatattagcaagacaatagattgttagatacacagccatttttgaataagaaacaaaagatgtaaatattgggttttaagtctgaatttaaatgttataagaacagatttatgaatgtgttagtgcagaatcaaagacaaaatcaaagaaacttgtaatcagtgtttgttttagagaccataaactttcacatacctgaaaataagcaaatgctagaatgttcttgaatatgttcaatcctttattcatatgatttaagctgacacggcatatgaactctctttaaccttctgtgaattggtctctttgtgatgtttggtgggcagcaggttaacaagggtcaggctgcaccagacttcacactaaaggatcaaaacggaaagccggtgagcctcaaaaagtataaagggaagcctgttgttctctacttctaccctgcagatgaaacccctggctgcaccaagcaggttgttaaatctttactttctcctccttcccgcattcattgatcgcatatttagtgtttctaaacgtaaatggttttacttgtgtacaacaggcttgtgctttcagagactcttatgagaaattcaagaaagctggtgcagaggtcattggcattagtggagatgactctgcttctcacaaggtacacacatcaaaaatctctggtttcttgaataaacccatttcttttttccggattttaaagagagtggtgggactttaaacattgttgcaggcgtttgcaagcaaatacaaactaccgtatacattgttaagcgacgaagggaataaggtgagaaaagattggggagtgcctggagacctgtttggagcattgccagggagacagacttacgttcttgacaaaaacggtgttgttcagctcatctacaacaaccagttccagcctgagaaacacatcgacgagaccttgaagtttctcaaagctgcttgatcattctctctttctcttctttctcttctttcatgcatgtctcatgtctgtctccatgagaccatgaccttcttatattgtttctgttgagtatgaattttcaataataccatgttataccaatgagaagggagttggctttggtctagtacaaagatcacaacaggataagtactgaagtgtggttaaaatgttagttggttctgtgtatttgagtctctcgttttcattgtgaacacctctactatctctttctcttgtatcaattaacacttcaagtaaggtacacatatcaggtaactctagctagcccttgattaaaattgtcaaacacaaagctttaaggaattgtgtagaatacatagaactcaagtcttcacacaatagttttagtatgtgaactcaagtactcaatagtgttgtggtctcaatctaatatttgaaatttaaaacggttattttcgcattgtgtttctttcttgatttgagtatagacaggaataaaggtagagcctttggactgtatgaagaatatggcaaagctctgtttttttacgcatttgtattaaatgacgtcgtataagtcggagcaccgagggcctctcgtttcatgagagaaacaaaaaatcttatctttctgacaacggtggtggtgtgtgatgttgtcagccatggcaaagacagagctacaacgatctctctctcttttcttcttcttctgtgtctgtctttaaatagagtctctttgaaacgaagcagctttgtcctgttctgatatccatg

SEQ ID NO: 27936 - DNA, 3003 bp, Unknown
  misc_feature (1)..( 3003): 2750-1469P.txt file - cDNA_ID_2992906; gDNA_ID_2926093; Annot_ID_196595
aaaacttgtatgaataactaggttatgattattattacctcatatgttcctaagttttaagtttttcacatatagtaagaaaataaattaaaatttaactataaatgcacatttttgttatttacgattttctgtaacgctaaaccaattaattaatagtaaattagttttcttgaattttacaattcttcatcattttgttttgaaattgtttttaaaacatcttttaaaatttggaataattagggaccaagggagattcctaacctagtttttgtccgaaataatactctgttagttccaaactaatccaagtttttctttaagaaaaaattatatcacaggccagtcatgcctaatatattttctttatattttggaatcaaagtgttccacgtgaatttttgtaatttggaattaaagtgtttttgttgtccaatcaaagcgacaatgcctaatctattgtctttcataactgttcgcctgtcatttatgtccaaactatattgtttacgattttcatcaccaaaactctttaattatactaattatcggtttttaaatatcgaaaacactcagttaacgtattgcattcacattttaagaacccataatattttagtaaacattaatttttgcatcataagcgctaacacatatgtatatataactctattaattgacaaaaaaaaactctattaatttgttcactgccaaaaaatataactattcgtttctcaactattttatttatattttatctttgttaatgactttgtaaataatgttagaaacctaaaacatttatatacaatgaaagaagaatagttaagatctaaagttaactagtgtggcatgatggcaactttagatctaaagttagatctagacttcaaaaaaatcactttccattatattcaagttcgatatcggcttgcgtccttttttttaactcgactctcaaaatggtatgggtaaggtaacattacctttccccaattgagtggttagttctatatacgctttcgacagcatatacgattgagtgtgttgtttgtaccttctggaatcatgttttgaggtaggcaaccaaatgtgtgaggtaggcttttacgtctaaatttcttcccttgctttaatttttgaaagattcaacgggcctgttttctcctaagctcgaagctagtcaatccaaatcaatatcaggaaaattgtggaccatatatatgtaaccttaatcaagaaaagaatggcaataagcagttagctagtttaatagtctagtttagtggaagaattttagccgttaatatatttgaaagagttagttcatctatatgtttacagaattggattactcatacaaaaagtaaatgtctttgttcaattaatatttctaagacaacctaatttttaagattagaaagatatcgaagtttgtggtcctatatcaaatcatgaacgataaacggaggacgtacgtactatgaagtattttatataaacatgattttctgaatcattatacatacaaaatttaacatgaaaattggataatgacaataagaagtcgacatcatcatataactaattctgaaacttaatcgcactagagaaattaattgttagaaaataggtaatataaccaacctcaatgccacaagtcgtattcggtgcaggtaggcaaccaaatgtgttaagttaatgctaaataacatttgatgttggtatgaagagaaaagttaaatcactaatttttggtttggtgactcgctctcaatagcaatctttgtgcttaacaaatcatcactactgatgtcaataaaaaaaagagcatcattactattttatatagaaacaataaaaaaacaaaaccttaattagtttcattcctccaaatgacaaatttaagatatttactagtattagatgataaattattcattcacatataaaactgcataaacataatctatgtttttaatgactgatataggctgaaaagaaaaaaaagagactgatataggctttatatgaaaatactgcatttgaaaaaatttcattccttacatgttttttttttgtcaaccatgcataccttacatgttattttataaaatttaagacacaatttcagattatcaaaaaaatccaggaatttttttttttgtccatatttagatcaaatacatgaaatttataaataaaaaatttaccctctattctagttaaaatacgttttgatgtagattaaaaatagttaaatatgattccaagacacataatttatttttgattatatttagagaactaacgaaaatggtggcttcctgcaatgttgaacaaaactttttaaaaacctatatacttagaagttagaaagtacattgatttacgaatttccaaatttagaatttatatcatagattagttaagaaaaaatattgataattttatctaagactcatgggagatcgacaactactcatattggccaatcttaagatttcgtttgttgcatcaaatctatatttgtttaatcacgaacttattatatctataaagtagaagtaactttatttctccttaatatattttgaaaaaatgcaattcctaatgatttagtatagaggaagttcacgtagacagtcaccattatcgcttcccataggaaatattttattcaaaatacagcagacattgatttttttatttatttttttctgtgataacatctcaaattttaggtagttatgaaatagataatattgaagcgttttcatttataatgggccttataaaaccaatctagcccatatcactaccaacccatttattacatccgaatctaaattaatcaaacccgtatattaaaccgggtttaaaattctgacccgtaattgatccactgacctagaaattggggggaattgaatcttatccataattcaatctcttccaatttctcttcttcttcttcttcttcctcgcgacgcgttaatg

SEQ ID NO: 27937 - DNA, 3000 bp, Unknown
  misc_feature (1)..( 3000): 2750-1469P.txt file - cDNA_ID_2992910; gDNA_ID_2936547; Annot_ID_193898
tactcttttcgttgctattctcctcctcaggcatctgcattcaaaaacaattaacaatcaggaaggctaaagataataagcaccatctagtggaagtgagaatggttatgtttcaaacaacaaactagctttacctcgtgttgagttgaactattttccaagccattctgatgcttcactggctcaggtgtcttctttggggatttttttccttcagtttcagcatcttgttgtttcaatggtgtgactgttatgaccggggctggggtacatgtgaaacagattcacattgacattaaagatcagtattaagcgatgtagaaactaaacacaatgagttaaggaagattatgtttacctattgatgtttcttgaggggttatgagcagatgagttttgtcattcatcacagcatcagccttgttttttcctaattctctagtggcctaatttcaggtaacgcagatatgttaagcataatcaaagacatggcgaaagcaaaggaaactagtgagtgtctaacttacagatacaaattttgctttagtgggtgtctcgctaatttccttagaattcaggaaacttctcaaatgctttgtggcactcgtaggagtcattgacttagcagcagaacaagagcgcattggcttccttttcaagatggttggaggagtttcttttatgggtttttgctgaaaatagaaacaaacataaagcattcataccaataaaccaaaactgtcagaatgttgattgaaactagtgtaattgatacctttagatcgttataccaaactccatcttcccacaccatgaaaggcctaagatctgagtgtcttattgtagattcctgctgtgtagcctctaatctaaccgtgtaacggttctcagagagaattttcctcacttgccctttatgccatcccaaaccagaaaacgtctctacagattccaacaatgcatacttgtcaactgaagaaggaggcggtatgggtctaacacggcgcgaattaacaatgttggttggtctcgcctcatcaccattgcagctcaggtacctattacagtccttgacaatgaatttcttcttatcatccacatcagtctctttgactaccattgcaggggaccacacagcttctttggcagaaaacacttccaccattgtcccggggctaaacatggacttattcgattccttcaaagacaacaaattaaagtctacttttaagcattcacaaccaaaactaaacctttaataattttaatcatagcatataacaagaacaaagaaagcaacaaaattttgacagctacaagcaaaaacaacaccggatttaagaaaggatctcttaaccatggaactataacactcaacaaacgaaaaatagagaaaagtttcagccttttgaaactaaagctgaaacctttaaccataacacgcaaccagactcaaaacggattaaagcttcaacctttttgaaagagagcaacaaagagacagtttcaaacattcaagcaaagacccacttcgaataaatcaacctcatacctcaatttctggttggatccaagtcccaccggtccagataagatgagtccgcaactgctttctctcgaactgtataatgtcaggaggcaaatcaaaataaaccaaatagttgtcgtcctccattttctttacgacaacaccagtccaccacccgtctttgtggtcagcatccaccagcaaaccttcctccaaaacgacgtctttttgttgattctcctccggaggtacaggtctaatgaatctctgttcgatgtgttcgattaagggagacgaaccgtccatgtccagcaacgtcgagtaacgaacacgaagctttctgcgagatgagttccctgggttttcctctaaaacagctctgaaccaagctccttcgaacccttcctcttcagaactgacttcaactacacaatctttcgttatcttcatcgtttgcagctccatctccggaaagtgaaaaatgtggttactttgtagaaataatcaaaacccagaacccaaataagcaaagagtgaagcaaaaaacctcccttttgtaaaaccctaaaatttcactctgatactgaaagacagctagctctacaaatgaaaagcagagacagacatttacgaaaataggaaaaatatttattttctttttggcgcgattaaatttacgaaaaatagaaaatatttgataagaagagtatcttattgggcctaatagcccaaccatgaatggccaagcccatattaatgaatgggtttaatgttccatctctaatccccacaagacttttcagcaaacaaatctctctttctctctctcactctctgctcgatcgttcaatctgatagaagaagaatctcaaggtaaagttctcgactttgtaaatttcttggcttctcaatcaaatatttcattccacttttaatagtaaccttttgtgttttctccgattggttttgtaaactgttggtcaattctctgatttttaggctagaaattgaaaactggggtttatgttatttgcgctaaatcttccgtctagataattgtttttccatttgcgatgttatcttgtgcatggacgcaccggttctatattgggctctttgcgtttcgattgtccaaatgttaaattactcattttttaatctgtaatcttgttttgtgttttgatcattctgaatttgatggatcttagcttactaagtgtttgattaaattccccaaaagtttcgggttgaagcatttttttaagtttacaaatttgtatatctgcttccagtgtagtagattccaagtcacttgcatttggctttaaatctgcattgaaaagttcactggatttatttcagggtttagggtttacaagatgtgtgtggtgatgttaaaagttaaaaccctgtaatctgatggtgataataaagttttaatcgtggttgttttttatagttttaattcgatg

SEQ ID NO: 27938 - DNA, 3000 bp, Unknown
  misc_feature (1)..( 3000): 2750-1469P.txt file - cDNA_ID_2992925; gDNA_ID_2926240; Annot_ID_142863
aatatcgaagttttaggcaacctcacgtctgttccccccttctacttatacccatctgagctgtcaattattaactgtgtagaactctgtgtattagctataatattgcaggaatagttaagaagaaactgttccatgtcagcttgcttctcttccaaagactatgatctatagttaattgagacttgtaattccttctcggaagattatcatgtctcttgggtgtatcaaaatcaatgggatcatattggctaaatattttgcagttgatgcatgaggtgaaggaactcagggcatgcgggctggaaaattcaaccaagatatgttacttggaagagaagctggtaagattttgtttattgctattttgattttcattcttcctgctggaattctgtttgcatgtgtaatatgaccacacccacacagatattcattatatcagtgataatgatcctctatcattttcagctaggggttcatctcggtatcattttcccttgtttttggaaccaataagctcaaaatatagtggtggagaaaccataacacttttacttttcgatatttggtatttcaggacaaagcacacaaggaaatttatcaattgacagagcgttgcaacatgctggagtccatatcaggtcctttaatcaccaaagctggtggcagtgatttggagatccattcaccagatgataccagcttagatccaactgaggcaattcttcttttagggggatttgataaagactctgaaacatggttgtcatcagtgcagtcatattttccatccaggaatgttgtaaaggctcatagttcaatgagctgtatccgttcaaatgcatcagtggcaaagttggatggtaaaatttacgtctttggaggtgatgacggtggccgtggctggaccaactcaggtacggcctctctttttctcttgttcttaaaatgagttaactatttagtgcattagagcctgtatacaatacatatataaacctataaaccttccagatattcttaacagacaactaaaagaactagaaaacggaatatgggtggcaaaagcatactactgtgactttcattatattactaaaccaaatggctctagtatttttagcaaattgtgaagtgaggtgtattaatttagtgcacttcacttcggctgtgcatattttaagttaatgtctaccacttcacacttctttttctctctaaccataattatttaagcctgatctttgatttctgttttgcctcttcttttttctgtgaagctgaatcctttaaccagactgatggccagtggagcttgtgcccccccttaaacgagcgaaaaggaagtttaggtggagccactttggatggaaaaatatttgcaatcggaggtgggaatgggatggtatctttttcagatgttgagatgcttgatccagatatagggagatggatcagaacaaggtcaatggggcaggaggtaaacgttcttctctattcgcatgacatatggtgaaagccaaaaatctgaaaagttgtcaattagatccccactgggaaatttttgacagaagctcacagctaaaaacataaattcccaaagagaatccattgttaaaactactctatttcgctaagttataatttcaagtaaggagtgtcaggttaacaatagaaatgtagtttatgcttccactcacctactggttataagccttagcaagatgataccatgaccttctcctcggctttattctctgagttgtcactgctctttgatctcagagatttgcagttgcgtccgtggagcataaaagttcaatttatgctgtcggtggttatgatggtaaagagtacctgaagtaagaacatttaagccttgtgttctattttttcccctaatcttgacacatgtgaagctaacaagaacaatttattggaaacttacttttaacagcacagctgaaaggtttgatcctagagagcactcctggatgaatattgcatcgatgaagtcgagaagaggctgccattctcttgttgttctgaatgaaaaactgtaagtttcttctccccatttttcttcttctttgagagtaactaacagacaaattttgggtaagagttttaaggttgtattcatatgcactattgcagatatgcgattggtgggtttgatggtgagacaatggtatcgagtgttgagatatatgagccaaggacagggacatggatgacgggagaaccaatgaaggatttaagaggatattcagcagtggcagtggttaaagactcaatatatgtgatcggaggatacaaaggggaagaggatgacatattagacactgtaggatcagttctgaacttgaaatgaaattaaaacaatttacataagcagacacggtttaatctttgatcatgtgtgtgtttgcaggttgagtgttttaaggaaggtgaagggtggaaaaacgtgccttcttcctcgatcggtaggcgttgctttctatctgcggtggctttgtaaatggggaaactttgaagctgttgtttttttggtggccaagtcatgagagacagagataagcctttaggagttttgattttggggaaagagtttccctctatgaagtagaagcaaaatggaaatatcgatttgctataaaaaagtacaaaaaaacatctaaccaattaggtgcgttcgggtctaggtcgagagatctattttataaacgttcctgggcactcaaatttgagcgggcttttataactagattaaggcccatttctaaacaaaataatccaaaatcacttcatcagagcgtttgaaagaatcttcgaaacgagaatgcaaacgtaaaaacgatgggcttgggcctaagcgaataaaaaaggtttaaggataaaaggggaaaattcctgggtggtcttactctctttatccgcttgactaaaaaaaattggcgtcgagtgatagagacgaagaagaagaagaaaatg

SEQ ID NO: 27939 - DNA, 3000 bp, Unknown; identical to SEQ ID NO: 27938
  misc_feature (1)..( 3000): 2750-1469P.txt file - cDNA_ID_2992925; gDNA_ID_2926240; Annot_ID_204054

SEQ ID NO: 27940 - DNA, 3003 bp, Unknown
  misc_feature (1)..( 3003): 2750-1469P.txt file - cDNA_ID_2992932; gDNA_ID_2926232; Annot_ID_142687
tgagtttgaattaggttgtaggattcaggacttttggaagaagaaaatacagaaatggtcgtagttagtgggttgaatttatagtgttgattgtgatggttactggttatagtaaagaataattttgcggggttaagttggattgggatttatttatatttacttaggagaatagcaaaatcagtttctaataagcataattttttggccttgagagagttttgcatttcaattttcaggcatttgtgttttttcttacatttaaaatcttaatatctgattgaaaataaagatgattatattcaaaaaaggagttgtgtattgagtctttgagaagagtttactttgcaaaatgtcatggaaaggattttgtttaagtgaaacattgtagtaattattcttgtgggactggaatgtggaagtggaaaaaagaaaaaatggaaaaggaaaatagaggttacgctttgacgtgaagcgaggccaaagataatacactgaaatataaaacagatctttagtttatggcttagtcttggattcttaatgtggcttagtcttagtggcatatgctctttgttacgatttcagacctttgttgtgtaagttagtcttgctttcttagagctttgtatttcactgaaggtattaatgaaaattcagatagaagaaaagagaaaacagatcttttcatgtaaatcaccttagcttttactatcatatagtacatgtatttgtgtatatatataacacatatatgacattccggggttaagatattgagtctatatggtctaccctcctagtagtctaccttggagataagcacgaaatttggtatgattaggagtgttacctaagtttgccggtaccgtttaggtcattgaactttggttgcaagtttcttgcttgctttttcttttttgggattttccctttggaaaaagaagtctaagataagaaaacagaagagaaattaagagatacacaaggtaagccacaaataagaagattttgtttggattgggaggtaaaatcctcatacctttcgtgtttgattgagtcaaactttaatccatatctatatatcaaaatgtcggcatcttaagagtctgatgctcttgaaacattgatgttcttagaaattttgtaccaaattacaactagtgtttaaatgtcttttctattggaataaatgcgaataaatggttcgtattaatcatatgataatacgatggacctataattgtggatataacatagtttggagcttcttctttctcaagtttatgattgcatttaaggatcttacccacaatacttttttttaactaaaacgtacctaagacgatgacggtgtgcgtaaagcaaaagtcacaatcaatctcgctatataatgcttacctatttttatcatttttacgtaatcaattattatattttcgtgtgtttttttgggtcccgttaacaatcgaaatatggcatctgcaattatgttactgtggaatatcaacttcccctaatgcaacaacaacatatatggttgaggaccgttatcaaacaaaaatttttggttgcggtgcgtaacaaacttaataacaaaacacaaaacttatggaaagtgacccacatacattaatggaagtcatgaaagagatgatggatcatattacaattatttgttgcagagagatcactcacaagtcacaaagacacaaaaatatgacttatttcagatctatgatccaaaaaaataagaaaaggtgttagaatgtcccacatcgaaaatggagtgtatctagcctagtataaaataaacataaacctctgcactattatctaacatttctatttctttagaactactgaaggagatatatagaatgttacaaaaaaagtgacccacccaaacatagagagtagagagtcttccatttttctaaatttcatctcaatattcgatcatattcaaacaattttgtgaacttgacgaaattggggagatgaaagaattgatcttgggccgaccagtatattaacattatctacccaataagcacaactcatgcaaagaggctagttcttgacgaaagaatctagatgagttaaggtgaaaacatggatccattttggaagacttaaaagaacccaatccacctcaagattttggtttacaaactaagctcatgagttttcttctctcacaaaacttatcactgcacatcttttttatgcttggggtaatttccagggaaagaagcaaaacaacacaacacaacacacaattatccatgtgttagattagtggcagataacatcttctttttaattcaataatatgcattatacatttttcatcatgaattcatgacaacgactcggctacccacactttggctttcaatactactttgtatagttccattgtaactcttaattccgtttttttaaattatattgttacatattttgtgtatatacataccacgttgtcttttccatgtgatgattttagaaaaacgtgacattttccggtcttgcctaactatatattggtgaaaatatgtttcttatagtaaaggacagtcacttgcaataatctaatcagaaaggacaagaaatttcattttcacttgcgttagtctaatcagaaaggatcgtcatcatgaaactttatttaacatttgtttagtatattagtatgcaagtgtgagtttaaaactgtgagacaagagaaagaaaatttgttgcatgcaggtaaacaatcttggacaggaagttctcacaagtcaaagtcagcgagcaaacgattttattctcttttcacatgttgctatgacagctgtcaatttgtaattggatcatgagtgtcataattcataaatataagctatgctcatgtaaccgtaaacccttaacgacaaattaattaaacttctccaaaactcttttcctctaaaaaatctcccaaatacagaaaaaaaaacaaagtcagtaagaaaaatg

SEQ ID NO: 27941 - DNA, 3003 bp, Unknown; identical to SEQ ID NO: 27940
  misc_feature (1)..( 3003): 2750-1469P.txt file - cDNA_ID_2992932; gDNA_ID_2926232; Annot_ID_203737

SEQ ID NO: 27942 - DNA, 3000 bp, Unknown; identical to SEQ ID NO: 8963
  misc_feature (1)..( 3000): 2750-1469P.txt file - cDNA_ID_2992952; gDNA_ID_1971952; Annot_ID_177346

SEQ ID NO: 27943 - DNA, 3003 bp, Unknown
  misc_feature (1)..( 3003): 2750-1469P.txt file - cDNA_ID_2992956; gDNA_ID_1620325; Annot_ID_153474
aagttgaataatcttaatggattttgtgatcattgctaaagccttaaatcttctgtttacatgttctgcaaatagtttagtaaacatctttgttatacaggatctgaagaatctgagaacacagttgtattcagcagctgagtatttcgaactatcctacacaaacgatgaacaaaaacagatgtgagtgagtttattcctctccctaattgtgattgttctcttttcttggagttttgtaagtttttacttgtgtatgtagagtcgtggagacactgaaagattatgcaataaaggctctggtgaatacagttgaccatttggggtctgttacatataaagtaaatgactttgtagatgaaaaagtcgatgaagtagcaggaaccgaactgcgagtatcttgcattgaacaggtatccattattcttcaaatggacagatatttctgctttagttttattcagttggcatttttgagaatgattcttgtttgtattactgaactttcttatatgtgtatagaggctacggatgtgccaagagtacatggatcatgaaggtcgttcccagcaatcacttgtgatcgacactccaaagttccacaagcggtacttcttgccttgtaagtttcgactctccaaagttccctatatgtttctacaaactttcgttctcttatttgtcggttttgggactcagctaacaaaaacgaaattctctatcagctggtgaaatcaaaagaggtggcaacctcgcaaagcttaagaatgttgaaggtagttttgatggagaagatgactggaaccaattcagaaatggtataaattgccatttcatttacttagaaattgccttgattcttgatttgatatgtttcttgttgtgaattcttaaagctgttcgcgctacaattcgtgaaacgcctccaccacctgttaggtatagtccagtactcatagtgagttcccttgtcaaatgaccgagaagtactaaacttttatcgctttttgcagaaaaccgatacttcagtctccctctcaacggaaacctcaacgttcagcaaccttttcgttctcctctatcgccaccgcaccaaagaaagaacaaggtaaaagacagcttcaccttgaaattgccgtttttggcttaatatgtaaacagaacctttaaacagtgtgcatggtaaaatagataagcgagcagtatcaccacatcggtttccgctgctaagatctggttcggttgctatccgaccgtcatcaatcagccggccaacaaccccgagcaagagtagagcggtaactccaactcctaaacgggtaagcttcggttacatttcaaaaacactcacttctaggctctatctctaacggttgattcttgatattttctggctcagtatccgtcagaaccaagaagatcggcttcggttcgggttgcgttcgagaaagaagctcagaaagaaccagagcatcaacaacaaccgagcaagagcaaacggctgctaaaggcgctacttagccgacgcaaaacaaagaaggacgatacgctctacacttatttggacgaatattaaaccgaaagctggttttgtatgttgactggtaaaccggaaattacattccagttttaattgcatttacgtaatgtcaaattgtcaatatatgtgttacaaaatatgtccatgattctatgattttgtgtataccttatgactgtcagagtgtgaatgcagttttgtttacaagcgtagtaaaacttgctgtgaattattttactgccgattttaaccaaattaacagcaagtttatatatacaatttcgttctcgaaatattatttgacagtttaatatatattttgcatcaattactgttgcaagaataattatgtttttgaaacttttgcttttatttatccagtttttgaaattgattaagaatgtttgagactaatcctcccttttttctttttttttttttaagccgtggtaatgtggtattcgttcggtaaatctacctattcaaaaagatagtatcatcgacttttctgttgtattaacttaccatttacaaatattacattaattaatttgaaacaagtcaaatttattgtcaccaagaatgaagtacacgtatacagataaaaataaagaagaaaaaaacagagacaacttttccggagattttactttagaaagcaaagaaaactaaatcaaaccaagccttcaaaaattaggtagctcttataaaccggatcataaaaccaaacatcaaaacatatgtatgctctttcaaaacatggtaccaactcacgagtcttttcatcagggccgattctcaccatcactcaatggtctagacaccatcagtttggggttcaacttctgatcttttgggtggtggtggaggtggtgatctgtcgtaatgctcagcaacaagtgaacgatgagaagaaggaagaaaaacctgacgagactccatcgatggaaaataagatgatggtacattatcgtcaagaagtttccggttggtttgagcatgcccgatcatgatcatagctaagagaacacaacatattaagagatgattcctagaagccattttctcatccggtgatcgatagagttaatttctttgcttatcaactatgttgaggttccatcttgtaatgtcttatgtatatacatagctcacaaagtcacaatagagggttcccactaactattattagattgattgatttctgaaaaatattatttttgtgtaccaagtaaaattatatgattttagatttgttgttagttttgatttgttttagattttttttttgtgcaagttgaattattattgtatagataaaatgacgagaaaaaaaaatgcccggttcggttaggaatgatttgtccaaatacgaacacaaccaaagataaaccattaaaccgaaccggagaagcttacatataaaataggatccggttctatctattcactgtgtatcaatg

SEQ ID NO: 27944 - DNA, 3003 bp, Unknown
  misc_feature (1)..( 3003): 2750-1469P.txt file - cDNA_ID_2992963; gDNA_ID_1972113; Annot_ID_178820
atccatagactagagccaaactcagtctggttatatcgccttatcgcttacactttcttcttttgtcgatgttaaagtgactatgtttgataatttcctaattgtctagtatgattggagtgttcatgagatgttatgtttctgagcccttgttttttagttgtctagagttctaatatgaattatatgtcttttggtttcacagatgttactagatacgcaagctgtgaagtcgattctactagaaattccttcccttgccagacaggttactcatcacaaccaatttatgtcatttctgttatctcggtatgacgtattactgggtatcttctttgcccaaaagtagaatacctgatgcctaaaccctttggatattcttgtttcggtcatagagccgatattagggataacgtatatagagcattagtcagtaaatccatgacgatttacttttttttagttttgatatatcatttagtaataacattgcagacctcaactgctgccagctattccaaatttgtgagccgtgaaatgagcagagctgaagcactccttaaggtcatactatccccaatcgactcagtggcagacacttatcgtgcactgtttccggagggaacgcccatggagtttcaacgcatcttagaacttaaggtaattttggcatgtcttaacccatttcctcgctctcaatcgaacaggctcgaggctcgagtctggttcacaacagtattctagagcgacagtctgctgaaactttttctggtgtttggtgcagggtcttaagaaagctgatcagcagagtatactagatgatttcaacaagcatggtccaggattcacacagcagtcggttgcagcagcaatgccacaaccaatgccaaccccacctgcaccaccattggcaatcactaatccggctacagctgcagggttcatagcaaacagcgaggatgttttaaccagagcagctgctcttggcagaggagctgcaagcactggcttcaagaagttcattgctcttaccgaagctgccaaagaccgcaaagatgggcctttaaggagactcttcaacgcatgatttgttcctttactacctcatctcaacttttgatttatgcaattcccacctttgtttccttctgtatttaaatgcacttgtttctttgttttcctggttatgtgtatatcagaaattcgtagtgaataacgagttttcttacggtgcggatgtatcttagttgtttactgcattctttcttgagtaacgttacgaacactttcttgaactaaagtcagttgaaattacctcaatcttgtatgtaactcataatgtagtttacggaggtagtcaactttctagctggcatgtttactaatgttttagtcaactaaagtcagttgattcattttttagctggcatgtttacggaggtagtcaactttggtgaaagttggagacttgtgaattaaaaacattagtctgtgggctacagatctatcaaggaaaaggaagttgtggagtatcaacggcttctcatggaagaagaagaaaaagagttaaaggggcagctacttccactatagccttacatccataaagggttagagttaaacagcctttacatgaagttcgatctcaaaaaaaacaggacactggtgtatatgaccttttgaccataacaggtctatcatccagcataactttagtaagaaattggttgttgaagaagaatctgagcttctctacaaagttgtattgttggggacatttgaaagagtagaaccagaatggatgagagaagttgtgatgtttttagcacaagcatgtgtcctgtcttcttcgaaagagttttacgagtcattaaagtatgaatatttctccttctcaatgtatcctatcatctcctctttgattgttttactctgaattgtaatttggtaagtgttttacaaataaaacatgttttaaaagttcaatgatgcttaatttttccggtttagaacctggttcgggtaatttcattgtagttgactgtaaccaggttcttcaaatttattctgctattcctagtaattttttttttggtaagatgctattcctagtaattttatttcttgatcaaatgcaatattgcaatgtatcacaagattagttttcaacataacaaatacttaaaagtccaaaaaccatagagataaaaaaaattgtaaataagttggataatttattaggtgtgcttttattcatttttattaaataatataatatttttatcgaactattttaagatattctcacgctatttgtacaaatcaccaccaacggaattaattatactagatagataaataggaagatggaatgttggttttacaataataatatttactgtataaaaaacaatattcaatatccttttttgtcaccgaatatctttcttattactagtatgataacaattttgaattgtttccaaaaactatattagaatacaatgttcttttgttaataatatattaaaatacaatgtatcaaaatgattatgtttttttcctctttatgtctatatgcattacatttgtcaacaaaaattaattgtttcttctttcagatttagaattaaagaaagaagcaaactagccgttagttaaacgaaattcaaaagcttccaagcggcgcttgtttgctctccaacgttcactaacaaatccgctttaaattttcccttttcttttttattccatttaaagtcaaagcgacgtcgttttctctcactcatacgccgttttataaccaacctcagagactctcatcgatcgatctctctgtctctcgcatcggaagtacgaagaaggatctttgttttcttcctcttctccttcttctactttcgaacactcgtgaatctgattctactctagtctaattgggtgctttcgatttctgaataaaaattcgattttggtctgacgattaagaaagcgaaagtgatg

SEQ ID NO: 27945 - DNA, 3000 bp, Unknown; identical to SEQ ID NO: 1421
  misc_feature (1)..( 3000): 2750-1469P.txt file - cDNA_ID_2992979; gDNA_ID_1620400; Annot_ID_155920

SEQ ID NO: 27946 - DNA, 3003 bp, Unknown
  misc_feature (1)..( 3003): 2750-1469P.txt file - cDNA_ID_2992991; gDNA_ID_1972174; Annot_ID_179959
atgacactctcttcaaaatgagtacacatttttagtacctcctctgctagtttagttaagttagtcccatactcttcaagtgttggcattttgctgtttccgctgcttcccccaccaacgcttgctgtgacttcattgttttccccgaccatacgtataacctaaaaatgatatatgtatctcaaaatgttataacgaaatggtttactaagacataacattaaccttagaatccagagttggtgcatttacctgtgtccgtatattactaggatctgcacccaaattctccaagacacgagctgccacaccctccccttcacgaagtagaccaagcaaaaggtgctctgaaccaatgtagttatgccctagatttcgaaatagcaaaacatttcccaaatggagaagaattagttagcttcatcagtcaagaaagcttatgtattgcacaacacataacaagctccaaggctaaatattcataatagaaatagacccataccaagttgtcgagcttcctctagtgacaactccagcacccgctttgcgcgaggagtaaatggaatctccactgccacgaatccactgcctctcccaattatcttttctacttccacgcgtgaatctttaagattgatccccatggatttaagaaccttggcggcaatcccagtcccttctccaattagacccaacagtatttgctcagtcccaacaaagttatggccaagtctccgagcttcctcttgagacagcattatgaccttaattgctttctcggtaaaacgctcaaacattgctttgggtacacatcggctagctttttctctcccagatgattttgcaagtttatacttaacaaggaaacctggactaggccttcccaaataatctaatgcactgggggcccttaaccctgagaagctctgaattgtcagaagaggtgcttgtaaactggacatcatcttcacacgccctcttggttctctgtattctgtggcctgaattctcagaacaggtgcttttaaactgctcatcttcatcacacaccctcttggttccctgtattctttggcctgcacatgccttccgggaccaaaaaaaggaggtgtaagaagagctatcgaccaagccatgatgcaatgttggaggctgcattgggtaatggtagaacatcagtattgctaattctcttaaacacgtatacagaaagagctcaggcacaaaaatacacaatttcaattcaccaactaagagcagaacaatgtcacaaaagcttgagctatgtttcttatctccaaactctccaaagcaaaacaagcaatcatctttgaacaaatcgaaacgcgaatacacaaccctaatctcaaagtaagcatttttgcatatcaataaaaccaaataaagagtacccagattcagaaaactcaaaatgaaaccaccaaaagaaacgaaaccaaacgccatgagaaatagaagaaaagaaaaactcaacctttaaaacagctcacacaacagagaagcagaaacctaaaagcttcttcaatgaaacacaacaacaacaaatgaaaaataaaaacagactgagaaagagagtgagtgtagcaaagaaaagggttttatgtgtagcaaagaaaagggttttataccgtcgacgcctttggatagcgaagttggagaaagcgagagactccttttattgggaaagagataggaaagtgaagaagaagatacccaagagacaagagatttctctattctctctctctttatcttctctcgcatcgccgcccttcatagattaaacacactcacctaccaaagttgcataccagccgttagattactcataagtgtattccaccgtcggatttaactactttttaaagagtcaacctcaataagaatcttgttcccaaagataagggtttgtgttgagtttaagaccggtttaatctgaaaactccgtcaaaccaaaaccaaaccgatttatcataaaaaaattcatatcatctacttccattggctagagacagattgtaacggtgtcgtcgtcgccaaacgatttgcctcttcctaaaggtaggttcttcatttctctcagtgcccctttgcgtgtttcagcttcttctttatgatctaattcatgtctatgtttcgtttgattctttgttcaattctgaattgagaaaatggcgattcgagatctgtctcttcggttttttagttcgactgatttgggaatgtgaagagatcagattgatttgttgacagagtcttgggggttttcaatcttattcctctagattttcgaaattcgattcctttacatcagatttcgcttaattctctgtcctagtgagttttacgatctttagtcttctggtttgtcaaattctatgtcttttcatgttcttctgagttttaatggttgatcttcaattacttggccacaatctctagagtttgagactcttgacttgtcttgcatatattcctctgtagattggttttatgtttggtttcaattccttgttgaactattctgatacggaagttttcctttctaaggtttggtgtttcctttttctgataaatagtgatgaagatcgattatgatgatcatgtaagaatataatctagctttggtgtttgtattggtttacctgagggaagaaaagtctttctctttgggactttaaactttgattacttaactccaacattatcatagttgggttctgtagttcatttcacttatagcagtaataactcattgattgatgcaatcaatcaatcctgtgatggaaatggaatcatggaaattgagggattcagggaggattgattgattagaatttcatatttatgagagaataagagaactgatgtgtgtttcttttcctacttcttaaagttgtgctctttcctatttctataagctcttgtggataacaacagttgattaacgttcttatgcttgtttagggtacaacaagaatg

SEQ ID NO: 27947 - DNA, 3003 bp, Unknown
  misc_feature (1)..( 3003): 2750-1469P.txt file - cDNA_ID_2992995; gDNA_ID_1620319; Annot_ID_153261
aagagagggaaggagagaatcttttgacaattttttcttctaatattttcagttttggactttattaatacagagccatatgattttgcaatttattctaagtgaccatattaattagtcaaaacatgtttaagatctagtatttcttttgatacaacataaaaggaaaataattgaattatttcatttcatttattaaaattaaactgaagattgaaaatttatgatggtaacaaacaaaattcaaacttaaaaaactcaatagtagtccatataataatactgtgtatattaatatattaagcttttaggttttgacggatcgggagatatggaaacaaaaagtctttttgtatttttctaaagaatgatgccttccgcgatggaccgactttggattcttttgattatatattgcaaaaagataagatctacatgctgacttccaaaaagaacagagatgctctaaataatttctaataattcgtgccatttctatattattcaagtaaataatactttgtaaaatttaatacttttcgtggttgtaaagcttattatacctaaattatattttttttaaaaaatttgtatcaaatgtgctgcaatttagcaacatagaaaaattgtgatacatcaaaagaaccttgttatcaaatgtggttactggttatgcccatttgaaaccaacactatcgcccatttcaatctgaaataacataatctgaaataacattttctgaaagcccaattccgagaaaggccgagcttataacacctgaggcccaaagtttcaatttctgtttgctgattctagaaaatttacaaaaatgtatacattgtgatcatcctacatataaagtagcttaccaacaattcacaaaagactaagctatattgcgtgtaaagcagaaataagtaaaaagaatattacagttttctgaaaaaaacatataggatataacattgaaagctaactattgcctacaaaatacttgttgtacaaagtatcaaataatatatgtaaatgtactttgaaaccggcaaatgatatatatatatatattttttaaatgatatttacatctcttaattttgattgaaaatatatagatagggatatagtaaagagaaataaagggataatatgacatctgtattattattttctttttgatataaaggacagatctgtttcaattgattgcttctgatttaagcatgacacgaggcaatactgactgaaatgtcatcgagtgacagatgcaccgattcgaaccaccttccttccacagttgttaccattcgcaattgttctttctgacaccacaatcttaatttattagttactacctcttttgctcctattatttgtttctttaattgtgtttattttattaatctggatttgcctttttagcataagcaaatacaaaaaaaagttattcctttaagatctaatcctgtttagtaatgttctctagatattattggttatgcaacttgtgcttggaaaatttttaaagtataatagttgaaagtgactttcttttgtagattttgaacttatttgaatagtcatgagatgagaacaaaacaacatacttccaaactgactatgttttgtagatttttaatatagtatcattgtcatattggttttgaaaattgactaacgttggaaatatttctacaaaataatttgtcttttctggtcttaaaagtgagttgattgtgtttaaccaagtaattcatttacaagtaagtgatcattgtgtaactaatgtaacttgagagaaatatactcaaacaaacttcagtagtaagaaagaaaaaaaagagtaaagctaaaagccaaaagtgaatgaattaattattaatatttgtcacaccaatttcgaccgatcttacttgttttcaaagagatgcttcaactgttttgtttgtttctgttaaaccaaaatcaattaacgagaataaaaaggaattaacgaataaaaagtggtagaaagctcatgtttcaagagaaggttttgattcatcaaccaagttgcaccaactccatatatattaccaaaaccaaaataaatttacatatttggaaagaacataaattggacagaacatatcaagcatgtaatatacagaagccgacaaattgcaaaatttacctaaaccccatcttacaccaccgtcagattctgatgtaagtattatcaaagctcaagaacaatcacatcatcagaatctaacttatatatcaaaggtccagaattttctccattgaagctggattctaaggtcagttcttacttctttatctcaatctgatgattccatatcgaaagtcttactttttcacttcaatttcaatctgatgattctaagatctttgattcgaggtcgatctctgatagttactacatgtttctgggtttatttatttttaatccatatagtaattaaaaactcttatgaggtttaattatggttacttgagaatttgcaatcgtcatctttctttgactcctatccattttttggtttttcctttgtttaatttctgtttcataattgtaattgtaaattaaccaaaacaaattgatcagaaacctttttcctatggaatatttatcacacgcaagcctgtgagttgtgactctgtaatcacttccttgttctggtaatttcagtggttaaggctctccttttttctgatgttgtcagcaaaagttagtttttcttcttctttaatgggttaattacacctaaatctctggttattaaacaatccagaaagaaaaaaagtttattccttcctctatgtatatagtttcacatgcaagcatcacttgtttgttctgacaaattgcagagttttgagttctgtttttttttttttctaatgttttgtctttaagaaagttctgtttttttttctgcaggaaagttatcaaaagttttgagagctttggatagtgaagctcaaagaactaaacaatg

SEQ ID NO: 27948 - DNA, 3003 bp, Unknown
  misc_feature (1)..( 3003): 2750-1469P.txt file - cDNA_ID_2992995; gDNA_ID_2684233; Annot_ID_192320
aaagagagggaaggagagaatcttttgacaattttttcttctaatattttcagttttggactttattaatacagagccatatgattttgcaatttattctaagtgaccatattaattagtcaaaacatgtttaagatctagtatttcttttgatacaacataaaaggaaaataattgaattatttcatttcatttattaaaattaaactgaagattgaaaatttatgatggtaacaaacaaaattcaaacttaaaaaactcaatagtagtccatataataatactgtgtatattaatatattaagcttttaggttttgacggatcgggagatatggaaacaaaaagtctttttgtatttttctaaagaatgatgccttccgcgatggaccgactttggattcttttgattatatattgcaaaaagataagatctacatgctgacttccaaaaagaacagagatgctctaaataatttctaataattcgtgccatttctatattattcaagtaaataatactttgtaaaatttaatacttttcgtggttgtaaagcttattatacctaaattatattttttttaaaaaatttgtatcaaatgtgctgcaatttagcaacatagaaaaattgtgatacatcaaaagaaccttgttatcaaatgtggttactggttatgcccatttgaaaccaacactatcgcccatttcaatctgaaataacataatctgaaataacattttctgaaagcccaattccgagaaaggccgagcttataacacctgaggcccaaagtttcaatttctgtttgctgattctagaaaatttacaaaaatgtatacattgtgatcatcctacatataaagtagcttaccaacaattcacaaaagactaagctatattgcgtgtaaagcagaaataagtaaaaagaatattacagttttctgaaaaaaacatataggatataacattgaaagctaactattgcctacaaaatacttgttgtacaaagtatcaaataatatatgtaaatgtactttgaaaccggcaaatgatatatatatatatattttttaaatgatatttacatctcttaattttgattgaaaatatatagatagggatatagtaaagagaaataaagggataatatgacatctgtattattattttctttttgatataaaggacagatctgtttcaattgattgcttctgatttaagcatgacacgaggcaatactgactgaaatgtcatcgagtgacagatgcaccgattcgaaccaccttccttccacagttgttaccattcgcaattgttctttctgacaccacaatcttaatttattagttactacctcttttgctcctattatttgtttctttaattgtgtttattttattaatctggatttgcctttttagcataagcaaatacaaaaaaaagttattcctttaagatctaatcctgtttagtaatgttctctagatattattggttatgcaacttgtgcttggaaaatttttaaagtataatagttgaaagtgactttcttttgtagattttgaacttatttgaatagtcatgagatgagaacaaaacaacatacttccaaactgactatgttttgtagatttttaatatagtatcattgtcatattggttttgaaaattgactaacgttggaaatatttctacaaaataatttgtcttttctggtcttaaaagtgagttgattgtgtttaaccaagtaattcatttacaagtaagtgatcattgtgtaactaatgtaacttgagagaaatatactcaaacaaacttcagtagtaagaaagaaaaaaaagagtaaagctaaaagccaaaagtgaatgaattaattattaatatttgtcacaccaatttcgaccgatcttacttgttttcaaagagatgcttcaactgttttgtttgtttctgttaaaccaaaatcaattaacgagaataaaaaggaattaacgaataaaaagtggtagaaagctcatgtttcaagagaaggttttgattcatcaaccaagttgcaccaactccatatatattaccaaaaccaaaataaatttacatatttggaaagacataaattggacagaacatatcaagcatgtaatatacagaagccgacaaattgcaaaatttacctaaaccccatcttacaccaccgtcagattctgatgtaagtattatcaaagctcaagaacaatcacatcatcagaatctaacttatatatcaaaggtccagaattttctccattgaagctggattctaaggtcagttcttacttctttatctcaatctgatgattccatatcgaaagtcttactttttcacttcaatttcaatctgatgattctaagatctttgattcgaggtcgatctctgatagttactacatgtttctgggtttatttatttttaatccatatagtaattaaaaactcttatgaggtttaattatggttacttgagaatttgcaatcgtcatctttctttgactcctatccattttttggtttttcctttgtttaatttctgtttcataattgtaattgtaaattaaccaaaacaaattgatcagaaacctttttcctatggaatatttatcacacgcaagcctgtgagttgtgactctgtaatcacttccttgttctggtaatttcagtggttaaggctctccttttttctgatgttgtcagcaaaagttagtttttcttcttctttaatgggttaattacacctaaatctctggttattaaacaatccagaaagaaaaaaagtttattccttcctctatgtatatagtttcacatgcaagcatcacttgtttgttctgacaaattgcagagttttgagttctgtttttttttttttctaatgttttgtctttaagaaagttctgtttttttttctgcaggaaagttatcaaaagttttgagagctttggatagtgaagctcaaagaactaaacaatg

SEQ ID NO: 27949 - DNA, 3003 bp, Unknown
  misc_feature (1)..( 3003): 2750-1469P.txt file - cDNA_ID_2993009; gDNA_ID_1620379; Annot_ID_155264
cagtcgacttaatcattaggggtgttgagacattggttatctttttatcttttttttttatgttttcgtttgaactaatattttggaactattttctggagtttatttcttctatcgcttgttttcgtgaagattttttctctgaattcggtttgatgacaaaggttctcttatgcacaatcttgcaaatccaagcttattttggttatgtagcctataactaagttattagtatgactaatatggctaataaaatacatgaagcagctccaaatcatattgttaagcatctcagacaacacagcttacatattctttacaataataaataatttattgttcgacataatactgttgttactgtttgacttagcgttaattttctgcacaaatgttgttactactttgattaaaaaggataatttgtgtaacaattttttggtcagttttaaaggttattattatttttttaaataacttttacgattagaatatgagtagtgcaacgcaaaataacactgccgtttaagacgacggtcccttgacagaatcttcatcaacgctcgatttgacgtctgccgatttccttagctccgacgtaaaccactgatcgtcggtattcagctatattttgatttctcagctccaaaaattcccaacgaaatggagaaaatggccaaaggatggtttccgatgagcggcactagtagcagcggagatcagcagcagcaaccgctgcaaacaggaggaacgtctctgctagctgattggaattcttacgcagcatcgagagattttgaagaagacaccggaactttaggcttcgatatcgaatccgccgttagatctgccaacgacactgtttccggcacctttaatgtgtaatccatccatctctttctcttaatctttaggggtttaacgattgatcgtgaccgtatctgagaaattaggcgttttcgcctgctattgaggattggattggtgtaaattaaatctggaatctgagaaattgtgattaaccatatagtttaagctttgccagattcgttgatcagatttacaaattctcagggtttgaagctattgttagtgaatgattttgattagtgtcttctctcaatgacttagaattgattaagagtcttaagcatatctttttcttgaagtgttactaactttttgattttgaattttgttgtactcaaatctggattgttaacagtgtttcgaaaggagttagagataacctgcagtctgcaacaagtagtatgccttcaggaaaagctttgatgtatttcggtttacttctagcaagtggtgtattcttcatcttcattgccttcaccatgtttcttccagtcatggtgcttatgccacagaagtttgcaatttgttttacccttggatgtggatttatcatcggatctttcttcgctcttcgtggcccgcaaaatcaactcgctcacatgtcatcggcagaggtaataactaataacaaaaccttgtgttgtgcagcttcttatatctgctgtatttcgtttacatttttctctttggaattttaatttcttgtttgctggcttctccagaggcttccactaactttaggtttcattgccaccatggttggcaccatatatgtctcgatggtgctccatagctacattctctctgtgattttctctgcattacaggtacttaaatttcatcttccttcccgactcttgttggtgtttatatcctctgtttttcatatgttaaaattttcctcttccccatttcacaaatcttacctatgaagttcttttttaccctgcatgtttcatctagtaagctcttgcctcgtcgaaacataatgtgtttagtaaaaaacatgtagactttcttattgctgttttaaaatacaagttgggttagtatgaattatgaagaagccttgaacgccatatctttggttggtctcttggcttgtttttgcaaatgcacttacttgcgacagaaacagctttgatatattattactcacccgttatcgatatggaatatatactttaagaactcactaaatcatatccttcatgtcggtttaaagattagtcacgtatctgcacattctgtaagtatagtaatctcataaaaaacctggtctctgttctctgtgaatccataggttattgcactggcgtactactgtatatcatatttccctggtggatcatcgggaatgaagttcctcagttctactcttacctcctctgtcttccgaatgtttgggagatgagctttcgctttgacctatgcaaagaaaataacttgattctctcgtgtataaagaaagatgaaagatcttcaacagtggttaaatgacaaatctggtaaaatatgttggtccaatggctcaaagacagttttgttataaatttcctatattgatactttctgctaaattggttcaaaacttcaaatcactagccactggatgaggtatggaacttgaagagttgcttggtggatacattctctaatctagggtaagtcgttagcttcaatgtcttactgtgaattattacatcagaattaagaaagttattacacgtatgttttcactgagtttactacactggcaatgtggcatacatctcttactgcaaattgcagacaagtggtcaatcaaatcttttttagttgggcccaaaatgtctgttattggatacgttgggccttaaaatggcccccatcagtcaaaaacatcactgcttggagaaggatctagaaaaacttgcaagttagttcaaacaaaataaaggaaaaagaacgatctagaagaaagaaaaaaaaaggaaaagaaacccttatggaggttcccacaccactctatatataataacatccttctcctaaatcccgcatcagtacttctctctgctctcaagataattttgttctctcaatttcattcttaaaccctagttcttcgattttttccgatctacgacaatg

SEQ ID NO: 27950 - DNA, 3000 bp, Unknown; identical to SEQ ID NO: 761
  misc_feature (1)..( 3000): 2750-1469P.txt file - cDNA_ID_2993023; gDNA_ID_1620318; Annot_ID_153242

SEQ ID NO: 27951 - DNA, 3000 bp, Unknown
  misc_feature (1)..( 3000): 2750-1469P.txt file - cDNA_ID_2993031; gDNA_ID_1971772; Annot_ID_175389
aactcatagcggatatattgagtaaaacctaaaagtttatatcttagttggcttcaataattaaacgaaaacaaaactaaagattggtggtatattttcgcatggcatgatgccatgatgtgaggaccattggccgcttatacgaaccactagtttttcgactcgtgttctctacgttattttaattttttttttttttaaactatcattattatatatttaaattatcttacttaagaaaagaaattcatttattttccttcactcatacatagtacgatttctaaatattgaatttcatgggccgaacatattattcacatagacagttatgcaaaaatctcataccttgactatataaactagctagagaatgacataagttataaactaatattgatcaaaaccttcaaattattgaaaataacaagatttgtgaataattaatttgcattgagagcaatagtcgtatgcatcactttcaaatcaataatattattaattacatatagctacggactaaatctaattgtaagcatcatgaaattatatcttaatatcttcttcttatcaatcgcaaattattaggaacatcacacatacttaaatatagctgcctgctctttataatcattgttaaggaatcttataacctattttagcgatttttaatgaagattaatagtataaaccatccgtaatattagggttatgtctccgcgttagagattgaagaatctgtcgggtccaacgacaaatgaagtcgttacaaagtgctgaaattatgaagttgaaccaataacaaaatcagttaattacattaaaaagaataaggttgcagataggtaggtgttaatgctattataacatgcaaatctagcttggggtttgcttgcgcatgtatcatttgccacaacgagaagtccacgtgttagtacagttgacaaatctattagctgaattagctgttttggagaattaattaatagactgattgtatacactcagtatatggactgcatgaaataatagtaataaaacttaattgattatacaaaggattattaatctgtataaaaaactactatcttatggttagcacgaaatgatttctatcattaatttcggaaaaaaaagttgcgtacgttgattcaatggtaactggtagacagttgatgtaaaactttttttttaacagccgaacgcattcttatatacaacatactagtaactagtacttgagtttccttagaacatacaccattcttacaatagttttgttattagatgttcccgttttgtgtataatttgattcttcttctatatggtcttgtattgtggaaaacgattattggggagcaaagaaacatacaccaaaaaaaatatgatcaaaatttttagtgtgtggaacctttcgaaaaccctacgatgttcaagtaagaaattgcaattatatgagatattatatatatatgcaattgttcttagtatttaggtgtttagaatatatactttagaccgttttaagatgtttgttaaaagttagtcttcttctaattagaaacatcttcttttgtttttatgaagtaagtgataagatatacatataatttacctcgaccaagtttgaatacttgctaggttaccatgtcatgtttaatcgtccacatgagatatctgtgtgactgtgtcttcggttcgatgtggctaattttctagaacatgttatcaaaagcaaacgtcgtcgtaattggctgatactgaggaaaatgcagtttggcaatgacaagaaccacacatatatacaatattgatatctattgaataattatacaatattaaattcctttgcattattcatttgtttcgtataaactaaaacctttgaactctaaatagttgaaaggagcagagtcagcagacaaggaccaaagatcccttcgaccacacatataaaacgatataatttgatacgaaatcgtaatggttgtgcagttgatgttgccacttaagatcacttacgtaagacttcatgcaaatataatttaatatacgtacctctttgaatttacgatgttagtttgattatatatatattggtcatttttttggtatttgctcgataatagagttgatgggaaaccttgataatattaaaaattatcatatgaattttggaggaaagacagcaacacactcgagaactctctggaaaattgcgttttcactttttttgttttccaggattagttgatctaaaatctataatatatattaataaatacaacctaataaacaaaaattatttatgtttcagttaatgtaacccattaatatagaagtaatctcgtaaatatggagttgattaaaaatatgtacttaatcaaattcatctatatatatatatatgtgtatatatatatatatatatatatatgaattatattacgtcaattatctagcttttaaaataaatttttttatcttagctcttattcaaaagtctttattccatcacaaggttatgttatcttttgtatttttattttattttatacaaggattccaagttccaacatttcaatttctaagtacatgcatatcttattaaatagtgatttaaatacacaaaaatatgaaataaattctaaacaaggtccactctataaaagaagaaaacccacaaattccaaagcccaaattaaaacaccaaaagagcccaaaatacaaactcattcttcaccactaaaatattccaaagcaaagcaacgaacataacggataagtgttatcctcatctagtcatcttcaccctctaactcaccgagaaagaaaagtaaagagagtttggtgtcactatgaacattgccattcataattaccgtcactcaaaattcatcgtaaatcctcacatagacaagacttttgcaaggactcgacaggcaagatcaaataatattacattcatgacaagtactcatggaagaagaagaacgatg

SEQ ID NO: 27952 - DNA, 3003 bp, Unknown
  misc_feature (1)..( 3003): 2750-1469P.txt file - cDNA_ID_2993035; gDNA_ID_2936555; Annot_ID_194231
aaatttaaaattatatatgatttttgttaagattgttttttttgtcatatattttaaattatatcattgtattttaattgttagttataggatttcacccgttgtataacgtgtcgtattactataaactcaaacccgtctgaccatctaattccgttcaatgaaattaaacatatttaatggatttcatcctaggtatactgtctcatattactatcaactcaaactcgtcctaccatctaaccccgttcaataaaattaaatattattttattatttttgttttaataatactttaattttaaatatatataattcaaatcaatttcaaactttttattttaaatggttatttaattgttataatttataaagttcatatattttaatattctaaacctgtcataccatctaatcccgttcggtgaaattaaacattattttttttgttttgtttaaataatatttttattaaaagatttataattcaaataaatttaaaatgtgtctttcaaatagttatttgatttttataaatttcacatttaaaatatttctctatatgtaacatatagttttatattttataaatattataaacgttttataaactttaaataattacaatatttaccttttaataaagtataatattaataatcatttaaataatcatgtgtagctaattttaaggaatttgatttaaagttagttgtttggattaaatttgaatgaataatgtgattgatatattaaatcaaaaattaaaaatcaaatcaaataattaaggaaaaaaaaaataatgccaatggcatgccattgtaaataagtgtcaagtagaggatttatttgctaaaatggttgcaaaaatgtatatgtagatattctgaaatttaaatttagttagttttttttctttcaactgaaatatattatataaaaatttacacatttcaatagaaaaaaatatctatgaaaactaaacaaacaaacatattaaaatccccgaaaacaataacccttagaaagaaataatgttgaaaaagacataaaaatacaaaccaatgaaaccattagtttacttaatcccgttagatgagcttctctcttggagttttggaactattatatagaaaagcaaaattcagttacgaatgcggtttatgtataaaagaagtcacaaaatatcatcactgtaatattatagattgtaaacagagaaatacaaatatataattgtccgaccttatgatatacactactaagtactaacctacgcaaataataccaattaatcttcagcttattcggaaaatttcggctaattcatgttagatacggacaacgtcggatttaacccaaatcctcaatgcaaatgcacaattttctggtttgtttcgtttttattttctggttaaaaaaattcagattaggtttgattaaattaaaaataataaaataaagattgagaaatcactgtggtcttggttcagtcttttgagatagagataatttctgagccgagccgaggaagaagaagaagaagagatgggttttgtcttaatctgtacttgtcctccgtcctcgggtgtcgtcgtctctcagcttcaccatcaccaggtccgtcttccttcttcgtcttctgattttgattttctaattacacaatctgtttaacaattctcttttgtgggtcacaattttcagttctccgccggagtcaaaagcaatgaactttggtttcgtccgactcgtagaaccctaatttcgaaatcatcttgtttcaatctccctcaagaacccattctctccgaagctctcaaggtacaattatatagatgatgacaaaattgattctttttccgtaatctgtacttgggatgagttgttccagatagcaattaagcaattgatatcccaattttgtgatgtgattgtgtgttgtttgttgatcaatcttggagggtttttgtctgtttgtttcacatatgtatccttagataagtgttacattgtttgttttcatattggatggtagtattgatgcatcaaatgctctctgtttcaatgtggtttgtttgtataggagccaattgcattcttgggtgggatgtttgctggacttctaagacttgatctaaacgaagagccgctcaaggattgggtgacgcgaacagttgaagcctcgggtattacagaagaagaagttgatgcagatggggttgtttccaatgatgaagactctcctcaacagatagagattgaatgaggtgtcttggttctgcagtatttaccatctgcaaggaccttttgtatgtaacccctgtgttctttatgtagaaagaaacagactctcttatgtataacttttacattacagaggtatgtcatgtccttgagtatgacattctttgctggtagttgaatcaagatagtgatgatctaaacagtgctagagtgttggagatcagtcgaatcaaatcaagctaacaagatggcttttgcattgaggcgtaaaatctgacaaattatacaacacaaagattttacattcactctgtatcatccatagtctagtctctaaatttgagataggtatttgtgtggctatagtgtaggtcttactacttatttttgttggttgaatcttcaatgagattacaatcatttttgtggataatcagagatacttgtactgattactgaatccaggtaagtctctgcattacgcaaatttggaagagaccaaatgtacaactaaagacaatatcaaaagatctttttcataagagatatttcttagcttactgttgaattttgtccatgacgatgaaatgataataaccacagattatttcaaccaattcaacccaaccacgtcataagacattaagactcataaccaaacgaccgcgttttgatacctctgatcaatctggctcactagcaagctatgccagaccaaaccggtacgacttctgtgaattcgattcgtgacttatg

SEQ ID NO: 27953 - DNA, 3003 bp, Unknown
  misc_feature (1)..( 3003): 2750-1469P.txt file - cDNA_ID_2993092; gDNA_ID_1971867; Annot_ID_58426
tgtgagtaatatagaaaagagtttgattaccactaactagtatgtagatgtcagaaacctcaattagaaatttgtggatgtttcgatgtctctatgccttgttaatcgaacaagatcgaatttgaagaataatgtattaagttatgtataatgtcgttacaatctgaccctcctttacaatttcatttctctccttttatattaatattgtgagattcgtaatcacaaataatgtttttctcgtgtcgccgatcacgtctcgatttaatgttgttcgtttcgaatccttattccgccatcatcgctcttcactttactctgtgattcgtccgttacgaagcgcaaatactaatccccttctagatctttcttgggcagcgataggcattcctaaacccatgggtctttaagcaaatagacctgatatctgttctcggcccataacatgtatccgtctatattgtgggttgggtggataacaagatctgacatttacatagtgtatgagtgatttaaagcaatatgagaagttaaaactagcacttaactttgtgctaaattctttagtttaacttgttaaaaaatttcttaataaaataaattgccgaatttacttaacaatttatttctctccctaaaataaaagtatagcctataatttttttaaatttttttaatgtttttaactatctaattcgcaaaaaaagaaccctataatatcaacatataaaaactaaaaaggattagaaatatcattgaaaccaactttgttaatcaaactagaataagggccaccacattaaggacttaggtaaaagtggtgtaaaatgtaaattgttcattttacaaaaaaaaaaaaagtggtctaaattgctttttgtgatgtgaagttgtgaactaatatgaatttggtctaagtctattgcccaaattatttatccttttagtcctagaatttgttccaaatttgatagtatatagcatcatcatcaaattgatcaattaaaatacgtgacctatagaccatagaaacaaattatttagtaatttttttatggtatatagcaaatggaaattgtttttatggttttcaaaatttttttttctggtcaattttttttttatggttttcaaaaaatggaaattatttagtaatttttttatggttttcaaaaaatgaaaattatttagtaatcaaaatggaaattatttagtaattttttatggttttcaaatttttttttttctttcttcccgacctctctcccctctccttgttcgccctagccgtcaaggccatcttcctcctcgttttggccggtgattggtggcttccatagcaccgtcgccggtcctgttcttagtagtttcagtttgttgtctcttagttattctttgttctgattttagtttctcaaaccctagtttcgtcgtctcctcttcaaatctctcttttttgtggtggttccgatgtgatgactatcatggaggatgggtggcggatcggtgctctttgtagtcggatctattccccggtggagccgtctcgtttcttcgatctagttatggaggtttgtgtttccgatctggttctaatgtctcaactatcggtcttgttcttgttagtttgagaattggacttgatttgttgtatgttccggctggttctgatgtggatctattgagttctgttcttggattttgttggctttgcggtggtgctgtctcgtttggggcgtgtatttagtcggcttttcgtttccatgagttagttctgtttatccctttagtattgcagcaacggcctctttgtatgcggattcttcttccgtttttgagttcgagtgacttctagggtttgtgttttgctgtgtttttcgactggttatggtttgaagcctcaggttcagcttttgggtaggcttgtttgactcctagctctgcctatctctctgtcctcctcttggttttcggtgtcgtggcttggtggaaggttctgttttgtgggttcttcaatcggatgctagcctcctataatggcatctactagctctctgttggaacctcttttggtttcccggctgagttctggacgttgtggtgggtcgatctcttgtccttctctttgcgtggcgtaaccaatctttagtctgtaggtggctttggctgggtctacgaaggtccgtgtgtaaggatgagtggtcctttttagcgtttcccctctcggatctcaaggtcttccttgatccttcgccttctcatgttcattggcgctaaagcggttctgatggttaggttctgtgttctgatcttcttgtttcgtcgtcttcgtttttgttgtggagatggttgtgtgagctcgtattaaatctcttttcaagactcctgtcagttgcctctcctcagcgccaaactgttctatggaagtgttagtcggcggcttgttgggaagagttttcagtgttgtagctttggaggctttagctattaattctgtagctgttatctttgtatcttttcttctaaggcttgttttgtttgttcaccttttttggcctcatgtctctgggggtttctatgtacccgccgactttgtctccgaaaggattttttccttttcggctatatataactcaaacgcatccaatcaatgaaatccgtctaaaaaaaatagcaaatggaaattgttcctaaatctttcacaattttccaagtattttttcttttgaataattttagttattatcctgataatattttttatgtaataattattcgaaacgtgtcacatatatatacaccaagcacaccatttttgattatcatccatcatctcactcactgatatttatacattcaaatatttatttattttcaagttttacgcaaatctctttcactcttaaacctcataaccttagagatcatcagtcatcaatcatcttcttcgttgttatcacttctttagtagctctcaacgagatttctccaaaatcagcgatg

SEQ ID NO: 27954 - DNA, 3003 bp, Unknown; identical to SEQ ID NO: 27953
  misc_feature (1)..( 3003): 2750-1469P.txt file - cDNA_ID_2993092; gDNA_ID_2926155; Annot_ID_139473

SEQ ID NO: 27955 - DNA, 3000 bp, Unknown
  misc_feature (1)..( 3000): 2750-1469P.txt file - cDNA_ID_2993107; gDNA_ID_1971953; Annot_ID_58657
aggcttgaaagatggctctcttgcaaactctgcattttagattctctatcttttatcgttttatatgtaaaggtattggttcttgttgagaaatgatgtttccgtatgaattcaaaagtattataatgaaattcttcttctcttctataatcagaatcgttttggtcctttttcccatcatattctttaactatggagtcaaattcaaattacatagttatctgttataacttgaaaacttctttgttcttcataagaccaagtacgatggtacgatcaaggtgaagttgttcacatttgtcaaataataatttccaataagaaatctggtgaattttgttacttgtcaaaaaaaaatcaagaaaattaacaagactaatagtaataatcgaacgacgacgtaatgtttaagaaaaaaaaacaccaaacgacgacgtaatgggtaatgaaagtgatgagggtatttacgtcaattcatagaggtactccgatgtaaccctaatatataacgtgcatttgtagcgccgtgagtgtccttcttgtttacactgagcagaatctaaaaacacttatcgtttcgtctcttctctgatccattgttgaagatggtaagctctttctctccaacatttttctgtgccagatcatttggttttcgttagtctgttaggaaattgagatctgcgatttcacttagtcctgctagtttccgatgttccatacttatacgtttgtttcagctatgcaaaattgacttattgatcttggcttgtctgattcatagtttaggggttgtctgattaatctccatgtattgatattgagctgatggtatgtaattatggttaaataccagtgaacaatttgtttctcaaatgtgttttgttctctctgtatataatagtcgaagagaaaaactaaggagccaaaggttgagactgtgactcttggaccttctgttcgtgaaggagagcaagtttttggtgttgttcacatctttgcatctttcaatgacactttcattgtaagttttttctcatttattcttagcgtttgtgtaatataaccttctgtgtaatgcgtttatgacattgctttcaatattttgcagcatgtgactgatctctccggtagagaaactctcgtccgcatcaccggtatgtttcctagtagtgaattttattacctgtgtttatgttagtgtaaaattcatttatatttcgagaaatataatgattatgtgaccttttgcaggtggcatgaaggtgaaggctgaccgtgatgagtcctctccttatgctgctatgcttgcagctcaagatgttgctcaaagatgcaaggtctgaaatgattcgatgtccatgcctttttttaattgactttgaggttctggatgataatctataatggtttatgtgacaggagcttggcatcactgccatgcacgtgaagctccgtgctactggaggaaacaaaaccaagactccaggtcctggtgctcagtctgctcttagagcccttgctcgttctggcatgaagattggtcgtattggtaaacacacaaacttagtctcactcaagttgttttgttttgttttgttatgattgctcattggaagctgaatctttcttgaatgcattttgcagaggatgtgactccgattcccacagacagtacacgccgaaagggtggacgaagaggaagaagactctgattgcacgatgaggctcatcatcgttgcaatgtgctcttgagactgtgggtattttcttgggtacacttcgaagttagttttgtctctctccaatttatctttccagttgctttgagaacattataagctgtgtttttttgtatttggagtttttggtattgagaaaaaaaatgttaagttactgatcgcgtcgtgttactgttagttggcttattgatattttacattttctctctttttaactttggcgaatggatactttatcgagatatttaatgctatggttgctcatcagaatcagattagaaagtccgatgcaagttttagtatgtcgtgctggttccgaaatcaaaccaagccagatcgttgttaacttgtcataatctgtttttgaggcccaattattcaaccaaaaaagtcaattttaagaatgaaaagagttgatttgtggcatgtggtgaatgcaattaacaactatacgagagattgtatgataaagacatcaaatatcccaagtccggcttttggaattcttgattagaatgttatcgcttagattgtgttgaatggcatctcttgcaagaaaaagaaaacagattagcagattatgatcatatatttcttattagccctgagctgttagtgcattataagcatcagaccccacttatagcctcttgcaatgacttaaaactcatcatatcctcatttcttgatgctcttggttgttatcgaagacataaacaacatggatgtttaaagaatgctcttttatgttctttagtctctatgaggagccatatcacaggcaatatttcctagtaaggagaaaggtttggtaattaattgatgcagtgggtatctttcttttagttttatggcttttgactacatgtaattcagataattttggatgggtaatcacaattcaagataaattgttataaataatttagtaatataaatgactaaatatctctaattagtaacaccgggtgtttggtctagtggtatgattctcgcttcgggtgcgagaggtcccgagttcgattctcggaacacccctacttttatgttttgaaacatgtgaaaggctttttttgcggtcaaacccattaacaatgggcttgaaacgacggtgcttcgaccactctagttttgcagaccgacgtcattttttttctttctctttcgctctggagactggaatcaatcgagtaaagtgttcgtagctgagaaaaaccctaagctctcgtttttcgtcttctccgattctgcaagtatg

SEQ ID NO: 27956 - DNA, 3000 bp, Unknown
  misc_feature (1)..( 3000): 2750-1469P.txt file - cDNA_ID_2993107; gDNA_ID_1971953; Annot_ID_177401
acagattctagtgatggagaaaaccattttggggaatcttgaatggtacttgacagttccaacacagtatgtgttccttgtgaggtttattaaagcctcgggttctgaccagaaactggagaacttggttcactttctagctgagttgggtttgatgcatcacgacagtttaatgttctgtccttccatgcttgctgcatcagcggtctacacagcaaggtgttgcttgaacaagactcctacttggactgatacactgaaattccacacaggctactccgaatctcagctcatgttagtcttcttaattctttacactagcaagtttgtgatcatattgtttgtatattaattctctatgtgcgtttctgtgtgtaatcagggattgctcaaagcttttagctttcattcactcgaaagcgggggagagcaagctacgtggtgtgttgaagaagtattcgaaacttggaagaggtgctgttgctctgatttcaccagccaagtctcttatgtcatctgctccatgaacaaggcttgaaagatggctctcttgcaaactctgcattttagattctctatcttttatcgttttatatgtaaaggtattggttcttgttgagaaatgatgtttccgtatgaattcaaaagtattataatgaaattcttcttctcttctataatcagaatcgttttggtcctttttcccatcatattctttaactatggagtcaaattcaaattacatagttatctgttataacttgaaaacttctttgttcttcataagaccaagtacgatggtacgatcaaggtgaagttgttcacatttgtcaaataataatttccaataagaaatctggtgaattttgttacttgtcaaaaaaaaatcaagaaaattaacaagactaatagtaataatcgaacgacgacgtaatgtttaagaaaaaaaaacaccaaacgacgacgtaatgggtaatgaaagtgatgagggtatttacgtcaattcatagaggtactccgatgtaaccctaatatataacgtgcatttgtagcgccgtgagtgtccttcttgtttacactgagcagaatctaaaaacacttatcgtttcgtctcttctctgatccattgttgaagatggtaagctctttctctccaacatttttctgtgccagatcatttggttttcgttagtctgttaggaaattgagatctgcgatttcacttagtcctgctagtttccgatgttccatacttatacgtttgtttcagctatgcaaaattgacttattgatcttggcttgtctgattcatagtttaggggttgtctgattaatctccatgtattgatattgagctgatggtatgtaattatggttaaataccagtgaacaatttgtttctcaaatgtgttttgttctctctgtatataatagtcgaagagaaaaactaaggagccaaaggttgagactgtgactcttggaccttctgttcgtgaaggagagcaagtttttggtgttgttcacatctttgcatctttcaatgacactttcattgtaagttttttctcatttattcttagcgtttgtgtaatataaccttctgtgtaatgcgtttatgacattgctttcaatattttgcagcatgtgactgatctctccggtagagaaactctcgtccgcatcaccggtatgtttcctagtagtgaattttattacctgtgtttatgttagtgtaaaattcatttatatttcgagaaatataatgattatgtgaccttttgcaggtggcatgaaggtgaaggctgaccgtgatgagtcctctccttatgctgctatgcttgcagctcaagatgttgctcaaagatgcaaggtctgaaatgattcgatgtccatgcctttttttaattgactttgaggttctggatgataatctataatggtttatgtgacaggagcttggcatcactgccatgcacgtgaagctccgtgctactggaggaaacaaaaccaagactccaggtcctggtgctcagtctgctcttagagcccttgctcgttctggcatgaagattggtcgtattggtaaacacacaaacttagtctcactcaagttgttttgttttgttttgttatgattgctcattggaagctgaatctttcttgaatgcattttgcagaggatgtgactccgattcccacagacagtacacgccgaaagggtggacgaagaggaagaagactctgattgcacgatgaggctcatcatcgttgcaatgtgctcttgagactgtgggtattttcttgggtacacttcgaagttagttttgtctctctccaatttatctttccagttgctttgagaacattataagctgtgtttttttgtatttggagtttttggtattgagaaaaaaaatgttaagttactgatcgcgtcgtgttactgttagttggcttattgatattttacattttctctctttttaactttggcgaatggatactttatcgagatatttaatgctatggttgctcatcagaatcagattagaaagtccgatgcaagttttagtatgtcgtgctggttccgaaatcaaaccaagccagatcgttgttaacttgtcataatctgtttttgaggcccaattattcaaccaaaaaagtcaattttaagaatgaaaagagttgatttgtggcatgtggtgaatgcaattaacaactatacgagagattgtatgataaagacatcaaatatcccaagtccggcttttggaattcttgattagaatgttatcgcttagattgtgttgaatggcatctcttgcaagaaaaagaaaacagattagcagattatgatcatatatttcttattagccctgagctgttagtgcattataagcatcagaccccacttatagcctcttgcaatgacttaaaactcatcatatcctcatttcttgatgctcttggttgttatcgaagacataaacaacatggatg

SEQ ID NO: 27957 - DNA, 3000 bp, Unknown; identical to SEQ ID NO: 5932
  misc_feature (1)..( 3000): 2750-1469P.txt file - cDNA_ID_2993114; gDNA_ID_1620833; Annot_ID_57902

SEQ ID NO: 27958 - DNA, 3003 bp, Unknown
  misc_feature (1)..( 3003): 2750-1469P.txt file - cDNA_ID_2993122; gDNA_ID_1621101; Annot_ID_171439
attaaactagtcattcatgaaaatttctataagtgattatacctttaaattaagttatttatcaatcaatttatttcataaaataatcaagtattatatactaatacaattttaatgcaatattgtaaaaccaatcacaataaaactattttgtgcaaaatttggattttacatatatcttgacaaaacttttatttagggtaatatgaattcgtgtaagatttaggtaaaataatttcgtgcaaaattagggcaaaaccatgaacaattttattttatttttttattttttttttagataccacaaagatttagagaaaagaatcttataaaaagaaaaattatcttgcaacgtttttagtaaaaataataataacacaatcaaatatatggaaatcaaatatttaatagggaaaagtcaatatctaaaagtgataagatatgtataacgttttaatcaaaggagttaaataagggatatcatatcaatcataaatggattttagataatatagtatttataaaatgatattgaatatagatgcaactattcaaaactggaatgctaaaacattaatacatgcttacatcacccaccaccgggctatgaatagttacaaaattagttatataattataaaattggtaatttatatattcaatattgtaatagtaaatcacaaagattaacaattaacaagcatgattctcttctttaacgattttctttgtagaatcattgaatcatgcgatagtaattatagaaacaaatgataagcatgattctcttctttattgaatcattgaaaacatgcttttaccgatctatactataatcatcgatcgactcatattgttttgtttcaataatagaaaataagtactatgaaccatgagtcgataagtaaacatggttcttaaaaaaaatgtaagaatctctatatctaccttttagagcgtgctgataacgtgttgtaaacagagaaagagatagaggaaatcagtgtattattccattgagataaagggttctttatataggagtacaaggaaagggtaaaaccctagaaacatctcgatgatgggcttagataatgggccttataatgggcatcctcttgattcataacaatatgttgtttcttctagttttggtccccgcttcctcaccatctctagctagcatcatacattttctttattttataatatatattttcgacatagcatgtagattttctatttatcttttttaaaatttacaccaatcattgatagtatatgtattgtaaaataaaaataaaaataaaaatatctacaacgcatggtcatattcaaacttaattctaatatttacccaaatgattttcttttctagcggttgaattaacttagaaaaagaacaatcttcacttagagatcccagtgacgatttggacgcttaattattagggttatcgactcttattaaggttcttctaaagaaagaaaatgtaatactttgaagatgaagcaagacaaaccgaagaagacagcagatatatatatatatatatatataccgaccaagattcgtgtacgtaaaagcacaactgagatatgaatttgttggcatgcaaataaattacagatgtttgatgctaagaccaaatgaaattaaaaagggatttagggattttgtatctgtgagaggaacagtccattgaatcagtgagataggatactttaattatactgtcttcttctgctcagcatggttcgaatccccatatcaatcatccattgtctctttcacctttgttttcataaatggcaaaaactttggttgcaatttgcgacaaaggatgacgtattcggcgccatttaaagttggagttttaaaagtaaaaactattactatatcatgtgaaaatataattagattgtgaagtataatttttagaattctgtcgtttacctcttagcattgttatttgattagactaaactaataattcaattaaataacaaatctaattttttcatagtcgaatttcattagttaatcgtttagttgtttctctcgtggatcttcacatcatcacatgtgccaagaagttaatattaatatatagtcattttccgagaagagtctatttgggttgtttgagtaaagcgtggatatctttttccaaagaccttttgagaacttatcaaccacaatcccttatatatggttgaagctgtgatcacttgtattacaattatattaacaactcaatcggcattaacacaattgctttcgattggatctatcagaaatcggcattaacacaattacattatatatcacgctaggtctgatcagctccatgtcaatctcgttgtttgtgtgctctcggtttagttatgtgactaagaagatgaaccgacttggataattgattgcctggttgcaatattttcgaaagtgataggatatcaactgtttcttttcaatccataacttacatacttaatgatataaccacatatatatagaatcgtgtggctgtcccgaaacacgtgaccataccatatcgtattcgaatgcacctacttatcaactatttgaactgatgtggatttaagaattggtcatatattatcctccatgcttcatagggtaatatccagagcgatgttgcaacagatccttacttgatgcgtggccaattgatgttgcttgtgtgagttgccatagatcctaaagccaaggaatacattttggaatccatagaagacatgaacaacattaagcaaagccttctgtagatttttaattctttttcgttgttgaggatagtgatatgtacattaattaatttggttccgtataattttttaattaattagcgtaacactccacccgaaaaggtccaaaaccttaaacaacacacgaagctcgtagacaagctgaccaaaaccttattagttttgtttgcaaaccccaaaagaaaaaacatctttggtgtaacaaaaatg

SEQ ID NO: 27959 - DNA, 3003 bp, Unknown
  misc_feature (1)..( 3003): 2750-1469P.txt file - cDNA_ID_2993126; gDNA_ID_1971973; Annot_ID_58689
gagcaatcaataataaatataattttattgttatttaatttttatcgaaggtccaacacattatatatggcgaaattatgatagaaacggaaattttagcaacgacatatacaaccttcaccaactacaacaggatcacatggccaagtgcaatcagcgcatggaaccttttgcggatgcacaacatatggagaagtcttttggttaatcacatgcgacatggcttcatgctccaacgtgtttctaccttccaccacgctaacacttgagaatgttatatctacaccgttaaaactaacttaagtcatgtatgctaatattgttttaaatagtaataagtcttattgattgagttttagattacagaaatgaacaaaatctcagagatataagaaatgcttacgggataggagagctatgaggcaaaagaaagtgagaatgttagagacttacttcatttcctttggaagttctattgagaaagagatatttcaagagtaaatcagtgttgaaattgataacttatcacccttttgatgcaatttatatatgtaagaataattgtattttgtggcaaattagtcattattctgtatatagttttttctaggaatatacatttaataattggagatctttcaagaaattcatgataaaatcttatatggattttttatctaattggtttaaatatttgtatctcaaaatctataacaatagtaaatttatatgtttctatattgatgaaatttaacttgaggaaaagcattgaaatttcaaatatggaagaaaaaacaattgagaaaaaaaaaaaacaatgagaaaaagtttaaatatttatgaccatgttgaactaattatttatgaccacaaaaaatatatattagcccactaatgtaccatgttgaattaatggcctattaaagtttatttcactggcccattaacgttcctatttgtatatacccaacattccaacaaagtccataattcactgatccgaaagtttttactttaagcgttagtatttgtgtcagatgcagacttcctggtgttttcacttcaataaaacgacgtaacgtctcatactaagaacgtaaaacggcatcaatggcgtgatccactggataacaatttcagcttgctctctttcaccttctctctctctcactacgttctcgggctccaaacgtatgaaccagaacaaagccttttagatagttccgtctgcgaaccctaaaatcattcaataaacttcgaacaaaaacgaatgcttttgttcaatcatcttctcagtttctgattccgaagaaaccctaatcaaataaatcatggactgctcatgcagtactcgtccttcgtctctgcttatctcttccgaaccatcttttcgctttcctcactctaatttctcctcgaatctcagctttcaggtttgtattagtatccttagtcttctgctttaagatttgattcgaaatcaatggagaacaattttaaagttctgagattttctattttattttccagataccgaaagatacgaagttggtgaagcagcgtttggtagtgagaagttcctctggttctgattatcaaaacggcgacgttaatgggtttcctctcaaaccaaacaaactctttatgcaagaggtaaatttcttatgttttcctgtgtttttgttgattgagaagaggagattaaatggatttagtgatgattttgttgaattttaggcgattggagctgagtatggagaagggtttgagacttttagacaggatggtcctcttaaagtggatgtggtaagagctactaatgattatgaatcttttattcgtttgtatttgtttttatcagaagctgcttatggaaaccttttattgtagggaatatgtgatttgcttttcgttttgcttgtaaataggatttctggaatgagaaactacaagatggttttcttcaaagaatacgttacgcaatgaaaccagatgaagcctatggacttattttctcttgggacaatgtcgtggtaataattgtttgacaccatctttatgttagcaagttaagttagatgaagtttcttgtagcttatatatattacctacaaaagcttcttcttctagtggggcttataaatattagtgttttcgtttgtttagatgatggctcccctgttattggtaaatctcaaaagttgttggatagaattgcgtggtccatgcatactagttttgggtctattttaggcgctagggcttggcggatttggcaaaagttgtagaataattgcttctttagaatgatgcttgcgtgttagctggtagatctcaagaggtctatagtggaattgcatggtccatgcctattaattttggattcaagagtcgtattttctcaatgttccacttatggtttaaactttgtaggctgatactcgaagtcttaagttggaagcttggaagcagctcgctgcagaagaaggtaagctttattgcgctgctctcctgctcctaaaggttttacccaaatatagtctagtttctttctgcatacgtgtttgtggatagagatatcttgcaatacctgctcatatatgtttagtgcggcccatgcacccttttaaggaatgttgggagagtgtccagagatatcaatgaactcaaacgttacattaccttctttgaggcctcaattgtttgttttacgttttcttttacgtttagatgttaaattagtgtgttttccttgagtttcccacaaactttagtgttttggatgcgcaatcagtatagagttgacttgtttatttatgtaaaggtctgaatatgcgaactgctctattgaaataatcttgtgtgttagctcttttgctggtatgtattaaacttcaaaaaggaattgattttatcttacttatattaaactacccatttctcatattaaattgtttggcaggaaaagaaattacggaggaggttgacatccaaagactgatg

SEQ ID NO: 27960 - DNA, 3003 bp, Unknown
  misc_feature (1)..( 3003): 2750-1469P.txt file - cDNA_ID_2993126; gDNA_ID_1971973; Annot_ID_177516
agctagtcactgaccgtgaaacctcgtctctatcctcagccattttcttgaacttagcagaaggagaaccaaatttgagaagctggaatctactagaagcatcaggtaaagcactaatagaccatctcctaggtttaccatcaccaatcaaagttcttctagatgtagaaacatcaagaggacaaggaggaaccttagtatttttgccagaagaaccattagattcttcaatctctgctttcaaattcccatcacaattagatcccattatctctctctattgaagatcaaatctttgtaggaataaaacagctactcaaaggaatatatgctttgcaagcttaaacattgttggcaaagaatataaaacccagaaaaaagaagaagaaaagattcggacttgccaacgaagcttcttctacttctcagcacattgaaacctaacaaagtattcagatttgaataaacaaagatgaaaaagaaaaggaatcaaacccttagttgagaaactcgttgaatcggaatttaaaaattgcccaagatccgattcagctgcaattacagagaaacccccaagacaagaaagagatgttactcagactaagaatttatctaaaaggaaactttgaagaagcaatatgcgtgtaatgaaaaggtaaggcttctgttgtgaaattgatgcaacataagattggtcgttggggaagaactagtctcggattctttttttctcgtggttgcagttaacttagcgttgatcaggccgccattattgtcccaatacgtttttttttattcatgaaaaggaaaaaaaaaagcattattgtattagtgtactcacaaaaataagatacacaaaacgttttagcatatagtatttatcagattttaattattactactaatttactgacaagctgttacagatgtgtattgttcttactgttttttgggttgtgttttttgataatttatatatacttgattaataaagtcttcacaccttccaagactagctcttagaatgataaaatatcattaagtttataatgatctcgattacaccgagattctcgcacgttaatgacagaatcgaagccatccagtggttaatttagagtttttgtatcaagttttggaatttgatctagggaaaatacattttcttactaccaaccatattcttcttatctatcatagttttttttttttttttgtgttgtatgttaacttgaaagtagatcagctattcagctgtgcgatatcactgagacatagtatgttgtattgttcatgtgatgcgtgtacaacacatagagtgaaatcgatttggatgattaacaatgacaatgttgtcatgagaaagaaattatggtctccttctcagagtttataatcaataataattattattttgtggaaggccaaatacattttggcggatattcgataaaataaaaaaaactttagcatcgacatatatgacattctccagatacaacaagatcacatgggcaagtgcaaatcagcgcatgggtgcttttgcggatgcataacatgtggagaagtcttttatggagaaatgcaaatcaacatattgttttcttcaacttcctataccatgtagttatgagaaagagattcatggtatcattatatctctttctccgagcaatcaataataaatataattttattgttatttaatttttatcgaaggtccaacacattatatatggcgaaattatgatagaaacggaaattttagcaacgacatatacaaccttcaccaactacaacaggatcacatggccaagtgcaatcagcgcatggaaccttttgcggatgcacaacatatggagaagtcttttggttaatcacatgcgacatggcttcatgctccaacgtgtttctaccttccaccacgctaacacttgagaatgttatatctacaccgttaaaactaacttaagtcatgtatgctaatattgttttaaatagtaataagtcttattgattgagttttagattacagaaatgaacaaaatctcagagatataagaaatgcttacgggataggagagctatgaggcaaaagaaagtgagaatgttagagacttacttcatttcctttggaagttctattgagaaagagatatttcaagagtaaatcagtgttgaaattgataacttatcacccttttgatgcaatttatatatgtaagaataattgtattttgtggcaaattagtcattattctgtatatagttttttctaggaatatacatttaataattggagatctttcaagaaattcatgataaaatcttatatggattttttatctaattggtttaaatatttgtatctcaaaatctataacaatagtaaatttatatgtttctatattgatgaaatttaacttgaggaaaagcattgaaatttcaaatatggaagaaaaaacaattgagaaaaaaaaaaaacaatgagaaaaagtttaaatatttatgaccatgttgaactaattatttatgaccacaaaaaatatatattagcccactaatgtaccatgttgaattaatggcctattaaagtttatttcactggcccattaacgttcctatttgtatatacccaacattccaacaaagtccataattcactgatccgaaagtttttactttaagcgttagtatttgtgtcagatgcagacttcctggtgttttcacttcaataaaacgacgtaacgtctcatactaagaacgtaaaacggcatcaatggcgtgatccactggataacaatttcagcttgctctctttcaccttctctctctctcactacgttctcgggctccaaacgtatgaaccagaacaaagccttttagatagttccgtctgcgaaccctaaaatcattcaataaacttcgaacaaaaacgaatgcttttgttcaatcatcttctcagtttctgattccgaagaaaccctaatcaaataaatcatg

SEQ ID NO: 27961 - DNA, 3000 bp, Unknown
  misc_feature (1)..( 3000): 2750-1469P.txt file - cDNA_ID_2993130; gDNA_ID_1971796; Annot_ID_58061
tcttaaaaccaatcttgatttctagaaaactctgttcctggtaaaggatctaacttttattagtcttgttgcttcatatattgccttgctttaggtgtgtttgatcttgaaagggaaacaattttagatcaagtgtgtagtagtactgatgcaactgtgtgatgatggttttgattgttcaggtggctttggcgcatacgattggacatgtagcagcgatagtgactatgtctaaagttgtagtgtccttcacacacgtcatcaaaagcagtgagccagccttcagagtccttgtctcaagcttcttcttgggcgagtcattccatgtatctgtttacctctccctcttacccattactagaggatgtgctcttgctgcaatcatggagcttaacttcaatatgatcggtaattaacaacatccatttattgtgggctactggttcgcaaaacgttgtctcccaaatcaaaccaaacgttgactgataatttttataatgagctattgatgttagttcaaaacaaaaaaattaagtttttcaaacaacttgatttgaaaccttgtaaggtatttgattctaaatgttagaattcaggtgggtaatggcacaaagtgtgttctaccatttgtataatcaagtctcatacatgtccctcgaccagatttcaccactaacatttagcgttggaaacaaaatgaagtggatctcggtcatcgtttcctcaatcatcatctttcaaaaacatgttaaacctgtcaatgccctaagtgttgccattgcaattcttgggactttaaccttttcttaggtaaaaaatttgagtgaagaaaaaaatagactcttttcattgtctacacaaggcttctttctcattatcagtctgctttgagatgagaacatgagaattaaacaaacacacaatgccctttcgtttatatgttagattcagactacaatcttgttatttctcttagaatgtatgaacctttagtgataactctaggaatgggccaatgttgtatcacatgttggaatcaatcttgaacttaaagctcattgattcctgcgagtgttttggctaatgatgttcttttgttctttagttaataaaattttatatttttttgtatatgatgtaattcaaatttttttaaacgaacatatattattcaatcaatgaagaaataatatatgtactcacatcgcttaaaaaaattagacaatggttcatagccatactataaatattccaaaatgattctgaatacgaatgaacaagaaacttaagttttccaacgtccaaaactaaaagtgttccgtttactccggttctttatttcatagaatgaaaactttaaaaagtttcaatatattataaatatgtaacctttattaaagtgaaatcttataacagtttcaattaaaaaaatttatgaaattttaaatattataaatatctgaaatttctaatagttaaatttatgggtctagaagaacaggaaaaacatttatttggaaaacgctagctgctgcagtaagatctagaggacatatctgtcttaaagttgcctccaatggcattgcttttttgttgttagaagggggtagaacaacacattctaggttttcaatacctttgaatcgagatgaattttcagtttgtaagatcaaaccaaaatcagatttagctgatctgattaaagaagcatctctcattatatatgatgaacctccaatgatgagcaagttttgtttgaagcattagataaaagcttttcgaatattctcaagcgcgtagacaataaggtattgggtggaaaagtcattgttttcggaggcgatttcagacaagtgctaccagtaattaatggtgcagggagagcagaaattgttatgtcatctctaaatgcttcatgatcttttggatcactgcaaagtgttgaaattgactaagaatatgcgacttttaaacaacaaattaagtgttgatgaagctaaagaaatccaagaatttttcgattggttattggatgttggtgatggaagggtcaatgagcctaatgatggtgagacgctaatagatatacctgaagaattgttgattcaagaagcagatatccaataaaagctattagtagaaaaatttatggaagggtcaatgaaatccaactaaactccacaaaatcattgatccaaaattctttcagaggagagatattctaactccaaaaaacgatgatgttaacacaataaatcagtatatgctagagcactggatagtaagtttagatttgctctatattatttaatcttttaatttatgttctccattcttctgactttttgtgaagagttgattgttattttatttgttacaagtcaagaaagaatctatctttcggctaatagtatagatccttcaaattcagattcattaaacaatcctgttagttcagatttcttaaacagtattaaggtatcaagtatgccataccagtctttgcgtttgaagattacaaactgtcattatttaaaattaaataaaatagtataaccaaatttttaaggtgtaattacttaattttctacctttagattgtacacactaaaacaatcatatttaactcactaagccatactaagtattatatctaaacatacaaaaaatttaaattaacaaataagtattaaagtgtgaattatattttaagaaatcaattagtcccgatactaaaataaaatatagatccgcagtatatcgtgtgttaaaatttagtactaattaaattccataactaaaattaaaacttaaagctaatattagtacaaaaaaaattgatttttcaatgtccttggtataattccaccggttcttgggatcaatccagatcggtacagtcataaaccgaaccggctccatgttctcttcgtcgtcgttcaatcaaacagatccacaatgctcgtaagttcaagcaaaatcacaagagcgagagagatg

SEQ ID NO: 27962 - DNA, 3000 bp, Unknown
  misc_feature (1)..( 3000): 2750-1469P.txt file - cDNA_ID_2993130; gDNA_ID_1971796; Annot_ID_175674
gatgacgcttgtctcttgggtcactggagttgtagaagctcttaaaaccaatcttgatttctagaaaactctgttcctggtaaaggatctaacttttattagtcttgttgcttcatatattgccttgctttaggtgtgtttgatcttgaaagggaaacaattttagatcaagtgtgtagtagtactgatgcaactgtgtgatgatggttttgattgttcaggtggctttggcgcatacgattggacatgtagcagcgatagtgactatgtctaaagttgtagtgtccttcacacacgtcatcaaaagcagtgagccagccttcagagtccttgtctcaagcttcttcttgggcgagtcattccatgtatctgtttacctctccctcttacccattactagaggatgtgctcttgctgcaatcatggagcttaacttcaatatgatcggtaattaacaacatccatttattgtgggctactggttcgcaaaacgttgtctcccaaatcaaaccaaacgttgactgataatttttataatgagctattgatgttagttcaaaacaaaaaaattaagtttttcaaacaacttgatttgaaaccttgtaaggtatttgattctaaatgttagaattcaggtgggtaatggcacaaagtgtgttctaccatttgtataatcaagtctcatacatgtccctcgaccagatttcaccactaacatttagcgttggaaacaaaatgaagtggatctcggtcatcgtttcctcaatcatcatctttcaaaaacatgttaaacctgtcaatgccctaagtgttgccattgcaattcttgggactttaaccttttcttaggtaaaaaatttgagtgaagaaaaaaatagactcttttcattgtctacacaaggcttctttctcattatcagtctgctttgagatgagaacatgagaattaaacaaacacacaatgccctttcgtttatatgttagattcagactacaatcttgttatttctcttagaatgtatgaacctttagtgataactctaggaatgggccaatgttgtatcacatgttggaatcaatcttgaacttaaagctcattgattcctgcgagtgttttggctaatgatgttcttttgttctttagttaataaaattttatatttttttgtatatgatgtaattcaaatttttttaaacgaacatatattattcaatcaatgaagaaataatatatgtactcacatcgcttaaaaaaattagacaatggttcatagccatactataaatattccaaaatgattctgaatacgaatgaacaagaaacttaagttttccaacgtccaaaactaaaagtgttccgtttactccggttctttatttcatagaatgaaaactttaaaaagtttcaatatattataaatatgtaacctttattaaagtgaaatcttataacagtttcaattaaaaaaatttatgaaattttaaatattataaatatctgaaatttctaatagttaaatttatgggtctagaagaacaggaaaaacatttatttggaaaacgctagctgctgcagtaagatctagaggacatatctgtcttaaagttgcctccaatggcattgcttttttgttgttagaagggggtagaacaacacattctaggttttcaatacctttgaatcgagatgaattttcagtttgtaagatcaaaccaaaatcagatttagctgatctgattaaagaagcatctctcattatatatgatgaacctccaatgatgagcaagttttgtttgaagcattagataaaagcttttcgaatattctcaagcgcgtagacaataaggtattgggtggaaaagtcattgttttcggaggcgatttcagacaagtgctaccagtaattaatggtgcagggagagcagaaattgttatgtcatctctaaatgcttcatgatcttttggatcactgcaaagtgttgaaattgactaagaatatgcgacttttaaacaacaaattaagtgttgatgaagctaaagaaatccaagaatttttcgattggttattggatgttggtgatggaagggtcaatgagcctaatgatggtgagacgctaatagatatacctgaagaattgttgattcaagaagcagatatccaataaaagctattagtagaaaaatttatggaagggtcaatgaaatccaactaaactccacaaaatcattgatccaaaattctttcagaggagagatattctaactccaaaaaacgatgatgttaacacaataaatcagtatatgctagagcactggatagtaagtttagatttgctctatattatttaatcttttaatttatgttctccattcttctgactttttgtgaagagttgattgttattttatttgttacaagtcaagaaagaatctatctttcggctaatagtatagatccttcaaattcagattcattaaacaatcctgttagttcagatttcttaaacagtattaaggtatcaagtatgccataccagtctttgcgtttgaagattacaaactgtcattatttaaaattaaataaaatagtataaccaaatttttaaggtgtaattacttaattttctacctttagattgtacacactaaaacaatcatatttaactcactaagccatactaagtattatatctaaacatacaaaaaatttaaattaacaaataagtattaaagtgtgaattatattttaagaaatcaattagtcccgatactaaaataaaatatagatccgcagtatatcgtgtgttaaaatttagtactaattaaattccataactaaaattaaaacttaaagctaatattagtacaaaaaaaattgatttttcaatgtccttggtataattccaccggttcttgggatcaatccagatcggtacagtcataaaccgaaccggctccatgttctcttcgtcgtcgttcaatcaaacagatccacaatg

SEQ ID NO: 27963 - DNA, 3003 bp, Unknown
  misc_feature (1)..( 3003): 2750-1469P.txt file - cDNA_ID_2993134; gDNA_ID_1620823; Annot_ID_169567
gtgttttattggtcggagtcggcgcgtaaaacgctgttagaaattggacaaaatttggccattatgggccgagttacggtttagagactctcttccggcccaaccggttcgtgggaaaaattcatcatattatacatgggatcagcaaaacgacgtcattttggcggcggttttctcagcgtttcctaataacagtaatattattatacatgggatcagcaaaacgacgtcatttttgagtaatgtgttggatgccactttgtttcttcttggtccaaaagtttgtaaacaatctcaacaatctgtatcggtgttttagagaagtacaaacttacatgtcaaaaggaatctagtgctcacagctgtgattacttctttcattgttgctgttttgcagtgaggagtaatcactggatatcgagataggcagctaaatagtcaggatattgtgaggtttcctgcagaacaactttcaattttttacggatctgaggatgcatttttgaagcatatagaaccgagaacatagataaagaggttgatcattttatatttaaggttttaagcaccactgagaacaacatgctatggctgaggataagtctgctgaagtcaaataaaagaaaccacaaagcagagaaaagaagaagaactcaaaagattaaagaggttgagaatagttttggaaagttagactactcgagctaggaggcgttttaaattttcatcctatcttgatcgatcaataagattaaaagatgagttcatatatttcaagtagattacagcattaaaagcacacatgtctaggtacctattctacaaaaaaaacgaaagtagaggatctaaataaggacaaaaaaagaactggaattttaaggttttcttgatgttgtgatctgctgttgtttcctacttgctttaacatctaccggtggattacacctgatacaaaaagaaacactttttgatgtcaattacacctaaaactcatctttggggatacataaaaaaaaagaaaaactagattgtgtctcgtatcttctttacttgttctgtatagggtttgagccactccttgggattcttctgaagctatcattttctcccttaagtggctctttcttcatctccttgcttacaggcaaatctctcacagcttgactcgaatgtgtcatcgttaacagagaacgtccttctacactatacttgctgctaaagaaagctacaagtaacagaaccagagccactgaacagcatctcttcattctgagttctcttcttgaaatttcctttaggactcttgaaacctcttgactttttcttgttctgtttttctgtgaactgagaaaatcttggatggagatgtgtgttagagaaaagagagacgagagacttctaaagcttgttggttttatagaataagatttatgtgtgtttgaacacatagttattgggatctgatcacgtgatcttactttgactaatgctatttaatcagatggtgagatacttatcttattcttaatcatttacttacgatgatgatgatattcctcaagcatctacattgaaacaatgatacaatatcatatgtagagacaaagatccacatattcacattacctaactcatgtaactgctttgaaactaagagatggtggtcatgtgattagagcacgtgatttctgcctactgttatcggggaactcaaaagaggctgaaacttaactttattgaaattattttttaagcataactttggaatttggaggtattagtgtaagtccaatttcagaaaagaaaaaattgcaggtaacagctgttttgtctcactactaatcactagttttttttcttcttctgcagctattttttttatatttcatgaagagaaggaaaaattgattccaagaaccggcacagattctttgatgagtggtggagaataaagaaatagggaaaagtgcattacgcaaaataattattaaatcattgatcctctaataacgaaccggaatggattatacaataccggtctaacttgtgttgaattttgttcggtttagataaaccaagcgcgagttaggctaattctttctctctctacccgcggagaaggagaaagtgagattaacgagaaaccccaagagagaaaatcttcatcgacaaaattcgattcaggtgatcaatttctttcatattttcgcaattatttcttggatctgatgttatctactttggaatttcttcgctgcattatcttttgatttgttgttcttgttcctttgcgtttctgggtaagagcgaagcttgaaattgcaattggaatctctaacaagtttaagactttgctttgatacggtttatgtggaagtatctgtgattttcttatatatttatggaagatattgcagctgattcgagtttggtttgcctatcattgttgcaattttctcggttcaatcaaaggattttctaggttgatatataattccagggatttccagataatttcctttaatttggttggaattcgattgaattttcgttgctttcaattggtttgcagtgatttgggtgaaaagatttttccaagctcatggaaattggggatttttattcaaagggtgtttctggtgatcatagagttgtttgactcaagtttcatttgatcttgtgtgtatttggttggtttttcttttcaatcaggtcatgaaagtattgcataatagctagaagtattgttatctctgtatatgtgttgtgagatagtacaattggtaaagtttccatatcaatggcacgaaaatcaactgcaatttactcgtttcgatatatgtttttatgtagttcatatatgtaattcagacataagggttttatgtagtccatctcatcagtaggtggactttcactcatatttgtatttcgttttgttgataatgttaaatgggtgtaacagctgctgcagctattcacttcgtccatagcacgtagatg

SEQ ID NO: 27964 - DNA, 3003 bp, Unknown; identical to SEQ ID NO: 21142
  misc_feature (1)..( 3003): 2750-1469P.txt file - cDNA_ID_2993150; gDNA_ID_1621111; Annot_ID_171804

SEQ ID NO: 27965 - DNA, 3003 bp, Unknown
  misc_feature (1)..( 3003): 2750-1469P.txt file - cDNA_ID_2993154; gDNA_ID_2684096; Annot_ID_190106
atcaccactgcttccttgtgatacccactccgattaaacccactaagaataccattccaagacacaatattcgcctcaatacctgaactttccatctcagagaggatacgaaccacctcttctaagcaaccctttcgcgcataggcacaaagcaaagcactgcaagtgacaacatctttgtcagacattctatcgaacactttgcgtgcatcacccatcctaccacacctcatgtacatatgaaacatagacccctgaacaaacgcatccatatccaacccggaaacacacgacacacaatgtatctgtttacccactttaaaagccgataattcagcacaaaccttgaacaaattcggaagaacatgactatctggaatcaacccatgagagaacatccgagaaaacacaccaatcgattgcgtaaaaagcttagcctttgttaaagcgtatataagagaagagaaagagtaaatagtaggatccggaatcgattgcaagacgagatcagcatcgttgaaacaattatagttcgagtatgaagcaatgagtttagcggagatatagccatcgttttgagctccggatttgagtatacgagcatgagcttgtgttgtcttcgacaacgaagaagaccaatgatatgatgaagattctaagaatccaacgatcgattgaggaattttctctatcagtggaagaacttgttttgtcattgcttaactaaaaaataaaattttcccgcttaaccttaatcattcacttattaatcttcctacgtgaccagattattccacgtcaccacaatcagaaatcaacggctgaagatgaaggactgggtctcactcagcttctgagcaatcttagtcgttgattatgtcttcgagaaatcttggacgttgattctaccttctccgagttttataatctgttttcttaagaaaatttgattgatacagagagagcgatgatgattcgaacggcgttagtgttcgttgtcttcttcgtcggaacagtcgtacaagcgcagctgatacctccggcgaggcgtgatggatttttgtatccaccgggtcggaaaatcgaccgggatacgatacttatcgaggcgtatattgacccggtttgtccggattgtagagacgcttgggagccgctaaagctagcgattgatcactatggatctcgcgttgctcttgttcttcacctcattcctttaccgttagtgtttgatttctcttcccttcaatttcagttttcaatttctttagctagattgagaaattagttgttcgatgtttcaagtaattgtctaaatctatgcatgccatgaatatttgtagtgatttcaattgataagtagtttgagaaagtagcagattttgtttatgttgccatatctgttgtatgcaaattgttttattattgtgtgatgatgagcttagcttttggatcttgcagcttccatgacaatgcatttgtagcatctcgggctttacacatcgttgataccttaaacgccaatgccacgttcaatttgctggaagggatcttcaagcatcaggtttgattagtgtactaaaaaactaaactttgctgagattaaacagagaaaatgtatatccggcggttctatttcttgaaatgaatgtttatccatgcactccatttgatcagtacatatggtttggttgaaaatttgctgcaacagacattgttctacaactcgcaaacacaactcatgtcaagacctgcagttgtggaagaattaatcaagcttggaacagttacgttaggaaactcatatcattctcctttgaaatctggcttcagcaactcaaaatctgatcttgccactagagtttccttcaaggtgatcccttcagcttttccacttctcagtttcacttacttgaacattttcactagtataggtatttagattgcttattcaatttgttcctctgtattcgagttcatatcttcaactagataaccaaatggagtgatatggatctttcactgcattgtcactagtcattatctttgcgcagtaggagaatttcgggttctgtcacttgatttctagtagcttaccttaccttctatcattgctttgcttttgttctctttgcagtatagcgtctcaagaggagtctccgcgacaccaaccttctacgtgaatggattcgagctgcctggtgctggttctcccaaagattatgaaggatggagagacaccattgatcctctggttaaaccacaagaagtagacatacgagacaccttcctttcattcctcacgcaaccatcttactagtttgtactttctatgatgtgccaaactcccacctacttagttgaaaagtccagaagcataactctcatacatgttcatattgttacatcttcaactgtcttcatttgcagcttaatgtataataaaccaaaaattcttcaaatgcttctcatgttttgtataaacgataaaaattaaagtattaaaagttttatactgatgacaaaaaaaaaaagaaaaagagaaagagaaaagataccaatggttattgctggtctaatcctcgatttgatatttaaccggtttaaagtaaaaacttaaaaaccggaaatcgattagggcagttcactggtgcatgggtttgtggaagagaagttgtgcggctgttatatatatcagagaagcgccttcaacaaccgcctcttagggcgtataaaatcagaaacagaaacgagacaagaattaattctctcgtccaaatttcttctgggcagaaaccaacatttatccttatccgattcttctagggtttcggaagatctaaccagaaccttcgcaacaaggtaagcattcaagcaatttactgaggatttaagaaaaccctgtttcttctaaatcgtggattgaacgagaaaccttagtttccatcgctggttacatttttttgagaaggactcttctgattttgtgttgcttttcagatg

SEQ ID NO: 27966 - DNA, 3003 bp, Unknown
  misc_feature (1)..( 3003): 2750-1469P.txt file - cDNA_ID_2993213; gDNA_ID_1972177; Annot_ID_180043
actaccggattggtgcaatcttcaaacgcgttatatccattactagaaggtaagggaggtgttaatcaaggtgattctcaacagaagagtagtgattattccaatcagctaatgtttaagcccttgatggatttttcttcaggcggggttagcgccacgcaaacaagaaatgtgaaggcggaagagaatgatcaggatcggggtagggatggggatggagtgaataacttatcaagaaactttttgggtaatatcaacataaactcaggcaggaacgaggaatacacatcatggggaggtaacagttcttggaccggtttcacctccaacaactcaacaggccatctctcattctaagtactcagcactagctattcttgatgattcttttgttggttggggtgtacattggtgcttgtcatgcgagttattgctgaggaagatcaaaccatgcagctatatccaaaggctaattttgaggctcaaaggaaaggtatggttataaaactatctttttgatcttttaaaagatcttcaaagtgtgagtatgtttattggttggcttctggtgatatttatgttttattagaatttggtcttatatattggctatatatagaggtgtgggtgatatgtatgaattcaagagttgatgttggaaacttttttgtgtgttcattgaataatcatcgaattctcaatttcttggagacccattatgagacattgagacatctatagaacatatatgtaatgtatattaaacgtacttaagtcgaattttatgaccaaagtaaataaattatgccgaatgtacatgctaatatcgagtttaaactattttttccaatataacaactattttctctttcgtccaacttatatactcttattctgattcttattttcttctttttaattcctttttcctttcccaagacacaaaaaaaaaaaaatacagaaacgaaaaaaagagattttaaaaattcataacccacgagaattatgcacctaaattcagactaatcccccaaatttcagaaatttatgtatttttgcgatttaatattgtgttcacaatcataatggccaactaactaattgaaaagacaatggaatgactgaaaccatgcataatctctcaagtctcaacctatgaagaatcatgtaaccaatagactatcatcatgattagttaatgcatgatctataatgtattctttgaacatagatatgtcatttatctggatataaagatggcgttttaacctactttgcaatttttgttatatctttcttctaatacatatgatcaatacacttttgtttttaaaagaaattaaaaacttatttcaaacatcgatcacaacatgacatagggtgaatctacacctaaattgactacagtagttagatatatatacttcaaattttaaatatagtgatgtacgtatgtaattggtacttcatattattattatgatgtatgtaattggtacctatattttggaacagaacaaaaaaagaagacactaaacgagctaaagaacaatggaaatttcagttataaggaattgtgggataagggacaaattaaactaacgtaagactagcgcgcaggtctatatatgtgtcaaaagcacggacttatataggtacatacatgagatacaccccccatacacacttatacaacacattcatgaagagagtcatatttcattttcttttaacgtattttttgggccaatccattttgttttcgctattattcggattctatatttctagctccctattaatatgaaattcattaatcaataaaaacgttatttgtaaagatagaaacgttttcgaggaatttctcccgcgacatcaagtttacatattgcggtatcaatacacattttctgaaaatagagaaatgaatttttatcaaaagctgaaagaaacagaagttttttattgctaattacaaactgatttataagcgttaaaagtgaaccgaatttgagtgtgagtggtagcctaatgagtggtgatctccaagggattgtggaatctggacctttaggatctgcttttgcaaaaaccaatgccctcaaaagaaagcgtttatttcccaaaatcatatcactctcttccccattagcattagagttaagagaagcatatgtttaagtctcgtcctcaatacatatcaacgcaactttaggcccaaaggtcatctttcaattagtgcaacttctttttttccttgctctattctgtttttgaatgtacgtttttcatattacggtctatccgaaatagtcgctcacgttcttccacatgccctcaaaccatgacctcactatcttctttttcacatgataattttatgagatattacctttctctaatgaataaactttattctaattcacttttgattcttttccttaaaccaagtgcgatcggtttctgaattattttattggaaatttggcaaagatagagctttgttttgggcttgtttccatatgatctctagtgttcttgggctccttccaagattaggcaagtccagtctcctgctcatgtagtagttggatatatctcttctctgggatacatacctaatcggttttgatcttttgttggagattgttcgggtccggtcttcggcttcttcttttgtatgtaaccaaaccgaaattgaaattgtacatctctctctctctaactggtatattggatattttcctctaattcattatttccattgacaagatttttcccttaatatgaacaaacatattccattttagctttaaatcacaaaaaaaagagataaatttctcaaaagaaattataagtagacaccgccctttttataaacaaccctaaaagtagtaaaaataatatcgagacgagacgggtttgtttcttctctctatctctatatctaccaaaatcctttgccccccgaatctagttctctcgatcgaccctgtgacgatg

SEQ ID NO: 27967 - DNA, 3000 bp, Unknown; identical to SEQ ID NO: 3647
  misc_feature (1)..( 3000): 2750-1469P.txt file - cDNA_ID_2993217; gDNA_ID_1620654; Annot_ID_47805

SEQ ID NO: 27968 - DNA, 3003 bp, Unknown
  misc_feature (1)..( 3003): 2750-1469P.txt file - cDNA_ID_2993224; gDNA_ID_1620714; Annot_ID_165568
atggattaggattagcttatattattgtaagaaaatattattactttttctaaagtacattttttgtatttcatgagaaaattataaattcaattccttcttcactaagagatggaaaaatggcttgtaggtcaacaaatttttgttatttctttaatgtcttgtctctttctaaccaaaagcatacaagaggtggtctcatgatttcaaatttaaattttcattattggatacactttgacaaaagccccacttcttttctgtaaaaagttgaaatgaagattcattattggtgtatcataatattattcagaacatccacaagcgaaacgtgtcttcatattttgatcggaactttcgtattaatgccgcagtagtaagaaacaaaaataaaatttgatcacttagacaaaaatgagttcgctacatacgctttagttatagtcatcactcatcatgtatatctaaaataacaatttaaaaaaatgtaagaatttgactcaaaaaaataaaaagggaacaaagtccgacctgccggaatcgaaccagcgacctaaagattacagcaactactacagtcttccgctctaccaactgagctaaggtcggataattattagtatactcacactatagaaatatagcgcttatactttaatatgggcccctaatgggcttgattagaaggcaaattatatgcgtcagcacaatttgaaaagaaccaaattagtcaagtgatgatggagttcgaccctaattaggactcccataaacaaaaatccagctagcggactacatacatcgttaaaagactattggcttgatagttgatactgaacaacaatatgaatttttaatttatttattttttgattaaaacttatatattaatatttaaagacccatccctaatatgctattttatgatgctgctaacttatttaaactaaccaatttagactaatggatgaacaccaagaatttggacttggaccacaaaacaatgcatagtatatttggattcttgattaatcaataaatttgaagttacatgcatgatgattatttatttttcgtcacatgcatgatgattaattaagatggcaaactccacgtgattaattaagaacttggtgcgtcataaatttttttaaaaaatatcaggggtgattcgactaacaaaatacgacgaaccagacatgttttgtttttttttacatttggaatttcgaagttaacttttaagaacccacttgataaatcatatgtacaaattaatgagaaattgtagaatgccaataaaaattgtgatatccaagaaaactaagcaaaatatatttattttctaagcaaaacatgtacactttttgagcaaaatatgttgaaacagcagccaagcgtaggactttgatttcagctgatggagaaggaaattcaaagtcatatccaatttattatgattatcacataattttagctgtaggattttcagataaaattttaccgaaattctcggcatataaattttttagaaatctacaatctgttgtaaagattttataaatacttatctgaccaagtcactagctcgtcaaggagatttcctcttcatattcattttcaaagacaagtgttttgttttctcatcgccacctaagatgtagataaaacaacatattttatttattttttctaaaaccgcgtacaacatgacatgcctagggagttctaacaatgggaaatgagcattcatgggggatggttgaagacattcctcctcattctcctacatgtgatgagatgtgcatcaatggtattttgtattatggagcttttattgacacaaattctaactgaacctgcaatcatgagttttgatgttaggtctgaaaagtttcttcttatcaagggactcgtcaatgccggtgttaactttcttacttcttaagagctaagaagatcttatgaggggcagctagctgtacttttttttgaaaattgagttatttgtatgtttgccttgtgggttttagaagatgttgtgaatgaggaatggtcatacatgagttttgatttctctagtttagctgggttgacaagagacttggaacttcaactgtttagtgcagccaacgcatgaaaagttgtttacgcaccattttgtgtgtatgcattgacatatcatgttgtttattatgatccaaaaaatgaatttacttttgaaaatttgagagagaaagaattatagaaaaacttgttcctaaaaactctcaacctagattgaataagtattattttccacttttagcaaaacacacttacaaattgaaacatcttaggtggataagaaaccaaacaaatagtcacaaaaatatcaaacaaattttttaagaataaaaagactacttttatgtaaatagacgttagactcaattaaaataaagggaagacacaaatttatatggatttcaactttcaataacgttaaatgtgatatgatatgctcatggcaactaggatcagaattccagttgtggcaaccacacaaatttctgagcttcgcagaatccgaatcggtgtttcacctcgtaacttagtcttgaacgcctagaagcaaaccaaatcaatttaagttgtaatattatatttattttgtgtagattgctttaatctgtgtatcttgtaatctttatatttctgtcaaaaaaaaaaaaatagtactatttaaccttttactaaaaaatgaaaatgtgatatgggaaatttcaattgtaatattactattgtagagaaagaagtcagaaattcaaaagaaaaaccaacgtaatgcccaacttaataaacatgggctttgtttttgaaagaggcccgtatagatattgacctcaaacttagggaaaccctaatataagagcaaaccctagcagcgctatctccctcagcctcatctttcacccactactattcgccgttcgcttttccctcgccgtcgaaatcaacatg

SEQ ID NO: 27969 - DNA, 3003 bp, Unknown
  misc_feature (1)..( 3003): 2750-1469P.txt file - cDNA_ID_2993228; gDNA_ID_1971974; Annot_ID_58718
tgttgaggaggaagacagtgttgctgctcatctctgatctcaacatactacaagatgagctatcgattttcgagcaaatctacacagagtcaaggaggaacttggttggggtcgatggtaagagtcatatgccttacgaggttgtgtgggttccagtagtggatcctattgaagattttgaaagatctccgattttacagaagaaatttgaggatctccgtgaccctatgccatggtatctaacacatttatttcaaaacacacattctagtagttgtaaagaaagatggagaaatataattggaagttatttttttttgtgggggtcaggtattcagtggatagcccgaagctgatagagagacatgtggtggagtttatgagagggagatggcattttatgaacaagccgatacttgtggtgattgatccacaaggcaacgaggctagcctcaatgcgcttcatatgatctggatttggggcactgaagctttccctttcactagatctcgtgaggaagagctctggaggagagagaccttttcccttaacctcatcgtcgacggcatcgactctgtcattttcaactgggtatttcaaaagtctcatccttttttctttttatgattggcctggaaactctagaaacagagcaggcagggtttgacctaaattacattcattcaagaacgaggcgtgattaatgaacaatgatgggtctgatttgcagataaaaccggataattacattttcctgtacggaggagatgacttggactggataaggagattcacaatggcggccaaagcaacggccaaagattccaacgtgaaccttgagatggcttacgtcggaaaacgaaaccatagccacagggaacagatcaggcgtatcagtgaagtaatcaggtctgaaaacctgagccatagctgggccgaacctgccttgatgtggttcttctggactaggctcgagagcatgttgtactccaagattcaactcggtaaagccgatgatcacgacgatgtaagagttgactagctagggttttcaattatttcggttcggttcggttcaattggttaatgaatgattttgtgtgtttgaaaacgttgattaggtgatgcaaggaatcaaaaagatactaagctacgacaagcttggaggatgggcactactgagcaaaggacctgagatagtgatgatcgctcacggtgccatagagaggactatgagtgtttacgaccggacctggaaaacccacgtcccgaccaaaggctacaccaaagcaatgtccgaccaccaccacgatgaggtcctccgtgaaaccggaaaaccttgcggccactttgatttccacatcactgctcggagcggtcggattccggagaagatgaattgcttcgagtgtcagcgtccgatggagaagtacatgagcttctcttgttgtcacgatgaaaagctccacgaagacgagaactacaacttctaaatgatgcaataagctcacgtctcttcccgctgctttttctttttgttttacgtaatttgaattctctatatagtttttcataaataatttctgaatttcaatatctttgtatgagagagaattggtcattccatgtgtgtggtttggcctttgtgggacatgttcgattgaagtattcctaataattttcaataattaacaatttcttctcttaatagcatagataaatgttgaatttattttgttaataaaattaaccctgatgaatacaacaattttgaatatgtcaaattagaccaattcaaaatataactatttgctttctttcttctcataatgtttatatatcccactttagtaaatggacccccacgaagcacaccacagcatactcttttttattctttccagtttctaatggtttacttatatactcttatcattttctaattgatcaatttgtcatttattggcttatcttcttataaatgttttttgtgttagttgttgatatctcattttcttgtccagtgaattatagcatttcaatgtgtccctcatgtcgtcaatataatgttttattttccttgttatgatccatatcttcatgtgtggtccatcttcaaataaagaatggattgttactactcttatcgtttgggctagtttttataattagacacaaaatttgtaactttcattctttttttagtatttaacacaaagtaatttgatggattagtctaaataataaaggcaaaaagttaagtaaatgtcaaaagagatatggcatatgtctaatcataaccaatgaattgcatggttctatctaaatagcaaccatatcatcccacatgccattgtccaccttgtctatcttaggaaaacactttgtttgtaactctattgtactctttgaattatgaaatctatgtaaacccttcttattgtgggggacaaaggctaattttaatggtctgtccacttctgcttgactttgatacataaattaggggtggctcatgtcatatctatgagaattaggtacaaaagagttttcaaatgagcaagttgtatttttattcgattagccgtcgtattatgtcaaatataagttaaaaatatgtaaaagtacaaaatgtagattatgatattagggatgaattgagataaaattacctataatttattactacgcataataaataatttgttacgttaattctcatagatacgttatagccaataccgaacccctatttaagtcaaaagtacttctaagtattttttagcgtaaatcaatttttatgaaaagcaacaattaagattaatgtagtaatctagtaatcgttaaaaaagccactttgttagtattgcttaatactctctctctctctctgttcccaaggagatgaaaagcttcaatctcaaaacatagcagctctctcaataaaccaaacccaaatgcaagctgtgtagagagaaacggagtgaggaaggaaggagatg

SEQ ID NO: 27970 - DNA, 3003 bp, Unknown
  misc_feature (1)..( 3003): 2750-1469P.txt file - cDNA_ID_2993234; gDNA_ID_1621124; Annot_ID_56328
cggctgaaacttatgtctttttttggcgaagtagaactgtaacacaaacaaccaaaggttcgaaactgctcataaacaggaactgtaccagtgagaatctcatatggagtcttgtttgataagagctgggaaggtgtcctgttgataagaaacacagccgttaacacacaatcaccccaaagagagagtggtacctgagattggaacatgagagcccgagaaacattgagtatgtgttgatgtttacgctcaaccactaaattctgctccggtgtttcaggacaggaatgaaacgaaacaatccctttctgctgatataaacttgtgaatttcaattctggtgcattatctgatctcactgcctttactctcactttatactgattctcaacttgttcaatgaaagcaggaaacacagtaagaacttctgacttgtttctaagcaaataaatccatgtagctctggaatgatcatccacaattgtcaaaaaatatttatagccatccactgtctcaactgaaaaaggaccccaaatgtcaatgtgtaacaaatcaaagatttcattacaaactttattctgagaagggaagggtaactttctctgtttagctaaatgacaaacatgacaataatctgagcctttattcttaggcttagtagtccccaaagagtctgaaataacatccaatctctgtagagaagcatgaccaagtcttcgatgccacatactgatatcaaccactgcattcactgagacaataggatcttcaatatccagcacatatagattcgcaattctcctaccttgaccaagcatccgagccttgataggatcctgaatttcacaagaagtcttatcaaatattactcgtgaaccaatgtcatcagtcagagaacttatactgattagattcaggcgaaactcaggaatgaataagatattcttgagaagaatgtcatcattaagtcgcaatgtaccaacaccactgattcttacagtaggaccagctggtaaattcactgcactcacaacagaagtatccaaattcaagaaaagactcttatcatgagatacatgatgtattgctcctgaatctatcacctgagacttgtcaccacctttgcctttaggagtaaaaccaagagggaatccatgctttttatagcatctttctgcaatatgtccaaccctattacagaaagaacaaatcggtctgcccttgtttggaccactctgaacatagcatattcacatcattgttagtagccatcattgcctcagagacctgaaaagcagccggtggagcaaccacattggaaaaaccttgttgactgttgtcttgatccagaatgtgatacacctctgctaaacttgggagtgctttcttagcaatgatctgtctgcgaatgatagcataagaatcattcaaaccagctaacaatttcactatcttagcttgctctgccttctgttgcaaacgcatagccttaccacaaatacagggatcatctagttcctctgtactttctaattgatcccacaatgtcttgaggcgagtatagtactcagacaaagacaatgtaccttggcgaaaatcctggatctcttgagtaagattatatgtgcgtgggagattagtcacattgaaacgactgtgaagatcacgccatatatcagaagcatcattcatacggagaatgctcctatagatctgaggagatacagaattcaataaccaagacttcaccatgcttttgcatctagaccaaagacgaaaattcttatccgattccaacggacgagggagagttccatcaataaatccagatttattcttagcatctaaggagataagcatagcaacattccaatcaccatagtttgtttcatcaagacgatgagatatgatattcaaacctggatgatctgcactatgcaagaagaagggagactgagtcggatcaacggattccggtggtgcgatgactcgcgaagctccagaaacgttggatttgtgaactggaggagagatcggaggagattcatcaacaccggtggatcgcgatgattttcgagctgcagaacttgtaccggacttcgatcgagtggatttccgagtaactctagctgtcaccattgtatctggagcgagaacaacgaagaagacgaacttgagctgagaatgaagaaatcagatcgaaaacaatggagttttgagcttggaaggctttgataccatattagcggaatagagatgagagaaaagtttgttgaagatattatgaaggcttttctcattaattgtaaaatgattctgtacaaatgtcttatatactttacactatacaatggttctactaaaccaacttatatcaactaaaccaatatacatatctgatatgaataaatcgatgacataacaacgatttttgtttttgggtaactctttcaaaacactgcataaacaaaaaaaaaactattatatgcattaagtagtccaaaaaaatacgtataaaacatatcattgtgaaacatgattagattttttaggtgttaagtagtgaataacataaactttgaataataaaatttgaattactcaaaaaaaattcaatagataaatcaaaatacattattcttgaaaaccataataatcaaaaaatgaaaatatatgtaatttcaatctcctttaataaatttcagatgacaataaaaaataagtcactaaattcagttcattttacaacaaagataactctcattttggtgcaacaatatgaaaactagctctcaagaaattgaacaaaaacttttacggcccaataacgacccaaatcaaaacccactaagagttttgttgattccatcagagtttcagactttcagagatcagaaacctcttcttcttcttcaatttcacagcttcacgtcgtcgtctttgagtcgccggagctgtagctactgatttggtaccagaaagagagtgcgacggtggacgatg

SEQ ID NO: 27971 - DNA, 3003 bp, Unknown; identical to SEQ ID NO: 27970
  misc_feature (1)..( 3003): 2750-1469P.txt file - cDNA_ID_2993234; gDNA_ID_1621124; Annot_ID_172174

SEQ ID NO: 27972 - DNA, 3003 bp, Unknown
  misc_feature (1)..( 3003): 2750-1469P.txt file - cDNA_ID_2993281; gDNA_ID_2926134; Annot_ID_138842
acatgtaattacctacaaagaattttgaaatgaaaattgttcttattgaataatgaagatgaattaagctaagtttgtagaattgatatgcgaattggaaactggagaaagagaacagatacattcgaatttttatccttttttaaaaacattacgttggataattttagtaagatttagattcttcgaggaggctattgacttagggaacacgtaaccgagaaggttaatatgggctaagcccaagtgagttctatttaatacgttcattaaatgatataaatactaaacaaattctctacaaaacaatcactttaattatctctctttttcttcatccgtttctattgataaagttatgaagtttctcgtcgagaatctgaatggttcatcattcgaacttgaggttgattacagggatacactgttagtggtcaaacaaaagatcgagaggtctcaacatattcctgtttccaaacaaacccttatcgtcgacggcattgttattcttcgagaggatcttactgtcgaacaatgccagatcgtccccacttctgatatccaactcgaagtctcatctgacgatgataaccctaatcacaacgactgcgatcaaaagccgcaaaccgagcaatctccagcactaccattggtttcagcggaagagtactttgagagacaagattggcctttgacagcagaagagctgagacagatttatagttatcggcctgagcatgaaggttgagagcaaccacaacgatgatcaaaccgagcaatatccaccgtcgtcgttgcgaagatgaggcttgacgagatctttggaaacttttcattattatctttggaaatttttcattattatcttcaatgtgtttactattttttttaagttagtttagataattatagattatttacattttacctaaggttttggtttctattttcttaataaatagctcattatttcccattatttcatgaagttatttgtttagttgagattttataaaaagggataataaactaataagcatactagattgtaactcgtgttggtagtagaattttaatttttaaatatttatttaaagttggatcattgtttgttttataatacagctttaatcaatccatacataatacaaaacaaagaaacttagaccatgcacatagttggtattcataaagtatcataacattttttactattaattttaatgtttatttattgtttgagaatttttataatactgataataaatctgttttcagtgatgagatccgtaatgatatcattgaaaaaaaatatttgcaaaatcgaaaatacctgctagcatcggccactacaacgataccggagacagtccgattgaagagaacagttaaaagagaagcgcctccgacgtagatataaaggagtgtgagagaatttgcgattaaggttccaagggatctgaatttggaagatgattctcgttttcattgaaaaagaatcgtatcaagatgcactgaagaggagagaagagaagagcaaatgattttttttttctctcctttcccacaaaaacgcgttgccgactaatcacaagccgccaaatcatcaaaaactagtatcagaagtatctctccagtgatacgacttaggcccaaatcagttgttttacccattaatttaatgttttttgggtttctgatactcataaaaatcctactatgtacatggtcttacccttattccattgtcggtgaaatccttcagggtttatgcttttccagtgctaaaatcgcatttcaacgaaaccgaatccctaatgaatgaaatcgcatttcaacaagtagaaaaaagtgataagactagggctttttattcaaaatctcggttttgtttaaattcgaaccaaatccgaccggtttacttaattaaaccaaattgttaaccatctctcagaagcaaacccctaatggcctaatccgatgatcgacctagttctcaatgtacttgaagattttatattgccttctactcacaatattatgcataaccctattataaagatgatcaatgtttatatacagctacaaactttttcattctcacttagtctcattgtattatcaatcaacgatatagctctataccatattgaactccgatgatcggggctataatcggagaagagagagatgtaacaaacgtttattatcaactcaaaatattgttacaaagcttaaactaaaattagttacattcacatcttatatactattcacattaatcttaaaccgaaatctagttaactggagttaaccaaattaaaccagtccatctatcccaataattcattcattcatacaattttatgtacaaggttaccaaaagaatcaaagagaaaacacttggcttaagtaagagtataacaataaacagacaattaaagaagaatcatatgcatatataatttcaccatgtgatattgaattatataaaaagaaattttcacagaagtggacgaaaaaagatttgctctcaccgtttgtcaaagtgagaactggttttcacgttttgtcttttcattcaatttcggaccaaattaccctgggaaaacttaataatggcacaaaccaaaccgtgcagcagttcgtatcggttaagttgacggcgtaaaccaaaccctacagcagttggtttcggtttagttgatgcggttcagttttgaaaaagacaaaaaaaaaaactgaaacgaagaaacccgagaaaacgaaaaagagaagagagtaacggagagatttgagagagaatcagaaagcgaaacgaaattcagtatccattgcttcaaaattcgacataacttcgaattgttggatagttgaattgagccactgaactcccacatccggggaagtgaaagttactgtttttctcggcgaagccaagagaaagttactgtttattccggcgaaatttgaacctccggcgagatagcatctttagctatg

SEQ ID NO: 27973 - DNA, 239 bp, Unknown; identical to SEQ ID NO: 14882
  misc_feature (1)..( 239): 2750-1469P.txt file - cDNA_ID_2993295; gDNA_ID_2684231; Annot_ID_137625

SEQ ID NO: 27974 - DNA, 3003 bp, Unknown
  misc_feature (1)..( 3003): 2750-1469P.txt file - cDNA_ID_2993303; gDNA_ID_1971785; Annot_ID_57986
atgtttttttctcttttggaagagaagggtaaaatagtaatatcgtgaagatgatgggtgaatattcggaggatcagattcgattataggttcgcatctctttgtatgggctggaactgacgtcactattccaatctctttagcttttttttttcagataagaacgaaaactcaaccatttttcttctcccctaattaagattccagagttttgttttccaacgattgttttatccttcatttaacttaactatcatctaatagaaatgattttctgtgtttctatatgggcaaatctattcattaaatggagattttatgatttagaatttcaaatttaaagatttggtttttattatgcgtcttttccaaaaatcataaaaattgacgttcacctaacaaatatgcgtttcattaaataaattaaaatactactactatctcataaggaaaaattatgtttaaaactttcaatgacaataaatcatatcattagtgatatcttaattccaactccaaacgttaatcattcacaatttatgtaacctaccactcgactacgtttttacagatatttagaacgaatattaaaatttgaattggaaatgagctaatttggtgaaggaatattctaggggaggaaaaaaaaaaaaaaaaatagaaagaagaatcttttggaaggaagtgtgagaatcacatttgcccacgccgcgtattaattatttacatatccgacctttcatattcctcaagagccaatttgctaaatgttcacgcgcatagagcgcgtacccacgtgaccaaatattcaattgatgcaaccagattctctgcttttgtcatattcatttatcttattggtttcgtcgttatctttttaagaaaaacaaacggttctttggtggttcgattccttgataggatgagttaatgcatatgaatatgataatagtatttttgtgttttttagatacagcaagattttggactaatttcattcacaataatcaccattaggatcatcaaaattttattttatgggtctacttatgtatgattgatgaaactatttgaaggtcgattgaaatgatcaactgttttcttgtagatggaaagttacaacatgcttattgctttaatcatcatcataataggcaaatatcagattcattccacatgttcttaatcaaatctgttttaagaaaaaacatctaaatctacacatagaactttgttgtctcaatctgatggagctaatacatgtttggtctttatgtgggaggtgtgggacatatagatttaaacgagattggctccatcaattcttacctttattattagcacatgataaaatttgtttccatgggaaaagaaaacaaacaatgtctaagttgtagtattatgaatgtttgaagatgcaagtaagatctccaagactccaacacatgtattggagttctcttcataatagctattgcatagccacaattaaacaacaaagttaagagtgtcaattagagctaaaaagagacggttaatcagttaatgcaataattgtcaattggcaatgcacaaaaataaaacatatgactctgagtccaagggaaactaccaagaacatggaagttaagagttttttcaatgggagtttctaaacaaaattcttgatatataataaaaatattatattgtttaaatattagtttggtttcttaaatttgaagaaacttagtccaattgtttcttaactaagagtcaattgaactaagtttcttcaaatgtaagaacctcatcattaaaatatattatttatctatatttacacttgattctattttaaaaactcactagattttaacccgcggtacaccgcagaaataatttattttttaaagttagtatacataaaagtttgcaaattgtatctatctataaaatatttttattttatagtttacaattgttattaaataacatcctgccaaacccgtcccgtcaacccgtcccgtaaaaaaactatttattttattaatgttgatcttatttatgatatgtttatgaattattgtctaaatattttgtaattttgtggtaattaaatgctatcaaatatctctgcggtttgatgattataattgaattgttatagtcatgccgaaaagcaaaaatatcaaaaatgataattttgtagtaattaaatgatattaaatattttggaagttttattttagtaattaattgtgtagttaaggtagaaagattttgggaagattattaaatgtcaaatatttaattagaagattttctttctaattatcaaaaacaattattaaatatcagtggcagcaaatgtaaataaatctcaactccaagatttatttcacaaagtggctggatttaagaaacttccgttgaaaatggtttaagaaaataggctccggtttctattccagttaccaacctaaccttagcctctctaaaacatcgtcactgaagctagattgtgcaggataccgagacaacgaacatttacaaattacaatagaaagaagtaaagaacatttacatttttatatatagaaatgacaaaaccaactaaaaataaaaaaaaaagtataaaccgtagatcatacatacacacattgaaccggttctaaccaagactaacaaattatagcttaacaagacttacggacggttcaagtgttaaacaaccctaaaacggtaggtccaccttcaacgtatcggtcccagaggccagagcaactaaaccagaaatagattatttatttataggttcgaattttggttcggtaaaccgggacaatcagacaaaaaggtttaagcctttaaggctaaaacgtagcgttttgaatcggaggcaacgtaaaattccgtaaaccaccaatttctgaatttttcaaccttattcttatgattaaaattgttcggtcctgattatctctgtgtttttgggaactgagaagcatccactcgacaatg

SEQ ID NO: 27975 - DNA, 3003 bp, Unknown; identical to SEQ ID NO: 27974
  misc_feature (1)..( 3003): 2750-1469P.txt file - cDNA_ID_2993303; gDNA_ID_1971785; Annot_ID_175443

SEQ ID NO: 27976 - DNA, 3000 bp, Unknown
  misc_feature (1)..( 3000): 2750-1469P.txt file - cDNA_ID_2993306; gDNA_ID_1971801; Annot_ID_58075
ggcgtgcgcttcaacagtcgaaataggcactcgtacgtttttattttatctatctccctactctcactcacatctggaccctccttgctcctcttttaccttctttaccggttttaccattgaatcaacgttttctccccttttaacattacaactttctttggaaattgatttgtttatggaaagacagagataaatgggtcataaccactattactataaatgctcgagtttacaatttcatatcttccagaaagatttgttgattttctggtaaagaaagattcgctgtatatttttacaagtatgcgtgcatgctgtgctggcacagaatatcgatttcgttagatcaataccacaacacatttatgatttttggtaaaaatccatcacacaaaagccttgatctagaagactagaacccacaaaattaatcatattaacatgaaatctatatatagtcaaccattattggatagaatctaagatatttgaactttggttctcaatttacatagtaaatctatccaaccactatgaagtggtcgttacaagtgagctttaatttgattattctttatatatttcaatttttaaaagatatattaaaaataacaaattcggatggagacgtacgatgagtggggtgaaggaaataaatgagagatagagatagaaaggaagaattatcaatataaatgctatcataaatacagcaaaccccattctctcttcttcttcgacaaacaccaagacaaacgtaagcacaagcacgagtgagtgagagatgtttgccgtggagaatgggttgcagggagacccgagattaaaggccatctccgacgccattcgtgtcattcctcacttccccaagactggtccatttttctcttctttgcctttagtttttcttttagcttacaaactaactaagcttagagtgtgtttgtgttgcagggatcatgtttcaggacataacaacgttgttgctggatccagttgcctttaaacatgtcgtcgacatcttcgttgatcgttacaagcacatgaacatctctctcgtcgccggttcctttcactttcctttctttaaactttctcatgattattagatgccttcttttatagtttaagtcgctatttaattagtctttgccaaatacgacacacacgaacaaaaccggctaattattgatttagcttgaaaggcaacacatttctttatttattcttgattaatttacgatatccttaagagaagcattcagcttggaaggcaacgcacatatagattattaaatttataatatacgacatatagaatccgaagcgtaattatatcagccaatatgaaaagattgaataaacaaatagacaacttttatggattaatgattttacactcacatactagtttgtctagtgtggttggtgactagttacttatccctttactctttattattgtcgttagtctgtctcttgttttttcttttgtcttttagtgaacctttttggaacataattagaaatgtctaagaaatactaaaaacatagattgatgtatgcaggagtagaggcgagaggattcatatttggacctcccatcgcgttagccataggtgccaagttcgttccactacgcaaaccgggaaaactacccggtacgattagtaatatacatacatatcacttctcagacaaaaacgtacattttgatggaatagaaaaagtgttattgaaggatactattgattgtgatgttaaaaaagggagagtgataagcgaagagtacgaacttgagtatggaagagattgtctagagatgagtgtagaagccgtcaaatcggaggaacgagctctcatcatcgacgatttagttgccactggtgggacactctctgcttccattaacctcttgggtaaataatatctttctactttcattagctagaaaatgaatgctacatgctaaacaagatgatttatatatttacgcttaagaagttgtatattatatctgagtataattattgaactaaaagtgagtctcttctatgcactttagagcgtgccggggccgaagttgtagagtgtgcatgcgttgttggtttgcctaagtttaaggtactatatgacctactttgttcgtttgcataagttgaaggtcttttaaattcgcgtcaataatattttgggctttaatgggcgctataggcccatacatttgaagataataaaataactcattgtctacgatatgtaggggcagtgtaagctgaagggaaagcctttgtacgttctggtggaaccaaaccagtttgatgaattaaccttataaaagccttttctattcaacgattatgacaaataatgtaatcggtttaatcgattttgtaactaaggatttgtttgttttctattggctccatgtggaatgattcatgctagttactatgaaattcggaatacgaaggtatgcagtattatgcaccactgttcttcagatgaatgaattcaagtcgattttctagtgatttacatggcagaatttataaataatatacatcatattgtttgttagataactttactaagggggcaaaaaaggaattatcagataaacaaaatatttgaaaaaagaaaaaaacgttggcagggagtttcacgcgcaacgcaacgcgcccatgtgattaacaaaagtacgagaaagcccctgccgcttaaagatctgtatataaaaagggtaaaataaggtctcctggcctggcctttaagataaagaaaaggaaacccaatcgaaaacctaaaacccgattagattttcttagatacgaaacctctcttacgacgctccttcctcaatctctctcgatcgtcggagattctttcttcaagagtcatcttcttcttcttctccttctccctaaaccctaatttatcgcgtttggatcgaatcagctgtcaattcttgttttggttttcacggccagggccatg

SEQ ID NO: 27977 - DNA, 3000 bp, Unknown; identical to SEQ ID NO: 27976
  misc_feature (1)..( 3000): 2750-1469P.txt file - cDNA_ID_2993306; gDNA_ID_1971801; Annot_ID_175693

SEQ ID NO: 27978 - DNA, 3003 bp, Unknown
  misc_feature (1)..( 3003): 2750-1469P.txt file - cDNA_ID_2993312; gDNA_ID_1621124; Annot_ID_56344
cgacgaagaccgaagcgtcacttaacgcctagctagaatcctacaaaaaagcaacacaaacataatttatttataactaattaacaataaaataaacactatagtgagccacttgaaccatgaacttcaacgaccaacagcaacacaaacttgtggacaagaataatttatttatatgtaatatgtggacgtgaattatttgttgaacctccaagactagtgataagaacattttactagtaattctgaccttaagaagttcatttcaccacaaacgacataaaatctaatataatttggttaaatgtaacatacagtatgtaactatgggttaggaatggtttacgcttaccaaaccaatttagtcaactgacagttctgtgaggtttattcccaataacttcactagaaccactcatttctcactagaaattcttttgttgcgggctataaaagggataatgctagagaaattaaagcacatatacaagaacaaaaataattctataaagaataaaacgtttagagtaagtaagcttgtagaagtaaacaaaaaaggttggtaatttccgccacctgaattcgagtagcattagccatcagagttcgagtaaaacgtttagagtaagtaagcttgtaaaagtaaatagaaagggaggtaattccgccatctaagttcgagtagcattggccatcagagttcgagtaatttaacatggtttctccagacttcaaaattagtctttagagcatggtcataggtgatactcataaagtatcattaagaactttttagtattatttataatgtttgtttaataaatatattttatttctttttagcaaatgcgacaaattaagagatgacatgtcagatgatactggtatcaaaaatatcactaagctgatactgatcaaacttattttaattatttatcaatataaaaataatttttggacttatgatattttagaaatattacccgtatatatggtattaggtatataaaatttttacgatcacctaaattataaaaagaaaaaacaaaacaaaacaaaaagtaaaccgaaaagggtcttgaacggtaaaaattatctctttccttgccttaaggtccaattccagattaaatccgagccaaaatccatcacaaaactggattaattaaggcatgtgctcgatttagcgtttctgaattaaactcttacgtgtatgatatttggatgtgtatataatgtctggggtgagtaaaggaaaccgaagttgaaaaaacaaacaaacttgacaaaagttaattagtttaatggttaaatcatgaaatgtcaccaccgaccacttgatctcccatgctgtagttgaagaagtttgcctcagaccactttagtagcatacaaaaaagaaaataaataagagggtgttattcagttatggatttttctagaattgaaatgcaacactaaaataaacttttaactcaaccgatccatatatgtagatgagttcaaaaccaacaaaaactaaaaaaaaaactatagataaattggtcgcatattaaaagattaaaaaaacatggtgaattaagtatttatctacaaattatactaaatacaacattttttatgttcaaaaaaaattggactgtcattttatctgttatatatatcggaaccacgatatgtaaaaatttaataaaatatcaatttatttttaaattatactttttcttaaaataaaataatcaatcatgaattattctattctcggagtctaaaaaagtaaaatttaaaacaatttaatttatgtagaataatgttttgtatgaaactaattttgttgtctataattaacaagatcgtttatgtttgcaaaaacaaaggaaattttttttttttttttttttaatatctcgaagttcaagccgaaaggcctacatctccgagatgcaggatccacaccagattttcaacaatggaggaatataaaatatcaaaacgacattcatattaagctatgtattatttaagtttataattaatgattttagttaaccaaatacagttgatttatataaaatttggattatcctattgaaaattatgcatgtccaaaacttcttatgagatttatatgtataagtttatataagggtttatataattattaattattttttacataaaagcctaaccagagacaaacattttttttcttctaaataatctatcaattattaatttctagaggttaaactaatgtatatacataatgtgggtgtgaatttttgttggttttgttacattcgtttatttctgttttctttatttttttcagttaagctagattgctaaggaataaaatttgaaattagtttagctcatttaaacaaaatatcggttagattcagacagttcaacctattttgaaaatctattcagttttttttttttataaaatgaaaaatccgaagctcatttctcagtattatagtagagaagtgattttttttgtttaaattagtttagcataagcacacacaaaattgttttacattacatcacatgtgatgatgatgtggataagtgtatcgatcatccgccaatatttactgattactgtaatataaacattaaaatttcttcaaaaatcaaagattctattgtacctttctatttcctctagagatttcctaatgaagaaaaaaccagcaaagtcattatcaaattcgaccgtccattcgaagacgtacacgtctttgtagtcaacaccatttacctaacttcctagaaaaccacgtaacattgcatgtgcctagtttctcttatataaccccaatcaatatatatatatatgaatattgaagataacatcgttaaattgcttttaggttctcattatatcatttctctttaacttcgcaaacttctcctcgataaaatttctctctctaaaaaaaaacaattagaatcttgccttttacagagtaacactacatgccgacaatg

SEQ ID NO: 27979 - DNA, 3003 bp, Unknown; identical to SEQ ID NO: 27978
  misc_feature (1)..( 3003): 2750-1469P.txt file - cDNA_ID_2993312; gDNA_ID_1621124; Annot_ID_172201

SEQ ID NO: 27980 - DNA, 3000 bp, Unknown
  misc_feature (1)..( 3000): 2750-1469P.txt file - cDNA_ID_2993324; gDNA_ID_1621170; Annot_ID_57236
tacaagttcagtaaaagagtgtgtctttctttgatgaattggacgattacgcgaaaatattaaatgagctaaacgatcaatcgtcgttaccattattccagtttacgacatatctttactgcatgtaaatgtttcagttgatttccttgaatcaaaccttggagacgacatcttcatcatgatccagtgccataaatgtatataagtgtgatatatttatgattacattttgaggtatgtatataaatagatatatagtggataattcgaagtatttgtatttgtcgctggttactatattagctgaggcaccgacactcccaaacgttacaaaaatatcgaatagttggaacttggatcctatcgacattgtacgtcgtcgttttgtgctacgaagagacgtggttttgtttttagtttagttatgtgttgtttttgtctttgttatataaaactaaatgacaaaatttgcacacaagaaagaaaccaaaagattttagatcctctcgatcggacgtacgctagaaggttcttccgtaattttcatataaatgatctttatcgtgtcattgcaacgttaaattcgattgagacgtgtcaaattaatttcttctaactatgcggtgtcattatattacgaattagcaaaaaaagatgaaaaatgcatgtgagatctacctaagatactgttctaaaatatatacggttttcttgcgcgattagagatcaacatacgattagagatcggcgattaaagatttgctggaaaatgactcatatatatttcccaatcctcgcagataaaataaaacggcactttaccgttttctttagaagttagtcgaagacaagtattctaaaaattcaacaaaaacaagaaacgaaaagtaaactacaaaatgttagaaaagactcacatgaaacactcactgtgcctctctaatcaaatggaaaaaagtggagagtttaaacttataagtatagtatagatgatagaaatcttctaaaaacgatacccgtgaactaagttgatcctgtgatcttcataatccatacaatttcaacagaaaaatacttttttgtgttttaaaaaatactgcgaaaagctatataaatagtaagataaattggtttaaatccaaaggtatgataaaattctttctcaaaaacgtcatatttggttagtagtactcttaatcgagtggttcatcaaaatgtatcggtttatatatatcagatcttgaataatttgcaaaaactcaaaatttcttacaactaatagcaatatatcatgtatcatatagctaggtaaaagtaaaatcatacgttttaaaaaaactgtggtagggaattatatatgaagccgtttataatagcatgcatgtgcttaacatagcaaaaaaccatatgattagtatcggggtacatgaaagaaaagggcagataaagctagattaggatttgataacgtacgagaaaaaatcgagaaaaaatgtcaacccttggtgggagatttaggcgaattttctaatctatcttcctcttatttttttcttggtggccaataaaactagagtttttagagggtaacgaatccaaaccccacactcacatgcatcgaatccaatctgtttctccaacccattcattaccaaaacagcagataaattttataattcatcaagtctaccaatattaattatcttctcataatcataaacttggttctctttatccaatattatcttctcataatcataaacttgattctcaaacattattactaaatctatttttcttttccccttctaatattctttactttaacaatacaaatacaactccttttaagacttttttttatagtaaagagttatacataacatgtttggtaacatagtaaaatagctaatataatagaccttttctaaaaattgtcaaaatacaataagtgtaattggtggataacatgtctactttaaaaaactttttagagtattaaaattgtcgtcccataaactatataaatgatcatcataaatgtattacaataacagcatatcaagacttgacggttatcagccaaaatcattaaattttggaattagatgttaataatatacaagtgtcatgtcgatctcttgtttacatatccaaacatctctatgtgtgacgtgagttactacttactagaatatggagtaagataatatgggcttcctaaaaggcctatacagaaacaaagcccaacaacctaaaacccagtgtgaacgtgaaggacttgaaatattccaaagttgagtgactgatgaaacctttcacgtgacagtgacttgattttattcgtatacgggcaaagttcttccattactgcaaaaactcttctattaatgaccaacttttcataaaagaaagtacacgtgtctgtcattagattggtaggtacatggagactacactaaagtcattcacatgggattctttgacccattaggagccaaataaaaatcttctctttttagtcttttttttccatcttaattaaaattacgagatcacgctttcttttttagtacgagggatcagcatcttaattagatcacgaattaaaatcacatattttatacaaattgcgacttaaccggaatacctttagaccggataaattcttaccaacaaccaatatctggaggttcaatatggtttggtacctaattttgtaccggaaattgcagaaatcatcgtattcgagtgttggatttgctatgatattacattcaaaattttggtacatattggttgatcatgaaaaccggaaaagtaaaaccaaaccggtagcttaccgtattttgctaagtgttgtcacttattaagattggtaatagagtacttattgtctgttcttcttcattcattacaacaaactctttgagacctaaagagagagagagcgatagtgagatttagatcaacagatttgaatcgatttctgaaaacatg

SEQ ID NO: 27981 - DNA, 3003 bp, Unknown
  misc_feature (1)..( 3003): 2750-1469P.txt file - cDNA_ID_2993328; gDNA_ID_2214627; Annot_ID_135996
cccttaactgactcattatgcggctcacataaactctgtaatcttcatcttccaacatatccgtggttaagcagcaatcaaagactgtaatacaaaaacatcaaagttcagcaaccttatagagcaatcttatatttcgtaagcagcttatagagcaatcttttgtatctttctcactaaaatagtctatttctcagagctaagcatggataagacaaggacgaatttgagaagtcatgcaacacagtgaacatacaaaacctgaaaaatctatccatgagctaaatctcaccgatcaagaatcttaagctatcaaatgttagattcagttcaattaacaagcctaacaagaagtacactataaacttaggctaaaattatgatttttaagacctaaaaattcaaactttctaaaatttaatactctaagagcaagggataagacaagcaaaaggatttgagaaatcatgcaacccagtgaccatacaaaagaaactgtttcctgacaattctttgagaatgagacatcttaagctataatagatagactttccaccaatgagcctgagcctgtgctcatggatagttaacagaatccatgaactaaatctcacccatcaagaatcttagtctatcaaatgttagattcagttcaatcaacaagcctaaaaagaactagaaactaaaacaggacactacacttatcaaaatctgatcttaagacctaaaaactcaaactttctaaaaatcaatactccaaagcccaaagaagagcaaggataagaaagcaaaccctaaacccatcacttaaaagaagaaagagcataccgtaaactctctctgagatctcaagcaacccttcaggaggttttctgtgaaagaactttctaaacaacgccattgagaggtttctttaaatgcttaactcaaaaaagcagagaggtcacacaatccctagaaataatcacttatgaccaaatgcgacccacattgcaggaaaaaccccaaataaggagaaaacaaaaacgagaaaaatgtcaggaagaaagaaggaagcgtgagataatcttattgctgggtctttaaggaacaatgcgatgtgggttttgtttcttttgtagtttggtggtttgtcttgacatacacactttcaatttcttccgttttggaattggaaacttagctttcaatcaaaacagatgtttgatagctctgcacatgcgagaaagaagaaagggaatgatgcagagagagaagagagagagtttggttatcttgggaaaagaggaactagggtttttctttgattctaagaccaagaagaagatgatatagctattgagaaattcagacagagattgaggatgatgtcggatttcagatagaagggaaaaaaaagaaaggaggacccaaagatctgttactttgtttaggactatgatacatgtcttccaatattcttttttgagttatttaagatttgctttcttttctttcctaaactcggaatttgcaatttatttccttttgccatgacttcatttaaaaaaattaaataatctttgaatgagtacacacttagatatcatagtttgtttttaagtcattaatgagaaaaatacaatttttgtaattttatatttgttagaaataattttttagctaccgattcaaccgcgaaaggtagattatggttcgttacatatatattgaaccaaatcgacggaatacttggtccgtcgaaaaagttaattggttttaagaatattggggtcacatacaaaataaaactgggatttttggtatatgtataaattcatttttctaatttaatatttacattaaatttagacattttaaatgaaaagtaagctattttttatattttttgaagttcacaaaaaacattttaacgattttgaaaagtagatttcactttaattattttttcgttacactttttaaccaaattacataaaaaaaatgtttcattcatcggccctgatcacttctcaagttttccaatatatgacattattggaggtaacaagatataatacactaatatgactgacaaactgcacaagacattttcttcatgtccctatatatggttagggagaccaaattcacctaaacaatactatagtttacggggtgatgctagacatgtcagtacaatagtctcaatcagtgggaaacgttgcacaaacggatcatgtagctgagtaaatgagttgatgcctcgttagttggtaaactcatgagccattcttgctattagttaaaccaaatcccttgtataaacacgcctctcatagtcatagatgagcttatgtcttgttctagtaaatgttataaagaagataactcaattgataattggttttagcacttggtccttgctctgttgattcgaaatccttattgaaaaaagaagaacaacgtaaattccttgttaaaatttttgaaaatttctattttctttgggccaggagtgatctcaacaaatatatccgaaaatgtaaaggtgtgtatacgtatcaccccaatagctaataggcccaatacggcaatacccaaacgtcaccatcaccaaatagaatgactagattttactttgtttactacgtttattcacgaacaattattttgtcaaaattaaaagcgagacaacgagaaacactcatagttttgcctgacacacacaacaaatgtcagtatccataattacattgtttcaaattttctctaacggttacatcactcgcaacggctacagtaacaaacatttaacgtttctttaccttttcaaaattcttcttttttcacaacaaaacaaaaagtaaataatctaacggctagttttcgaattttcaccactataaaacctcacaagaacctcctcataactcagcaatttccaaaacaacattcctaacactacactccaagcaactagcttctctactactcaatactatgtttctatcggcatctatg

SEQ ID NO: 27982 - DNA, 3003 bp, Unknown
  misc_feature (1)..( 3003): 2750-1469P.txt file - cDNA_ID_2993328; gDNA_ID_2214627; Annot_ID_187851
atgcaccgggaaactgttcccttaactgactcattatgcggctcacataaactctgtaatcttcatcttccaacatatccgtggttaagcagcaatcaaagactgtaatacaaaaacatcaaagttcagcaaccttatagagcaatcttatatttcgtaagcagcttatagagcaatcttttgtatctttctcactaaaatagtctatttctcagagctaagcatggataagacaaggacgaatttgagaagtcatgcaacacagtgaacatacaaaacctgaaaaatctatccatgagctaaatctcaccgatcaagaatcttaagctatcaaatgttagattcagttcaattaacaagcctaacaagaagtacactataaacttaggctaaaattatgatttttaagacctaaaaattcaaactttctaaaatttaatactctaagagcaagggataagacaagcaaaaggatttgagaaatcatgcaacccagtgaccatacaaaagaaactgtttcctgacaattctttgagaatgagacatcttaagctataatagatagactttccaccaatgagcctgagcctgtgctcatggatagttaacagaatccatgaactaaatctcacccatcaagaatcttagtctatcaaatgttagattcagttcaatcaacaagcctaaaaagaactagaaactaaaacaggacactacacttatcaaaatctgatcttaagacctaaaaactcaaactttctaaaaatcaatactccaaagcccaaagaagagcaaggataagaaagcaaaccctaaacccatcacttaaaagaagaaagagcataccgtaaactctctctgagatctcaagcaacccttcaggaggttttctgtgaaagaactttctaaacaacgccattgagaggtttctttaaatgcttaactcaaaaaagcagagaggtcacacaatccctagaaataatcacttatgaccaaatgcgacccacattgcaggaaaaaccccaaataaggagaaaacaaaaacgagaaaaatgtcaggaagaaagaaggaagcgtgagataatcttattgctgggtctttaaggaacaatgcgatgtgggttttgtttcttttgtagtttggtggtttgtcttgacatacacactttcaatttcttccgttttggaattggaaacttagctttcaatcaaaacagatgtttgatagctctgcacatgcgagaaagaagaaagggaatgatgcagagagagaagagagagagtttggttatcttgggaaaagaggaactagggtttttctttgattctaagaccaagaagaagatgatatagctattgagaaattcagacagagattgaggatgatgtcggatttcagatagaagggaaaaaaaagaaaggaggacccaaagatctgttactttgtttaggactatgatacatgtcttccaatattcttttttgagttatttaagatttgctttcttttctttcctaaactcggaatttgcaatttatttccttttgccatgacttcatttaaaaaaattaaataatctttgaatgagtacacacttagatatcatagtttgtttttaagtcattaatgagaaaaatacaatttttgtaattttatatttgttagaaataattttttagctaccgattcaaccgcgaaaggtagattatggttcgttacatatatattgaaccaaatcgacggaatacttggtccgtcgaaaaagttaattggttttaagaatattggggtcacatacaaaataaaactgggatttttggtatatgtataaattcatttttctaatttaatatttacattaaatttagacattttaaatgaaaagtaagctattttttatattttttgaagttcacaaaaaacattttaacgattttgaaaagtagatttcactttaattattttttcgttacactttttaaccaaattacataaaaaaaatgtttcattcatcggccctgatcacttctcaagttttccaatatatgacattattggaggtaacaagatataatacactaatatgactgacaaactgcacaagacattttcttcatgtccctatatatggttagggagaccaaattcacctaaacaatactatagtttacggggtgatgctagacatgtcagtacaatagtctcaatcagtgggaaacgttgcacaaacggatcatgtagctgagtaaatgagttgatgcctcgttagttggtaaactcatgagccattcttgctattagttaaaccaaatcccttgtataaacacgcctctcatagtcatagatgagcttatgtcttgttctagtaaatgttataaagaagataactcaattgataattggttttagcacttggtccttgctctgttgattcgaaatccttattgaaaaaagaagaacaacgtaaattccttgttaaaatttttgaaaatttctattttctttgggccaggagtgatctcaacaaatatatccgaaaatgtaaaggtgtgtatacgtatcaccccaatagctaataggcccaatacggcaatacccaaacgtcaccatcaccaaatagaatgactagattttactttgtttactacgtttattcacgaacaattattttgtcaaaattaaaagcgagacaacgagaaacactcatagttttgcctgacacacacaacaaatgtcagtatccataattacattgtttcaaattttctctaacggttacatcactcgcaacggctacagtaacaaacatttaacgtttctttaccttttcaaaattcttcttttttcacaacaaaacaaaaagtaaataatctaacggctagttttcgaattttcaccactataaaacctcacaagaacctcctcataactcagcaatttccaaaacaacattcctaacactacactccaagcaactagcttctctactactcaatactatg

SEQ ID NO: 27983 - DNA, 3003 bp, Unknown
  misc_feature (1)..( 3003): 2750-1469P.txt file - cDNA_ID_2993328; gDNA_ID_1620626; Annot_ID_162469
gatgcaccgggaaactgttcccttaactgactcattatgcggctcacataaactctgtaatcttcatcttccaacatatccgtggttaagcagcaatcaaagactgtaatacaaaaacatcaaagttcagcaaccttatagagcaatcttatatttcgtaagcagcttatagagcaatcttttgtatctttctcactaaaatagtctatttctcagagctaagcatggataagacaaggacgaatttgagaagtcatgcaacacagtgaacatacaaaacctgaaaaatctatccatgagctaaatctcaccgatcaagaatcttaagctatcaaatgttagattcagttcaattaacaagcctaacaagaagtacactataaacttaggctaaaattatgatttttaagacctaaaaattcaaactttctaaaatttaatactctaagagcaagggataagacaagcaaaaggatttgagaaatcatgcaacccagtgaccatacaaaagaaactgtttcctgacaattctttgagaatgagacatcttaagctataatagatagactttccaccaatgagcctgagcctgtgctcatggatagttaacagaatccatgaactaaatctcacccatcaagaatcttagtctatcaaatgttagattcagttcaatcaacaagcctaaaaagaactagaaactaaaacaggacactacacttatcaaaatctgatcttaagacctaaaaactcaaactttctaaaaatcaatactccaaagcccaaagaagagcaaggataagaaagcaaaccctaaacccatcacttaaaagaagaaagagcataccgtaaactctctctgagatctcaagcaacccttcaggaggttttctgtgaaagaactttctaaacaacgccattgagaggtttctttaaatgcttaactcaaaaaagcagagaggtcacacaatccctagaaataatcacttatgaccaaatgcgacccacattgcaggaaaaaccccaaataaggagaaaacaaaaacgagaaaaatgtcaggaagaaagaaggaagcgtgagataatcttattgctgggtctttaaggaacaatgcgatgtgggttttgtttcttttgtagtttggtggtttgtcttgacatacacactttcaatttcttccgttttggaattggaaacttagctttcaatcaaaacagatgtttgatagctctgcacatgcgagaaagaagaaagggaatgatgcagagagagaagagagagagtttggttatcttgggaaaagaggaactagggtttttctttgattctaagaccaagaagaagatgatatagctattgagaaattcagacagagattgaggatgatgtcggatttcagatagaagggaaaaaaaagaaaggaggacccaaagatctgttactttgtttaggactatgatacatgtcttccaatattcttttttgagttatttaagatttgctttcttttctttcctaaactcggaatttgcaatttatttccttttgccatgacttcatttaaaaaaattaaataatctttgaatgagtacacacttagatatcatagtttgtttttaagtcattaatggaaaaatacaatttttgtaattttatatttgttagaaataattttttagctaccgattcaaccgcgaaaggtagattatggttcgttacatatatattgaaccaaatcgacggaatacttggtccgtcgaaaaagttaattggttttaagaatattggggtcacatacaaaataaaactgggatttttggtatatgtataaattcatttttctaatttaatatttacattaaatttagacattttaaatgaaaagtaagctattttttatattttttgaagttcacaaaaaacattttaacgattttgaaaagtagatttcactttaattattttttcgttacactttttaaccaaattacataaaaaaaatgtttcattcatcggccctgatcacttctcaagttttccaatatatgacattattggaggtaacaagatataatacactaatatgactgacaaactgcacaagacattttcttcatgtccctatatatggttagggagaccaaattcacctaaacaatactatagtttacggggtgatgctagacatgtcagtacaatagtctcaatcagtgggaaacgttgcacaaacggatcatgtagctgagtaaatgagttgatgcctcgttagttggtaaactcatgagccattcttgctattagttaaaccaaatcccttgtataaacacgcctctcatagtcatagatgagcttatgtcttgttctagtaaatgttataaagaagataactcaattgataattggttttagcacttggtccttgctctgttgattcgaaatccttattgaaaaaagaagaacaacgtaaattccttgttaaaatttttgaaaatttctattttctttgggccaggagtgatctcaacaaatatatccgaaaatgtaaaggtgtgtatacgtatcaccccaatagctaataggcccaatacggcaatacccaaacgtcaccatcaccaaatagaatgactagattttactttgtttactacgtttattcacgaacaattattttgtcaaaattaaaagcgagacaacgagaaacactcatagttttgcctgacacacacaacaaatgtcagtatccataattacattgtttcaaattttctctaacggttacatcactcgcaacggctacagtaacaaacatttaacgtttctttaccttttcaaaattcttcttttttcacaacaaaacaaaaagtaaataatctaacggctagttttcgaattttcaccactataaaacctcacaagaacctcctcataactcagcaatttccaaaacaacattcctaacactacactccaagcaactagcttctctactactcaatactatg

SEQ ID NO: 27984 - DNA, 3000 bp, Unknown; identical to SEQ ID NO: 3106
  misc_feature (1)..( 3000): 2750-1469P.txt file - cDNA_ID_2993331; gDNA_ID_1620626; Annot_ID_47135

SEQ ID NO: 27985 - DNA, 1826 bp, Unknown; identical to SEQ ID NO: 13455
  misc_feature (1)..( 1826): 2750-1469P.txt file - cDNA_ID_2993331; gDNA_ID_2214627; Annot_ID_135997

SEQ ID NO: 27986 - DNA, 90 bp, Unknown; identical to SEQ ID NO: 6826
  misc_feature (1)..( 90): 2750-1469P.txt file - cDNA_ID_2993351; gDNA_ID_1621108; Annot_ID_56012

SEQ ID NO: 27987 - DNA, 3003 bp, Unknown
  misc_feature (1)..( 3003): 2750-1469P.txt file - cDNA_ID_2993353; gDNA_ID_1620619; Annot_ID_46973
tgaactcattcaaattgatgttattgtgaaagaatgtgactggaaaaacagactcgaaaatttgatctttaccactttcacagtcagaagtgacactccattgtcagccagttcatcttcatacaaaactacctgaaggagtagagaataagtacatcaaagggcccagaaaaatgtgtgtttgagtttgtatcgataaggtgaccaacctcatcatagaagagaataggttctttaagtgagagagcagccaaatcaatctgatcttcacagttctcccactgaagagtagcttccccctttggattagcttttgcctcaacctgcttcacattaaaaaagcatacagcaatgagcatgaaagtcacacttgattgattatcgtgtgacagacagaaaaagagtgaaaatgagagcaaggcgaaccgtttctttgtctttctcaactacttcacttccacagtatggcgttgtaaacgtgtaatcataatctagtatcacctgctgagacggcttgctgcaagtagatcagagtggtatcagatacaactatcaagcaaagcttccctattgaaaagaataatatcttttgtgatatatttttcagtcaaatcctgaaacttacctcctgaatttccattgtgctgcagcaggaacttcaacaggtggaagcccttcctgcttccaaccagctagtgcgtcaaacgcattaaaatgaatcttagtgttgctacctaagtgtttaaggactaatgcattctcgccaaaaaccatttcaggtaagtgagatgtcttaagctttttttcccacctgtgttacaatcaaacatcacattcgtgaatctcagaagatgctatttacatatttgagataaacagagagctataccaggaaatgtgatgagcagagatcggaacaactaaaatcagtaaccacaaaaactaaaccaaagcaaatacgattttgattttttcacagaatagatcatacactccaccaaaaactaggaaaaactcgaaatcaaggacacaattctgatttccttcgatacgttccactaatacggtgtacacgagctcaaaaacccaaactacactactcagttcatcaaattaacgacgagcacaaatacaaaaccgtaaacacaaatatcacctacaagtaatcacagacaccaacaaattcatcatatatgatcgtatcttatgaggtgagagagatagagattaagtactcttcgacagcgagagaagtgagaatcgtgccgcggagggtttcgatctcccagtcatggatgcgtaaacctcgacgtccgtcgggaagaagctcagccccggaagacttcagaacatctttatcgaccaccgtctccatctgaatcgccggctaatattggcactaccttttctcctccgacgatgtcacttgtgtgaccaaccggactatccaaccaagacatttgacttttgatgggccggcctagtttcattttagtttgaaaaaagaaggtcaatttgattttggtccttaatgggctttaagtttataacgtaggcctttttcataataatgtaatatagctagaatttcatgcttttggaacacactataaaaaaggtcaatattcaatgtttcttttttcattattagtagatttggctaaataaacctctagaggacctagaccaggtttgaaacctgacatggtggaacaccactagcccacttgttctctcaagctcaataatatccatataaatcatcaaaagatgaatcaatcacaaaaattcacaactaatttgcacgatacacctcatgaacaaaatattcgtcgtcattgccactattaacgattcaaagtggtaaaaaaatcaggaagcagtgaaaggtgaaacctcatgaatctctagactctaatgcataaacatatttcattatatatcgtagtagaatactgagacacattgacatatataagtatcaaacagaaattgtataatggtatctttattttattaacacatgtgtgcgtcaatgtgaatcagatagaattagacacactatctttttaatatttaaagttggagccgttttggtcaaaactaatttatgtgcactactcatttatttataggttttttaaaaacacaaaaattgtgaaaaagcttctaagccaggtggcgggttttggtgcaaagtctttgatatgttcggagttgctgcttcgtagagaaaaaacttttctgataacatcggagtaaaaggaaagtaagtcggagtttaatcatcttaagatttgattgaatggctacgctcactgaaatagcaacccttgaggagaagtgagttttttcttttcaccttctatttctatgtgtatatcttatctactcttttgaaattaagacagaaaagttagagatgtgttcgtaggattgggtttttgtctgaaagactgaaactttgtaaataccttttcttaaaattgatgagtttggaggaacggtttcagtaaattaggttgtgtttcgattctgttgtttttgtcggtgttcttcgtgagaatttgtctgaatttctgcatcttcctttgattgaggattgttttttgattctgttctatagcttttgctcttaaggaatcaaagaaggcaagtttttttgtcaagtcatggctttttttctgtttcggggtgcttattaatttgtttaattctgggttatttagttataatgtgtgctaagtgattcctctactagtattcaagttaatggatttgattcatctttggttttaggtatatcgaattgtgcaagatgcatggaatcctacccaacactgccattttatctgctttctttgaggtttgattactttttccttgtccagaagatctgtttagcttaatcttagtgttagtctgagtataaactacgattgaacctgatcaactgaattttaggcggaggttaaaaagtcaaggaatcaaagatgcattatg

SEQ ID NO: 27988 - DNA, 3003 bp, Unknown; identical to SEQ ID NO: 27987
  misc_feature (1)..( 3003): 2750-1469P.txt file - cDNA_ID_2993353; gDNA_ID_2926207; Annot_ID_141777

SEQ ID NO: 27989 - DNA, 3003 bp, Unknown
  misc_feature (1)..( 3003): 2750-1469P.txt file - cDNA_ID_2993357; gDNA_ID_1620628; Annot_ID_47191
cttctgttacttcgacataacagagattgacggcgtcaacaccaacgagctttacaatgccgtccagctttacctcagctcctctgtctccatcgcaggtaaccgtctcagcctcacacgcgccgtcaactcctcctccgtcacattcggtctctccaacaacgactccatcgtcgacacgtttaactccgtcaccgtcgtctgggaacacatcgttacacagagacaaactcaaaccttcgcttggagaccaatgccggaagagaaacgtggcttcacgctccggatcaagaagaaagacaagaacttgatccttgattcttacttggattacatcatggagaaagctaacgagattcgtcggttgaatcaagatcggcttctttacacgaattcacgaggtgggtctcttgattctagaggtcttccttgggaatctgttccctttaagcatccgagtactttcgatactctcgctatggatccggttaagaagcaacagatcatggaggatcttaaagatttcgctgagtgtcaatctttttacgagagaactggtcgggcttggaaaagaggttacttgctctatggacctcccggaacagggaagtcgagcatgatcgccgccatggctaactatctccggtacgacatctacgatcttgagctcacggaggtcaaaagcaattctgaactgaggaagcttctgatgaagactagctccaagtcgataattgttatcgaggatattgattgttctatcaatttaacgaatcgtaacaagaaacagagcacagggagctataacgaaccggagatgttaaccgggtccggtttaggtgatgatttgggtgatgggaacactataacgctttcaggtttgttgaatttcactgatggactttggtcttgttgtggtagcgagaggatttttgtgttcacgacgaatcacattgagaagcttgatcctgcattgcttagaagtggaagaatggatatgcatatacacatgagttactgtacgttttcttcggtcaagattttattgaggaattacttggggtttgaggaaggtgatcttaacgacgttgttttgaaggagttagcggaagtggttgatagggctgagattacaccggctgacgtaagtgaggctttgattaagaatcggagggataaagagagagctgtgagggagcttttggttgatttgagaagtagagtggagagaaatgagaagaatgggaaatcgagggttcaaaatgtgagcttggaagagcaagagaatagagctttcgacagtctttacgcagaagagaatggaggagaagaagaagagattgaggataacatttgcaaaagtagtgatgattgttcttaattaggttttctaacgtttctatgttctacacaatgtgaaagttgtgtgacctttcttatgtttctccttttttgggtagttaactttttgaagtaagccaaagtgaagaagaagaaggagagaaaatagaaaagaggtagagagttggttaaaataagcaagtggtggtgattaagatttttgtatgtggcgatcgggaaatgcaaagagattcattggttaccattggcatatgatttggtgttactataaatttataatagtttcgttacacttttgacatagaattccatattattttttaacaatagcatccaattctttttaaaaagaaaaacttgtgtgtttttagagggtacggttgtctttcatcttcaccaacattggataagatcaatgcattccttgtcaatttttaaagtacaaaaaacaggacaaattgtttagccttaagaccaaacactgaagttgacatgttttgtttgtttactggattttcttagcattgtggactttctagactcacccgtttgaaattgtcataatatggtgtcgtcgcactgtctcttatatatttcttactttattcgcaatataaacaacaaagtctatgcttatgtcaattggtcaatctgtccatcgactctattaattgagttatgagtgtattgtgcatagattaataaaaataatacagtgagtatgttatggatagatgtggatctctctctctagtcacattaccacaaagagaataaagagttgaagtttccgaaagagataaaacaacaaatgtataatgtcgtgaaataataattgtgtagaagaaaatatcaaaaaggaaagattttgatattaatacctttttatggattcggtgagaaattaaagaaagatttgattaagaagtgagttggaagtgatgcatgtacattattaggcttttgtcggaaaactataaaaaagacttcttaagcccattttaatattcacttttttactttctttcttttttgcattgcaattttccattgtagtttaagatctgaccctactttgtatatgattcgaattatccattgtttaagataaaactaatagaaatcaattcgattgtccggtgagtaaacggctcttcgctaacagaaaaacctaacttgaatagcttgagtcaaaacaatctaatttttaaatagttcccaaaattttatcttaaattactcgtaattacactagcaatccaaagtttatttgttttaataaaaactattttgggtcgtcaaaatggcccataaagcctaattaagaagacccaatcaatttaaaagcccaaatcagtgtgacgtataatatacacgtcacacgtcaattctcagcgtcgttaaagtatgttaacaactccgacaagattcgttgctctaagaatcccattccgatcttccaataagattccgatctccattgctccctctcccaaagtttttcctcggaaaccagttatcagagttccagcaagtctccgatttgtagcgacgatgtcgacccctgccgccgccgtcaacgccaccgtcacagtcaccgatgccggcagaggatcgatcactcacgtcatattcgacatg

SEQ ID NO: 27990 - DNA, 3003 bp, Unknown
  misc_feature (1)..( 3003): 2750-1469P.txt file - cDNA_ID_2993357; gDNA_ID_1620628; Annot_ID_162567
ttttcttctctcaccttgttttagccgtaaagtaatcaccttttcaacttctcaaaagccctctgtttctctcatctccctctctctgacgatgaaagagtattggacatctttggcttctctactcggcgttttagccttttgccaaagcctaatgaattctgtattcccaccagagctccgtttcgccatctcgaaactcttcaacaaattctttaaactcttctccaccttctgttacttcgacataacagagattgacggcgtcaacaccaacgagctttacaatgccgtccagctttacctcagctcctctgtctccatcgcaggtaaccgtctcagcctcacacgcgccgtcaactcctcctccgtcacattcggtctctccaacaacgactccatcgtcgacacgtttaactccgtcaccgtcgtctgggaacacatcgttacacagagacaaactcaaaccttcgcttggagaccaatgccggaagagaaacgtggcttcacgctccggatcaagaagaaagacaagaacttgatccttgattcttacttggattacatcatggagaaagctaacgagattcgtcggttgaatcaagatcggcttctttacacgaattcacgaggtgggtctcttgattctagaggtcttccttgggaatctgttccctttaagcatccgagtactttcgatactctcgctatggatccggttaagaagcaacagatcatggaggatcttaaagatttcgctgagtgtcaatctttttacgagagaactggtcgggcttggaaaagaggttacttgctctatggacctcccggaacagggaagtcgagcatgatcgccgccatggctaactatctccggtacgacatctacgatcttgagctcacggaggtcaaaagcaattctgaactgaggaagcttctgatgaagactagctccaagtcgataattgttatcgaggatattgattgttctatcaatttaacgaatcgtaacaagaaacagagcacagggagctataacgaaccggagatgttaaccgggtccggtttaggtgatgatttgggtgatgggaacactataacgctttcaggtttgttgaatttcactgatggactttggtcttgttgtggtagcgagaggatttttgtgttcacgacgaatcacattgagaagcttgatcctgcattgcttagaagtggaagaatggatatgcatatacacatgagttactgtacgttttcttcggtcaagattttattgaggaattacttggggtttgaggaaggtgatcttaacgacgttgttttgaaggagttagcggaagtggttgatagggctgagattacaccggctgacgtaagtgaggctttgattaagaatcggagggataaagagagagctgtgagggagcttttggttgatttgagaagtagagtggagagaaatgagaagaatgggaaatcgagggttcaaaatgtgagcttggaagagcaagagaatagagctttcgacagtctttacgcagaagagaatggaggagaagaagaagagattgaggataacatttgcaaaagtagtgatgattgttcttaattaggttttctaacgtttctatgttctacacaatgtgaaagttgtgtgacctttcttatgtttctccttttttgggtagttaactttttgaagtaagccaaagtgaagaagaagaaggagagaaaatagaaaagaggtagagagttggttaaaataagcaagtggtggtgattaagatttttgtatgtggcgatcgggaaatgcaaagagattcattggttaccattggcatatgatttggtgttactataaatttataatagtttcgttacacttttgacatagaattccatattattttttaacaatagcatccaattctttttaaaaagaaaaacttgtgtgtttttagagggtacggttgtctttcatcttcaccaacattggataagatcaatgcattccttgtcaatttttaaagtacaaaaaacaggacaaattgtttagccttaagaccaaacactgaagttgacatgttttgtttgtttactggattttcttagcattgtggactttctagactcacccgtttgaaattgtcataatatggtgtcgtcgcactgtctcttatatatttcttactttattcgcaatataaacaacaaagtctatgcttatgtcaattggtcaatctgtccatcgactctattaattgagttatgagtgtattgtgcatagattaataaaaataatacagtgagtatgttatggatagatgtggatctctctctctagtcacattaccacaaagagaataaagagttgaagtttccgaaagagataaaacaacaaatgtataatgtcgtgaaataataattgtgtagaagaaaatatcaaaaaggaaagattttgatattaatacctttttatggattcggtgagaaattaaagaaagatttgattaagaagtgagttggaagtgatgcatgtacattattaggcttttgtcggaaaactataaaaaagacttcttaagcccattttaatattcacttttttactttctttcttttttgcattgcaattttccattgtagtttaagatctgaccctactttgtatatgattcgaattatccattgtttaagataaaactaatagaaatcaattcgattgtccggtgagtaaacggctcttcgctaacagaaaaacctaacttgaatagcttgagtcaaaacaatctaatttttaaatagttcccaaaattttatcttaaattactcgtaattacactagcaatccaaagtttatttgttttaataaaaactattttgggtcgtcaaaatggcccataaagcctaattaagaagacccaatcaatttaaaagcccaaatcagtgtgacgtataatatacacgtcacacgtcaattctcagcgtcgttaaagtatg

SEQ ID NO: 27991 - DNA, 3003 bp, Unknown; identical to SEQ ID NO: 27989
  misc_feature (1)..( 3003): 2750-1469P.txt file - cDNA_ID_2993357; gDNA_ID_2926188; Annot_ID_140870

SEQ ID NO: 27992 - DNA, 3003 bp, Unknown; identical to SEQ ID NO: 27990
  misc_feature (1)..( 3003): 2750-1469P.txt file - cDNA_ID_2993357; gDNA_ID_2926188; Annot_ID_200777

SEQ ID NO: 27993 - DNA, 3000 bp, Unknown; identical to SEQ ID NO: 4214
  misc_feature (1)..( 3000): 2750-1469P.txt file - cDNA_ID_2993367; gDNA_ID_1620691; Annot_ID_48601

SEQ ID NO: 27994 - DNA, 3000 bp, Unknown; identical to SEQ ID NO: 4214
  misc_feature (1)..( 3000): 2750-1469P.txt file - cDNA_ID_2993367; gDNA_ID_1620691; Annot_ID_164781

SEQ ID NO: 27995 - DNA, 3000 bp, Unknown; identical to SEQ ID NO: 4214
  misc_feature (1)..( 3000): 2750-1469P.txt file - cDNA_ID_2993367; gDNA_ID_2926159; Annot_ID_139637

SEQ ID NO: 27996 - DNA, 3000 bp, Unknown; identical to SEQ ID NO: 4214
  misc_feature (1)..( 3000): 2750-1469P.txt file - cDNA_ID_2993367; gDNA_ID_2926159; Annot_ID_198629

SEQ ID NO: 27997 - DNA, 3000 bp, Unknown
  misc_feature (1)..( 3000): 2750-1469P.txt file - cDNA_ID_2993375; gDNA_ID_1620745; Annot_ID_49713
aagattcgtcaattggaattgaaacatttcgaagataatggattcgtgtccattttcatctgcactggaaatgaattttgaagataatggattcgtatcagtctttgtgatctgatgccgctgaaattttttggaagtaatgaacaagtttgatcattggttaaatgttttggattagaatttgatttgaatctgtacttttgaagcattctggtttaaatcagagtaatcatcgttttgtttaattgttcagggtgattcacagtcaaatgatccagttgcttacgataatggggtgacttatatgtttgtacaacatagtaatgtatacttgatgatagcatccaggcagaattgtaatgctgccagtcttctcttctttcttcaccgcgttgtcgatgtaagtatggctggtcaattctttagtttttctcttaaggttccatctttttcctggatatttgatgtaatggcaatggtatctgttatctggttataggttttcaagcattacttcgaggagttagaagaggaatcattgagggataactttgtggtagtggtatgttaagcttctgtcatcgctcttttagtactatttcgcaatatatttttctattacttgggcaatcaaaaagatccttaaaattttggaaaagtatttgtcattgttagatgctgaaattgattttttggtgctggcagtatgagctacttgacgagatgatggactttggttaccctcagtataccgaagcaagaattctcagtgaattcatcaagactgatgcatatagaatggaagttacacagagacctccaatggctgtgacgaatgctgtctcctggaggagtgagggaatacagtacaagaagaatgaagtgagtgccattgttttcgcaagataggaatatgtttctgatgtttcggtttgcaaataatgacaacctgcttctttttccaggttttcttggatgttattgagaatgtaaatattcttgtcaacagtaatgggcaaattgtcaggtctgatgttgttggagcgctgaagatgcgaacttacttgacgtatgtcaacacatcaaatttacgatatagttcctaatcagccaaagcatgttaaatcacgtccctttttgactattttgctctttgatccattctattgcagtggaatgccagagtgtaagttaggactgaatgatagagtattgctggaagcgcagggacgagcaactaagggaaaagccattgatttggaggacatcaaatttcatcagtacgtctttaagtttttattatattgaaacttggaaagtcttcactgatcttaacccttctattttctttttgttcaaaaagattatatacttgagttttatgtattctcttcttcaacaaccatttatttaatgcaggtgtgttcgattggcccgttttgaaaacgataggacgatatctttcataccacctgatggggcttttgatctgatgacatatagactcagcactcaggtttgacatgtgggatatagcatctactggaattgttccacgtcttcaacaagtaaatatcatgatttgtttcttttatgttcaggtaaagccacttatatgggtggaagcacaaatagaaagtcattcaagaagtcgtgttgagatgctcataaaagctagaagtcagttcaaggaacgaaggtaaatatattctatggtatttgtgccactttccttttctgtcttactgtcatgcaaagatcctgattgatcagattctttaaacctttgatcacgaacattctttttgtagcaccgcaacgaacgttgagattgagttgcctgtaccaaccgatgcatctaaccccaccgttaggacatctctagggtctgcctcttatgctcctgaaaaagatgcgttagtctggaaaatcaaatctttcccggggaacaaggtataacactaacaaggttcaataaactcttaaattcagttgaaacagtcagcaatgtagactatgtagtatcaatgctaaccttcagaaaaccaatataggagtacatgttaagggcagagttccatcttccaagtatcactgcagaggaagcaactcctgagcgaaaggctcctatccgtgtcaaatttgagatcccttatttcactgtttcagggattcaggtaagcttgtgcttaataataaatggttactgtctcttccacaatgtcatatatataatatatatgttctttggtgtgtaggttcggtacctaaagattattgagaagagtgggtaccaagcacttccatgggtgagatacataaccatggctggtgagtacgaactaagactcgtgtaatgcacatttagtttcatcgtctatgtcaattgtgattcccacatccctcaaggaattgcctgaatcaaagaagcaaaacgaaacaggacaaaagtagagggaaaagaaaacgttttgaaacattttagctgatcaaattttcctttaatttgttttagaagccatattcttgtgaatttgtctttatggtgattctattttattttacatgaggctctctgtaacctttcacgacatggttcattattttcctttagactgctacatttctgtctatgtgttcgttctgcgatcaaaattgttaaacgttgaggttttggttttgttttttggggcattcgtctatgtttacataggtttctctcgagttatgatcaaaatgaaactacataaacaaattatgcttcaatagagtgaggtgagagagccttacaatagagagaacgtatattttggtgtttctcatattgtttaactgatatagtatgggccgaaatgaaataatcgtcaggcccattaaaaagcccataatcaccatactttctcctccaattctgtttcgagcttgggaagtgacagtgaattagggttttactcaaaaaaccttctcgttgtcgttgtttactgctccgacgagaaaatg

SEQ ID NO: 27998 - DNA, 3000 bp, Unknown; identical to SEQ ID NO: 4927
  misc_feature (1)..( 3000): 2750-1469P.txt file - cDNA_ID_2993375; gDNA_ID_1620745; Annot_ID_166642

SEQ ID NO: 27999 - DNA, 3000 bp, Unknown
  misc_feature (1)..( 3000): 2750-1469P.txt file - cDNA_ID_2993383; gDNA_ID_1620753; Annot_ID_49855
ccttcccattacgtcttgacgtggaccctgtccgtctatttttagcagattaatccaacggttcttattctttcttcgacccttcacgacattgcctcaaagccgtccgattctcatctcacgcccaatggaccacatatatcaccagtactccgcaacttagctgtcgtgtaggatttcacgtggcatttatttgttctagtttgtagtgcaaacattgcaagttgatatggtcccctatcgatcaccgtcgtctctttagcttcacatcgagattcttctttctttcctacgtgtaatagcatttttgattttgagaatttctttagaaccgttggatctctcatcgttggttgatccatccatccaaatgggacctgtgtgtgctccatccagggcatatgatcccaaagccaaaagagtatttccaagtgctttctttctttctttctttctttcttactaacctttttttttcttatgctttagactaagaaatttattcggccatatccacttttacgaatatacttcttacaagatctagatttttttgagttaattcggtgtatataacattggcatagactgcaattaagtaaatgataatgtgataatgatgcgatgtgttgttatcaagtagtataatatagatggctaaataggtaaacaaaattacgtgttatatgtacacaattaggtagaaccgtagaaattaaactgaataaaacctttattaattttaaaattatatggtacagataaatacggaaaaacattcacgctttacgtaacaattaagtggaaagtaaaattatcccaaaaatatttatatcacatcattgttatatttctaagttttttttatttctctaatggtatatgttttacagattgttttttgggaaaattcttaaagagacttgaagaatgttttttttttattttcttgaaatgtttgacacttgaaaccgtttaaaaactaaatatagtatatatcattgttggtctcataccttgtaattcaccacatatattatcaatggggaagatttgaaaatttttgggggatcacaaaacgaaggaaagagtacaaaaagagaaggaaaagatagaagatatatgtttttaacttcattggtatgacatcaataaataaatagttgaatgtactttagtttctcttttggtttaatgcacatcatctcgatcaattgtcatcatcttacattgaattatacgaccagatctgataacaagtgaattcgtacttgcccttccctttcttctcatacgtccttctaactaattttgattgtaacttataattatataaccatatttaattttattttatctaaaaccaattgaagcaaattaaaatatcataaatcttgagtcccacatgaagacaatatataaaactcgtgcaaatttgcttaaaatgcttctatgagaccatgaccaagtgagattaataagcgattcaatgtgcaaatcaaaagagaaaagaagctaatgggtttaaatataaccaaacagaataataatgctatgtttagtttttctaattgaatcatacctttgtgtccatcacctacttaccggtcagaataaagcaattacgtctgcaaccaaaaagcactaagactttcggtcagacatgatctctaacatcggacgaaccctaagataaccaaaataaactatatcttatattcaaatctctgtttattttatccatttatgttttctttctttcccataattttttttgtgtctcatcagactctcttaccaaactgaatttatcaacatggttttttttttggccacatcaaaatggtggtttataaagtagactaatacaaaagacatttctgttaatttcactaacaaaaataatcttagcagtactatagattggaaaaggaaaagcaaatctagcagtaagatttatcaaaactagcagtaagagttttagatatcatgaaaacatcacaaacgagtagtgttttactttacatttttaaccaatcacaagggtagttccgtaagttgggaaaatcgtacgaggcttcacctagttaaggttaggtcacatgattccctgaactcgattttataagtaaaaaagaaaaatttataaaatcaaaattttttatataaaaaaatcaggtggatttatcagaccctaccatcgagatgtcgacacgtgtccaaactcattcattgccctactattttctgtttagggttgcaatcactcatcgcacacgcgccatctccaccttccattattaatctctcattttcaacatcacactcttacgaatcatacgattttaatatctctgtctctctcaacgtattaaataaaaatggttttaaatgttagggttttttgtaggattttcaattattaatctctataattcgatgaactaagtaaaaaagcatcaaactttcttggcagaatcacatttttctctaaactaaatatggactgaaattgaaaaattaaaccactagctagaataaagtgttggtgagagtggaactctaatttctctcctttactaattatgtataaacacaaaaatgcaccaaatttttaggtttgaaaatatctaagcatggatagggtaattaacattttttctttcaattttgcaatatttgaataaatcctatgagggtctttggtacacaataattggagggtatatagttgagtctgagagtatattagaaagagaatatttcaagtaatgaagctgacatgtttatatgtactttgagagaagtgttgtgagatttgtacaaatgtatatgtacactttaaaaagcaatataagatagataaaaaaaatataaagaaaaaaagaaagaaagaaagaaagaaagagagaggctcatatatatatagaattgcttgcaaggaaagagagagagagagattgagatatcttttgggagaggagaaagaaaaagaaaatg

SEQ ID NO: 28000 - DNA, 3000 bp, Unknown; identical to SEQ ID NO: 27999
  misc_feature (1)..( 3000): 2750-1469P.txt file - cDNA_ID_2993383; gDNA_ID_1620753; Annot_ID_166849

SEQ ID NO: 28001 - DNA, 3003 bp, Unknown
  misc_feature (1)..( 3003): 2750-1469P.txt file - cDNA_ID_2993386; gDNA_ID_1620775; Annot_ID_50268
ccctaagtaccttctttcgtcggagcttccattaggagtgaagaagccaagctcaaatctctgaccagctgaaacaagagtctctccatggctgtcattgatcaatgttgaacctttgaacaatgttttggagtcttgaactgcaacaaaacaatctaatcgacgaatatgcagcaaaaacatatagaagaagacagaaagaatcattctctgaccagtactagcttttttttactcatctgatatctccattatttctgcttaagaactcaactcaaaacgtgtctaacgaaaaaagaaaaagtttgcctcaacgtcaacgaaagacccacctgaaaagtaaatatgtggaacgcagctaatcatgtgttttaagatgtttccaagaaaaagcagaacaagtctcacttgagcatctgaaccaaaagccatgaaagtagtagatactatttacactctcttagccactgtatgtagatacacatgtgaccaattcacgcactttgtgtcaactttttccgcgatggatctctaaatagttcaaaaagatccaacattttttgaataatacgtacttttagagtattttttgacaatgagagagacataggggtacctaaacgtgaattactggaaaaaggggacaatgatgttgaagaagtcaatcttttgtccttattggtgctttcgaagaagtggagattgaccctgcaaacattgttaaccaacttttttccgaaattattgtgagattcgaggagttttgacaaatgtaggacttttgtcgttcaaaagaaatgttttcatctaaaacgcgtaaacctgtaaaaggcagcttcagctctgattaaacaaagagacttgcaacaatgtcactatgagacattactgtttaaaaatagattcagaaacactaatcagttttcacactaaaacaactttgtcttctgccttgtttgtttattcctctggatgtttcatagatatacctttaacagggtatagcagtttcaagttcatagatgaaaccctttcgctcacaaatattgttttaaagccttctttatgagagttggattggttcaccacatagattctctaactcctcttccaggagtttatgcaactttgcttcagttcgccgatatatccacgcattagcatcacggtcccagtcaaatctagaagggccactgcaccgagacaaaaggaagaatgaagattacattaatgtgaatctaagatgtggaagcacaaagtcaagagcaacaacactatacagtcataaacagtttcatttctccaaatatcatgagtacaaaaatcagaagagagagcagaacatgataatccagatgcgaaattcaatctaggcgcctaaagttagcaactttcaaaaggcaagaaagaatctttacctcacaggtgaagacatccagatttgtcgatttggagtttgcttattcagtacataagtgcctaaagatccaagcttaagggtaagaacttcattctgttggaaacagccaaaaggactgactataataagtacacatagatttccagaaatatgaacaagatcttaaattgcttaaaagagtttaatccttaccccataatctatgtcgaaaccatcaatctgaacattatcaccataatcctgaacatgaatcatgcaagtagaacatagtgtaagctattgcaatctcaagtaaaacgaagaaccctagagagaaaaaggttccagcttcaaatacctcaattttctcaagaaggtgattaattgtgaagttggctaatttgtgaaactcttcctcctgcaaaaccgaactgtttttttcttccactttgttcatattctcatgaaattaacgattcagatacaataaaggagatcaaaatggagaatattaaagtacctgtaatcgacagaagcaggaccttgagaagagaagcttctggtagtcaaagaatcatggcggattcgagatcctattctccagaaggaatccaacggttctatggaatcttgaatcagattgcttgaaactcttacgccattgctacggagaagagttggagacagcttgagaaacctcggcaatttccgtagaagaaaccttgaagctgtagccatggcggttctgtcacaagaaacattcgacgcctctcttcttcttattccttcgttgtccaatttaggcccacaataaggcccaaatttagatttacccggttcacgtatttcccatgttccggtttactgaaaccggtatggttctcaagagatttgtcatttgtgtgcgaagaagagttttcttctcctctcataagaaaaaaccagaattttgaagaaggagaaagaaaaaaatctgggtttttgggagctgattaggttttgttccttcaatctctgggaattttcgctatgcactcaggtgaaattcgttttttcctctatttcaatctctgtcttcctgcgagtttacgtgagagaatagtttttaatgatcccgagttcgtcgaattacaatgcaactcccagtttttgtagttttaattagcgaaattcatcaatggcattggaaattttaagccttttttggtttgttttatggtactactaattattcaagctaaggaattccaaagttttcgttcgttttgattgggtttagaagtatttggctgatgagagaaagagccataattctgaaattaaacccttttatgtgaagcttgtgtagatgttttacctgaatttcggaattactagcaacatttctaaatacacaaagcatgattgtaaaatgaaattgattttggtcagggctttgcatctcttggttattgaatggtgtccgtgtttcactattatcttcttatgtttttgatttttatgtgctattttcgatagattcaggcgaagcgaccgctgatggcgataaagcttctacagaaaacagcaaaaaacggaagcttaagactcctatgcaagttatg

SEQ ID NO: 28002 - DNA, 3003 bp, Unknown; identical to SEQ ID NO: 28001
  misc_feature (1)..( 3003): 2750-1469P.txt file - cDNA_ID_2993386; gDNA_ID_2926205; Annot_ID_141694

SEQ ID NO: 28003 - DNA, 3003 bp, Unknown
  misc_feature (1)..( 3003): 2750-1469P.txt file - cDNA_ID_2993390; gDNA_ID_1620783; Annot_ID_50374
aaaattttaatggggccatcttagccgtccaactcctttttctttaatcagcttttccactggcgtacctttccagatggtgattacgtgtctataccaatctttatgaaataaaaattagcaatttggttacaaattcaaaaatagcgatagaagtttgatacaaaattgacacttcaatttccttccaataccgcagacaatatgatccgtccctttgaatacgatagtccttttcaactttttaacatagtacttaatttttatttttgacatcacatagtacttaattaaactactatatttatcatgtaattgagtatcatttgtgaataagatttgactctctttcttttccggaaaataggtccgatattttcttttatattcttgatttaatgaaatggcattttctaattttaaaattaattgaacagtttgaaaaaaattaacggaaaatgttatgcactgcgttcatcactttttggtgaagaacttacaaaacattctgaaaattttgaaaatcctattaagtttagataaaaatttataaagttttcgtagttttcaataatagtaataaattcaacttaatcaacaattttcaataaggatgaagaaaaaatattaattataaaatgaaatttttaaaaatttgcattgaacatccttctcataaaaccagttaaaatttttttttagtaagcatccttttcatactttctaatagacagaccctgaagagttctacaccaagacgaaactgcggtgaggattttatctgacggggcaaatcagaccggctggtatgtggacccactttcaaatggaatcatacgtggcatacagtcacgtgtcagcgatcggaaacaacttgtcaccacgtcattatttctgactcttatgggtcctacccaccggcctattacttgtcgtcaactgtccacgtagatttttaacatggaaaagatcaaaaactgtaatttaataacaaaatcagtgacctaaataaaatgctgggtaaaaaaatagaaatctcaaagccagaagaaaaaaataatttcaggatactggatactcaaaataaagaaggataaatatatatagtttgttataataatgcgtacaattataaaatatttatataaatgtaaaattatatatagaacatataaaagttctatcgtatacttttaacaagcttataattaagtggatatgaaaacgattaattcacgagtgactatgactcactaaaatgtcattttcattctacccaaattcaaatttctgtaattggttccatatatttcccttacatagaaaatcagatcactaataactaatatttacctctatgccgacttatgaatatattgtggtcaatttcatatatatgtttcactggatacaaacaaacatatattcatatataaagtatgtactattcgctacttttgcggttttacattccatgtgatatcttatctggatcagtaaataatttgctttgtacaatgttaagcaaacgcaaaaatccaaatgctagagtttataataaggatccatttatgatatatcgtgttattttgttagttgtttacactttatatcactcacattctatctcaattcatacaaaaagacgtagatattaattaattctagctttaaaatgatcaatctatatagcaatctaagaacagttatcatctgtgacaccaacattcttaataacattaccgactataagtgaataaatgatcacctaatcttctatgaatgataaaaaattccaaccaccactttcaccgaaattgttactcgagggatcaacttctttttgtgactaatttgaggctaaaactagtaagaagaaataaacaaacaaactgtatttctatcaaaaaaacaaaaccaaaacattgtgactctttaacactgttttaatgtcttggtagaattcgctgatgctaactaaggtttaaacgttttaaaaaaaaagaagtttaagttgttaaaacattaaatcgaccatgcacgatccgagatttgatatgattttttagtgggaagaattgatgaaaatgatttgatattgttcataaacatgttaatatgtttaatatcatgaaaaaatattgttcataattaaatggcacaaagatttacctattgttttgagttctattttagccaattcaatcggtgttcctatattttaaccaaaatacaaaaaaatcgtatttatgtcattatattgttttcatgaaacatattttttcatatccaacctcacttatgataatcagtatctaacacgacatctagaattatgagtttctatacatttttataattaaaatttcagattttttggtatagtgagaattgtagtgcacggttaaatcaacaactagactaaagacgactccatatcattaacattctcattcattgcaatactgtttctgccatcgattttctcctcaccatcatcactccttcaaatattcattttaactatagtttgttttcatgctataatgattctatatttctatcaaacaatagttacagaatttctttgcttaagaaaataatatatatttaaatctataatattcacgactaatagacgttaattgcaagtggtgtaagatctgtatatgatatatattttctttcacgatcacaaactgtacatgatgtttctttctcaaacatctatacaacaaaagcttcattattattgccagagaataattatgcttaatatgtgattttgttttaggattttttttttttaaatatatcttgaaaaatgattctaaagctttttttttttttttgataaaggtgtatttgtttctcctataaattaagccatcttctcaaccaaactcttcactcaccaaagcatcacataacactcacacacacactttctcttctcttattttctcagttcttttaactcttttctctacatatattcaaatg

SEQ ID NO: 28004 - DNA, 3003 bp, Unknown; identical to SEQ ID NO: 28003
  misc_feature (1)..( 3003): 2750-1469P.txt file - cDNA_ID_2993390; gDNA_ID_1620783; Annot_ID_168028

SEQ ID NO: 28005 - DNA, 3000 bp, Unknown
  misc_feature (1)..( 3000): 2750-1469P.txt file - cDNA_ID_2993392; gDNA_ID_1620803; Annot_ID_50518
aattgtaggattttacgtgataattttagaaatctgtttagaatgggcacatacaatagctagaccttggcgttgatgctgaatgggtgggtcattcaccatggagatttatataataaaacacatgagaaacgatttttctgcccttgtttgaattgtagaagactagaagacaatctttgttcgtagtccttgtgcaaagataaccattaatcattatttttggcattatccaaaacctctggtcaaactcgaagccatgccgatatgtggtggtcactggaagcctcttcaccttcatttttggtggagtattgcgaaaatataatatatttttttggaatcttattaggtttgttacctgatatgctttaaagaaggatatttccaggtactctttaactcatcaatttaggatagtcaatcgtgagaagaagttgttataatattcgggaacaatggccggttgcgttattaatggaccatattttaacaattgcaagaaccaattattcagaggcaaagtcaacggtttgatataagctcgctttcatatttttttttcacatttgagcatttacttggaatcatgcatgggaatatcatagtttcgtgctagtttctcctgcctgaagaagatgatgaaatggaccagttatagctagcgcgccagtactagaaacggtgttgtactttctggagaagaatggtaaagtatcagattcaatacaccaacacggcaacactcaagatgcagcttgtttttggtaaatacaaaaccgaaacttggagagaatgatcagaaagaaatgaaatgatggtaattgatccaatctgagcttttaccctattccattgaaaaccctttttcttttgtgaaaaaggtttgtatcggaaaagaaaaaataaaggtttgttaaaattacttatctgagcaacaactcgagtccggtcaccggtgaagctgaactttggaattccgaacacaccaacaatcccgtgcttgtgaccgtgagcatgcacgtgcaacccgagctcgtctccatgttatagttatttactatttagacttctgaaagaaagcatacagtaaaatgtttagacaacactctctttgtctgagcttatcattctctccgcccatcacatacgcttggcccatcctcattagcccataagcccagagaatcgttttctcatggaggcaaaccaactttgtcgatttaaaaacgatttcatctaaacacaaaattttcgattggtcgtcctttaccaggaccctaggtctcgcatctaccatcatgaaccaaagcacaaaccgtccaacaaaaccaaagttaaaactctgatcgtttacacattaaaaacaacattacctacacctacttttttttgtttgtttgtgtgacaattaagaagttcagacgtattacaaagatatgtgcagcgtcatattagttacctattgaactcctacactatgtttgcatattgataaatttttaaggacatcagatataagtaacagtaagattactattcgccaacacatcccggccctattaagttaagaaaatctaagtaatcgattccaaataatactatagatctcgtaatctttataaacgtatatataaacgtacggttgtgtgttttgaagtttgttagggtgacatgatcaaggtgagaggatacgtgatgttgcgccgaatttaaattatacttaaataacaatgatgataagaataaaatcaagaataaaacagaaaataataagacataactatcaattatatatatgaaagctgaaaaatgccgatttgattggttggttaaggtttgatatgaacaatctgtaaattgccagcctgagtgttgctgtatactgaattgcatgtcaacttgttcatgtttacatcataaactctttttgtcctttttccttttctttattagtttactatacaaaataataagtattttaaacattttgtcaacaaaaagctttactgttacatttaacttaaacattcagttatttcaaatatagagttttcataagaaaattacatatgtcaaaactggaaataaaataatgtactagttttcaaattccataaagttttgaatactctttatcaacaaataattccaaaaatatattcggtgtgggaagatgttctgatgcaattaataagaaagacaaaaaaaaagtgtatcaaaaatatcaaaaactattattattagaaaaagagataaacccaaaaatggcaaaagatgaaagagaagtcaaagcatggtatagcattaccacgcccacttcatcttcaagtcatttgtacacgttaatgtgtgcgtctgtgtgtgtgtgggtatatagtagtaaggtttaatcttataaatttaagtaatcaagcaaatacttaatttaattatatcaaatcaagcataactactgcattctaatccaatgaaaggggaaacagaattgcccacatgcaaatgtctcgaaatgtcttaaacctgaaagaaaatgtgtgttagtcttacatgtgctgctgcaacattaatttaatgttttctttttgtcattatgatcctataataagaatttttctgaaatttgatttgattctgaacgccaatggtgattatgataattcgaaaatttagaaacaaactaatcacttgggaattcttgaacggagccaacgtcagtcacatgaattccttttttaacattttaaatagattaagacatttatttacgaacattctttagtaaacaagacaaaataaatccatgatggtggactcttttctaacgaagatcaatcagagcagaggtaaagagccagcttgtctacaactcattttgtaaagtacctaatttacccctcccaacctgtcccacccaacctctacctctatatatacaccactgacacatatttaatatacacacactaatcagtaatcagaagtataaaacacaacatg

SEQ ID NO: 28006 - DNA, 3000 bp, Unknown; identical to SEQ ID NO: 28005
  misc_feature (1)..( 3000): 2750-1469P.txt file - cDNA_ID_2993392; gDNA_ID_1620803; Annot_ID_168731

SEQ ID NO: 28007 - DNA, 3000 bp, Unknown; identical to SEQ ID NO: 5890
  misc_feature (1)..( 3000): 2750-1469P.txt file - cDNA_ID_2993403; gDNA_ID_1620823; Annot_ID_57830

SEQ ID NO: 28008 - DNA, 3000 bp, Unknown; identical to SEQ ID NO: 5890
  misc_feature (1)..( 3000): 2750-1469P.txt file - cDNA_ID_2993403; gDNA_ID_1620823; Annot_ID_169579

SEQ ID NO: 28009 - DNA, 3003 bp, Unknown
  misc_feature (1)..( 3003): 2750-1469P.txt file - cDNA_ID_2993407; gDNA_ID_1620835; Annot_ID_57974
gtaatactgcgagagaaatcttatgaaagaatcgaaatgtgttttaaaaaaattaaagttttaagttttttttttttaatattgttaattttgtttagtgtttaagattatataattatattataattgttaattataggttttttttccgtagcatatcatcctatgttataatccactcaaacccgtcacaccatataaccccgtcccatgaaactaaacacaaatttgtcattttattataaatttcaaatatgtataaaattataaacttcaaaaaagattaatattgacccaaacttcatcattgaattttgagtgttatatctaagatttctctcgcagtatatcgtctcatattaatatcttttatattttgagtgttatatataaaatttgaaacttaaaaaaatacaatatcgaccttgattatatttaagacttttcctgtaatatatatcgtctcatattaatatattttatatatatttataatgtttaaatttctttaaaattcaatttataatttttaaaactttataagttttaaaattataaatattcaaagaattttttaaagataaactttataaaaagtttttaaaattataatatttaacttttgataaagttataatatttataatttcttgaaacattttaaagtttcaattctttaaaataaaaaaacccgagtaaatcggataactattttaattttggacgcctgataaatcaagcttcctgctcattcgtaatcagaatcattttggtccttttataatatgggtctgaaccattgtccaatttttctaagcgatgtgggacattgtacacatattatttcttcataggttgaataatatatgtctgttttaaaaaatttaaattacatcatatgcagaaaaaaatataatattttattaactatatatattttatataaattcaaaataaataaagtataagatcaagtaaaagtgaaagaagaattatatatttatgtttaaattaggtagaaatattttaggaaattagttaaggtaaataacaaatatggttagtttagagatattgtttatattaaatttggtaattaaatcattaattttcgtttttaattattagtttttaggtaacttttccaaaaattaatgttatccaagatcagaacagaattaaacatgttatccaagatccgaacagagttaaaccgggtaaaacccacccatttgaattaattgttgaattatggctcaaatcttcaacattatcttcaaaaaacgtttacaaaaatgtatatatagataactacaatataatacggttttcatagtaacaaaaatatatatctatttatatatagatattttcgttacttttaaaaatatatcgtacaatgcagtttaatcttaattcaaaatactgcaaattaattaatgatacacaaataatcaaatgcttttaattagcctatcaatagagtattaacacattttttttccttttttttttgtgtgcaagctattatacatcttgatatgcaagctattataattaaaacaatcataaagttagatcatttctcacttctccaattatatatgtatatttcaaaagcgtaacttaatcataatttcgatattatttcatttacaattcataaatttggttatcttttcgttttaatattttctatagtaaaagaattatgaagaaatttgattagttaatgcttataattttgattttttcatttacatgtcataaatttggttatcttttcattttaagttttcctatttataaatattaaacagtaaaaggattatgtaatattttgaataattaatgctttcattcaatatcagattcacatgtttgttgtggaaattaaagttttaggaatattatgagatcttctataattaataatatactcattaaataggtttatatctgctgttggaaaaaatgtgaatcaaaaagaaaaagagaaagaattttggatataaatttaaatttatcaaaatagttacacaaaaaaagaataacgccgttgatgaatggtgaccaattgaaaacggaagcttgaagatggagtcactgtcctgtcaaataaaaagactttgaaggtctttgtcatgttttttcttcaaacaaataaatacttaaggaaaacaaaagttatctatcaaaccatatatattaaaaaaaactaagaaccctagttgaattaaaaaataaagaaaaaaaaggcaaggtaaaggggaacagaggagagagaaaaaggtgtgaacagttaatggcggagcagtataaggaatcgcttctctctagaaatcttttgccatagctggatttcatttttttgatctctctctctctcttctcttgtaataacaaagctcacaacataaagaaattattacagaacaagcaagcaagaagaagaagaagaagcaataaaaattagtgcttttttatttagtgagagagaaaagctctgaagaagaaggaagttgttttcgagatgcgagctagtaaaggaaccttctctgtacttcttctctttctccttttgattctcattctgcccagtctttaattttttttcctttttcttcttcttctttcttcttcttcaatttcactcttgttgggtaagtcaagaatcgtccaaagtctttttttttttcttgggttgtttggtattggatctgtttcttggttcttttaaagattggctaatactttgattttggggggttttgatttgatctagggtttctagttagagtctgaagacctttggatttgatgtaggactttgttttttgttctaaagttaaaaaaagaagaaaaaaagaaaaagaatctgttttctcatccaaatctacccaccatttttgttgtgggaggtttttttttttattattacaaaaagaaaaatatagagagaaggagagatttgttttaaagtaaatattttgattgtttatg

SEQ ID NO: 28010 - DNA, 3000 bp, Unknown; identical to SEQ ID NO: 9621
  misc_feature (1)..( 3000): 2750-1469P.txt file - cDNA_ID_2993443; gDNA_ID_1972163; Annot_ID_179640

SEQ ID NO: 28011 - DNA, 3003 bp, Unknown
  misc_feature (1)..( 3003): 2750-1469P.txt file - cDNA_ID_2993456; gDNA_ID_1620386; Annot_ID_155462
ttgattctttctccctaacaatgtgggtcttcgagcttggcctctcatgtatgggtaagtcgtacataagtgcaacacacacactttattttgtatgggtaaattcatgattcatgtacctgccataagtgcaaaactgtgtatgatttaagccctacattaccaggaggtggcttaagtcaatatatgtatcatataggattatgtgtgatttgacataatagcatttcagagaaatcttaacataatatatacatgatttggttctaaacttataaattataagacatgctaaaagaagcttattatggtacatttaaacataatcctataaccacaacaaaaaaggataataatgaacctacaatgatgtagagcgagcgagattgcctaccaatatgcttttgctttgcccatttgtgtcggcaaattctggttggtttggatcactttggtatgatgctactttcacgtaatcagtaggtttggccattcagatataaaaacatccatatctgaatacttgatttagttcatttttcttttcatgcatagccggaaatatatcgttaatagattttttgtaaactaaatagaaatttgtttctacagtgataaaataaattttctttaagcttcatgaaattttcaaaaaattattcaatattttagatgttgtacgcttgctactgtagagtattattttgtgtccataactattttaacaatattataaatgagtgagaatacgaatggagagaaacgaaaatcttcaatagataaagattggctggttttgaattctagtcaaaaattagctttattgctgagtgattactcctacaatggttttaaaagcagagattcttcgtaagaagcaaaatatgtaaacgaaagtcacttttattttgggcatcgttctaaagccaaattcaaataaaatatcgacatttctccttcctttgaaatcagcatttacaaaaacgtttgtagaaacacacaaaacatgactaattttgttttcaaaggctatatatgtttgtggctattcattatcaaagatatataagcggtcaccaaaagaattttgcaggtcgaaatgtacttcatatatcataaatgattaaaagtgataactaatcatttttactagcctgaattgaagattattgcaagaaaactttttgtgcaagggaatactaaatttggtaatcttttttatatataataaattaactcgccgttaaaataaaaataaaaaataactcagtaaatttgtattagagagagctatttcagcttggagtatatattgacatggattaatgaaaacaaaagggtaaaagaattgtcaaacgacagcatatttatcattcaagtactcatcgtatagaataattatataacgtattatctgcgccacctaactaagcacaaacttcacgcatgatcgtgatgtatgaaaattccgatctctaagtactaattaacatcaaacaagcttttgttaaacctaatgcatcactagcaactttaatgttataaatatcataatttcttacataaaatactaatatgattcatgccaaaagttatctaattcatatatcatgcgcttggaataatataaatattttcacaacacactttcgtgattgttacgaacatagatcaaacagaaaattcaacatcaaacaaagaaagaatattgaccaaagaaaattgagtatttttggaaaataaatttggtaggaagataagtgggtgaacaaaaatgaagtagatataaattacaaagtgatttaacaatgacataaatgaagtaatatcactaagaatgtttttgcaatattaaaaaaaaaaactttggatattataggaattaggttaatccgcctaataaatgtttggtccaagtccaactaatccaaaactatgttaaattgtaatttaaatttgatacatcaaaacctgtttttggaaattaacctttttcgtcaaaacaagtttctttttggaaaccgttacacggttctggtgattaatagacatgggaactagaatccaaaatgcaggtgttacatcaaacttaagtgatatcaaaaaaagcaaatttcaaaaagagaagaaaaccactaaatcactatgatagtacacatgtcacacattcacaactatgtccaaaatataaattacataatttcgttcatcttatcaaattctgccgcgccgcatcatataacacgcagcatacactatagtgccttttcccaaaaacatactatagtttatttataactagattacatttgataatttgtgataaatattgtgtcaaattggtaggattatgttaatgatattgcttagtagaaaacagttgtatctttttagccttttaggcaagaagatgatgaaaatatgagagaattgagcggtaggcccatctctcttctgttcataaatgagaatcatgctttactctctctccctttttctcattcttcttcttcttccccatttacagcccaattccactatcttcctcatcatcataaattcataatactattgcactaatctcgagaagataaagagacaacaaacacctctctatctctctctttcttttttctttcttccgtttcaaagtttcttccttttgggcgggttttaaggaaattttggaatttctctctttttggagacgtttctttaatttctgggcttcttctagttgtgggttttgttttctacttgtagctactgtgtcacgcttttctctagcgaatactttgatgcttcttcatgactctttaacaagattattctgagcttttcctctggccttctaattattaaagtcttcctttttatctattgttaaggtttggcttcgttgtctcttcctcttacctctgctttttggttcagagtatttgaattttggggaatattaaaaattgcctgatactgaaatcaatctcttgctgtctagtgatg

SEQ ID NO: 28012 - DNA, 3003 bp, Unknown
  misc_feature (1)..( 3003): 2750-1469P.txt file - cDNA_ID_2993460; gDNA_ID_2926261; Annot_ID_143229
atgtagctatttttggacggtcactatttcaacttaacattgtgtaatgcatttatgagtttgggatctgtctgaggatatttatgaagaacttccacatggagaaacatttgtttactaaatgttgatatgactattcttgaaacttaacttttacacaaaagttaaaaactaaacaaaattcaacaaacaatttgtggttagctgcaagatctaccagaagttaggggattaaggaggatgagaggggtaaaaatataatttcgagtgggcaatgaagtggcacgttcacctgtcggcacagtggagaagagaacaacaaaccttacttctctcttgttcacattcataatttgatgaacagtcttcttctctgatgcagaaaccctctccctgaatcttgattctctcacaatcaagatttgaagcaaacgttttgagaaaaatcttttgacaccatcaagtaagtttttatctttcttatgttttttgtggtgtacctgcattgtgcctagttttggtacttgaatcatctattttggaatctagagtattgatctggagtatgattagtcaaatctaggatttttaaggaaaatggtactgagagattgtattatttgcacatatcaggtgttcagtggtagtgatttgatatgatttggtcattgtttgaatgaaagttggattattgttcagatttggttggcggattgtgggaggaattccagagcaatatagcaggtgatggttgtacaacaatggctaagaagaagggcttgttcactgtattgaaaaggatttttatttcagaagttaattcagaaaaggtgaagacaaagatgttaatctcattctaatgctgattgttgtttctgcatcttgtttgattcttcttgtgtacttctgcagaaagagaagagaagaaaatggacattttggaagcttaggattaagaaaagattaccttccattacagcacctccagagcacaggacaagtcatgaatcgcatgaggaacagaaggaggaaattgtgtcagatgtgggtgagatcagccaagtgtcttgtagtcgacagttagattccatagaagagtcaaaaggttcaacatcaccagaaactgctgatctggtagtccagtatcaaatgtttcttaatagacaggaagaagttcttgctgctactcgcattcagaccgcctttcggggtcatcttgtaagcttgtcttacccttttcttatgaagctactgaaagaatcgactcattttcatactggagttatgtagttaccttgtagctgtgttgactatagttgagtaggttaggtagagagctaagacgttgaaagtaagtttaggcagaaggatttggggattctgaattagtttaggatcttggtttgggcagtaatatatacattttgtctcctgtgtcagtcacctattaagtcttttgagaaccagatgtgaatcttttaaagcgatttctcttcttcttttattgctggattttgggttgatttttcaggtgacatgctgacaatgtttttgaacttcattgcaggcaaggaaagctctacgtgccttgaagggaatagtgaagctccaagcatatatcagaggtcgtgctgtgagacgccaagcaatgactacactaaaatgcctgcaatctgttgtgaacattcagtcacaagtctgtggtaagagaacacagattcccggaggtgttcacagagattatgaagagagcaatatattcaatgataacattctcaaggtatgtcttctgatctaaaaatgtaaactcgttgccaacagtgcagcagtttattagtatgtattgttttcaggtggacacaaacggtcaaaagagatgggacgatagtcttttaacaaaggaagaaaaggaagcagtggtaatgagcaagaaagaagcttcactaagaagagaaaggataaaggaatatgcagtcacccaccgggtacttcctatgcacttgtttcatttggctttttattgctttacaagtttcctagtattgacttgaaactgatactttgtcaacatcagaaatctgcggagtcataccagaaacgaagtaacactaaatggaagtactggttagacgaatgggtagatacacaactaaccaagagcaaggagctcgaagatctcgacttctcttcgaaaacaaaaccgaaagacgaaactttgaacgagaagcagcttaaaactccaaggaactcatcaccaagaagattagtgaataatcatagaagacaagtttcaataggtgaagatgaacaaagccctgccgcggtcactatcactacaccaacttatatggttgcaacagagtcagcaaaggcaaagtcaagatcattaagctccccaaggataagaccgagaagttttgacacacagtcagagagttactcgccatataagaacaagctatgcctgacgacatcaatgatgagtgaagcaccaagcaaagtaaggattgccaacaatggcagtaacactagaccaagtgcataccagcaacggtctccagggttaaggggatttaacataggccctttgaaatcatgcaataataataatactctattgaacgatctcagcattaattcagaaagatctctacctagctggaacaagcagagcagcttgagatgagtggatattgaaccctgtatatatacatactacatacgttccaatgtttcttttgacttttgagggtcacactcacatatgtgtatcatcaaatattgtttcgtttttttgtttacacttgtttgtttatctcaacttcaaaattggctaatcataagatattgtcattttggttgagtaatattacaagacaaaacataggttattgtaaccaaaatttggtaatctattggtttcttctattaaggaccagcgtggctcaagcgacaccgttttggtaaggaagaaagagcaaaaggttggagaaggaagatatg

SEQ ID NO: 28013 - DNA, 786 bp, Unknown
  misc_feature (1)..( 786): 2750-1469P.txt file - cDNA_ID_2993463; gDNA_ID_1564533; Annot_ID_149617
aaaaaaaaacmaataaataatcmaattttactgaaataaattgtaatgatcaaawawatttaagcattgaatttttttgkgtagtccyaaagktkaatyttkaaaggcygctgatcytaawttgtcyttttttttttgttcgtgcaaagctgctgatctttgttattgtctcatatgtaagtggttagcataaaataatattaatttcttgaatatgcgttgtatattttggtgaccatatacaactacttacatcgatcttgtaagaattgcacatagtaaagtaaatatatcacaaatcatatgtccgataacttcatttatttatatatttaatgatgaaaattgtaaataaaaaaaataatgatgaaaattgtagaaacgaaagtattttaatcgtaaaatggaaaaaattgttagatttttattgatcattttttggtagttgctatactgtttataggttttatatttagttgtggaaataatttataactatamcagaatagattattcatgtaatgacatagaaacagttgttttcacttttcttgttttgtcttggtgccgtggtagattttgataataaaattagagtgttgattaatttatatttgccaaaacaaaataaacaaataaataatttcaagttgaccaattcatatttcttgatggaaaacactgatctcttctcttctattctttctttctcttatgaggaattttcacaatctttgatcatcttctcctttattctacggaagaaatctatatattctatatatg

SEQ ID NO: 28014 - DNA, 3003 bp, Unknown
  misc_feature (1)..( 3003): 2750-1469P.txt file - cDNA_ID_2993463; gDNA_ID_2684240; Annot_ID_192556
caaacattagtttacatataaaagtaaaacaaaatttcaatagtaactctaaaaatagtcttcttgtgaatacttttatccatttcctctttttctaaccaatcaaaattttgttacctaacaaaaaaaataacggaaattttctattgggtttcaagtaaataagagaagctgaataaattttacaaaaggaaaacaaatgtttttccctatatatgtactaacgaactaaataaatcaataattgcgaggagaataaataatgatccgagggaagatctcattggcatacaaggcacaataagaataagcaaggaaaggcagtcaaaagaagtcgaatattatttgtctgttagaaagcataatcctaagttcccatcattggctcatagagaacatataatctttctccaatgatttgatgtctcacactcactagtcactacttttacttttcacattttatatgccatttgcttgcgcaaaaatacactgcgaatgaagtggttgtaatttgtggtttcattagtttgatcgatcgacataaaacgatttgtaacaatagatccaaaacagttgcaagtcgatcgataactagtatgggttcaagtccatgaaattcaatcacagctttgcggaattcaattgcttagatttcttgaagagttttgttaggaatttcatgtctcaacaagaagaaacttaaaataacacataacgaatgttagctaacataaacatattcacgttgtaaatgcattacgttttaatcttagaaattcatgaatgtctatattcttaaagaataccataaatttatcagtacagattcgacatcccatcaatcattcgcatagttatagctctaaagatctatccagtacaatcatatcaaacaaagaaggctaagacatacgaatggacatgatagaacatgaacaacaaaattttgttttccactagagcatatgttctcatagcattaaacctttcgaataagcatcttctcaatactatttagcctcacgagggttataaattctcacatttccctactgacttctcaccaaacaaaaaaaactagaagaagaacgatacataaactatgctcacgcaagaacttgcgcgcattatggggggtgacgatgatgagtattggtgaggaccgggtaatctgcatcctgaggtttaaagcttaatttacgcaggaaatttgtatacgcatatacgtatgtgtattagtataccttttagtcctcgggatgcggattacctcgttcttacttacaatacacgtactcggagacacgattactcatcatctagaggttggttttgatcctccatttcttctaagtttaaacatcattaataagatatttaagactgaatatcaccacacatatatagagtcagtctcatagatgatgaattggtaatattatatgacactactgacttaaaattattatcatataatattactaattatattaaagttttttttcgtcaacatacacactagttaaaaatttgaatttagaaaagttcaattgatgactcatttcaggaatgctcgaaacaatggcaacgacgcttgtgtatgtttgaattagtgatatatccgttttattcatacttaattaaactggtaactctaactaatacgctgtatatttacctttttgtctagtgaataaaaaaaaatcacgacgacctagttttatgtcttttatctattgctcaaaggtcgctcattgcctttgactaatatgtttagacttgtgatttctgctattcaattaaattaattaactgcgtttattaaatttcagttaggtgactcataaaaagaaaacatagattaattaagttatatatatagtataatgatgtacatacaaattcaaaagtactatggatcttgctttgaaaacgagtcagtcaattgattttgtagatttattcagttttcatagatgtccaacactggaataattgttgataatttcaggaaaagcatatgttaaaataatgctaataacaaaaacaaagctagtgatgtgtatcaaactaccaattgtgcagagacaaaaacaaaacgccaaaatgctgtgttgtacccttttttgtcaactgcgtatctgtttttttttcagtataaaaaacttaagaaatctctaaacctaattattgagagtaaaaaaaaaaacaaataaataatcaaattttactgaaataaattgtaatgatcaaatatatttaagcattgaattttttttgtgtagtcctaaagttgaatcttgaaaggctgctgatcttaatttgtctttttttttttgttcgtgcaaagctgctgatctttgttattgtctcatatgtaagtggttagcataaaataatattaatttcttgaatatgcgttgtatattttggtgaccatatacaactacttacatcgatcttgtaagaattgcacatagtaaagtaaatatatcacaaatcatatgtccgataacttcatctatttatatatttaatgatgaaaattgtagtttgataaaaaaaataaaaaaaataatgatgaaaattgtagaaacgaaagtattttaatcgtaaaatggaaaaaattgttagatttttattgatcattttttggtagttgctatactgtttataggttttatatttagttgtggaaataatttataactataacagaatagattattcatgtaatgacatagaaacagttgttttcacttttcttgttttgtcttggtgccgtggtagattttgataataaaattagagtgttgattaatttatatttgccaaaacaaaataaacaaataaataatttcaagttgaccaattcatatttcttgatggaaaacactgatctcttctcttctattctttctttctcttatgaggaattttcacaatctttgatcatcttctcctttattctacggaagaaatctatatattctatatatg

SEQ ID NO: 28015 - DNA, 3003 bp, Unknown
  misc_feature (1)..( 3003): 2750-1469P.txt file - cDNA_ID_2993463; gDNA_ID_2684240; Annot_ID_137757
ctttgaaaacgagtcagtcaattgattttgtagatttattcagttttcatagatgtccaacactggaataattgttgataatttcaggaaaagcatatgttaaaataatgctaataacaaaaacaaagctagtgatgtgtatcaaactaccaattgtgcagagacaaaaacaaaacgccaaaatgctgtgttgtacccttttttgtcaactgcgtatctgtttttttttcagtataaaaaacttaagaaatctctaaacctaattattgagagtaaaaaaaaaaacaaataaataatcaaattttactgaaataaattgtaatgatcaaatatatttaagcattgaattttttttgtgtagtcctaaagttgaatcttgaaaggctgctgatcttaatttgtctttttttttttgttcgtgcaaagctgctgatctttgttattgtctcatatgtaagtggttagcataaaataatattaatttcttgaatatgcgttgtatattttggtgaccatatacaactacttacatcgatcttgtaagaattgcacatagtaaagtaaatatatcacaaatcatatgtccgataacttcatctatttatatatttaatgatgaaaattgtagtttgataaaaaaaataaaaaaaataatgatgaaaattgtagaaacgaaagtattttaatcgtaaaatggaaaaaattgttagatttttattgatcattttttggtagttgctatactgtttataggttttatatttagttgtggaaataatttataactataacagaatagattattcatgtaatgacatagaaacagttgttttcacttttcttgttttgtcttggtgccgtggtagattttgataataaaattagagtgttgattaatttatatttgccaaaacaaaataaacaaataaataatttcaagttgaccaattcatatttcttgatggaaaacactgatctcttctcttctattctttctttctcttatgaggaattttcacaatctttgatcatcttctcctttattctacggaagaaatctatatattctatatatggaaaacatcaaaaaccctaaaaacgcagatgattgttccgatagcatatcaaaaaacagtcatcaaggcgttgatgattccctgaaccagtcaagatcttacgtatgcagtttctgcataaggggcttctcgaatgctcaagcactaggagggcatatgaacatccacagaagagacagggctaaactcagacaaaagcttatggaagataataaggatgatgtcgtcgccgagagtgatgcatccgaagttgtgtctctagaccttaatgaacaacaacaacaacaaggagaagctttgacatgtgatgatcacgatcaatatgttgataacgatataagtcctaaacagaaattagagttttgggttcaagaaagcaagcttgatactaatgatcatggaaaggtcacggaggctagcatagatggttcgagttcgagtcatcatcgtgatattgaagtattggatctcgagcttcggttaggccaaagcgtcgtaaagaagaagacaacatagtctctgaacgatgaatcatatattgattgcattgtatcaatgggaaaatccctatgaaacaccaaactctctaatccgtctattacaaatggattcgtggctcaaattgtattgtaaggtatgcatttgtatcttattgctaccattatcgttgttgtaccttgtattgatatttgtttccttgcttgggttaatttcaccaacaacttttgtaaatgacatacacgtccaaacaaacaaacatatatatagaaattatatatatttggtgtttgctttatagttgtttagggaaaatgaataactaataagcttaacttagctcaacattattgatctggtcatggtagagactattcaaacttgttcactgagaaatattgttacagttgagttatatattggtagtcgtcctcagattttcgagtaagcatttgccaattatgactcttatattcgagattagcactcaacatttaattatatgttagcaaatagtataacattagctagcaaacttataaacgataaatttgaccaaaacaacataaaccaaggtcactttatctactttttgttctctgaattctgaaaacgaatttgaatatcgtattctaacagtgaatattgcatttatactaaaatttacgatcatagccataaataagtagttatgtatagtcaaactatatgtagttatacagtactttaagacgtttgaaccgctaagattcccataatctgcatgataatataatgtatgtaaactgatacatgcacaattgcacatgataaatataactaaattgatacatgccgatttgcgcatgataattataattatatgctctataacatgttaggatttaaaatgaaaagagcaaatggttcaaggctgcaacttggtgacgccaccaatgatgaccttttacgtcttaaccacgttccggtttggttcgagaacttgtttgagatccgctttggatctaaattcagattggttttatttgagatgccgtggaaaattggataatttccaccagagatatatgatttaattaattggattttggattcgattatagtaaaccgataatagtgaggcagtaacgaacaaaacaacttcaaccggatcattgggttggtttagtttactaattgaaccggtttgataatgtttaaaaaataaacaagtgacaacgaagaccagcaggtccagcacacgatcctaaatcctgtgagcatcgtctccatcgctggtcttccattattgacgaatctctttgcctttttttcttccttcttaaacaaacccaattcgatttcaacgaacgcctcttctctctcactctctttcgatttgttctttgccggagctcgtagtgtaagcgtgatccgcggcggagagatg

SEQ ID NO: 28016 - DNA, 3000 bp, Unknown
  misc_feature (1)..( 3000): 2750-1469P.txt file - cDNA_ID_2993532; gDNA_ID_1621100; Annot_ID_55830
ttttcactgagctctctctcgggtgcaaagatagcaactttttaaaggttacagctttatttttataaacagactgcatgtcgttttctatttaaataaacgtcaagcagtgcggttactaaataggaaacgacatagagattgaaatttggcgacaatacaggttgatgcatcgctggatttgctggaaaacaaaccgtcaatctccgtctttatagagaaaaaaagattctcttctcttctcgttctcatcatcgtcttaaagaaggaattcgatttttcgcctgaacctgcggatttttcgattcttcaaattcaatgtcttatgcttatctcttcaagtatatcatcatcggcgatactggtaactccttctctgctacgttatctttcttcaatccatttggaattgagatgatcaaaacctatatatgtttcgttgcgaaaattgaaaagcgaattgatctgaatctgtgtcatatccaactttttttagtggatttaggggtcgagagaagctttggtgatgttgatttttgtatattgattctgattttcaggagtggggaaatcatgtcttctgcttcagttcaccgacaagaggtttcagccggtgcatgaccttaccattggtgttgaatttggggctaggatgatcaccatcgataacaaacctatcaagcttcagatctgggatacggtctctttctccttacttcttcaactttcatgatgtatctctatcttgttttcatgaatacctggattggtttgtgcacatcatcatatatgctttgattttctttgactaggcgacttggctattctgaagtttcatatcctttgtcttggctaatatctctctgtaatgacaggctggtcaagaatcctttaggtctattacaaggtcatactatagaggagctgcaggggcattgcttgtctatgatatcacaaggtaaatcatttgcttctttctgtatgtttatcaaaagtagagttgatcagggaagcaaattattttttttgtgtaagtagtaactagacgttattcttcttttctagattggagttcgactcctaaagatctgaaccagaattagatttgtgtttttgaatttataactgtttcagtcaagacacttacgatattttttacctccgttttttttgcaggagggagacatttaaccatctagctagctggctagaagatgcaaggcagcatgcaaatgcaaatatgacgataatgctcattgggaataagtgtgatcttgctcacagaagggcagtgagtacagaggaaggagagcagtttgcaaaggagcacggtcttatattcatggaggcctctgccaagactgctcagaatgttgaggaggtaaacccccatacgttccaatgtggtatatttgccaattacccaattacttaacatgatttcgactggtgttgtgattttttgctaggcattcattaagacagctgcaacaatatacaagaagattcaagatggtgtgtttgatgtgtcaaatgagtcatatggaatcaaagttggatatggaggaattccaggaccatcaggtggaagagatggatcaacctcgcaaggaggagggtgctgcggctgagatgggaaaaatatgtctatgtcattatgtaaaaatgatcacatatgatatagcaaaaatgtctctgcttctttctatagttgtaaatcgttttggaattcgatttggtgactgtgttgtggttggttttggaacggtttgacaatacacgtgtatgcctattcatatatctaaaaattaagatgtgtttgcgtaaggatctaatggaggtaggaatgtagcccatttgcattgtactggaaaaggtagtaaggatataaatcatatcatgaaggtaagttcagtgtttgtggagaaaattgtattggctgcatgtggttccatttaccgtgttatacaacaaataaagtaatccctttagcttttgtcatgatgaacgatgccttccatgtctttcatggtttactcgtttaacaaagccctccttcccgctatttcgtgtctaggtttttgcagttgtttcacatgatttcttcttcttctttactagagtctattggcttttgttccgcgtgctgtcttgtctttcaaataaaagcctaccaaatactgaaacgccagcaagtttgcaatggtcgacaatacaggttgatatttctctggatttgctggaaaaccaaccgtctttgagtgtgaaccagaacagacgacaacgaaattgaacaagggggtaaaatgagctcaagcaatcataatattggaccagaaagacatgcaaattgagaaaaggaacaaaaagccaaagtcacaaacaaaagaaactgttttatcttacaacttacaagggctatgacaagttattcggaggcctgaggcaaaatttatattaagatttttaactaaattttgccaatcattattaaacttttttttgttagatctttatctattttatgattaaaattataaaatcactaaaaattgattatcatttatttttaaaattgttaatttagctaactagaaaaataatagaggataatttttttaattttctatatttttgtactttttgttatgttgaaatttattaattatatattaaattttatcaaaggacctttttttttttttttttgatccaaatcatgggaccccaaataagaggctattgccttatttaagaagaaaagaaatggcacgtatcaaccttcacaacagactcatcaatctccaatcattgtacaatcatcccaatggtgagacaccaaatctctaagtgacacaatctagaagtttctaagactctatagaaacattcaaaaacgttaaaagtgaagacattgtcggattcttgaccttacccatcaggagaagaagggattcgtttttgtctgaacctacggattcagattcgtccacttcaatg

SEQ ID NO: 28017 - DNA, 3000 bp, Unknown; identical to SEQ ID NO: 28016
  misc_feature (1)..( 3000): 2750-1469P.txt file - cDNA_ID_2993532; gDNA_ID_2926167; Annot_ID_139969

SEQ ID NO: 28018 - DNA, 3003 bp, Unknown
  misc_feature (1)..( 3003): 2750-1469P.txt file - cDNA_ID_2993537; gDNA_ID_2684224; Annot_ID_191900
tagtgggaattaaagcttttatttggggtctgtaataagtaggcgagataagttactcttactctttgaaatctcaaaaccaaaataaaaagtgggaacttaattatgacaatatacatggttcataaaaatgattattcttgataaatgaaccaaccataaaagaaggaactaacagtattccacaagaaaatcagaaatcaagaaatgaagaaaaggagccatgacgtgaaggggaaggtagggttaattaggcggcgtagatgtggatgtgaagggcgatgagggagatggtgatgaaggcgaagaagaggagagtgtggatgacaatggaggggccgcttgtctgaaacccaccgaactcaaccgctttgctctttccgggcagctgaaacaaaactccagggctcaacacgatgaagaaaattaccgacattagcaccggtccccagtccaaccccatctttgttttctgtttcttctctagctataatatacgtctctctataaacatctaccactttattatgtgcttatatttataatgtacgcgtaaatgtgagaatgaacttgatgtcaatacgattaattaataatatatatgtggcttgggctggacaaaagtggagggttcttctcaagtttgtgggatgaaggaaagaactattctctgatatagtattttaaattatctgtacaaaaaaataattaaatatctagatcgatagtattttgcttgttttgaaggccaagcatatgattctcctcctcttcaggcatttcaattcataagcaagcatatgattctcctcttaaggcatttcaattcataagccaacatataacaccttacgttcttgctccggttctgagtttaagggaagtccatccgcttctgacggatgtaataatattcatgcaacatatataagtcatatatatactgaagtaattttaaaacgtcaatcgcaaaaataatacacaatacactaattaacgccataatttttatttttttaacaccataattttattatgcactaacgcggttattaatcaaatcacgtagtattagtaatgaaatagggataagatccacatgaggaaagcaaaagaatcgaaaccaaaccaataaacgcaatcaagtatcaaacactttaactttatatacatagccactaaatgtatatatccatccaacaagaaagaaagatactggtcaagtctcaatctgccttcttttgtcatccttaaataatctcaatagtttctgaatttcaaaaaagtacacaaaacacacctattatcacacgtacaatatatatataccaagtgcattaatacacttgtgtgtgtatatgtaatattgttccaagtagtgctttgacacctaataagacgatcaaatctttttggagctctaattgaggtagatatgggaggagcggactgggggccggtggcggttgcggtggtgctgttcgtagtgttatcgccggggcttctgtttcagttgccggcgaggaggagagtgttggagtgcggcaacatgaccacaagcgggatctcaatattggttcatgccattctcttctttgctattatcacgattttggtcatcgccattcaaattcacattcacatctaacatctttattttaatcaccggcttatgtttgtagtataaacctagcttggtataatattgttatctattcatctctcatgtgcttgtttttcttttcatttttaagataaaagtgtacaagttagcttgtgaaactttactgaagaaaatcaaaaatagagtaagagtagtataaaatacttgagaataaataaatgtttggtttgcctcgttatcacttcttgatgttcccacgatcgatcccttcaagagaaaataattaaaacgaaagattgcattcgtatcagcatttatggcggatgattgcgattattaatgcctcctgtaaaacgtgttttattctgtttcttttgaaaattctttcgtcgaaatgaatcattgccgtaaataatcagacattaatatctgattctatctctttaattacatcagataaaacataaaaatgacaaagatttattataaaataatatagaaaatgaaccgtcggaataatgatctgatctcgctatcgataatgaagccaaaatatatatacagtagaaactaatgacataaacgaggttaaaaaatactatcaaatgcatacatcacccaatcaattatatgtggctgcatatggtaatttctttgtatcctcgattaaacgcaacctgtattgtaaaaaaaaaagggtacacatacagaaaaagactcccccaggcccagtagacattttgaatatagatattttctgaatcaaatgttgattgttttttatttttttttgggtaggcaaatgttgattgttgtatatagaggaataagctattgttagaaaatagtttctatttaaaagctaccagtaaacattggtggtgtgtgtgatctatcaactgagtgagattttttttataaaaaaatttaaagaataagagagatcatcatatattcagtcaatcttttttttgtcggctagtattatactaatcaatttgttttttttttctttgtcggctagtatactaaatttgttagttatcagatttaagttaaactttgaatggtaagttactaaatgagacctggaaaaatgattttgaatgtggtcccaaaatgtaagtatgacagggcatgcatcgccgccgaataaaatactagtaacataatgggaaatatttcgtttaatgttttgtctaattattactctaagttcgactaatacatttttttattaaaaaacaacaactgattaacaacagtcctagttaatttcttgtgaaagaaagattaaagggatctaaagatcatcatcaattcatcaagagaccaagaaagaaatacaaggttgatcgtacaaagaaatcgaaaaaatg

SEQ ID NO: 28019 - DNA, 3000 bp, Unknown
  misc_feature (1)..( 3000): 2750-1469P.txt file - cDNA_ID_2993537; gDNA_ID_1972047; Annot_ID_178260
tgggaattaaagcttttatttggggtctgtaataagtaggcgagataagttactcttactctttgaaatctcaaaaccaaaataaaaagtgggaacttaattatgacaatatacatggttcataaaaatgattattcttgataaatgaaccaaccataaaagaaggaactaacagtattccacaagaaaatcagaaatcaagaaatgaagaaaaggagccatgacgtgaaggggaaggtagggttaattaggcggcgtagatgtggatgtgaagggcgatgagggagatggtgatgaaggcgaagaagaggagagtgtggatgacaatggaggggccgcttgtctgaaacccaccgaactcaaccgctttgctctttccgggcagctgaaacaaaactccagggctcaacacgatgaagaaaattaccgacattagcaccggtccccagtccaaccccatctttgttttctgtttcttctctagctataatatacgtctctctataaacatctaccactttattatgtgcttatatttataatgtacgcgtaaatgtgagaatgaacttgatgtcaatacgattaattaataatatatatgtggcttgggctggacaaaagtggagggttcttctcaagtttgtgggatgaaggaaagaactattctctgatatagtattttaaattatctgtacaaaaaaataattaaatatctagatcgatagtattttgcttgttttgaaggccaagcatatgattctcctcctcttcaggcatttcaattcataagcaagcatatgattctcctcttaaggcatttcaattcataagccaacatataacaccttacgttcttgctccggttctgagtttaagggaagtccatccgcttctgacggatgtaataatattcatgcaacatatataagtcatatatatactgaagtaattttaaaacgtcaatcgcaaaaataatacacaatacactaattaacgccataatttttatttttttaacaccataattttattatgcactaacgcggttattaatcaaatcacgtagtattagtaatgaaatagggataagatccacatgaggaaagcaaaagaatcgaaaccaaaccaataaacgcaatcaagtatcaaacactttaactttatatacatagccactaaatgtatatatccatccaacaagaaagaaagatactggtcaagtctcaatctgccttcttttgtcatccttaaataatctcaatagtttctgaatttcaaaaaagtacacaaaacacacctattatcacacgtacaatatatatataccaagtgcattaatacacttgtgtgtgtatatgtaatattgttccaagtagtgctttgacacctaataagacgatcaaatctttttggagctctaattgaggtagatatgggaggagcggactgggggccggtggcggttgcggtggtgctgttcgtagtgttatcgccggggcttctgtttcagttgccggcgaggaggagagtgttggagtgcggcaacatgaccacaagcgggatctcaatattggttcatgccattctcttctttgctattatcacgattttggtcatcgccattcaaattcacattcacatctaacatctttattttaatcaccggcttatgtttgtagtataaacctagcttggtataatattgttatctattcatctctcatgtgcttgtttttcttttcatttttaagataaaagtgtacaagttagcttgtgaaactttactgaagaaaatcaaaaatagagtaagagtagtataaaatacttgagaataaataaatgtttggtttgcctcgttatcacttcttgatgttcccacgatcgatcccttcaagagaaaataattaaaacgaaagattgcattcgtatcagcatttatggcggatgattgcgattattaatgcctcctgtaaaacgtgttttattctgtttcttttgaaaattctttcgtcgaaatgaatcattgccgtaaataatcagacattaatatctgattctatctctttaattacatcagataaaacataaaaatgacaaagatttattataaaataatatagaaaatgaaccgtcggaataatgatctgatctcgctatcgataatgaagccaaaatatatatacagtagaaactaatgacataaacgaggttaaaaaatactatcaaatgcatacatcacccaatcaattatatgtggctgcatatggtaatttctttgtatcctcgattaaacgcaacctgtattgtaaaaaaaaaagggtacacatacagaaaaagactcccccaggcccagtagacattttgaatatagatattttctgaatcaaatgttgattgttttttatttttttttgggtaggcaaatgttgattgttgtatatagaggaataagctattgttagaaaatagtttctatttaaaagctaccagtaaacattggtggtgtgtgtgatctatcaactgagtgagattttttttataaaaaaatttaaagaataagagagatcatcatatattcagtcaatcttttttttgtcggctagtattatactaatcaatttgttttttttttctttgtcggctagtatactaaatttgttagttatcagatttaagttaaactttgaatggtaagttactaaatgagacctggaaaaatgattttgaatgtggtcccaaaatgtaagtatgacagggcatgcatcgccgccgaataaaatactagtaacataatgggaaatatttcgtttaatgttttgtctaattattactctaagttcgactaatacatttttttattaaaaaacaacaactgattaacaacagtcctagttaatttcttgtgaaagaaagattaaagggatctaaagatcatcatcaattcatcaagagaccaagaaagaaatacaaggttgatcgtacaaagaaatcgaaaaaatg

SEQ ID NO: 28020 - DNA, 3003 bp, Unknown; identical to SEQ ID NO: 28018
  misc_feature (1)..( 3003): 2750-1469P.txt file - cDNA_ID_2993537; gDNA_ID_2684224; Annot_ID_137535

SEQ ID NO: 28021 - DNA, 3000 bp, Unknown; identical to SEQ ID NO: 6891
  misc_feature (1)..( 3000): 2750-1469P.txt file - cDNA_ID_2993545; gDNA_ID_1621111; Annot_ID_56092

SEQ ID NO: 28022 - DNA, 3003 bp, Unknown
  misc_feature (1)..( 3003): 2750-1469P.txt file - cDNA_ID_2993558; gDNA_ID_1621144; Annot_ID_56701
ctatcaaaatctctaaactaatctctatgttcagtttttgatggtttattatcaagtatgtgtctttgtaattatcttctcttctaagattgaatcatcacaatgtttttgaattatttgattttcattgaatatttcaaccaaccaaaatgttttcgttctagaaataaagtcctaaagtgacgtacattcgttttctaatgaaaatgctatttcataagttattcctttcattttttttgggtcgtcaaaacataagttaatattctttttttatttgactaaaactacttttccaaaattttcaccggggaaaccttctcaaagctttatgagcttaaacatatgcaaagtgtctcattaacttaaataaatatagagtacaattaatttgttcacaacgtttttaataggaaacttagaatatgttctgtgatgcactatatgttgcttcgtaaggaaattgcatgcgaaaatctagtggaagaaatttagttaaacggcaaaaatcttcaattaatcgtttcctttatctacattaccaaaaggttgcgaacattatgcgacatatggtggttagaacttaatacactaatgtttttcaaagatgctatttgtggagttgataaagacaaaacatatttgaagaaaataattttaaacatgtagtgtttaggaacatcacggcttcatagatatagagtcaacttaatatgttacaatgatattgaaatatgttctctaaactctaaaaggttctacctgattttcttaaacaatgcatcttcgaaagataaagaaaatatatttttctattttctctttacatgtcaatgcttactatatcatcttacgatatactataaacgttttattcataagtaaaagacaagtggcagatacgttaaattttataatagaaataaattagttaaatcttaaaaagttgctgaaaatagaaagcaaactacttatcttaaagcaaacgtaagtctctttaagaagaaatacaaaatgaatatatatcggattaaatcaaaaaacaaaaagatacacttttgtttttctgaacaaatgaaaaatgatatacacaagtggcggacaatccatctatctcattttagcgaacaattaatcttgtctgcgactgcgacctatttttttctacatcacatcttttgtttcgtatgaacactaacatgattgaatgacaaaatttactaacaattcttatagtactgagctctcctgtccaatatttaaaaatgcatacatttttttgtgtgtaactaaaattagtagaaaataaatgctagtcgttaaaaagtgcatatagcagatttcgagttttttttaattgcgatttcgattatcaatggtcgatcgtagacgtcttttttagtaaacaaatctgaaatttctatgaaggttaccaaatattttggatttcaacctaagatgaagttaacctatggacgtgtagaacagtggctgaagtctgaaatgataagataaagttcaatatgaatacattactgagatgttacaaaaaactacatcactgaataattcctttattttccagtttggacagtagaacctatcgctaattatttaattaccaattaaaagaaaaagaaagaataattcctacagttgttaggctatggttataagtttcatctttgaacttaagaaatgctctaattagtggtaatggtagttacatctatatatgttgatgcaatgtcaaaaagaaaatctctcaaattagcaaatccatacctatttatagacgcataagtatatataccaattatcctggtcgtgcaaatggatggttagtatttttacaaccaaactaatgtctaattttaaaaagtaatcattattttgctttagatttttaatagttaatattatatgtatagatagattaccgtatgatataattgtttcaagacactagatactatctcaattataaaactcacttttccataatatggccgcttgtttataaaaaaagaagagaaataaaacaattgatttggtttatattatttaattgcagatatcttgtacttaattcattttgagataattttgcgtatttgagttcggacattggtaggtatggacgatgaaaataactgccttcattctacatgtttgagatttgtttgtcgaccatataacacaagcggctagaaaaataggtgactattctcaaatgtcctggttctatctaacctgaaggatcccttgttctacctggtataactacaagaaaaggctgttttataaaatatatcatttcttctatgatttctatctcaactttttttttagtttttttcttttagaacgttttcgctttcgaattttttaagaattttttttttctttatatctctaaataatagttttaaaaacataacaagtgatactgtaatttttttttctctataaacttggcggtaccctacttttttcttatttttattaataatcttactttgttatgataaattatgttaatatatggcaaaactaaatatatatgaaactactgattactcattatcataattaatatctttgtataaaagtaaataatatttagtcgagagaggtatcttgttaaaggaaataaatcaaaaattagtggctaccaagtgggagatataatttggaatatttccagtgtattagtgtggtgggtttggaataccacaaacagaaataaaaagaaagaaaaatatgaaataagacgacaatgtgtgatgtacgtagaatcagttttagattctagtacatcaatagacaagaaaaagattgtggttatgatttcaccgacccgagttaatgcaaatccgaaacagtataaatatgtgtagagggttcatgcctatgatacaaattaaagaagcagaaacaaaaacaagtaaaacagaaacaatcaacacagagaaaccacctgtttgttcaagatcaaagatg

SEQ ID NO: 28023 - DNA, 3003 bp, Unknown; identical to SEQ ID NO: 28022
  misc_feature (1)..( 3003): 2750-1469P.txt file - cDNA_ID_2993558; gDNA_ID_1621144; Annot_ID_172944

SEQ ID NO: 28024 - DNA, 3003 bp, Unknown
  misc_feature (1)..( 3003): 2750-1469P.txt file - cDNA_ID_2993569; gDNA_ID_1620742; Annot_ID_49641
cggtttaaagaagcagtggagttcatggaagcactcgcaggaacttggccctcttgctcatccttcatgtaaagcattccctcttacctgaaggctctcacagattatcaagttcttctcttattgttaacaatccctgatatattatttttttaacatgtccataattttcaggtatacacacaattggtggcatgttgctctctgttacttagaaggagggtccccaatgagtaaagtagaggagatttatgatcatcacatctggaaagaattggagaaagacgatgctgttcctcctgaagtaatcctctttttgattaacaaatttatgcttttgcgtcatctattcaatattcaactgtctgcaactctttaggtttatctcaatgcattgggcttgttgatacgtttagatgtaagagatgctcttgatggttttgaagaccgtctcaaaaaccttgcagttcgtttaactaatcaggtaagccatacactagttttatatcatcccaaaacggttgcagttatacgagttatcttgttgaataagtttttatttttcggccacttgctttaacatttcaggcaaactggtatttggagtggcaccttgatatattgatagtttgggcactagcaaaggttggagagacttcaagagctcatgaattacttgagggccttaagttccggttagtgtgactttcttttattctgcagtttctaaatgataccgaatttgtcatgaacttgtgttgttcttgcagattatcaaagaagaacaagaagaagcaacaagtgatgcagaaagggattcaggtttgtttattccccctccctctttgatcgtctttctttatcattgtaactagtactcaatatcagtcttgttttcatataagcttggggaagctgtgtatgaatacgcaaggggtaactacgaaaaggctctagaactactgggttcagagttcaacgccattggttacaaggtaaaccgttcttcagcgacttgctcaaaatactctgaatcaaacacatttctggtggatcttttaaactgttttatggttaataatagatcgttggggcatcagacgaacaaatagatgttttcaacgaaatgtggtgccagctgctgctaaagacaggccaatcctccacgggtaaggcttgttgtagagtcttactaatttggatactcgtcttgcttagtatgatgataaacaatcgtggttctgatgtatgcagccaaagaagtaatcagagagaggattaaggccagagatggtattcctttcatgtggcgtttgctggtatacattcaaaagcagaacatcactttgttttagtgtactatatgtgtttttgctatgagaaaatgatgtcgttgtggttgcaggagaaaagttactccatggaaggcaatgcagaggctgagagtagtgcacgagagagagctaagaaacttgaatcttgttatttctaactttgcttcaaaaatccaataatgacatgtgtgtatacatgtttttaaataagtatagaataaaatattttgctactcgtgtcctacttttttgtttaccaaaaggtaaatgaataagggggtgtattgaaagtggaagtttaagagatttgtgtagaatttataaatcctatgttattcaaacatgaattttaaaaagtttcatgaaattcagtgttattgaactaatgatttaaaaatccaccttaaaatccactgttattaaaaacaatttgtggatttgaattttaatgattttggaggatttgagaggatttctttagttaaaaatacagaaatccaaattccatggctaccgccagtggtgtaacaaactgtggaatgctgtcagatttgcgatgatgaagcttggcgatgggtatactcctcctgtgcaaactctacgccctaaaaccatgaccttcagctgccaatggattctttctttactaacaatatcgaagacagtggattccttgaatgcgtttgcattatcggatgctgccaacagtgtatgcttggtggcaataccagttctgtgatgtatttatcgaggcaattaagccttatttttctgctgacactcaaagaaggattcatgcacaagatgctctctgggtgtgtctcgagactggtttgagattgctgcatccatttatgccttatattacagaagagctgtggcagcggttgccttcatcgcaagactctgaacgaaaggcgtctatcatgatatgtgactacccatcttccatagagatgtggacaaacgagaaggtggaaactgaaatggacatggttctagcgaccgtgaaaactcttagggcactgagagctgcagagtcgctaaagagacagagaaatgaaaagttccatgcgtttgctctgtctggaaatgcattaacactggggattgtgaaaccacatgagctggagatcagaactcttgcaaatctctcatcctttgaggttatgttgaggggagaagacaaagcatttgtagtgtgttgggaggaaattgaaatttggattagttacaatgtgctttattttattttatgtaaactatgtccatcgttttgaatatgacggattcgatcatggaaaagcaaacttaggaatttccatgtttcaaaaagtcaatgcatccatacaaaaagttatactacatgaattaagaagtgttgtgtatgctttagcactaactatgttgtaactaaaagctaattatgctttagccgacaaaagaaaagaagaagcttactaattctctccattgtcacgaaaagaatctgtctttcaaacttattttaacattgtggcattagaaatcgaaattcttgacgttttcggtttgtataagagccatgtcgctataatgtaatctttctctccgggttcacgtaaagaatttctctgcaccttttccatctttcaaaactttaatttcgaagaggaaataatcgaagatg

SEQ ID NO: 28025 - DNA, 3003 bp, Unknown
  misc_feature (1)..( 3003): 2750-1469P.txt file - cDNA_ID_2993581; gDNA_ID_1621084; Annot_ID_55344
ttttaatccttaaagagataaattaatttactctttaaaattttatttctaatggcatacctatgtaattacttacaaaaattaaggttacatttaaaatgtacttcccaaataatatagtaggatataaattataatctactgatcataacgcttagtttatagtacttatttgtattagactttcattgtacatgggaaataaaatcttaaaacaatctctaaaccgttaaactctagaccaacaacgaacccaaaaggccaaatgcatttatatgaacaagtttgattactagttccaccaaatttctacaataagtttccttgagatattccatagtaatttgaagttgatttttaattgacatttgttgcattataaatgagtaagatacgccatataattgttgaaagacctaaagcgagtttgagatcattaagataaagaggtagtcataaatcgtttatcgtcaaggtcgacgaaaaaaagaagtaaagtggtcatattcgatttctgataggtatgtaagagagagattaaatgctttctaaaattttatacatgatttggacctcttatctaatatcattcactcaatttatggacgagaacataacaaaaatttaaatacttatcgaagaaggaagaaaaaatatttagcaacttggctttaaaggttattccacttgtcactattcaaagattcgagttttgagcctttgagtaataccttggtcacccttatattgcaaccacgtggtataaagattgtaacgctttaattccaatgaccccttattttgtggacttttgtcatcaattgtaccaagtttataaagatatagaaactgagggcgtatgaattgtttcaagctagacatcaacaaaaaaaatgttatccactttctcaaatctatatatactaaaggatgtgtatttaatctagtagtttaaattatttgtgtaaaatttacaaactttatgttatttaattatagattttaaaaactttaatgaaatccaatgttattaaactaataatttaaaaattaactttaaaatcaattgttattgaaaacagtttgtggagttgattcttattcatcttgaaagatttgagaaaacttctttagttacaaatacacaaattcaaatctcatggttttagatagaatttgaaaagatttctataattttaagaaagttgatgtgattaattgtacaatcttttcaaattccatctacaatcatgagatttgttttcaataacagttgatttaaaagtaaattttaaaatcgttagttcaataacacttgattttaatagagtttttaaaatccatgattgataaattttacacaaatcacttaaaatactagattgaatacacttctacaaaatcatcaaaatcatataactacttaccctccccctcccacccccctctaaattaaccgtcattttaacaaaaactgcatgtaacaaaactttcaaattttaccgaatgtgacaaaactttcaaaactgcatgtaacaaaactttcaaattttaccgaatgtgacaaaactttcaaatgggacaacactttcaaaaacagcaacatttaccacatgtcacaaaactttcaaattttacttttatactttcacgtaatctaattctattaccactttgttagcaaccactccttccccatgatctcaaaatgtatcctctcctctaaactttcttccacttttttttttataagtaattgtaacagtcaaacagatgcattaacttcttctttattgctcttctttctcacaaactcagaagatcttccattttttttttcaaaatccaactaaaggcaattatgttttattttgccaaaatattttgatatatgatgtaatttggcatttattttgtatcagcatagcaggggcggccataatcttagtatatgcatataattgaggctgctcttaaattttagcgtatttatattgtagtgaattctttgtcttgtataatattttggatgtaggacctgaatgttggtacatgaagacaatctaatatttttaaagcagttatcattaagcatttaagcaagtaatgaaacacaacaacacggtagaaatttaagcaagcactttgatgatctctctccttaactcaaaacatctttatagtattgttgtgtttcattatttgttctatgttaattgctttacaaatattacactgtgtccttgtacaaatatttaggtctaatgctaaaactaatttttcttttgattcgcaacactcaaaataaaaaactgatcgaaagctaaccttatgttatactctctgagttctgacacaaacaagagaagaaaagagaggaaagtgatttagatgctttgatcgatgatagaatgagaagacaaaagcttgactttatagctaaagatcaacgtctatgccataaagtcaagcataattcacacaatatataagttgaacatgctatcaaaataagcttactacattggtgaaattatgcatgtgtggatatctcaagaaatatgcatgagatgcattactcttcttttacgctttgtgatttaagatattgtatgccaaatctatgtgttgccaacattgatttctataccaattggttgatacaatgactggaatttatcctttgatttgccaacattgatttctataaaagttaaacaaactaaaaataaaaagggaaaaatatttaataaaaaatgtacaatattaaatttccataaaaattttatatggttaatgttttggattagcattagtccccaaatcccatattaagtaaatccattttgagttttgttctcgcaaaccggtttaacccaagaacccaaagatctctctctatttgtttgccttcttctttctttctgactcaaaccctcaaatcaattctcgcgattaagcaaaaccctagatttattctactcttcgaagtcgatttcaatg

SEQ ID NO: 28026 - DNA, 3003 bp, Unknown; identical to SEQ ID NO: 28025
  misc_feature (1)..( 3003): 2750-1469P.txt file - cDNA_ID_2993581; gDNA_ID_1621084; Annot_ID_170460

SEQ ID NO: 28027 - DNA, 3003 bp, Unknown
  misc_feature (1)..( 3003): 2750-1469P.txt file - cDNA_ID_2993585; gDNA_ID_1621084; Annot_ID_55351
ggggaaagtcagcatcctaaatgaatgtcattgatatactgctttcaaatacagtgctttactacactgagactcagctaaataactgcaaaactggtactttggtacaaagtacatgcatacaaaaacgcacctagactgaaaatttgttttcttctcctttttaaccaatctctagctatcttgcttaaatagttctgtcaaagaatagatttactagtccgaattacaggtttctaacatctttcagttattagtttgtggtgccacctatcgatttgatgttatgaaattatgaatgcgtaaattatattaactaaaaacacataccacaacacagttattaccggaagatgcaagattctccatatcttcaacacggtttaatgctctgtaaagaagcattagaagcgtgtctattccctccctcactgggagagttaagcccttctcacgtgatatctcgaggtacctgtcgtaacatgtaacgttatctcattatatgccaactcagaccacagagaacagggatatctacaaaagctgtagaggaaaacaatatacataaaaagtgtaattgtatcacctggttatgtttttaattgctgaatccagtaaatcagctctactagggggatctgagaaaaactcttcgtcaaccggagtgtccattcctgcttttctaagaaaattggctctctggatggccatcagcccattatctacaacatcttcgaaaggagctgggggaggatgcagtccccagtatctgtttcttggaacctgaaaccaagcaaaaattttagttaagcagagtgcagctggacaaggcttaagacatcataaagttcgggttcgctacaagtcaggcaatgccttgagtaaggaaaataatgaactgtggttgataatcagtcaatttttagaaacaaattagagtatataattaaaaaccagctgacaggaaaaaaaattataccaccaaagaccagcgattaggatcccgcatgataaaaggaaaaacttcagaaggttccattttttctgacttcaaaaattgattcacagcttcctcaaagcgcaaatcaaaaagcagtagataccctatttgagcatgaagaaacgaaagcatgtctttcgaaatttccccctgtgagtcaagttcctccaccaaggagatggtttctctatatctctttttcctcaagaggtctttaatctgttcttcataaggcactctccgataaaaaataagctgaaacatcacaatgaaagagtcaacaaaaaattcttgactattttattaacaagatatactccaaagaaatgaagatagccattatcaggataaacacctttgacaaggtagtgacaaccaaaaggtttccgtctcctgcctcatctgcggccaaaagtgaaggcccacatccttgaggaccaaaactaactgattgaacacaagcaccagacttcttctgatgtatttccatttttccatctccaacagtcaccaagtagaaagacaattctccaacagaatcaggcctcctccgaaacacaaggctccctccaataggctgaccatttgtgtccacaacaactccaacattgtccaccaacaacaacactttccactctttacagagcaatttaagcagcggcggtccagaaacatcaggcaatgtgaaaataaccccacttagaccagtgacacacgagatcaaactataacctttaacagttcccgcaataacataatcatcaagccaaaccaaagttttgatcccaccaattcccagaatctctttcaaaacaacaaaggaaccacttaatccttctttttcagcacattgaagttcaatcagcaacattctctcaccaatagcaacagcgaaaacatagtgaccttgttggactctctcatgtctagaatcattacctctaacatcactcacaagattcccagcaccaagcaactgaagaaacttcttactcgagctagaatccgttgaaatctcagaaggcaacaagtcagtactcgacgaatcacgtcctcttactctcttagcaatcacattgatccctttcaataaaccacccaatctcttagctggttgagaaagaagcgaatccaataagaacaagtaaccattgcagagagctagaactctccctctttcctcgccgagtacaaagatagactcaacaggagaagggctcagcgatacacttgcgagacgcgagacggtattagttaaagtgtcgagagataggagaatcagagatccggagtaggttccgaggtatactagggtttgagaatcggagataggtgagagagataaagctcggatcttatcgtcgccgccgagatcgaaacgagcggtgagctccacaactgcccgagatttggacatgacctaaaccagatatacgatgtacaatggtagtgatcggatttaagtagaagaaagaccgcgattgaaaaactccggtgatcagtgtcgccgcttaccggtaaagtaaagagtcagacacgttcgagttattttgacttaccattacagcttaacaaacactaaacgctgtcgtttaaagcatcgttcaattataatatttgtttttgttttttgaagccaaaaacttaattttcaagttaagccctaaacaaatcaagttccttaaaatgttattttctaaaaaaattttgtttttttgtctgaattaattggttgcaaaaaaatttgatgcgaatatgcgatataaattcaattttcttgaatttttgatttgtagttttttctggaagaaaactaattttaatttcgtgatcctaagaacagatagacacgtggcgctctagatcgccagaagcccatccgaaaatacgatacttggcaagaacaaagccgcgccaatccaaaagcccaaactgagatggcactgcttcaatccaatcttcgtcttcatcatcatcatctccattaaagctgcttaagaatg

SEQ ID NO: 28028 - DNA, 3003 bp, Unknown; identical to SEQ ID NO: 28027
  misc_feature (1)..( 3003): 2750-1469P.txt file - cDNA_ID_2993585; gDNA_ID_1621084; Annot_ID_170470

SEQ ID NO: 28029 - DNA, 3000 bp, Unknown; identical to SEQ ID NO: 7131
  misc_feature (1)..( 3000): 2750-1469P.txt file - cDNA_ID_2993590; gDNA_ID_1621128; Annot_ID_56422

SEQ ID NO: 28030 - DNA, 3000 bp, Unknown; identical to SEQ ID NO: 7131
  misc_feature (1)..( 3000): 2750-1469P.txt file - cDNA_ID_2993590; gDNA_ID_1621128; Annot_ID_172409

SEQ ID NO: 28031 - DNA, 3003 bp, Unknown
  misc_feature (1)..( 3003): 2750-1469P.txt file - cDNA_ID_2993598; gDNA_ID_1620744; Annot_ID_49675
gagaaccggtctttctcatctctagtcgaaattcagcatttatctaagtgtaacaacaatttcataattatttcttattaggtttttcggtgagtttgaaccgggatatatattttgtaaaaatttatactatatatcttatcaatataagaaaaagaagaagaaggatatgtatctcagaagattagttacatctagctattgatgctttcaaagccataacaaaaaacgaaagccttggacttgttagacttataataaaaaagtttatcattcaaagatccatttctttataatttttataagaatctttgtaggagtagtgaattattgcaattttggctgattatatgagtactgtttgtggttgacaacaaaataagtgaactgtttgtgatgtatatatgtttatataaagacaaaatgatggtgtagtttagcaaaataaagaaattaaaggaccattggctgggataattttggagaaatgaaataaagagagaaagagagtgacgtcgtaggaatgtgggggaggaattaaagagataaaagggaaaagataccgaatcttctcatggttttgcaacttggtcggttccaattatttttcacacccactttaaatcataatattgtagggaaataatttcaagctacatattgtacattccgagttccgacagtactgcattccgatattttaattgattcaagttttgattacattttttctttttgctgatttggaaaaaaatcttgattttgtatcgtcatcaaacggttgaatttagagatttattgtattttatatattctatataaacttaacttttctcgtgttcaagtagtagctaggtcgccgaccttctgcatgaatcacatgtctcgtaagtttagagtagtaagttaaaattcattaattgtattgtctcaagaaacacgcatgatacaatagtatttttaaaaaaagaaagtaaaatttttattttattttattgttttcatatatttcaggatcgaccatgatcagaagttttctagatgatatcgacacgaaatgtcagtctatagaaaccgttagcagtgatcagtgatcacttatatagttgctaaattgaccgttacttgtcatcgttttatgttttatcttatcacccaaactgttttttatcccacagtaaacacaattgatgacaactaaaccaaataatatacgtgtttcaaacttaaaagaagaaacagcatcgtggaagatagcccattcccagagtggctattttgtaattaatgaagttttccatgtcctcgatcaaaacaactaagcgacaaaaaggaccgcccgtactaactcgtgagatccaaacgctgctactttcacgcgcctctactacaaattcctctttgcactaacccaacatttaatttctcagattattgatgtaaatgatttaattaccagtttcaagctaataatcaacggtacataaccactttagccaaatcggtctggtttgatttatccaaattattttacacaaaccgatcttgtaagctaaccacaatgcaaatagctaaatggagagtataggacacgcgctataaagaacgtgtgtgggagtgggaatagttcatattaataccaccactaactataatgttcgcttcgtcatatctgactaattactcattaatttataaggtttttatttagtttcaattaaattataaaaaggtttgtcgtactattccactagattcctattaaaacctctgacacagaaagaagggtttcaatctcattaaagagaaaagaaacgattagagaaagagaagagggtagagacttcttttctttgtttctgtggaggctcttcttcttcttcttctctgtctctgtctctgtctctctgtaatcttctgtgctctccacaaatttgtctctcctctctctcgccgactccacaaattttgagcttctttttttgaagttcttgaggtaactaaatctcactctctttatagttttactttgtttgattttgtcaattttgactctttgaattctggggttttccattaaaaaaactcagaaagttctaagatttatctctgaattgagtaagttctattgaaattggcgtatggattcgacagatttttgagcacgatgtatgttttaaatttcgatgtcgacgcaccataaattttatatatatgaaattgaaatcttgataacaacagatttggtctcatcttcttcaagttgttgttgttgatgtggctgctgcttagagtaatgtttgttgctgcaagttggcttattgtctaatccgttatattattattttattttatttatatacagttgtgtttcgatttgtaacattttagattccgtctttgaccaattaaatctttcctccaaataaaatatttattttcttgctttcatgtttttaattttgacagctactactactaagttcgttttaagcatcaattcgtttatgcaaatagagagaatatcatgtcatgtcttaaaaaacaaagttgctcagaaacaatctttttttggttttgattttcaagttagtagtaggaggaggaggagatcttttaggaatctattcctctgttttttttctttggttgagaaggacccagagaaactcttgttttgttttcagagaatctctgtttgtggtctctctttatgaaatctttatctctatcttctttcagattctgcttcttctgtctagttacttagtggccaagattcacttatttgactcggcaggcaaaatctaccgaatatcttatcttcttgcaacttgtttatagacttaaagctgtgtacttactttgttttgttgcttcttcttatcctttgtcttgttctgtctcttggtcgtgatatgaattagttctttcttcttggttaaattgcagaacaagtgaaagagcttaatatccacaagactcttgtttctttcttaaatg

SEQ ID NO: 28032 - DNA, 3003 bp, Unknown; identical to SEQ ID NO: 28031
  misc_feature (1)..( 3003): 2750-1469P.txt file - cDNA_ID_2993598; gDNA_ID_1620744; Annot_ID_166580

SEQ ID NO: 28033 - DNA, 3003 bp, Unknown
  misc_feature (1)..( 3003): 2750-1469P.txt file - cDNA_ID_2993602; gDNA_ID_1620744; Annot_ID_49685
ttttgagcttaagattctataggacaacatgatgaagcatgtaaacaaagcggacccctcataccacccacacacttactatcatcaataaaatcaccaaaatggtcaacatgatgttgacttttttgtttctcatgatgtttttggactcatcaaattaatgtccattctaaagaatttatttgggagattctatcattttcctctagctcacgtgtgtaatcatcagcgaaaccgacgcatggttttctatttttttcttccattactaaatccacaacctttattaacaaaaagagttataactaattagttgctttcaaaatatcaagttttgtcctaactatcactctgtatctgctcacgtgtattttatataactaaggatcagtgccagagaaggagattagcttcagagacgcacttaaggctgcaccacaggctacggcagccggtggtggtgcttccatggaggaaggagccgccggaaaagacacaactccggtggctgcgattggcaagcaagaaatgccaagtgcaattgtaatgatgcgcctcatactaacagtcgtgggccgcaagctttctcgaaaccctaacacttattccagcctcttaggtcttgtctggtcacttatatccttcaagtgagtcaaaaaataactcaaatatcaaaatttcaactataatcattgaatttgtttgttatataactttaactcatattttattttgctaaataatgagcagatggaatataccgatgccaaatatagtggatttctcgataaagatcatttcagatgcaggtcttgggatggctatgtttagtttaggtatgaacatgttcttataaacctgcataataaataaaattatgtataacgtattctaacaaaattaaactataggcctgtttatggcgctgcagccaaagatgatcccttgtggggcgaaaaaggcaacaatggggatgttgatcaggttcatctcaggtcctcttttcatggctggtgcttcccttcttgtcggattaagaggttctaggttacatgctgctatcgtacaggtaaactattcagagtttaccttgatttggcccatatatattattgttggaaaattaaagaaaacatacttggtgatggagaaagtgtttaagattttgggagtgaattaggaagtttaacatatagaagggactaattagttaaaaaaaaatgaaggatagatatgttcatagctttcaaaagtacaaatatctatctcatataaacctaatatagtctaccattatatctagacttatatgttacaaagtatctagatattatgaaaatatctagatattttacatgatgcaattctcctgtattagtctaaggaggtattaatattttaagatggttctaaagagactctttaacttgtttcaagttttgcgtttggtccaagaaattaatgatacctggatcattgacacataattataactaatccaaaatcaagttaaatatttcaaaatataaattacccgtggctataatttaaacttcgtttcttataaaagttttcgattaacttatagtagagatatgtacatctaaatttgatgaagccgatatgttcttttaggctgctctaccgcaagggatagtaccatttgtgtttgcgagggagtacaatttgcatccagacctactcagtacattgtgagtctcttgctcttctttttgttgttcttcatttacatttacggttgaacgtttcaaaatgcggtattatggtttatgtgaaatctctgttcttggtgattttttgttttgttttcagggttatctttgggatgatagtatctttaccagtaactattttgtactacgtcctcttgggcctatgattcacacaacacactgaagaaaaagattacaccggagaaattaaatgatctatgaataaagaggtctggaaatagagaaatgtgagctcttaagagttgttcttgaggagcttgtgagaaagattaattaacggttaattacattgttgaatcaaattactggtaaatggttaggtgaataatttaattttatgtatttgatatccaacattgatcgacgtacgtacgtagtgaggtagaggcttaggttaggaatcaatcgtgaatactatttcaacgttgattcccgcgagctgaatattttttgtgatgtatagtaaaacgcatatgattataggaatcatcataaagattcttgtcatgaagaacaatattaaaccaaattatgcattacgagcaaaataattatacaaaaatactgataattataacttgggtcattgtattttctgtgtaatgtctactatcccttaattagtcggtttaaatcaggaaaaagtataattaatgacactcataattgtatcgttaagacttgaaagtgacggccaagaatacaattaagagccaattagtgatctttcataactttaaaaatctcacaaaagtagaaaaaaaaaattccaacttgatgaccaagaataatactattaaagagctatttaagatgaaaccgcccgaaaccaaaagcattcgatgggtacaccgattactgcttttagcaacaccacggcgtgaccatcaagactaattaactaagaccacattttaaaaaaactattaataattactacaatttgtaattaaaaagatcaacgagaaatgccacgtggacgaatactagcaacgccaagtggaaagagcgttcgagagaacaaggcaaaaccaaatacgcccctagtattctacagatgtcgactggataattacaaaagatttcaataaacagtactaattaatttctagtggtgagtttttgtaaatatctacttcttccaattaccagctgctatataaatccccttctctgtttctcttttcttacatcacaatcacacaaaactaacaaaagatcaaaagcaagttcttcactgttgataatg

SEQ ID NO: 28034 - DNA, 3003 bp, Unknown; identical to SEQ ID NO: 28033
  misc_feature (1)..( 3003): 2750-1469P.txt file - cDNA_ID_2993602; gDNA_ID_1620768; Annot_ID_167384

SEQ ID NO: 28035 - DNA, 3003 bp, Unknown; identical to SEQ ID NO: 28033
  misc_feature (1)..( 3003): 2750-1469P.txt file - cDNA_ID_2993602; gDNA_ID_1620744; Annot_ID_166595

SEQ ID NO: 28036 - DNA, 3000 bp, Unknown
  misc_feature (1)..( 3000): 2750-1469P.txt file - cDNA_ID_2993606; gDNA_ID_1621202; Annot_ID_57697
ggcacagaatgaaaaagaactaattgctataaagagttgatcaaacttacagacgcttcatcaaccaatatagaaggaagtttcttttcagttgcaatgacaactccatttgaagctgcataaagaaaacaacagtcatgattaccaaagacaatgttccttaaaaatctcctctcgaatttgattagatcattgaaaaaacctttaattccaagtgatgtttggcctgatccaacagctgttagggcatgttctatctgaaccagcttccctgatgggctgtttcataaaccacaacatgaatcaaaccccgaagaaaccgttccaaatgctcagaaagagataacattgatatgataaacaaagttaatacctgaaggtggtgagagaaaacgagtactgactgtcccccattgaaaaccaactaaatcaagctgcaaaaaatgcgaaatagtgtcatctctggaaatttagaaacgtggaagctaaatctgttcttcatcaacaatgttcaaacttaaatgaaaagaaaccacgtctgagcaagtaagtagactgaagcgttcaaatctgacaaagcttaaaaacccggaagagtctcatcgccatgggcaatgtgtaaggaaaacgatgaaaaagacaagatataccaaccctaattaagaattgtgagtgaatcaaatcaaacacaaactcaaactcaaagatcagctcttagctcaaactcagagacgaaaattgaaaacttttcttaaaccccaaattcaatatatttaaagttatcaatttaaattcaacaaaagaaacccattcaatcaaagcaacatacctttgatatatggatcgaacggaatggtcgcaagagaagagagagagaagagacccaagtgaagaatttttaagctctcaaggtttcttgcacaaagggtgagagtctgacgccagaaaacgagagaaacaaaaaaaccaaaacggcggcgttttaacaacttcacagttactgtatcttacataatagtccaatattttatatctcttttcagtttgaaccacattatttatttactacccctagtcccctactctctctcgcttccacgcccgactcggactcaaacctggtccgaattggctgtgtctctctccatcgcctccttcttctctgacaaactctcctccgttggtcggagtttgtttcttcgctcgttcatcacaagcttcgtgtactggtaattgttccattttttctagctatttcggaaaattggatggaagaagcatctgaaatacgcgtgtaaatgtcgctgattgtgtcgttgaggcagagccattgttgattcttagagaaaatttgctcctttatttctccagtttgttaaactctcgattacgcccttgaaatgcattcgaccgggaagagaaatttcttagctgttatcagattattgtttactagttcgagcttggtcagaaaggctggttgtagaaatctcatttctgctacctttaccaccaggtgttcgacgttatgcctgaatgaatctgaagaatgcattgaggattctgatctatcgtctaggagaaaaaaatttgattatgttggagaagttggtgaaaaagagaaagtgagagatattactagtagtcctttacaagttttacgaagatggggttgtgatgatgatgaaatatccaagctttttactcgtaggcctgctttgcagagagccaatgttgctcagttagagtttaagttaagccttcttaagccactgggaatcacgtcttcagaccttgtgaagattcttaactgtcgtcctaggttctttagttgccgtcttgtccttgatgaaaggatcaactacttcatggagattttggggtcaaaagaggtgttgcgcagagtcattatccggaatccgtcactcatgttgtatgacctcgatgacaagatcaaacccgcgatagaatactacaaagggttgggctttagccaacaggatcttgtcgcaatgttgatatcgcgacccacgttgattccaagaacaaactttaacaatgagaagtttgaatacattgagaaaactggagtcaccagagaatccaagatgtttaaatatgttgcagtcatcatcggggtctcgaggatggagacaatcgaagagaaagttagaaacttggaaaagtttgggttctcggaagaagagatttggcacctgtatggaaaatgcccaatccttctctctctctctgttgagaaagttcagagaaacatgactttcgtcatagcctcgatgaaacttccagctcattccgtggttaagcacccttgtttgcttctcctcaacctcgagtctcgtctaaaacctcgtgcggatctcgttaagagagtcttggaaatgcgtctaaagccattgataaaagaagtgagcattttcagagcggtaaggatgagcgagaaacggttcttgaaggtttatgtaatgtgtcatccacaagatattgcaaccgagctgatggagttttacgagaaatccaaaaacatgaaacgtttagctgagaaatccaagaaatacatccgtaaaggattccccttttgaatctctttttcatcttttgtttctttggatatgttcattaaagatgtaacattgtgtagaattttccagctttatcaatggatacttttgaatcggttcatgttttggtttagatcagattagttaaaccggaatagaaaaatatcaaaacacaaaacgcgaagaagcacgtttggtgaaacgaaacgccaaagacgccctagacgtgtctctcttccagacccgttcgtggcggcagtgacaaaatcctctttattgataaaaacgtttgcaaagttgcaacctttttgggtttagtacttgaagagaatcaatctgacagcaaatagttttggcgtctttctaactcaacccatcatctctgttgcattttatcgagagaatatttgaggtggatatg

SEQ ID NO: 28037 - DNA, 3000 bp, Unknown; identical to SEQ ID NO: 28036
  misc_feature (1)..( 3000): 2750-1469P.txt file - cDNA_ID_2993606; gDNA_ID_1621202; Annot_ID_174957

SEQ ID NO: 28038 - DNA, 3000 bp, Unknown; identical to SEQ ID NO: 8247
  misc_feature (1)..( 3000): 2750-1469P.txt file - cDNA_ID_2993610; gDNA_ID_1621202; Annot_ID_57700

SEQ ID NO: 28039 - DNA, 3000 bp, Unknown; identical to SEQ ID NO: 7148
  misc_feature (1)..( 3000): 2750-1469P.txt file - cDNA_ID_2993617; gDNA_ID_1621129; Annot_ID_56429

SEQ ID NO: 28040 - DNA, 3000 bp, Unknown; identical to SEQ ID NO: 7148
  misc_feature (1)..( 3000): 2750-1469P.txt file - cDNA_ID_2993617; gDNA_ID_1621129; Annot_ID_172429

SEQ ID NO: 28041 - DNA, 3003 bp, Unknown
  misc_feature (1)..( 3003): 2750-1469P.txt file - cDNA_ID_2993630; gDNA_ID_1620621; Annot_ID_47042
caacaattggcgcgccaggtaggggggaatataaacaaattttctctaccctcctttaatcaaagcaagcatggttcaaatcgtcatcgaccccatcattcctccagtcaacgatgatgggacggaatcaagtctcctccacggaggagatccaccatctaccgtcgaagtagcggccaaaacgaccgtgaatcaaccaacacacggggagacccctatcgactcaccatctttctcattggaggacatcaaagccatcctcacaaccgtgacgaaagatctctctgaatcagtcatggagactaatcgccgactcgacgagctgccaaaaggaaggcggctggggtcagaccgcgccaaagccgtccaagacgaggtcgagcggctcctaaaagccggcctgattaaagaagtacaatatccagaatggctggccaacccagtcgtggtcaaaaagaagaatggtaagtggagagtctgcgtggattacaccgacctaaacagggcttgccctaaagacagttatccactgccacacatagatcgcctagtcgaggcaacgtctggaaatcagcttttatctttcatggatgccttctcggggtacaatcaacgaaaaacctatcttctataccagtaaagccctgaatgacgccgagaccagatatccgaccttagaaaagctggcgttggcggtgataacggcagctcggaaactccgaccttatttccaatcacattccatagtgttcactgatcagccactacgcacagtgctccacagcccaaaccagtctagacgaattgcgaaatgggcaatcgaactgagtgaatacgacgtggaatatcgctctcgcccgagcctcaaatctcaggtcctagcggacttcatgactgaactatccccggatgtgattgacgttatcccggacgaaaactggatactctactcggacggctcctcatcattacaaggctccagcctcggaattctacttcagtcaccaaccagagaaatccttgaacagtcacttcggctccagtttaaggcatcgaataacgaagcagaatacgaagcacttctcgcaggacttcgactcgctaaggggctcggagccaaacagatcaaagctttcagtgactctcaactcgtagtcagtcggttcagcggggaattcgaagctaagaacgaaagaatgcgggctcatctttcaatggtccacgtccaaggacttcccagaatggcattgtagattggttccgatcttcagaaagagatcagcgatcttcagatcgcattggttgctgtaaaagagcacgggaagagggagtgcaacaggttgcggaatgaccgagctgctaaagtcgcccgtactacaaagaaagcccaagctcgtcttgatagagtgaaggcttatctcaaggagcaagaggacctcgtcgggccaaaggtggatgctgagaatcaagccagaggcgctgaggagatagtgggcatccttatgcagagaggtgcgaagattgcggcatctgaactcagcggccttaaggagttaaccaaaagggcgaccgacgaagttaatgccttgaacgttatcgagctcggggacgatgatctgaacatgtccccagatcagctcggtttttcgaggcaaacctcccaagttgctccagtggcggaccagcacggctcaaatgtcgacctcgttagcggaagtgatattcgacgtgtaagcgttgaagaaacgaaccagacgacctgaataggtcgtctttgtaatctattttgaaatattgatcgtggacccaattttcggggcgatctcaaaactcttatttaaccgtgaacccactttcggggcggtttttaatttttacttctacgtcagggtcgacctcgcgtcgtatgagcgtccgttctcggggaggaaaaggatgtggacggagtttcctggtagattttttttaaatagatagggtaaagatatgtcgatcccgattagattctcatagctttttcttttgttgcagatcgatacaggcctagtccggattttcccgtcgagttcgaaggagttttagaggcgatcttccgagctcgtcgtcgtacctggaaagacgtcacgaggtcgcgcgtcaacaggataatggggaaggtcaggaaatccttcattagcttttaaacatgccacctcccccagctcccatcgaagaggaaagacagcctttagacggagaggcggctgcgtcaaatcctcccgttagtgctggcccttccggtggcgaactggtttgaagtttggatccttattgagcttatgacaggttacctccggggcgattcctgtcatatccttcgtagaccaagcaaaagatgacgacctcgatttcaggaaggcgatcagctcttcctttatctctccttctagctcgcttccgataccgaccgtccgagatggatccgactcgtcgatgttgacctggataattgttataggaaaactgaagtcaagctatagcgttcaggggttaatctggcgagctggaaatatgaagtcagggatgtttagcaaagcacgtgttgtgagctggcgagctggatatgtgaagtcagggatgttaagcaaagcacgtgttgtgagctggcgagctggcaatgcaaatggacgttaacggcgatcgttattaacgtggttaacgtttactttctttacctttttgtataagagcaacatgttatgctcatgctttcattatcgaataatctggttgtaatctctctctagagacttctagatttccctcatcgttttaccggagctctcgtcgagtctcttgtaggtgagaagttgatatcgcgtctctttacgaacgttgtatcaagtgtgttaatcggagtactctattttcatctctctgttctattgatttcaaactctgtttattcatttctggtttacgttaacactggtatcagagccaagcgtttcctcggaatcaatg

SEQ ID NO: 28042 - DNA, 3000 bp, Unknown
  misc_feature (1)..( 3000): 2750-1469P.txt file - cDNA_ID_2993630; gDNA_ID_2926201; Annot_ID_141531
caattggcgcgccaggtaggggggaatataaacaaattttctctaccctcctttaatcaaagcaagcatggttcaaatcgtcatcgaccccatcattcctccagtcaacgatgatgggacggaatcaagtctcctccacggaggagatccaccatctaccgtcgaagtagcggccaaaacgaccgtgaatcaaccaacacacggggagacccctatcgactcaccatctttctcattggaggacatcaaagccatcctcacaaccgtgacgaaagatctctctgaatcagtcatggagactaatcgccgactcgacgagctgccaaaaggaaggcggctggggtcagaccgcgccaaagccgtccaagacgaggtcgagcggctcctaaaagccggcctgattaaagaagtacaatatccagaatggctggccaacccagtcgtggtcaaaaagaagaatggtaagtggagagtctgcgtggattacaccgacctaaacagggcttgccctaaagacagttatccactgccacacatagatcgcctagtcgaggcaacgtctggaaatcagcttttatctttcatggatgccttctcggggtacaatcaacgaaaaacctatcttctataccagtaaagccctgaatgacgccgagaccagatatccgaccttagaaaagctggcgttggcggtgataacggcagctcggaaactccgaccttatttccaatcacattccatagtgttcactgatcagccactacgcacagtgctccacagcccaaaccagtctagacgaattgcgaaatgggcaatcgaactgagtgaatacgacgtggaatatcgctctcgcccgagcctcaaatctcaggtcctagcggacttcatgactgaactatccccggatgtgattgacgttatcccggacgaaaactggatactctactcggacggctcctcatcattacaaggctccagcctcggaattctacttcagtcaccaaccagagaaatccttgaacagtcacttcggctccagtttaaggcatcgaataacgaagcagaatacgaagcacttctcgcaggacttcgactcgctaaggggctcggagccaaacagatcaaagctttcagtgactctcaactcgtagtcagtcggttcagcggggaattcgaagctaagaacgaaagaatgcgggctcatctttcaatggtccacgtccaaggacttcccagaatggcattgtagattggttccgatcttcagaaagagatcagcgatcttcagatcgcattggttgctgtaaaagagcacgggaagagggagtgcaacaggttgcggaatgaccgagctgctaaagtcgcccgtactacaaagaaagcccaagctcgtcttgatagagtgaaggcttatctcaaggagcaagaggacctcgtcgggccaaaggtggatgctgagaatcaagccagaggcgctgaggagatagtgggcatccttatgcagagaggtgcgaagattgcggcatctgaactcagcggccttaaggagttaaccaaaagggcgaccgacgaagttaatgccttgaacgttatcgagctcggggacgatgatctgaacatgtccccagatcagctcggtttttcgaggcaaacctcccaagttgctccagtggcggaccagcacggctcaaatgtcgacctcgttagcggaagtgatattcgacgtgtaagcgttgaagaaacgaaccagacgacctgaataggtcgtctttgtaatctattttgaaatattgatcgtggacccaattttcggggcgatctcaaaactcttatttaaccgtgaacccactttcggggcggtttttaatttttacttctacgtcagggtcgacctcgcgtcgtatgagcgtccgttctcggggaggaaaaggatgtggacggagtttcctggtagattttttttaaatagatagggtaaagatatgtcgatcccgattagattctcatagctttttcttttgttgcagatcgatacaggcctagtccggattttcccgtcgagttcgaaggagttttagaggcgatcttccgagctcgtcgtcgtacctggaaagacgtcacgaggtcgcgcgtcaacaggataatggggaaggtcaggaaatccttcattagcttttaaacatgccacctcccccagctcccatcgaagaggaaagacagcctttagacggagaggcggctgcgtcaaatcctcccgttagtgctggcccttccggtggcgaactggtttgaagtttggatccttattgagcttatgacaggttacctccggggcgattcctgtcatatccttcgtagaccaagcaaaagatgacgacctcgatttcaggaaggcgatcagctcttcctttatctctccttctagctcgcttccgataccgaccgtccgagatggatccgactcgtcgatgttgacctggataattgttataggaaaactgaagtcaagctatagcgttcaggggttaatctggcgagctggaaatatgaagtcagggatgtttagcaaagcacgtgttgtgagctggcgagctggatatgtgaagtcagggatgttaagcaaagcacgtgttgtgagctggcgagctggcaatgcaaatggacgttaacggcgatcgttattaacgtggttaacgtttactttctttacctttttgtataagagcaacatgttatgctcatgctttcattatcgaataatctggttgtaatctctctctagagacttctagatttccctcatcgttttaccggagctctcgtcgagtctcttgtaggtgagaagttgatatcgcgtctctttacgaacgttgtatcaagtgtgttaatcggagtactctattttcatctctctgttctattgatttcaaactctgtttattcatttctggtttacgttaacactggtatcagagccaagcgtttcctcggaatcaatg

SEQ ID NO: 28043 - DNA, 3000 bp, Unknown; identical to SEQ ID NO: 4481
  misc_feature (1)..( 3000): 2750-1469P.txt file - cDNA_ID_2993638; gDNA_ID_1620708; Annot_ID_48945

SEQ ID NO: 28044 - DNA, 3000 bp, Unknown
  misc_feature (1)..( 3000): 2750-1469P.txt file - cDNA_ID_2993642; gDNA_ID_1620396; Annot_ID_155786
cttgagcattcctacgttgtcgtccgtgacaaagtactcgttgtccacaatttcaactcccttctcattaaaccggcttcggtcagaagatttatctaaccaagtggtttagaataaaaagtggaagggtaaaatagtaaataaacacctgtttgcgggcgaaatcctctgcacctgagaaagcaaggtaagagtggggagatttgtccatgacgagacgagcaagagatataggatttttcacggtggttatccccgaaacggcaccgcatcgtctcttcgtaccgtccataatgctagcttccatctcaaccgttcctttttccgtcaaagcagatccacggcctgaattaaacagaggatccgtctccaattctctaatctgtgttaatcaatcgtttagtatataattcaacaagaacaccgtaagaaatcattgtggggaaagagaacgtacgacgagctcaacgacgtcaatggcggagacattggaacgcaaagctattatgccgaggttgagacaacgagttaaaagctgtttagcctcttcttgtctctccgccggaagattagggtcgataccggcaccaccgtgtactgcgattgcccacccacccatattctctctctttctctttgttttatttatgtgtttcacagttaaaccgagaatgatggaagaaagaagagtcgcattaggtcattatataggccttttacgagcaaggagagacccacattttcttatttattgatttacctcttaatttttaaaaacattttttaattaccccatctgattttatttgttttgtttagttttttttttcatatgaaggaagaatatactttccgtatatttttctttacttttcagttattttgtcaacatttcccttttcaggttaatatttaaccaatttgggatttgttttaccattttctttctttgatttgattcgaccaagatgaaacgttattaaactgtaatgcttttcataatttcaagaaatctgcactacattttgtaatatgcaattttttttgctatgacatactatctcaaatgaaacaaaacaaagtagtcttgggaacttgcagttagctgtttatgttgaattccacgtcaggtctataacatgcatgaagggagcgataactattggttgttaattgttatgcattcttttatttgtcttattatattgataaaatgtggtttgggagaaataactgtttctcacaacttgtgaactaaataaattaaaagtttcaagttggcttgcaatttccctttttgtttaaacaacttctcttcttttcccgttttccttatgtttatctcgtcaattttgtgctaatctacgttattagaagatagattatatacgtcaatacacatagctcaatattatgtgtaaagtctatcttgtcgattatttgggtccaactcgacaggtatatcacaattttcctatttttatagtaaatcttacgtaatatttttctttactcaaatgtatcggttatgatttttcctatcatatgcaccgaaacatttcctcatatgcatcggagtctatagaaacctctttcttggaaatagcttagacaaatgttagtggattagtggtatactcattcccaatgtatagttcgattctaatatagtaatatgtttttaagagaagttgtaaagtagctgcgacacgcatttgctagcagttagcaggatcctatgcattaggcattagcaattgttaattatttaccgcaggattttgtgtctaaatatgtttatttattgttggccagtcgcatctttctctccacaagtttggaatctccgagattttctcttcatgtgttggaaaaggacagagcctagtgactttggtttgtggattccaataagattccgtcacgtgacaaactccaattagaaagacgtctattttcttctctctttgttgcctctcccatttcttaggggtcgtcaattagatccccacactctcgtggaatcttgtcctctcaaacatgttttgatgaccccacttctcctcttttttatacgagattcattacaaaatgaatcttgattcactacttcaaaacgttgctcaaaaaaaaaaaaaaaaaaaaaattcactacttcaatttactttttatagaaaaatcattcaaaacctctaaataactactgcaaaacgaatttttattttatttcaaattctagagatactttaaactatttttagactttcaaaaatggtttgcaaaaaaccttttagtgtgattttgtccatttaaggtgtcaatgatagtaacgaattacgcagtatagaatatgtggatcgattatatataacaagtaattgttagtgttggattatcctaaaaatcacactacactgccaattatgttaaattgtgaatatgttacagatggaatcacctggccatgactattgcctttcctctctacattcacatatgtaaatattagcactagtcgaagccaaatgagacacaacggtaatcgaacttttctttttggatgggttaaaattaactatttatgttgtgatttttttatatattttgtcgacacctaactcctaagatcagagctcaaattaaaagtggtggtgattcacaaatctatctataacgtgattcagggaacttgccactggctggagtttttagtaaacctaaaaaactattggggttttttccaaaacaaaatcataaagaaggggccctataacaaaataagaagacacgaaatattttagttaaaaccttgagataaccttatcctactagattccacgtggcattttccaagtggcgtaagaaaatccccgggaggaaatcagttgccacgtgtcagaagaagatcaaaactcgactcattgtgaccaaaggctattatttcctacacaaaattcccactcaccacacacaacaaaagaatagtgatcgaagctcatg

SEQ ID NO: 28045 - DNA, 3000 bp, Unknown
  misc_feature (1)..( 3000): 2750-1469P.txt file - cDNA_ID_2993652; gDNA_ID_1620675; Annot_ID_48220
aatcgaatagcaaattctgatttcttcttgttttcccagtttgtttttccagcgtatgttaagatcatatcaataataatctactttagctgccatgtttatttgtagtctttagttagtacggtgaaagtaatatgtggttttatttgattcaccttttcagctgaatgttttaaggatcggactgatgttcagtgtcttcatagatggcaaaaggtcttgaacccagagcttgtgaaaggaccgtggtcaaaagaggtgattttgtgaattgctttatatgctttactcggtttgagtctaatacaccttagcatttgtaatgtgttccatgacattacttttccatgttttgaaggaggataacacaataattgacctggttgaaaaatatgggccaaagaaatggtctactatatctcagcatttacctgggcgcataggaaagcaatgtagggaaaggtaatgcaaaggctctcaacttctttccgataaaatgatatttacatacattgggtggtacttcaacgcacataaacaatattgtgggtgatgtaggtggcataaccatcttaaccctgggattaataaaaatgcatggactcaggaagaggaactgactcttattcgtgcgcatcaaatttatgggaataaatgggcagagcttatgaaatttttgccaggaaggtaaatatgtcttttccatgggtcctagtataacaacataggtgtaacatgtccgtaaaattggtggcctcataaatgaaataataggtttttgatgctggtagttgtggtctatcgttcctgctttggtgatttgcttattttttcttacgttcctgtaggtcagataattcgataaaaaatcattggaacagctcagttaagaagaagttggattcctactatgcatcaggtcttttagatcagtgtcaaagctcgccattaattgcccttcagaacaaatctatcgcttcatcttcctcgtggatgcacagcaatggagatgaaggtagttcaaggccaggggttgatgctgaggaatcagaatgcagccaagcttcaactgttttctcacaatcaaccaacgatttacaagatgaagttcaacgtggaaatgaggaatattacatgcctgaatttcattcaggaacggagcagcaaatctcaaacgctgcatctcatgcagaaccgtactacccttcctttaaagatgtcaaaattgttgtccccgaaatttcttgtgaaacagaatgttcgaagaagtttcagaatcttaattgttctcacgagctaagaactaccacagctacggaggatcaattgccgggtgtatctaatgatgctaaacaggaccgtggtctagagttattgacccataacatggacaacggtggaaaaaaccaagcacttcaacaagattttcaaagttcagtaagattaagtgatcaaccttttttgtcaaactcggacacagatccagaagctcaaactttgatcacggatgaggagtgttgtagggttctttttccagataacatgaaagatagcagtacatcttctggtgagcaaggtcggaatatggttgaccctcaaaacggcaaaggatctctttgttctcaggctgcagaaacccatgctcatgaaactggaaaagttccagctttaccgtggcatccttcaagttctgagggcctggcgggtcataattgtgtccctttgttggattcagacttgaaggactcacttttaccccgtaatgattccaacgctcctatacaaggttgtcgcctttttggagctaccgaattagaatgtaagactgatacaaatgacggtttcatcgatacttacggacatgtaacttcccatggcaatgatgataatggtggtttcccagaacaacaggggctgtcatatattcccaaggattctttgaagctagtacctttgaatagtttttcttctccttctagagtgaacaagatttattttcctattgacgataagccggctgaaaaagacaaaggagctctttgttatgaacctccacgttttccaagtgcagatattcctttcttcagctgtgatcttgtaccatcaaatagtgacttacggcaagagtacagtccctttggtatccgtcagttgatgatttcttcaatgaattgtacaactccgttaaggttatgggattcaccgtgtcacgataggagccctgatgtcatgcttaatgatactgccaaaagttttagtggtgcaccatccatcttaaagaagcggcatcgagacttgctttcacctgtgcttgatagaagaaaagacaaaaagcttaaaagggctgcgacttcctccttggctaatgatttttcgcgcttagatgtaatgcttgatgaaggagatgattgcatgacctctcgtccgtcagagtctcctgaagataaaaatatatgtgcctccccttccatagccagagataacagaaattgtgcatcagctcggttatatcaagaaatgattccgatagatgaggaaccaaaggaaaccttagaatcaggtggagtgacttctatgcaaaatgaaaatggatgtaatgacggtggtgcttcagctaaaaatgtaagtccgtctttgtccttgcatattatctggtatcagttataaaatcccagtcatctcattctctgatgtctatagctgtaaggtgcaatgtctggtacatggttattgagtctattagtgaacttcttgttgcttaacacatcatctagtatgttgaattctcttcatgtgagatcgtatcaatcacatttgctcaaacagatagcatctagttatttcagctgtctttgtagaggattatagttttatagttggtctaaatctccataacgtaatcttataagctttaatctctaaatctcttacttgcccttgtaccaggaccaagaaacttctggaagtttttttgagttacgactgtgttctcctggtatg

SEQ ID NO: 28046 - DNA, 3003 bp, Unknown
  misc_feature (1)..( 3003): 2750-1469P.txt file - cDNA_ID_2993652; gDNA_ID_2926203; Annot_ID_141583
gtaaatcgaatagcaaattctgatttcttcttgttttcccagtttgtttttccagcgtatgttaagatcatatcaataataatctactttagctgccatgtttatttgtagtctttagttagtacggtgaaagtaatatgtggttttatttgattcaccttttcagctgaatgttttaaggatcggactgatgttcagtgtcttcatagatggcaaaaggtcttgaacccagagcttgtgaaaggaccgtggtcaaaagaggtgattttgtgaattgctttatatgctttactcggtttgagtctaatacaccttagcatttgtaatgtgttccatgacattacttttccatgttttgaaggaggataacacaataattgacctggttgaaaaatatgggccaaagaaatggtctactatatctcagcatttacctgggcgcataggaaagcaatgtagggaaaggtaatgcaaaggctctcaacttctttccgataaaatgatatttacatacattgggtggtacttcaacgcacataaacaatattgtgggtgatgtaggtggcataaccatcttaaccctgggattaataaaaatgcatggactcaggaagaggaactgactcttattcgtgcgcatcaaatttatgggaataaatgggcagagcttatgaaatttttgccaggaaggtaaatatgtcttttccatgggtcctagtataacaacataggtgtaacatgtccgtaaaattggtggcctcataaatgaaataataggtttttgatgctggtagttgtggtctatcgttcctgctttggtgatttgcttattttttcttacgttcctgtaggtcagataattcgataaaaaatcattggaacagctcagttaagaagaagttggattcctactatgcatcaggtcttttagatcagtgtcaaagctcgccattaattgcccttcagaacaaatctatcgcttcatcttcctcgtggatgcacagcaatggagatgaaggtagttcaaggccaggggttgatgctgaggaatcagaatgcagccaagcttcaactgttttctcacaatcaaccaacgatttacaagatgaagttcaacgtggaaatgaggaatattacatgcctgaatttcattcaggaacggagcagcaaatctcaaacgctgcatctcatgcagaaccgtactacccttcctttaaagatgtcaaaattgttgtccccgaaatttcttgtgaaacagaatgttcgaagaagtttcagaatcttaattgttctcacgagctaagaactaccacagctacggaggatcaattgccgggtgtatctaatgatgctaaacaggaccgtggtctagagttattgacccataacatggacaacggtggaaaaaaccaagcacttcaacaagattttcaaagttcagtaagattaagtgatcaaccttttttgtcaaactcggacacagatccagaagctcaaactttgatcacggatgaggagtgttgtagggttctttttccagataacatgaaagatagcagtacatcttctggtgagcaaggtcggaatatggttgaccctcaaaacggcaaaggatctctttgttctcaggctgcagaaacccatgctcatgaaactggaaaagttccagctttaccgtggcatccttcaagttctgagggcctggcgggtcataattgtgtccctttgttggattcagacttgaaggactcacttttaccccgtaatgattccaacgctcctatacaaggttgtcgcctttttggagctaccgaattagaatgtaagactgatacaaatgacggtttcatcgatacttacggacatgtaacttcccatggcaatgatgataatggtggtttcccagaacaacaggggctgtcatatattcccaaggattctttgaagctagtacctttgaatagtttttcttctccttctagagtgaacaagatttattttcctattgacgataagccggctgaaaaagacaaaggagctctttgttatgaacctccacgttttccaagtgcagatattcctttcttcagctgtgatcttgtaccatcaaatagtgacttacggcaagagtacagtccctttggtatccgtcagttgatgatttcttcaatgaattgtacaactccgttaaggttatgggattcaccgtgtcacgataggagccctgatgtcatgcttaatgatactgccaaaagttttagtggtgcaccatccatcttaaagaagcggcatcgagacttgctttcacctgtgcttgatagaagaaaagacaaaaagcttaaaagggctgcgacttcctccttggctaatgatttttcgcgcttagatgtaatgcttgatgaaggagatgattgcatgacctctcgtccgtcagagtctcctgaagataaaaatatatgtgcctccccttccatagccagagataacagaaattgtgcatcagctcggttatatcaagaaatgattccgatagatgaggaaccaaaggaaaccttagaatcaggtggagtgacttctatgcaaaatgaaaatggatgtaatgacggtggtgcttcagctaaaaatgtaagtccgtctttgtccttgcatattatctggtatcagttataaaatcccagtcatctcattctctgatgtctatagctgtaaggtgcaatgtctggtacatggttattgagtctattagtgaacttcttgttgcttaacacatcatctagtatgttgaattctcttcatgtgagatcgtatcaatcacatttgctcaaacagatagcatctagttatttcagctgtctttgtagaggattatagttttatagttggtctaaatctccataacgtaatcttataagctttaatctctaaatctcttacttgcccttgtaccaggaccaagaaacttctggaagtttttttgagttacgactgtgttctcctggtatg

SEQ ID NO: 28047 - DNA, 3000 bp, Unknown; identical to SEQ ID NO: 11978
  misc_feature (1)..( 3000): 2750-1469P.txt file - cDNA_ID_2993656; gDNA_ID_2214526; Annot_ID_134157

SEQ ID NO: 28048 - DNA, 3000 bp, Unknown; identical to SEQ ID NO: 11978
  misc_feature (1)..( 3000): 2750-1469P.txt file - cDNA_ID_2993656; gDNA_ID_2214526; Annot_ID_184758

SEQ ID NO: 28049 - DNA, 3000 bp, Unknown; identical to SEQ ID NO: 1414
  misc_feature (1)..( 3000): 2750-1469P.txt file - cDNA_ID_2993663; gDNA_ID_1620399; Annot_ID_155881

SEQ ID NO: 28050 - DNA, 3000 bp, Unknown; identical to SEQ ID NO: 4395
  misc_feature (1)..( 3000): 2750-1469P.txt file - cDNA_ID_2993676; gDNA_ID_1620703; Annot_ID_48815

SEQ ID NO: 28051 - DNA, 3000 bp, Unknown; identical to SEQ ID NO: 4395
  misc_feature (1)..( 3000): 2750-1469P.txt file - cDNA_ID_2993676; gDNA_ID_2926174; Annot_ID_140262

SEQ ID NO: 28052 - DNA, 3000 bp, Unknown; identical to SEQ ID NO: 8005
  misc_feature (1)..( 3000): 2750-1469P.txt file - cDNA_ID_2993690; gDNA_ID_1621182; Annot_ID_174312

SEQ ID NO: 28053 - DNA, 3000 bp, Unknown
  misc_feature (1)..( 3000): 2750-1469P.txt file - cDNA_ID_2993708; gDNA_ID_1620743; Annot_ID_49666
ttcatatttagtattaaaataatacttttaattagtttgttaattttcttaattttatttatttaaacatataagtaaatctaaaagaagtcatcgaagaaaattataagtaaaattattttttaatttaataataaaatatttgttatgatcccgacaactgcctagtagttttgtgaggacataaaggagaacagtgtggacaggaaatgaaaaagaaaaaaaaaaagaaatatagaagttgaaaattgtacgtgatcttgaaaatatctcttacgacgcaacttatgacttatgattccatattcttaagattattttaactagttagaagcatgaaacatgtgtagttgtgtacatcaatatgcaaacagctatctcatacgttttttcttttggttacagatagccgtaaaaaagaaatatatatccatcaagttggtaaaaattggtgagttttctaattcttgattcgatcgtaatttgtgagttttctaattcgtgattcgatagtaatttgctttaaacaaaaactacggattggttgaaacaaaatcactccattttaactagtatttagtctgttgccgagagactttatgatttcgtaggctttgaactaaaagaagcagagagtcataagatgaatttgttggaggtaagtcctcggtcataaaccaagcacaagagggaacaaaatcaatattcaagttcttaatgaaattagggttaaagcttacaaaatcttagaattgtatatgtatttgttgtttaagacaggtttcattttttgttattaatatgcataattactagaaccaaaactctttttaatccagagaaaagcaaatgttcttgcaaactttctcgtaaaactgcttttcagtcttatgactcctattgatgctaccattgtttaagcttttggtcttttaaataaatacggttggtcaatctatatatttatcaaccatcgaagggtctacaaatcaacaagtcatctctgtaaatggattggctaaacctttgactactttgcaatttgcattcgattatatggttagatattccatgttatgaaactttaatttacattggtcaaataattatttgattttgggccttataattgttgcagtggtccttaatactattcatttactataattaagactagcaactgactttattttaattctgattttgttaccaagttaagcacaccatctccaaagttccaaaaaggtaaggaatttattattaagaaactaatataagcatttgattgatgcttcatgcgatcgtattctaatcatgattctaaattgtaattgattttattattgtacataattagatacgatataataattaatgtgtaaactcacttatgttaattttgaaaaattatggagtgtgtgtgttatatgtgtctataaaatttgttttcgtgttattttagggtatttcttttaaattattgaccaaaatcacttggctttgtctcaattgtgatcatgtatattagatgtgcaaaataacccttacttaaataattaactctatctctcgtggtctcatctaaatgaaccgcaaggatgctcgccgcgacatcaagtttatatcacttttcgtggagaacagctacgccacaacttcgttagccatctcgtggaagcccttaggcgaaatgcgatcaatgtgtttatagacaatgatcaagagcttagaggtgaagatatcagcattcttttgaagaggatcgagtattcttgaatctccattgttgtgttctcgagcaggtacacagaatcgaggtggtgcttgagagaggctgtgaagatcaaagactgatgtaattttaccttacttgcctttcttgcctgttggcacaatccattagtcaagtttgatagtgaaagcaatgccaatgatcatcgtcatgttacttaagtcatctcgtatcgttcgattcaaattagttgtcgtttaagtttttgaagcatatactaaaaaaacatttaagttttcagttgtcaattaataataataaaaaaaaaaggaaaatgatgatgggtgagttttataatagttacggtgaacttggtcacattggataatttgtcattgttcttgggcggaccaataaaagcctctcttttgaatcccccacacagatctatcgcctcttcttccctcgtgtctgccagaatttttgtttcccgttgataaaggttaaacctttcttcttcttcttcttgtttcgatttcaagttcttctctttcgtgacctacggtgccgtttcatattccctaatttgattgaaaagggttgcgcaagggctttgaagtgaaacacttttgattcttgttgttgcttcaagttttcatttttatcaattgggttttggagaaaacactatgagctgtgattgaattgtctagctcgaagaatcttgattttgtttacacagagaattggtttcttctttcttgatgatagtacaattggattctgaatgttgtgtagagtttttggaattgctcattggtgtatgcttttgttatgcagggtttatctttggtggatgattagtgaaactttttaaggagataatagttcacatgttttagttaaaaatggcagcttcaagcggctctggtttggaaggttagaaacatgacctcaatccttttgttgttatgtattctttgtgtatactgactttaggaagttatatcgagtttccatttctttatttccgtttcttagagtgttttgcttttacgtttaactttaaataagaatgaggtcttgtttctgagactcatcaatttagagagctttatagggtagctttgagctttgtttattggctttgctgaggtattttgtttgtatgtattgttttgatttgaataaagaagagcttttgggatttattctgttttttgctcttgactatatcagctgaggagggggaaataagtatagacatg

SEQ ID NO: 28054 - DNA, 3000 bp, Unknown; identical to SEQ ID NO: 6950
  misc_feature (1)..( 3000): 2750-1469P.txt file - cDNA_ID_2993716; gDNA_ID_1621118; Annot_ID_56226

SEQ ID NO: 28055 - DNA, 3003 bp, Unknown
  misc_feature (1)..( 3003): 2750-1469P.txt file - cDNA_ID_2993716; gDNA_ID_2926161; Annot_ID_139717
aatctaacatcagcaagaaattcaaagagaccataaaaccaagtcaacaacactatgaaaactatacctcccaacacgattccctaaacgcgttgtaaagttattcaaaaccagttctggttgatggcttgtaggatttccgtgattctgcagttacatttaacatccaattcagtgatcactaatctacactcgatgtagagaagagtaatggttagcttacataccttaatatccttccttagaacaagatttgacaatttgaaatgagcagtaggaccatttggcaaaccgatgataagaagcgcatctacatatgaaatagcaaaagcttgaaacaaagcatatacagtagagagcacaaaacttgaaactcagtgaaaactaaccaggttctctacgatttgtatgaacaacaataagagatgtaaaatctttcttcgttgcgtattctacaatctgcagaaccatatctaacaaggttatatagttgcaaaaagactaactttatagagaaacaaggaagctatgaaacttataacaacaccttcttcaaatcataggttcctctcttttgataatgagagtttggtatcaccgaaagcaactcagatattaaagcaggtcctctctgcaatccaacaacattacttgaatcagaaaaccacaaacaaatctgtagaatctcttatgaaacaatggtaccaaaaaaaaaagacttacagtggaattgaaacgacatgttgtgagcaagaccttaggtgcaatctcacgtctcagaactggattaaactcatcagcatcaatatccgcaaacaactacaaactcaattacactaaattagcaacacgacaatgaattgaattcaaaaattgagatgaatcaaactttaaatctaaacatacttcttcatcgtcaggtctgcaaacagtttcatcagattctcttgtattctcaatcgtcttcggaatcatcttttgtggaggctacaaacgaataacacacaccaaacttaatatctcaaattcataaacacctttaaaaaatccctaaaaaagcttctccagatcgttacctcttctccaagctctaaagctcgtttctcagcagcatcacgagctctaatcttcttctgcttctccaatttcttctcatgcttctgcttcgcatacacttttgatctcttatctttgttcttaatcatcgaaggaagtatcacattcctcttctcacccccactgaaagtagactttccacgaacatcagattccatttcctcaccatcaccatcatctttcttcctcttgaaccccatttttacgacggacggcgaacgaagcctctctctctttaatcgatgaaaacggcaaagctgagaatgaagacgacggagactaacttagggtttatcgactcaaaattgaaaaacctatacaaatgggcctatgcttgggcccatctttaagcataggcctatctatctttataatattcgttaaaccgtcgccgtatcagtctattaacgggcttaattctgggccttgaagaaacattatactatggcgtttcattataacgatattaaacgacgccgtgtatgttagctatcaatttcgtttctcagtggtcactatgcgatgcgccatggaagaggaagcgccgtatcagctgcaatttccggtctatcaccggcgaagaattcaccgtttccacagctctgcaatgtccttctcgtcgcgtctttgtccaagaccttgtctcagtccggtacacgaagcctcgacgcgaattcgataccgatttcggaacctgtggttctccagatccttcgtagaaactccatagatccatcgaagaagctagatttcttccgatggtgttattctcttcgtcctggatacaaacattcagcgacagcttactctcagatatttcgcactgtttgtcggacagggcttctcggagaagttcccgatttgcttggttcaatgaaggaagatggagttaacttggaccagacgatggcgaagatacttctagattctctaatccgttcgggtaagttcgaatcagcgttaggagttttggattacatggaggaattaggagattgcttaaatcctagtgtatatgattctgttcttattgctctggtgaagaaacacgaattgcgtcttgctctgtctatattatttaagcttttagaagcttctgataaccatagtgatgatgatactggtagagttattattgtaagttatcttcctggaactgttgctgttaatgagctcttggttggtctaaggagagcagatatgaggtcggagttcaaaagggtatttgaaaagttaaagggaatgaaaagattcaagtttgatacatggagttataacatttgtattcatggatttggttgttggggagacttggatgctgcattgagtttgttcaaggagatgaaggagcgaagttcggtctatgggtcttcttttggtcctgatatatgcacatataacagcctgattcatgtgttgtgtttatttggaaaagctaaagatgctttgattgtatgggatgagctgaaggtgtctggccatgagcctgataattcgacatatcgtatactgattcaaggatgttgtaaatcttaccggatggatgatgcaatgaggatttatggtgagatgcagtataacgggtttgtccctgatactattgtgtataattgtcttttagatgggacactcaaggcaagaaaagtcactgaggcttgtcagttgtttgagaagatggttcaagaaggagttagagcttcctgctggacatacaacattctaattgacgggttatttaggaacggaagagctgaggctgggtttactctgttctgtgacttgaagaagaagggtcagtttgtcgatgccattacgtttagcattgttgggttgcagctttgcagggaagggaagctagaaggagcagtaaaattggtagaggagatg

SEQ ID NO: 28056 - DNA, 3003 bp, Unknown
  misc_feature (1)..( 3003): 2750-1469P.txt file - cDNA_ID_2993732; gDNA_ID_1621153; Annot_ID_56916
caaggatgtcacgtttgggaatcacagaatcaagaaagtaagaaacaaaaagaacaaagatcaaataccaaatcagcaataacagcaggatttcgaggatcatcctcgggaattccctgctcaactttcccaacgagatctgccccaacatcagctcccttagtatatattccaccacccaactgagcaaataaggcaacaaacgaagcaccaaaaccatatccgacaagaagaagaggtactgtaagagaaacagaaaattcaatcaataaatcttacaagtttaatagctccactatcgcccatgcaaatgcaaattctggtcaataaatcaagagaattacatatagggttcactgaaaatcttagaactgtattggtaccccacctcaatcaagattaatacaagtcatgacatatttaagaaaatactgctcatgtctgaaaatgatcctttgaaaagataacaataactttttgaaactcagtacaatgattatagaatatacacacaagacgaaaatgaatatttttcataaaaaaaaaagagcagaagacttacggtcagtaacattcattgagcctggtgaacccacgcccaaccacacataaaatgtagaatagaggatggcgataccaatcacagccataccaacaacaaccagggctgaaaacccaccagcacgaacggctatctgcattatatctgccacttagtatttggaaacgtgtacatgacatgttaccaaaatagctaaactaaagaagaacctgcaatgcttctctcgcagatcgtctggcagcactggagacccgcacattagcacgaactgacacccacattccaacatatccagcaatacctgagcatagagcccccaaaagaaatgcagcaacagtaatataagcagacatcgccctgcagcaaaatagtaatatggctaagcttcattcacaacaattcaaaagataaaataaatcttgtgaatgtaatcatgtatcagcaccttcctaaaccagcagcctcttgctggggagttaagctacggaatagatatatgcaaagaatcacaaaagctagcaaaatggccatcttggatatagtgctatactgcgttctgaaaaaaccttcagctccatcacgtatagcatctgatatctataagtaagagaattacctcacaaattagaattacaaatttttgatgagaacaaagaaggaaaaatgtcaacatcatgactaacaccacataatctgagtgagcttacctcaaccatctctggaggtccttcatctttcgctaaaacccacttggttagatatattgacaaaaggaagctgatgatgcatactgtgaagacgaacacgatgatgggagaagtacttgcccccatgtaaaagattgctccgaagcagaaaagcagaattatcgaaaggacacggacatttaatttcctaataatccggaatatctgccaaaaaacaactaaactttatacaatttcaaagaaaatgaaaacgagatgctcaagaaactaagatgctaaacgaaatagaaggaaactagttataatacgcatctcagtgatctgatgcaagcaaaaagaaaagcactcaagaaagagaggaataaaagttgtaccagtggactataggttttactacgcatgttgggaaaagccctaggcctgtcattgaaagacatcaaactggcctgctcaacatcttcatccatcatcatgttttgagctgaattagcccttcggactatgtgtagaggcgtaaagtcaatgctatggggcaactccgccccagaactcggacgctgaattttaatacactacaactttttcctccaaacgttaacaacagcacatcacaaaacgagcacaagttagtatgaaccctcttaactctagctatatctttgattccagcttcttcaaactttctcagtagagttgccacaacaagtttccaccacaatcaaaatttctgaaaaaaatagaaaagtatgaaaagttgtgatgtttctctttaccaaccaaatagcatttttaaatgaaatataatcagagtaaggttctacagtaaagtttagctataactttcatcatttcccatgagcgtaattgcttctacgatcaattccccagaaaagtgcgattaacaaacagacctcaagatctaatcgactaagatttcagtgaataaaacgcaagggactttgcattccgagtttaatgaatcaagcaccgttactttaatttagatctgagttctgttctaagagaaattcacatgatctctagacaggaaatggatacgtttccagaaacgaatccaacgaaaaaaaaaaagcatacgaagagtttatccggaaacaaaccctaaaaatcggtaaaacagagaagatgacggctccggtgagagtgatcagaaggaaaccgccattagcgaaagcttgttgtagccgaagaagcgctctatcctctcgctgtctccgttctaaatccgaagacttttcacagaactttccgaatatttttttcctaaattaatttttctacctttaattttattttcactcctcagtggttcaatactaattttatgacacatcctatccaatgagtcgttgacacttaatcactattctcacttaaaaagttaaaaacttaaaatcatcctcgtttgttaaattatatagatcgagttaaattatcaaaaatacccatcaattttggaatattaacatttgaatattatatgggcctagcccaaaattatgttttgccattcggcccatataatagacaatctgcaaagtgaagaagaagaagaaccactaacgttatcttaccggcccgatcacggagctcacctttcatcgtcaatctccggcggacgaatttctcttcgtagccgttacttctcattatttctttgaaactttcttagaaaattctctgttttggttaggacaatacaaacagaggatg

SEQ ID NO: 28057 - DNA, 3003 bp, Unknown
  misc_feature (1)..( 3003): 2750-1469P.txt file - cDNA_ID_2993732; gDNA_ID_1621153; Annot_ID_173321
attgtaaaaagaatgaaaggaacaagacaatcaatggttatgtgtgacaacattaccgcgccaaatgttataacagctaatataattgtcagagaatatcctttctgaagtacagccattggatcctctaccggagatttcacactagcatcacgtgttcccttgattgatagaataccaattgaggatataatcaagtcaaaagaatgaacaactagaggaaaaaggataaagcctgatggatctgcataatagagaaagatttgagtaagtatcaagcatgaacaagaggtttaataggatgtttatcagcgcatatctaacaaccactgctagaaatgggtaatgttattgaaattttttgactgcagccaagtgtagcttgctgtcatgaaaagtagtcttccttcaattttcacacaatgcatagcaggttcgtacaaggtgcttcaaacaataactctatacaacttatgtcgactttttaaatcctaacaagtaataatgtaccctcaaatcctcaaggagtgaccaaaacatgcaataaagcgtagattattctgtatacagaatgtaatttacgagcttgaactctctatgcaactcttcctaagtttgcatttcagattataaaatcctagcagttcatttaattttctcggtatgagtcaggaactcacaccataagttatatatttgcatataccagaagtaactttaaagagagatggtgcaccttcaattttgcacttcttagccattgttccacctagtatcattgcactgatgatttctgcagctatactttcaaataaatcagcacctctagcagcacagtcccccacattgtctccaacctacaagaagatgaaaatggctttaaatgcctaaatgacgaaaacacaagcaaacccttgtagagtgatatatgccccaaacaaggatgtcacgtttgggaatcacagaatcaagaaagtaagaaacaaaaagaacaaagatcaaataccaaatcagcaataacagcaggatttcgaggatcatcctcgggaattccctgctcaactttcccaacgagatctgccccaacatcagctcccttagtatatattccaccacccaactgagcaaataaggcaacaaacgaagcaccaaaaccatatccgacaagaagaagaggtactgtaagagaaacagaaaattcaatcaataaatcttacaagtttaatagctccactatcgcccatgcaaatgcaaattctggtcaataaatcaagagaattacatatagggttcactgaaaatcttagaactgtattggtaccccacctcaatcaagattaatacaagtcatgacatatttaagaaaatactgctcatgtctgaaaatgatcctttgaaaagataacaataactttttgaaactcagtacaatgattatagaatatacacacaagacgaaaatgaatatttttcataaaaaaaaaagagcagaagacttacggtcagtaacattcattgagcctggtgaacccacgcccaaccacacataaaatgtagaatagaggatggcgataccaatcacagccataccaacaacaaccagggctgaaaacccaccagcacgaacggctatctgcattatatctgccacttagtatttggaaacgtgtacatgacatgttaccaaaatagctaaactaaagaagaacctgcaatgcttctctcgcagatcgtctggcagcactggagacccgcacattagcacgaactgacacccacattccaacatatccagcaatacctgagcatagagcccccaaaagaaatgcagcaacagtaatataagcagacatcgccctgcagcaaaatagtaatatggctaagcttcattcacaacaattcaaaagataaaataaatcttgtgaatgtaatcatgtatcagcaccttcctaaaccagcagcctcttgctggggagttaagctacggaatagatatatgcaaagaatcacaaaagctagcaaaatggccatcttggatatagtgctatactgcgttctgaaaaaaccttcagctccatcacgtatagcatctgatatctataagtaagagaattacctcacaaattagaattacaaatttttgatgagaacaaagaaggaaaaatgtcaacatcatgactaacaccacataatctgagtgagcttacctcaaccatctctggaggtccttcatctttcgctaaaacccacttggttagatatattgacaaaaggaagctgatgatgcatactgtgaagacgaacacgatgatgggagaagtacttgcccccatgtaaaagattgctccgaagcagaaaagcagaattatcgaaaggacacggacatttaatttcctaataatccggaatatctgccaaaaaacaactaaactttatacaatttcaaagaaaatgaaaacgagatgctcaagaaactaagatgctaaacgaaatagaaggaaactagttataatacgcatctcagtgatctgatgcaagcaaaaagaaaagcactcaagaaagagaggaataaaagttgtaccagtggactataggttttactacgcatgttgggaaaagccctaggcctgtcattgaaagacatcaaactggcctgctcaacatcttcatccatcatcatgttttgagctgaattagcccttcggactatgtgtagaggcgtaaagtcaatgctatggggcaactccgccccagaactcggacgctgaattttaatacactacaactttttcctccaaacgttaacaacagcacatcacaaaacgagcacaagttagtatgaaccctcttaactctagctatatctttgattccagcttcttcaaactttctcagtagagttgccacaacaagtttccaccacaatcaaaatttctgaaaaaaatagaaaagtatgaaaagttgtgatgtttctctttaccaaccaaatagcatttttaaatg

SEQ ID NO: 28058 - DNA, 3000 bp, Unknown
  misc_feature (1)..( 3000): 2750-1469P.txt file - cDNA_ID_2993736; gDNA_ID_1621153; Annot_ID_56941
aaaagctaaaatcgtgaacaatccaccattggagacgtgccatcttcatcctctgagatgtggagattctgcttcttcttatcgttactattctttgatgttagcgcggtgaaatctgcagaatcgattttcctcccaagtcaaatcggagttgaagattcccgcgtctttgaatctcttagtcttagtcctgtatgctccgcggctgatccaaacctcaactacaagccggtcatcgggattctgacccaccctggcgaaggtcgatgggacgctcgtcttcactctctgaaaaactacgcctacgcgacgaacatatcgtacatcgcagcttcgtatgtgaagttagctgagactggtggagctcgtgtgattcctcttatctacaacgagcctgaagaaatcttgtttcaggtttactctgatgattttgctcttatggattccgttcactatgtagccttctttaatcactaatcttacaactatttattctacttgaacttggctacacctgatttgtttacatcacataaacaggcaatttgaaataagttcaaggttgatgttaccatgttattgttttggctattgcttgtcaaaattagttcatgttatcttagtgaatttcatttttgagttgcagaagctagaattggtaaatggtgtgatattcacaggtggttgggctaaaacagggttatattacgatgttgtggagaaaatcttcaatgtaagttctcattatgcaaacactctctgttgctttcatgtgttagctgagctgtacaacgtaatagtcttttgaaatccttatgtttctcacagaaagttatggagaaaaatgatgctggagaacattttccggtgtacgccatgtgtcttggattcgagattttgtcaatgatcataagtcaggtcactcttttggcttcttgcttcttttgttgcttaagtaacttccatatatgtaaagcaatgtttcacactgcctaaaatttaaaagagctttaagctgcatatcttgagctgagagggatatgcagtttccatcctaaatttctgacgattttgtgtgttttgaaacagaacagagacattcttgagaggtttaactcagtaaactatgcatcaagtctccagttttttaaaaacgttaatatcgaagcaaccgtgttccaaaggtgcatatatagctatgctttaaacttttcagtgatccaaagaacaatatcccataattgtaatgtttcatatttgcagatttcctccagagctgttgaaaaagctcagtgcagactgtttggttatgcagaaccactatgttagtatctctctaattttctgcagaatatgaatataggctatagctctcaccttttgttgctcttaagtatactttgattgctgttttcttcttataagtatctttaatcctatacagttacacaattttatatttcctgttttcttgttcatgaatgatttattatattctctctgcttttctgaaatgaaatgctattgtttcccagtttggtatctcaccagacaactttcaaggcaatccttatctgtctagtttcttcaatatcgtcacaaccagcgccgataaagacagcaaggtatagttaatatgttcctatacaccgattatacaaattccacaagctgacaatttcaatgaagggataaatttatcttttttctttccagacttttgtttcaactattcgatcaaaacgataccctgtgaccgccttccaatggcatccagaggtattacacacaagttaacttgtgtctctcattagtcttctcaatcctttgttaacttatatcttttactatgctatatgctttataatggatatatgtttctaaaaagatccttaaaatatactctgcagaaaaatgcattcgaatggggatcatctgaaatcccacactctgaggacgcaattcaggtgactcaacatgctgcaaattatctagtcaggttagttctctattgatcaatgttggaaagtatcattaaaagaattatgtagtggttcaattttcttatttgaatgttggtgcagtgaagccagaaagtcaatgaacagaccatcttctgagaaagtgctgagcaatctcatctacaactacaagcctacgtactccggatacaaagggtacaacaaaaaaaaagccacttcataattggagtccaatccttacagttcttgctgtatgttaacaaatattggatcatgtatgatcaacctcgttgggtttttttttgcaggagcggtgacgacgaggtttatattttcacgtaacaaagatcccttctctgtgtgttttcgccaaaacatagcaatttatattagttactaagagcaatacagtgtttctccttatccaccattgattgtaagttgtaaccaaggtgttgaactataatttaaaaaaacacagtatagatcacatgaggcgtgaggacgcaatcacttgttcccatatcttcctctaaaacctaaatcctaaaaaatcccttttcaaagatcaagttttaaggcaaaaaagcaatcatgattttggccagacacagcgaaaggaccttgtctgtttcgaaaaactcatttaatcatgtgttattaatttattattatcaacaatacaatcgtactgggtgaccaataatgagacgcacccatcaaattgggccctccacggctccaccactgagagggatacacgaaagtcgttttacaaaaacacctattaaaaataaatgtgcataaaaatctattaccacgtgtacggtgaagattaggttctcgattttgtataagaaggtcgaagtgtgaagaaatcaaaaacccaaaatcgtgaaagttcatttctcctccattgatctttctttactcagatctttcctcttcctctgagatgtggagctacgtttggttaccgttggtagctctatctctctttaaggatagcatcataatg

SEQ ID NO: 28059 - DNA, 3000 bp, Unknown; identical to SEQ ID NO: 4408
  misc_feature (1)..( 3000): 2750-1469P.txt file - cDNA_ID_2993740; gDNA_ID_1620704; Annot_ID_48839

SEQ ID NO: 28060 - DNA, 3000 bp, Unknown; identical to SEQ ID NO: 4408
  misc_feature (1)..( 3000): 2750-1469P.txt file - cDNA_ID_2993740; gDNA_ID_2926206; Annot_ID_141717

SEQ ID NO: 28061 - DNA, 3003 bp, Unknown
  misc_feature (1)..( 3003): 2750-1469P.txt file - cDNA_ID_2993752; gDNA_ID_1620618; Annot_ID_46966
tctagcgttacacataggtcgatatagctagcacaagaatgaaaactaactttatttgtcttgggaacaagcgaaagatcgaaactccgacagacgtaatcttaattcgctgagaggcgtgtgagaattgcctttttccttgaatataaaatgcactcccataatgtaatcaaacaaaagatataaatagaataagaaaaataacaactcagcgtaacggagtccgattaacggagtgagaaatcatctggtttctcgagagttctaagccaatgataatcgaaggaaacgaacggtgttgtgtgtgtgtggttaagaaaagaacaaactcatacgagacacgtgcaccgaagctttttcccacgtgccaaagagtttcgtcttcgttcacacagaaccaagatgggtggtaacgaaggtaggaccctaaagcaccagcctacaacacatagatgaaatagtatatgcgtttacatggatttgatgaattgttgtgtttagtatataagtatattgtttagaattatcaaaaagtatactttataaaaagagtggtggtaacatatttagtttctgcaccaatataaaaagaaatatggtgatgtctaaagaaaaaagagagaaaacttagccaccaacaaaatattagaagaagatttcaccatgtgaatggaagggtaatgttttttttctttctttattttgaaatgaagggaaggaagttgttataaacaaattttcgaaaaggttaatgatttaaatctactataacctttttgatcctttagtttggaacaaaagaaagtttcagagttagcgatattttagtggaaactagttgttgattctccaactaaaattcaaccaccattagcataaaacatggttattttggcgaagtagtttactttgcaacatctatctgtattttactatataaaataatacttaacatatacaaataaatagaaattaacattagaaccaatagttatatagtttagctgtttaggtaaagcttagtaagagtggatgcaatcctttcccgttttctctccgcatttcacgccgtcgaagccttattagggtttaatacaaatccataatctctcgtttccttattattaaaacatcccatgtggacaccaggactaaaaatcttgacaatcagctttatttgatgactgaagtatcaaatttaaataaattaactagttaactagttatataatgagacttattttgaccacttaggtccactaatagacaaattaaattatcttatattggttattgtcccatcgtatgaaaatcaaggatggtgttttctaccagggaaatagttacatatatagtacatgatcaaacttgaataaactacacgataatgatcattatttgttgaaatcaaataactttaacaaacaaacaaaaaaactaaaatcaaataagaatattagtagcatagtactttcattataacctttatgaaattttagtaaatagtataagaatttctcaatatgcatcgattttgatttaataatgagtaaatgaaacgaatagaaacaacattttgatttgattaaacaaatagataaaaacaagactcataaattaaaatttggaagtttccgacaattagaaaagctgattgatatcgcatctgattgcaaatctgaccagaactcgaaaatattgaaaacatattttaggaataataaaagagatgatagcttaagtggaagttgaatgtcggaccgtacgtaccgggatagttctaatagacacttctcatttattctttttccttcaattatcccaactgttacacagttatattccataaatacccctagtcaaaatgtgaattcacgagtcaaacccataaatgcagactactgtcggtgtcggtgggtgaaactagcgtaaaatgatttagggtaaaactggaatttcactatatgcaacaaaagagcattcattcacatgtttatgtcttttgtgtgatttatatcttctttcttttgacagttacaaacttacagctaatcctttgattaaggaagcatctcttaattaatctcaagtgggctgataaatttgaactttcatcagatccaagaacccaaaattatatccaaccgatcttcaaagaaacttaccaaataaattgtaaaatagtagtatatgacatatccaccaaatctacaaagttcaaaggctactaaaaccaaattccaccgaagaagaccatataataactataggccaaacaaaactacaaaatcaatttctggaacaatgtgaatttaataagtatggtaaagtctgtacacatatctaaatgacaggtacactgtgattttggaagtggaagacacttgtacaatgtgaatccattttgacgactgtccacaagactcctcactaataaaccaaagtacttcacgtactctatctttttatatcagtttaaatgaccaaatcaaatttcaacatctactaatcactaactcaaacccataacaatattcagccataaacacataatatgttttaagttagtgactagactgacgcactaaatcaatcaaccaaacaaaaaaaagaaaacgaaactgaaataaaatatagcgtgattagctgctttaattcaatcaacgtgccacttttttcaccctaatatcataatcaactcttactttattttatttctttacatcttcccgtttttttatatttccgttatatgatataaaaacaataaataaaaatgcgtaaaaattggtgggaaagcgtcggtagctcacggccacgcagtgatgatgcgagtaagagacacttgtgaagtgcaataaaacccccttcttcttcctctctttctccttcgtcttcttcttcttcttcttccttccttctctctccttattaagaaagaccaacacagacacggaagaagtagcttggttcttctctttgtgaaggtgaatgcgggagatg

SEQ ID NO: 28062 - DNA, 3003 bp, Unknown
  misc_feature (1)..( 3003): 2750-1469P.txt file - cDNA_ID_2993752; gDNA_ID_1620618; Annot_ID_162156
tcatacgagacacgtgcaccgaagctttttcccacgtgccaaagagtttcgtcttcgttcacacagaaccaagatgggtggtaacgaaggtaggaccctaaagcaccagcctacaacacatagatgaaatagtatatgcgtttacatggatttgatgaattgttgtgtttagtatataagtatattgtttagaattatcaaaaagtatactttataaaaagagtggtggtaacatatttagtttctgcaccaatataaaaagaaatatggtgatgtctaaagaaaaaagagagaaaacttagccaccaacaaaatattagaagaagatttcaccatgtgaatggaagggtaatgttttttttctttctttattttgaaatgaagggaaggaagttgttataaacaaattttcgaaaaggttaatgatttaaatctactataacctttttgatcctttagtttggaacaaaagaaagtttcagagttagcgatattttagtggaaactagttgttgattctccaactaaaattcaaccaccattagcataaaacatggttattttggcgaagtagtttactttgcaacatctatctgtattttactatataaaataatacttaacatatacaaataaatagaaattaacattagaaccaatagttatatagtttagctgtttaggtaaagcttagtaagagtggatgcaatcctttcccgttttctctccgcatttcacgccgtcgaagccttattagggtttaatacaaatccataatctctcgtttccttattattaaaacatcccatgtggacaccaggactaaaaatcttgacaatcagctttatttgatgactgaagtatcaaatttaaataaattaactagttaactagttatataatgagacttattttgaccacttaggtccactaatagacaaattaaattatcttatattggttattgtcccatcgtatgaaaatcaaggatggtgttttctaccagggaaatagttacatatatagtacatgatcaaacttgaataaactacacgataatgatcattatttgttgaaatcaaataactttaacaaacaaacaaaaaaactaaaatcaaataagaatattagtagcatagtactttcattataacctttatgaaattttagtaaatagtataagaatttctcaatatgcatcgattttgatttaataatgagtaaatgaaacgaatagaaacaacattttgatttgattaaacaaatagataaaaacaagactcataaattaaaatttggaagtttccgacaattagaaaagctgattgatatcgcatctgattgcaaatctgaccagaactcgaaaatattgaaaacatattttaggaataataaaagagatgatagcttaagtggaagttgaatgtcggaccgtacgtaccgggatagttctaatagacacttctcatttattctttttccttcaattatcccaactgttacacagttatattccataaatacccctagtcaaaatgtgaattcacgagtcaaacccataaatgcagactactgtcggtgtcggtgggtgaaactagcgtaaaatgatttagggtaaaactggaatttcactatatgcaacaaaagagcattcattcacatgtttatgtcttttgtgtgatttatatcttctttcttttgacagttacaaacttacagctaatcctttgattaaggaagcatctcttaattaatctcaagtgggctgataaatttgaactttcatcagatccaagaacccaaaattatatccaaccgatcttcaaagaaacttaccaaataaattgtaaaatagtagtatatgacatatccaccaaatctacaaagttcaaaggctactaaaaccaaattccaccgaagaagaccatataataactataggccaaacaaaactacaaaatcaatttctggaacaatgtgaatttaataagtatggtaaagtctgtacacatatctaaatgacaggtacactgtgattttggaagtggaagacacttgtacaatgtgaatccattttgacgactgtccacaagactcctcactaataaaccaaagtacttcacgtactctatctttttatatcagtttaaatgaccaaatcaaatttcaacatctactaatcactaactcaaacccataacaatattcagccataaacacataatatgttttaagttagtgactagactgacgcactaaatcaatcaaccaaacaaaaaaaagaaaacgaaactgaaataaaatatagcgtgattagctgctttaattcaatcaacgtgccacttttttcaccctaatatcataatcaactcttactttattttatttctttacatcttcccgtttttttatatttccgttatatgatataaaaacaataaataaaaatgcgtaaaaattggtgggaaagcgtcggtagctcacggccacgcagtgatgatgcgagtaagagacacttgtgaagtgcaataaaacccccttcttcttcctctctttctccttcgtcttcttcttcttcttcttccttccttctctctccttattaagaaagaccaacacagacacggaagaagtagcttggttcttctctttgtgaaggtgaatgcgggagatggggactggagattctgcttcgagactgattctctggttctgcttagggtttttgattctaggtgttggatttgtgcaatgtggagttacttatgaccggaaagcacttctcattaatggacagagacgaatcctcttctctggctccatacattaccctcgaagcactcctgatgtaagatttaacaaaagccctaaacttttctcttttttcttcttttgggtttaacaaaaagaccctatgtttctttcctttatgttctgttttatacaatttatcaaaaaggttttagctttattaattttaactgttgttcttgttgttagatg

SEQ ID NO: 28063 - DNA, 3000 bp, Unknown
  misc_feature (1)..( 3000): 2750-1469P.txt file - cDNA_ID_2993752; gDNA_ID_2926211; Annot_ID_141977
agcgttacacataggtcgatatagctagcacaagaatgaaaactaactttatttgtcttgggaacaagcgaaagatcgaaactccgacagacgtaatcttaattcgctgagaggcgtgtgagaattgcctttttccttgaatataaaatgcactcccataatgtaatcaaacaaaagatataaatagaataagaaaaataacaactcagcgtaacggagtccgattaacggagtgagaaatcatctggtttctcgagagttctaagccaatgataatcgaaggaaacgaacggtgttgtgtgtgtgtggttaagaaaagaacaaactcatacgagacacgtgcaccgaagctttttcccacgtgccaaagagtttcgtcttcgttcacacagaaccaagatgggtggtaacgaaggtaggaccctaaagcaccagcctacaacacatagatgaaatagtatatgcgtttacatggatttgatgaattgttgtgtttagtatataagtatattgtttagaattatcaaaaagtatactttataaaaagagtggtggtaacatatttagtttctgcaccaatataaaaagaaatatggtgatgtctaaagaaaaaagagagaaaacttagccaccaacaaaatattagaagaagatttcaccatgtgaatggaagggtaatgttttttttctttctttattttgaaatgaagggaaggaagttgttataaacaaattttcgaaaaggttaatgatttaaatctactataacctttttgatcctttagtttggaacaaaagaaagtttcagagttagcgatattttagtggaaactagttgttgattctccaactaaaattcaaccaccattagcataaaacatggttattttggcgaagtagtttactttgcaacatctatctgtattttactatataaaataatacttaacatatacaaataaatagaaattaacattagaaccaatagttatatagtttagctgtttaggtaaagcttagtaagagtggatgcaatcctttcccgttttctctccgcatttcacgccgtcgaagccttattagggtttaatacaaatccataatctctcgtttccttattattaaaacatcccatgtggacaccaggactaaaaatcttgacaatcagctttatttgatgactgaagtatcaaatttaaataaattaactagttaactagttatataatgagacttattttgaccacttaggtccactaatagacaaattaaattatcttatattggttattgtcccatcgtatgaaaatcaaggatggtgttttctaccagggaaatagttacatatatagtacatgatcaaacttgaataaactacacgataatgatcattatttgttgaaatcaaataactttaacaaacaaacaaaaaaactaaaatcaaataagaatattagtagcatagtactttcattataacctttatgaaattttagtaaatagtataagaatttctcaatatgcatcgattttgatttaataatgagtaaatgaaacgaatagaaacaacattttgatttgattaaacaaatagataaaaacaagactcataaattaaaatttggaagtttccgacaattagaaaagctgattgatatcgcatctgattgcaaatctgaccagaactcgaaaatattgaaaacatattttaggaataataaaagagatgatagcttaagtggaagttgaatgtcggaccgtacgtaccgggatagttctaatagacacttctcatttattctttttccttcaattatcccaactgttacacagttatattccataaatacccctagtcaaaatgtgaattcacgagtcaaacccataaatgcagactactgtcggtgtcggtgggtgaaactagcgtaaaatgatttagggtaaaactggaatttcactatatgcaacaaaagagcattcattcacatgtttatgtcttttgtgtgatttatatcttctttcttttgacagttacaaacttacagctaatcctttgattaaggaagcatctcttaattaatctcaagtgggctgataaatttgaactttcatcagatccaagaacccaaaattatatccaaccgatcttcaaagaaacttaccaaataaattgtaaaatagtagtatatgacatatccaccaaatctacaaagttcaaaggctactaaaaccaaattccaccgaagaagaccatataataactataggccaaacaaaactacaaaatcaatttctggaacaatgtgaatttaataagtatggtaaagtctgtacacatatctaaatgacaggtacactgtgattttggaagtggaagacacttgtacaatgtgaatccattttgacgactgtccacaagactcctcactaataaaccaaagtacttcacgtactctatctttttatatcagtttaaatgaccaaatcaaatttcaacatctactaatcactaactcaaacccataacaatattcagccataaacacataatatgttttaagttagtgactagactgacgcactaaatcaatcaaccaaacaaaaaaaagaaaacgaaactgaaataaaatatagcgtgattagctgctttaattcaatcaacgtgccacttttttcaccctaatatcataatcaactcttactttattttatttctttacatcttcccgtttttttatatttccgttatatgatataaaaacaataaataaaaatgcgtaaaaattggtgggaaagcgtcggtagctcacggccacgcagtgatgatgcgagtaagagacacttgtgaagtgcaataaaacccccttcttcttcctctctttctccttcgtcttcttcttcttcttcttccttccttctctctccttattaagaaagaccaacacagacacggaagaagtagcttggttcttctctttgtgaaggtgaatgcgggagatg

SEQ ID NO: 28064 - DNA, 3000 bp, Unknown; identical to SEQ ID NO: 3679
  misc_feature (1)..( 3000): 2750-1469P.txt file - cDNA_ID_2993752; gDNA_ID_2926211; Annot_ID_202619

SEQ ID NO: 28065 - DNA, 3003 bp, Unknown
  misc_feature (1)..( 3003): 2750-1469P.txt file - cDNA_ID_2993756; gDNA_ID_1620832; Annot_ID_169710
ttcaactaatttaaaacattgaagctgaatatgtatagttttcaattaatataccaaataattgttgaaatgtttgtgatgcaggaccatgaagaaagcaataatgggttccgagagagaaaggctcagaggcattccatttggggaaaatctccatttgagtaataacaatttgggatatgaaaatttaacaaaaaaataaataatggcgtatgacatgtgatggtgactcttttcttctagggtttgattatgttggtttagggtttctgttgttggagagagatagagagaagaagaatctgaaacggaagtaggatttgtgtgtgttcgagaagagtccttgggaatgagcgagtttgttcagtaatttcgtagtacttgtcaactttgaacttaatttgaagagacatgcattgactctataaaaaaaattctacttttgcattcatgactactcttattccatgaatgttttaacattccatgaaacagtactttagtaagaatctttggtaacctatcataataaagatccttcttgacttcgcgcgctcaatgcttttgtacgtacgatggagaaaaacacttactaaaaaaaaaacactttttgttttgacatttgacctttctaagttactttttttttttgtcgtctgaaaatttattatagagattccggtgaaatacaaaagtgaaatataaagccggcggttaacaagtaacaccagaaaactaagccgacgattaaaaggatagtcttggaagcaaaacccaaaggaaagggagacaacaaggcaaaacaaaccttacaaacaaagcaaagttgcgaaactgaaacaaagaagcagaccaaaacaaccaaaattttaaacacaacatctcgtcaaccacattaccagacaaaggaaaggcagagctttacaacaagccactccgtaggagacaaggaactcccaaccaaacggacagcggtgccacctattacgatgaagactaccttacatagaagagttccaaggaatccataccggcgagaagaactaggccaaagacgacaagtcacacctacactcccggaatcggcgaattaaagaatatgattgtttagcgcctcgaaggaaaccagccaatgaacagatgagatctcgatcagatctttagagtagagacaaggagagaaccaaatcaattcggaccacaccgaaaaagaaaaacgggaggagatcgaaccggacagaaacgaaagcaaccaccaagcctggtaagaggctaaacgagaagaaggctaaaacatgaccggatcaagaggcgctactagcaacatagaccaacccacaaaaacaacataagccatctaagaaccattcgaaaatccctacaccacaacgcacataaactaagtaaaagcaacataaactttacaacagagcaagagacgcatagctccggcgctatggaagccaccaaagccagccaacgcaaactgagatctagatctacttttagagagaatgaagaggttttagagtcctccattctttacacaaattattattaatttgatctttctaagttactagtatataaaatatataaccatcaatattcacgaaacaagaaagctaaagaaatcaatttccatgattgaagttactttgacagtataaattacttcatcctaaactatattaacatgcacttttttcttttagcttaaaaaaccagagcaagtctgatcttgcaaatgcatgaaaatcaagagttggatctatcggaatcctttattatatcattgactttttttgcagtaaactgccagtggatctcatgaatctaaagaaaccatagttaaaacttaaacctgaaccgatcaaaaattaaactcgttagtcttttgtcacggcgaggggataataagaagaaaaaaattatatcagaagagtgttttttttcggataaagaactaatatacttgtcaatgagcttaatttgtttttgtttgctttacactacggacggctctgaccgtacgaacaaaattattaaggaaaatcataattaagaggttgacattgcattttagatattggtgtaaattatttgttatatatactttattcaaaattctctatgtatgtacatgttaacgatcctttactggaaaacttaaacatcttccatgccatgtttaaatttgttttcacgtttttttattttgagctaaactgatatttctttgtgtattctgaaatatttttggattttggtattggttaaggttataattttccagctgaaaaggatgaattctctaaaagttttcaaagatagggtatcatttcaaaatacattttttaaaaaggtttgcttctcctaatttcatattatctttttgacgtcaccactcaccactattgaaaaagcatttcttaattttctttaacaaatggagttagtagaatattattatctgcacgttttccctatctaataacaggggtaatttcgtaaatcccccttcaacaactaattaatgtgccggaatcgcaacttcttaaacttctaccaataacaatacgccacgtcatcattcttccctgtcatcgattacctcagacggtgtcggagacgtttcattctccggcctttagtggcattttctcgtaaataaattcataatctgtgggcgaacctttggcgtcgtgtttataataaagtccaccgcgaaatctctattattcgccacaacaacaacaacaacaacaacccaaaacccaattttgttacctcttctttcctcaatcctaaagtcaaaacaaacaaaaagcttccattttttttctttgattatcttcaatcggaatttcaggtaacgaaaaaaaaaatccgatctttaatcatcaaatcacctaactgggtcaactatttgatcaaatcgataactgatggattgatttggttttgcttatcgtaacttttgattttcaggtgtgagagatg

SEQ ID NO: 28066 - DNA, 3003 bp, Unknown
  misc_feature (1)..( 3003): 2750-1469P.txt file - cDNA_ID_2993779; gDNA_ID_1620774; Annot_ID_50245
catttggggtgctagcccatacattatatttgatgctcttatgcacatcatcttcactgtacgacttgatgataaagaacttagcatctttatactcaactggaaaatcgtctctgttgcactcttctctatctggaagaacgcatgttacagtctcctcagtatttgattcatcaaacgtctgctttttcacctcctctgagctaacctcttctgtggccttcgtgcccttggctctagggcccctgtttagttcattcaagccatcaatgttctcatttccatagaagtaactgttaccccttccccggcttctatatttgttgtctgtattgagccatcctctttcatttgttcttgaaccatatccagaagaaccataacccataccagacctcaccgtgctaccatactgaccatatgacttgtttggagacactctgtcgtagtaaccctgagctgcataacctgtcatggatgcaggctggtacatactctgccaagaatagaatgaggctatcagatacagggattcagatagagaagaagacttatcatacaaaactgacttccatatcataccgtgtaatgcgaattggagctagagttttgattcctagtcgcaggtacattgttgttagccttagaatatgaggatgcaactccactgccagaaacagacctctgcacatctgagaagttagagccatcgtgccatgacacaggagtgtaaaacccatcatagctatacctggggtcctgataaccagcagcaagaccacctccaagagcactgtttccatacagtgcactctgattcaatggtttaacaggagctgatccattcattcctttagggataccagcagatgcagagttggctgctttgtttgtagagagcttgctctgagtagaggcaggaacagacgaagcgaaaggcccactactggctgtgagaggaaaaggatactggtactgctgagcaccatacaactgtccatcaccaccaagttgtggagcagggcttgttgctggtgagtaaggaaaggcagcatacccgtatccctgcggataaacaagagatgcattctctccgtaagctccctggagtgattaccaaatgactaagtagggcaaaaggtaaaagagaggctaaatagtctggacacgagttgcttataagaaaatattaacgcacgtactgatgtcatatcaacactctcggaattggtataacctgtgtagtcactcccataacctgaaagattatacaaacggttgtgttatagatattacaataattctagacagtagaaggctgaagatatataaatgaaacttaattatcaccataatagtagggctgctgatacacattaggaacatagaaaacagaaggatccaaggcatcactgggtagcataggtgacaaagatcgatcaaaagaaggaacttgaccattcgaatccatagctccatactggtaaacacccgtctgcaaagataatgatgctatgagaactctgcttggagtaacaaaatgtgcagagacattaaaagatgtaactttaccttcttagtaggctcagggatctccaaagtcctagactttgaatctaaagacagtttcttcaatacatcagcagcttctgaaaaaacaatgtaagtgaaggaaacaaataggtttctatcttcagcaagactaaaaaattgatttttctaatcaatttattcactttgctagctacaggaacagtcaaattcatcgagctaaaacaaacagaacaaatggaaatgacatcatttcactatatgaatcgaattacgatgaagcaactagattcatgaacgtagatcacaaaagaaatgaaggagaaaagaaacaaaggcaaaggatacgatcagcaggaggagcaacagtagacatgagaacagagttggcagcgaagactgataatagatccttgtcggatattgaacaataagagtttgagacaaacacaaatatcagagcaaaaaagaactcagaaggaatctagggtttaagagattgaatcgtagccgcaagagaagagagaagaagaggaagaggcaaaagtggttttgttcgttcacctcgatttgattcaaatacctccaagatcccttttttatatttttctattatttttgtttacctttttctccatcgttttttttttaaaatacttcctttattccagccacattaatattatactagtcactacgaaatatctcacaaaataatactataaatattatttcctcgaaaatttcgcaattaatcgggaaaaaatcaatttttaaaataaatatcactgattccaattccattgttaggaattaaggagcaagaataaaggcccaaataggcccaatataaatctgatccaggatccgaagagttgaatccaacggccaagattaactcaaagcttgaaagaggtaagggaacgttaaaagcaccttccaagcgagagtaaggagataaacctacttcctttccttgcttcagctccccttttcttatccggaaaccaaaaacttccggtgataaaacctccttcgtcatctctctacttctgttagtttcttaatccttactcttggaatagtttatcctctgcattttttagtgccacagtttatgtgtgtatgttttgtttggataagaatttgttgtaagcttttgaaaacttgtattagttcattacttccatgattttgggtgttttgtaataaaatttatggattagtgtttcttcagattgtcaattgtgttcttattgagctctgctttcgaaggtgtcgcctttcttctggtttgttgtgaaaatttattactttagcttactgggttgttgtttctttctgttatattgattgtgttaaccgtatatagatgaaaagaagagtcttttttatatctttgaaatcttatctaagtgctgaattttgtctgtctttgaagtggataaaatg

SEQ ID NO: 28067 - DNA, 3003 bp, Unknown; identical to SEQ ID NO: 28066
  misc_feature (1)..( 3003): 2750-1469P.txt file - cDNA_ID_2993779; gDNA_ID_1620774; Annot_ID_167632

SEQ ID NO: 28068 - DNA, 3003 bp, Unknown
  misc_feature (1)..( 3003): 2750-1469P.txt file - cDNA_ID_2993791; gDNA_ID_1620658; Annot_ID_47910
tttttgacattgagttgtaggaaaaagagaagaagtcgagaaccaaattgtgcaccaaatggaactcgcctttcctaaaaaaagaaagacagtaggatgtgataattagaataacttaattcctgagcccacactattctttttttttttttgaaaagtgaaaattcagatattcatgcattcccatgaaacatactctagagattgggagaggagagtatccaggtaccacattgccggcactgttaacaaggacaacggacttaaccaacgccggccaaagaaaggccattaatgcaacgaaataccctgatagaggaaaaaatatatatacaattagaggagtatcttaatcatttgtgccattttaacgcatatattacatctcaataacttagggtgcataccaccgattgaattccctacgcaatgtgctggttccccaactacttcagccatgaaatcccgcagtaattcagcccacaaaagctcggtgtaaatgatatttggcttctctgattttccaaaacccaagactgtgatggtccatactcgatttttgctatttacgatgttgtctacattatcgcggtaatgctctagaaaagcaccaaagccatgcacaagaagaacggcaggcccttcattaccaaccactgtgtactgaaacaaggaagtgacttctattaaaattccatagcaaatataaaaagatcaagcagtgggattacaaaaatggccaatgtaggccattggacttggagaaatatgagtaataacagaaacctgaataagatatcccttccatctccaaatccttatagcgtgccttttttcatcaatcctctctctacttagagccaggagataataccactgccaaaacaaatccaacatcttcaaatattttcgaaaagaaagtaggagcatagatatatcatgtctatgagttattgtacctccatagagcatacagcatcagttgcagcagacactgtggcagctgaatatccaaaaggagaaataaatccagcattcctttctttttcatactcgattgcttcatagtggacacttcttctggatacgataccaagacagaggacaggtccaaaaagtttgaaaaatgaagctccgggcctagtctcggcatcacgaagtctcgcatggaccctggtcaacatcaaaaccaacgcccatcactcttcaacaagatataaaatataccagattcattccataataaccactttcatatggaagcatctgggaagcacaataacgccagaattaagaataaccacgtactcttgccagtcatctcgacttgtaccctccaagtacctcaagtatcctgctagagcattcagtacaacctcatttccacctccaacagtatctcttttacttgtgacaaaaacagagttatcaaccttcttccctaaacttccatcaacaattggctccatactgctttccttcaagttaccaagcctttccattaatactctttcagcagatgcctgtgccatttccctccaactattttctatttcccataagctttccttcaaatagtccttcaggtcatcgagcgttggcacagaacctggagcatgtttcatttaccatttcccctagttaaaagagtcacaaattagatatctaaaagaactactcaagcaagagatccaactccatgaatattgaagaaaaccttaccccactgcaattcacttcctggagatgaaaattttgctgcaggaactggcaaagtgagaggcagcttcagtttcttaaactcctcccaagattgtggtagatctgtcaaattctggaagaacaaaaatgtgtcacataagtaactggttctgaatcactacgcagtaactgatattgtaaaagatacgtacttggctctcgtaaaaaggagtacgccaagcaacaatcctcggtgattctccagataaagaaacaccttccaatttattctttacagcgtctaaaacctcacacagatggtattctacctcttcttccacaaagacaaaaggagctcgcacctgttacaatccagtacatgcttgtgacaaatagaatcttgccttcaaattgtgagaaaaatgctcaaattatactcggtgaagttacctctttgacaagatcttcaatgacattctctgcattcccatatctgagcataagatttgatccttgcttcttcaaggtttttctcaaatcttccaatgctataatagctagctctaaagtgtccgttgtgtatcctacatacatataagcccgttggattagatacccaatcaagtaacgcttggaaatggagtcctatggaagaatcctagctacttgatctatgcaaaaccattccactctcctacaagctaaaacgaagcagaggttcatcaactagagagatccgaattgagctcaggtaaattcgaatttgttccgctaatcaatccaacatttggaatgtatataaacttactcgatagaatgcgacgatcgaggacgtagagaggtatgacggctctgtgcttagacgcagcgaggaggccaggatgatcatcaacacgtaggtcatgtttaaaccacacaaccgccgtggaaccttcattcgttgccgaagacaaacaacatttgcatcggtttttccgatcattccgccggagacggagatgcaggaaatgcgggagagcgaggaacgccatgaggacggtggaagaaaaccagaatcagtgggttagtactagtagtatccatgaagtcgaagcagagagagagagagggattgtggtggagaagactctttccaagtgtgtggtcaatactcagtcccacagagaaacacctaacattcaaaacgacgtcgtacttcacttttttctttctttcgttttttgtgttcaactgtgactgtcttcattagatttgagactatctatttacattctgattatttcttaagaagaagcggccatg

SEQ ID NO: 28069 - DNA, 3003 bp, Unknown; identical to SEQ ID NO: 28068
  misc_feature (1)..( 3003): 2750-1469P.txt file - cDNA_ID_2993791; gDNA_ID_1620658; Annot_ID_163716

SEQ ID NO: 28070 - DNA, 3003 bp, Unknown; identical to SEQ ID NO: 28068
  misc_feature (1)..( 3003): 2750-1469P.txt file - cDNA_ID_2993791; gDNA_ID_2926187; Annot_ID_140836

SEQ ID NO: 28071 - DNA, 3003 bp, Unknown; identical to SEQ ID NO: 28068
  misc_feature (1)..( 3003): 2750-1469P.txt file - cDNA_ID_2993791; gDNA_ID_2926187; Annot_ID_200703

SEQ ID NO: 28072 - DNA, 3003 bp, Unknown
  misc_feature (1)..( 3003): 2750-1469P.txt file - cDNA_ID_2993795; gDNA_ID_1620627; Annot_ID_47159
cttacatctgcataggattttgtgataaattagatttgtttattgccacaggaagctatatcggtaccatggaaaccgattcctcggagaacagcaaagctctactttgctatgagaggtagttactagttactacagctgatttctttattactttccacaaatgaaaattgagatcccaaggcagatacatacaacaaaaattcttcactaatctttggcattctcatgaaattttcagtaatagaagtgtttgaagagagtgaagggcgtaaacatggagaatgttcgctactcgatcttgccagagtcttggaaatcaaaaagcaactctgtgaggcaaacgtaagtgtgtttagttgttttatcattatttagaaatgtcactgccaggttcactgaataactgaatattgtctctcagtctgtgagcgagagccatataccagatattctcttggagagacttatcactggtactactgaattcccgccagtttgtgccattgtgggaggaatattagcacaggttctctctctctcactttcactctcttatcgcattcgaatcttctcactagaaacttgtaatttgacaagaaagattttttgatgtggcaggaggtgatcaaagcagtatcaggcaaaggagacccgttgaaaaacttcttctactatgatggtgaagatgggaaaggtgtgatggaagacatttccgactcttttacctcttaaacaaccagtgggccttgatttagtttaaactctataatctctgagattccatgtatatctcaatcgtttgttttttgccttcacattatgaacaaatttaatgcagaatttagtggaggatcagttgtgattttccttcggtaaaatcattttcagttattgacatttgaattgttcaatttcaaatttcaaatattataattcaattcaaagactagctaagtttttaaaagtaattagtgagagatctcacagtgatataaaccacattcattttaattcatagcaaagtaaatggtaagaaatgaaaatggaagaaagagaggagagtagttcacacgaacatctgaaggagaagttgagagagcttgaggaggaatggacagccatgaaaacaggtaaaaactcatctgcggtttcatggattaccgtggaagatgctcttgagtatgtcgaaaactctcccagaaacctaatgctctctctccaacacaaaccaaaggcagagatgatacaagaaatatcgccattaaggagaaaactctttcacgactctgatgatgatgatcaaactaagaagacgacattgctttctcattcatcttgttggtcttcgaatgtgacgagttcgagtgataccacgaaagcaaagaagaagacaacgattagaagatttgtttctgttacaatggtgctgcttttgtcatgggttttagttgtgttgatgaaccactttgatcatctctccatgaatacacaaatcattactttggttcctacttgatatttttatttattttggtttgagaatgttcatcaatctcaataaataaaaaaagtttagttttgtattattacctctcgccttctcttttaattcattgaacctcttcaactttggctgtaactatgttggttaaaacagtataagtaatgtatgtatttatggttttaggaaaatcttacaaaataatactctatcattggatgaagaagcaaaaactacacccctctacatcttttctattcataaacttttttggggaaagaactacattggtggtgattaggtgcatcggtgacactaatgttgaaaatatgttttgtgtaaaattagtatggttaaagctaatcatttagttgagcaaaaaaagatgctaatcatttaaatagaaaatggactcaaacaaaagaaggccacacattcaattgttacatctttattgggttttcatttttggaagctatttttatgaatttgcagtgttttgttgcccaaaagaaaaaaagcataattccaagtatatctttcattttgaatccatcagtcatatgttttacttgaatcaactatttgttgggttttacgaagttacttgttaagaagattcaaaatatatataattagactatcaaaggaacaaaagaatgtaattgggtcataactttttccgaagcttacgtgacttgggagaaaatcaaacccattagtttcacccttaatcaaactaatcacaaattttgaactttgcaaagaaggtaaaataataatcagcaaaaagattaataaaatgacaaaagtatctctttaaaagattaataaagaaataaagaaatgacataagctctcaccgaccgacgtcttgtcttttttattcttaaggtcggtgccatgtcgacgccttcaagcttagaatctcgccacgtgtgggataaactaaccgaacccaatcgaaccagacagaccaaagacagaccagaccggactagttgtatgtcggcatcagcgttctagtacgacgttaattaaaaaaataaaaataaaatattatttatgatattccaccaataagagccaatgaaaagtgtgtgaaccaaccaacttctgtagcaaaccgtaccatttctctcttagatacctttaccttccttctataaattaggttcttcctttcacatttctttgtcttcttcttctacataaaattgattcgcctcgaaatttacacagacttgtcgctctctctttctctcttatttcacagagcccctaaacatttccaaaaatcttgcaaaggaagaaaaacaatggacaaattttggactttcctcactgctcttcattcaggcgctgggtaattattcttaatcttaattttccttccattatgtttccaaaattagttactttttgatttcctctgtttcgatttctaatccaaaccgtaatcgatttgttggtaatgtatatgcaggcctatcgtgatg

SEQ ID NO: 28073 - DNA, 3003 bp, Unknown; identical to SEQ ID NO: 28072
  misc_feature (1)..( 3003): 2750-1469P.txt file - cDNA_ID_2993795; gDNA_ID_2926186; Annot_ID_140804

SEQ ID NO: 28074 - DNA, 3003 bp, Unknown
  misc_feature (1)..( 3003): 2750-1469P.txt file - cDNA_ID_2993802; gDNA_ID_1620678; Annot_ID_48294
taatcagtataaggtaccgaggtgcgtgagcttcacacctatcatggagctgcttgactctagagttgtgtctgctcatttcagcccttcgttgccgcattggtcaccagaacgacgtcgttagataaaactttatatgaaagatatcaaccggatgatgtgcggttttagaatataaagctctgtttctgatgctaattaagactccctgttagatttcttattaggctttgtgaatcgtacaataaaatttgaagtacgtaccgatgtttttttccttcatcttctgttggaatccagctaataactagctttggtccaaaaaccagatatttttaaaatcagcatttaattattactacgccctaaattttctttaaacacggaatgttaatcaatgtgccctaatacttccaacataaaagtttggaaactaacattagatcttaaattattgttagatcttaaatttcaactgtgtacaataaattagatcttagattgtggactaccccaaactcgggcttctctacttagatcttctactaaatatttgggcttctacaatgggttcaattactttccctctcagggcttttaactagtttcggcaattcacaattgtaaaactgttgcaacatggctcattcagagataaagcccaatatcagtattggtaaatacacaattttattttttacttctttttacacgagtttctagaaatgaatagtttttgacatgcaaacaattagtcaaatctcttgtcgaacaaattcagtgcgaaagcaatgtatacgaatcaatagatatgcccagaagataaaatgacaagttatcatgaaacgaatttgaaccagaataagaggagcacacacaaatgcttcgttaagcatatatgaacaaaacaaggccccacaaaaggaataaaaaattccttggtatgtgacatatcagggaaaccacactaactaaaatatttttacgaccttgaacatgttgaataattttttttcctttgaaattttaagatatactgcaaaacattatgagtacttgtataagatatatacacaagaaaaagagcataaaaaaacaaactacaaaaaaaaaggattatatattaaatgaagttatagataaattcataatgcaatgtctccttttttttttagaatgtttctatttgacttaacaacaccttaaaattttaatagaatgcaacttaaccgaactattgtgactcaaattaaatttattttggaaacaaagctaaaacttcgaaagttactggagaaacgattggaaaacaataaattaaacaacttaatatggcaaaacaatgaaacgtgattttaaaaataagattaaagtaattgaccagaagagtaaattaggctgagatgacaaaaacagcgattagaaaaagactatagaagcgaagctggttcctcgctgtcgctccaagactaaccacctcgactaaaactacttctggtggcaattttttagcattttatttagatcgtggttttacgtgcataatggcttttggctcaaaggaaaaaaaaaacacataaaaatatatttcgacatgtgcaatcaaatctttgacaaaagagatttgctgatttgcaatcgcaacgtgaactattatatattaccatggaccataatgtattatacatgaaaggttagttttttttaatatatcaataagatattaattaagattaactaaatgtataaatatcgaccgttatagacagagtgaaataacatagaactttttttcacaattttgacatgagctccatgcgctctaagacaagcttttcttttttttttgcttgtcgtttatttttcttttgttgaaaatgtcttttaatgttatagtctctccatttcattatatgtatagtttcagaaattttcacatatattatattaagaaaagaaaaaattggtttttgtccttacgatttttttcattgatcaaatacttaaaattaacagagataaaactgaaacaatattttaaattaaaacaacatttaaagtgtaacgaaggaagtaaaaaatgtttaccaactatatttgtcctatctttcttaaccaagctagcttatcttcactaattcaaagttgtcacgttgtctgtttgatttaatactatttcgagtaaaagcaaaagtatcttatggaaatatctgctaatactcgcaataaatatatatgggacaaatgtaaagaaagatgtagtatggttttaaacttttaataataacaactatatatatacatatatagacatttttatcattaaaaccttttcacaccatgcaggatggttcccattctagaccggtgaccctataaataatatgataatttccttgacaccatatcacaaccaaattccttagagaaaaaggaagagaaaggtcaaagatgttttactatgtgattgtccttcctttagctctctttctcttggcttacaaattattcttcacctccaaaacgaagcgtttcaacctccctccctctccaccttactctctcccaatcctaggccaccacaacctcctcaagccgccggtccaccgtctcttccaccgcctctccaaaacacacggcccaatcttctccctccaatttggctcccgccgtgccgtcgtaatctcctcctcctcactcgcaacacaatgcttcacaggccaaaacgacatcattctctcaaaccggccttgtttcctaaccgctaaatacgtcgcttacaactacacaaccgtaggaaccgcgccttatggcgaccactggcgtaacctccgccgcatttgctccctggaaatcctctcctcgaaccgtctcacaaacttcctccacatccgtaaagacgaaatccaccgcatgctcacgagactctcacgcgacgtcaacaaagagatcgagctcgagccgctcttgtccgatctaacgttcaacaacatagtaagaatg

SEQ ID NO: 28075 - DNA, 3003 bp, Unknown; identical to SEQ ID NO: 28074
  misc_feature (1)..( 3003): 2750-1469P.txt file - cDNA_ID_2993802; gDNA_ID_2926213; Annot_ID_142080

SEQ ID NO: 28076 - DNA, 3003 bp, Unknown
  misc_feature (1)..( 3003): 2750-1469P.txt file - cDNA_ID_2993806; gDNA_ID_1620721; Annot_ID_49208
tcatccataaccggcgtgaactctgttgctatctctcccatcgttttagaagagtgagtgttccgttctttgggggatgaatctttttttatatgtaagatcttgattgatactctatcgcaattattgaattttgatgtttatatccattaaggaagtctgtctttttccactaatatttatactattttctcactcgcatgttattactgaaataataaaaatatacatggcttgtaatgtttgaattttttgtagaagaaagagaataaatcagagtggaaaacgacaagtgatggccgatgggtcaagtgtgtaggagggaaaaaacagctaagacgatacatagttttgtaatttcaaaattagacaaaggaagccaacaaaaaaagagtcagattattattaatagattaatatacagaagcataagatatatatgaaacgtcgaaaaagaaaacaattggttttacttgttttcactcgagagtataaaaataataatgcatctggttgtaatgggtaacggagttcacggcacaaatgtggtgtatattaaatattattcaatatttaaaggtgttaaattcgaatactgatataacaacggttcaatcacattccattagattatttatgtgttctaacttctagtcaacgaaaccaatatgattatgaatttgtcatcaatggtgaagaatctaaatagactgaaataaatattttggtgatcattgccattccagctgtacacaaatttattgtcaccgaaaaccttgtatgtatctaactagaccgttaatgatatgtaattagcaatatatacattgaataattgattttagcaagtgtcaatgaaacttttattctaacggtaataacaagcaataaccttatggtcaactttggttagagatcacatcaaaactgtataaatacataagtcggatattaattcaaaacaaagacttttgggtcagtatgagtatttcgtcgtcttctaatttataaatggatcggaacacccaaattattatcgggaaaaacgtacggcaacttgtttatagaattcaagttgctactaaatcatgcgccacttgatatatttgcagtcgcaggtccactcttcctagtttagtaccccatctaggcacatatatcgaaatagtttaataaattgaatcaaatactgaattgttactgatatatatactctgtatgtttctcgaaaatacttaaatttggtgtcatggagttgataaatttctgtaagaaattgaacgtctacagttcttatggtttagggtttctaagatggatccaaaaaaatgcaggaaccgaactatatacggcttttgagaacttaggttatcctttagacgtgactttcaaataagtatgtcgatgatttgataagacatgtcgttttatgatatgtagggacagggaaataaaagcacaatgtgaattaagactttagattcaaaaagatgcttcatgcttgtagaaatgatgacgattgcgacttgggacaatggacaagtgctatgtcattacatatactgatacacctaacctaatgaccaaataaggactctttacacgggttaactaaacaaatatatcccaactaacatttccaacaaaataagccgataaatgtaacatgtaccgaacaaaacattattaatcatcgtaacttttttttaggtttgaattaatcattataatttaaaaccctaaaaccaacttataagaaccataattgatcagaatccagtttaagtaaataacatagaaaattttgagtcagataaaaaagaggaaattgtatggttagcaacatttacattttacagaatatggatatggtaaatgagaagtgtgtggatcacaagaagtgaatgtgctttttctgctttttaaaggatgaatatgaaaacgaggctaccctcgttattttatttaatgtgaccactgtttagctggaaatcacttggagacgactttaaagtaggctccaaaatctaaagctagacaccagacaaaagactttctatattgtttgtcttaagataattctaaaaatatcagcatcgttactttattgaatgaatacttataagaattgacagtgaaaatgaaactagtgttgaaaagagatgtttggtcattaaaatcaaacaccgaccttaaactaaaaaagaatatcacttcatcggctcctccttttttcacaacttatatacaatatacacacacacaaactgagaattagaatgtacatgtgaatgggctggtgcagtaaatgcattattacgtgttaatgtacatgtgaatgggctggtagcagtaaacgcataatctcaaaaccaccggtcaccgatgcgtgtgcaagtctcagtcagaacgtgattggaccaagtctcggtgtataaagacacacagtccatcaccgctaaataatgaccacacggatgggcccatcaatatatcaaatttgtgggtcttttaatcttgtttcacaagtgaattattcaaatgggcctttatttatacaccataaatggcccattagtccaacaacatacaataatgcaagtggtcggggtcaacgcactagaaattccacaagaactaaacgataagaacaaataatcttcatagtctctcatccaatcttacaaactttctgatttcctttctacattcatcgaccaatggcagcaaacaaaactcttcctacgtatttttgcagaaactgcgagaatccactagctctcggtgaagatctcatctccaaaaaatttgtggtaacaaaaaaaaaaaactaaagaatgttatagctttaccaaaaaaaatcactttttcatttcttatcggatgattttctagagatgatcaagtctcttcataatctccattggttataaaatgcaaaatgtttttgaatatggattatagggagcttcagggccagcgtttatgttttcacacgcgatg

SEQ ID NO: 28077 - DNA, 3003 bp, Unknown; identical to SEQ ID NO: 28076
  misc_feature (1)..( 3003): 2750-1469P.txt file - cDNA_ID_2993806; gDNA_ID_2926191; Annot_ID_141057

SEQ ID NO: 28078 - DNA, 3003 bp, Unknown
  misc_feature (1)..( 3003): 2750-1469P.txt file - cDNA_ID_2993813; gDNA_ID_1620726; Annot_ID_49283
tacttgatgctttggtacgtaatggtgatgatgttcgttatgattatcttgttcagcggctaaggaagaggattggttaggcccttgtggatgttggtgttgatgttcttgagcactgtttgggagattgtaaaacacatgtcgtttgtcggatctatgttctacattcattgctgacattgttacatatacaaaaccaattccaagtaaatcacaaatagaaatcagcatataaaatcaaactaaaccaaaatgttttacaaaaaaaaaaatttgaactgatatttatttataacggcattgtttaaattattttctatgcaaaataaaccggatcgaaatcgaacaaaacccaaaatttggtgaaaacaaatactatattactatttcaaaagtaagatgaaagaaaaagtgaggtttggcaactggaccgaaatattttggcttcaattagactctcaactcctaaaaaaacaaaatagctgatccgaatcgaaccaaaaatatcatatggctaccctaaataaaaatggtatatggaaaattagtacatataacaaatggtatcaaagctgaggttaatacctcttgggagcgccggatctagattatctggatgatcattagaagcagcagaggattttaaagaagcctcgtcggttatgtaaactttcaagccgagctcacctctcacacgagaaaagatcccacgtctctccatgggaaagtgaagaacaacagcatcagaatgaggaacaaaagaggtccctgagagagataccttgccaaggaaggaacgtccattagtagatctgttgtgactataagcttgagcttcaagattgagatagtgaagacgagatggatctgagatgttgaagaagaaactctcgttccaaaccgggtttaagtctcgatctttgatcgttgttcggtgcttttgaccatcgaagtaaagctcaacgtaagcgttcgatgttccttgcccatcttttgggaagagattgtgtgctccgatcacgtccacgccgagttttagattgctcatcatcatgaccgtcgatcttttgatcgaacacttaaaagtgaaagagagacttagagtagaatcaagctcacaacttcaattttgataaagggtcttggaactatatactacataataaaattatatgcacatgcatgtgcattcataagtatatgtaagttgtggagaaaaattgaataattatggtaagaccaacttagatttcaagtaagggcagacagagtttcttgggattttcttaaatgtttctcatcttgaaaaattgaaaaaaatccagaaccgaccttaatttatacatgtacaataatgcatatttttgttataaattaatatgatatggtgtgccttaacatattgacatgagttataaataggatatggtgtacctcaactaggacctcaacccataattttttttcctttgtaagtaaaacaaacttacaaaaaccaaatctattttacagagttataaattggaatacaagaaataaggtcaactctttagtctctttttgttgattggatgagatggattcaggaaaaataatgaaaaaccatattattatctccacacataaatgcagatgcgtataaaagaggtcaagagttcatgcatgcatatatctaaggtaaagatcctagaaaaacgcttatgtcacatgagtttctttgacttatataaattgagcacatagctcttactacttaagatctaaatttccaccaatagaaaaactactagctaggtctccgcagtaagtgatacgattattaaatgctatatatatttatacaaaatacatgtgtgtgcatgtatttatacacgtattttagaagtggggtctctatctttttatggattcccatgattcacaatttcacatacaaggatttaactactatcccatcaaaatcctaatctgaagactaaacctctgatcttgattcacatgtataaggagaaagatgggaaagcttttaattcatttttgcctccgtttccaacattcaagctttgaacttctcacttttttactagagagagatagtgatggcacgatgaacgagggttgaaatggaaatcgcagattatgagatttattttctatacatcttgattcatataataaacacagtactagttgataccatgctatttgtagatttctagataattattgtttttagtaaaattgactaatggtaaaaccgataataaatagtgtattttgtgtgtgaatgatctaagcaaaaccactaaccggatataataacataaaatttgttaactaacacgtccaaaatctatgttccttcaaaaaaaacatactagataaataaaaatatacaatttggctcgaggtctcagtcaaaatcaatagtttagttatcaaccctatagtcctgaatccataaatgttggataacaagtttgcaatgttatataataaaaaaaaagattgcaatggtaagaattaacatcataagaattttattggagattagttagctgtttagttcatatataaaatgctttttagtgaagaaatagtcaactatcatatgaagatttaagatttaatcagtgatcattatacaattctatttctaacttgatttagattctctgccgatcttatctcatctccacttgttctctttctcaccttgttttctaatttctagtcttctagagaagtcaacgtaaacaaaaaatgtacatggactaaaggaatgtgatagttttatttatttagataagcaatgcacgacgtttattgtgcaataaaacagcgtggtgttctttttttctagctccgtgctgtcttctcgaatctgcaattccctgtaaacagagcaaactgaaatccccaaatcaaaaccctaaaccctaatctctaatttgagaaattaggttagttcacctttttgtcgattcctcttgcggagagatg

SEQ ID NO: 28079 - DNA, 3003 bp, Unknown; identical to SEQ ID NO: 28078
  misc_feature (1)..( 3003): 2750-1469P.txt file - cDNA_ID_2993813; gDNA_ID_2926153; Annot_ID_139391

SEQ ID NO: 28080 - DNA, 3003 bp, Unknown
  misc_feature (1)..( 3003): 2750-1469P.txt file - cDNA_ID_2993825; gDNA_ID_1620629; Annot_ID_47217
agccgtaaaccggactaaagattatggtttgccgcaagaatgtctccataaaaccagctgatcaaaatctaaaacaaaaaagttggaactttggaagtaaatacctcagaagctgcagaagcatatacatatacacacggcagaatcattcaagattcattgccaaatcgattctttttgaaaggaataatcttgggttttgagttaggtgaaccatcagtcattatgtaagcaaaactctatttgttaaattcaagccagtttttataaagatcgtaagttaacaatttattcagcatattatctaatctcttcctctctctttattttgcttgaatatttatatatatcatgcaacatacatttcaaactattcataatcgatctatttaagcttcactcaatctgcacccaagcggctgagcttggtatacctgcatgcaccagaaatatcatatagtatcccggaggagcaatctcagccgttgatggacccaatgcactgactctataagaatttgttagctggtcacgcgtcacagagagtagcttcaagattaccatcctctgattcatcgcaaaggagtgtgtagtgaaagatggtgcaactatcctcacagagagaagatcaacggtcagaaactgagctatggagaaatccacgttaaacaatctcttgtaactcaatactttgtcgcttgtcaataatatcttgggacgtattgggtcggatgtgaaaaatagatatggtggagaataagcctcgaggcttaaatccgttggatactcgacgttggtaaagttgtaataaacgtgaggattacttccaccaactaaaacccgaccgtctggtaataaaatcgctgaggaatggtacatcctaggacgtgatggtgtggacataacggtgaagagatgatcaaacggttgatatatcacaggttggataatcgggtcacgtgctttctcccaaccggccgtgccagctccggctccgtttacgatgatgacgtcacctgttggtaagagtagcatgtctcccataacacgtggcaatggcatggtttccatttcccaacttggactctgatcggatagttttagcctcccgcatgtggaggtggcacgtgtgaatccacgtgagaagccgcctttaggagagcctccacataccattatctcaacttctacgttagcatcgttggtatcatctaatggaaatagtatagaagaaccactgcttggatagttccttggatcaccacctggaatctctggaaactctttcacgattcggttctttttgtaatcgaacacaatggatcttgtgttagcgaagacaaataagtttccatcaggtaaaagatgtatgaacggatataagttgttctcgttacttccatctgaagtttctctaagaaactcaagtcttgagcttctagaccgagaatcatgtcggggaaaaagttcatagttgaactgtcttcttcctccgaccacaatgatccgtccatcgggtaatatttggttggtggcataccatctacgttgggatagatactgaggaaactcaatccaatcacatgtatcactataaccacaagggctaaacattcgagcagcacgctcaccatcgttgtatccaccggtttgaaccaatgttccgttgggaagaaccgcaccagaagaacaccatgtatctgtttggacattcaaaggacggtatgtgttggagacaacatcgtagagaactgagtgtgcgctgcaatcgaacttttctgcggtgtcagtagggtcgtaacgacatatgcctccgggtagagaaacatttgaggtaccgaaatcggtacggtcgaacattataaccatgccgttgtggaggagttgcatgtgcatggcggatataccgatgctcggtagcaacatttcccaccgatcgagttgcaatagaaaagggttagcttgaccttcggataatatggccatggagaggcataagatggttgtagcgacgatgaatgtatttttggagttgatcatagtggttggtggtttcttcctttgttcttggtttgatggtgaattttaagttagaggttggtttatctattttcttgttgaagagtagtatggttggagtaatacgtccaattatatattctttcacataaaattgttatttttattagattgacgattcttgttttatatatttaatttggaattttggacaagcaaactctttgactctactacattcatgccggagttttagacagtctttaagaaaacgtagtagaattgcatcaaactatagatagttttaatcaaattaaaggatgtaatattttctttctaaattctggtatcatcactctttgaaattgtcgtaatatttggaaataaataagtaaggaacacatataataaataagtatgaaatgaatagagaaaacaatgtacacctgcatgatgatttctataattccgcaagttgcaaagagaatgcccaaaaaaaaaaacttaagaaattatcagacaaatatttccttattcttatatgtttataaatcaaaatgacaaaaatatcactcacttacaaaaatatcaccttaagaatgtctccatagaccggctgatcaaaatctaaaaaacaaaaaagctggaactttgggagtaaattgctcagcctcaagaatgtctccatatatacatactcggcagaatgtctccgtaaattttgaattacagcattcaattatggcatgttaacaaaacgctgactttttaaattcagtttagttcttgctttgtgttaagaccggttttagtctcggtttaaccaaattaatttcattacatatttcatgtaaaggtcaaaatggtcattttagttcacctgagctcagtttgaaaaaaggtcttcctcaggtttccccatactcaagtgccggcgaaccctaagacttttgatacctcttctcttctctctcttcgaagatg

SEQ ID NO: 28081 - DNA, 3003 bp, Unknown; identical to SEQ ID NO: 28080
  misc_feature (1)..( 3003): 2750-1469P.txt file - cDNA_ID_2993825; gDNA_ID_1620629; Annot_ID_162622

SEQ ID NO: 28082 - DNA, 3003 bp, Unknown
  misc_feature (1)..( 3003): 2750-1469P.txt file - cDNA_ID_2993832; gDNA_ID_1620715; Annot_ID_49101
gaaacactgacagggaaagaacatcttctcttttatggaagacttaagaatctcaaaggccatgatctcaaccaagtatgttatcattatcaatcttacttctatcttatattagtgcaagagtcttaaacgtcaattcatggttaaatattaggccgtagaagaatcactaaagagtgtgaacctatttcatggaggagttgctgatatacctgccgggaaatatagcggaggaatgaaaaggcggcttagcgtagccatttcacttatcgggagtcctaaggtacaaaattgtatcttactcatctcctaacaaaaaacttattgaagcccttatttgaatgtgatttagagagctaaagtttttcaagctttaacaattatttttggtttttatattaaataaaaggttgtttatatggatgagccaagcacaggacttgatcctgcttcaagaataaacctatggacagtcatcaaacgcgcaaaaaaacacgcagcgataatcctaacgactcattcaatggaagaagcagagtttctctgtgaccgattgggaatttttgttgatggaaggttacaatgcatagggaacccaaaagagctgaagggcaggtatggtggatcctatgtgttaacgattacaacatcaccagaacatgaaaaagatgtggagacattggttcaagaagtttcctcaaatgcaagaaagatatatcacatcgcagggactcagaagtttgagttcccaaaggaggaggttcgaatttcagaagtctttcaggccgtggagaatgcgaaacgcaatttcactgtatttgcttggggatttgcggacacaactcttgaagatgttttcatcaaggttgctaaaaccggcctttaactaatgtcttcttttgaatacttttaagattattagttatgtctgttccacgtcaatattttgcttgttcatgtttgataaattgataatgcagaggtttgattcatgtacattgttggctcttcgcctgcaagtttgcgaattagtctgaggtcttgtattagtttgtttgtggatgatgcatgtaaccacaatttttttatttaaacgtggctatatttaattgtggataaaccactgaatatgaaattttatttcatctaccattcagatcctaaatgtatatcttaccatttaattcatatagggtttacgatttaaaatttagaatttcgaaaatagtatctatattaaaagatagtaattaggtctttttttcattgaattttacttaaacattggtaaaatttcatatgccatcgaaaaaagaaaatatcactgaaaactatgttagctgccggagacaacatttctaaaaagaaagacaatttttaaaaaagactacaaaatactctgttgttcctttttgtttgattgtttagaaaaaaaatttgtttttaagaaattaattttttaagttttccatgcaatatttattggttaatattggtgaattgtaattttcaagaaaaatagttagttatcattggtttagagttataaaaaattgtaaaacactaaaaataatacatttataatcaaaatttaatatgttttcttaatatatgtgtttttctaaacaatataaaaaaaggaacagagggagtataaatcaaaactgttaaaccaaattttttaccaattaaatcttaattatatcaattggttcttctccgaaataagaaattgtcttgatgtctatgaaaatcacaaatttcactaaaaatttatggaggattcctaattaactttagaccaggaatttttcaaaaaataaatttaaagatgacattatcatgaacacattcaaactgaaatcaaaccaaagtaaatttattttccctgtaatggaccatagagtataaagtatttaaaactgctacttattaaatcaaagacttttgtgttttttattgtgtgcaaagactttttatgtttgaaaactgaaataagactgctagtaaaaatataaactgaaataagaatttttcttaggacatcataacatttttgcttcttgtccaagtaactgccacattggaaaaaaatgtttagatttgaacaaatctttttaaaatggtcaaaaaattatcatagtcaaccaaattacccgacacttttacgtgagacattaaaatagactagtttaatcgattatgttcacacgtgattacgtctgagatgacgtatgaatcatctttatacaaatacaaatatacagtaaacaaataattgaaactcacctcttccactagtcgaagaatctattggtcgtggcatcactctccttcgcagcttcctaccaaatttacattgaaaatattctccattgtcactttctcgatttcgtaaaattacctttttgttatttgaccaaaagaataaccccaaaaaaacaatactaatatattcgagaaaaataactaattaaaggtatacttaacgagaaattaaagcgtgtgcacaagggtattactgtaatttcacattccgtatctgatctctgttcttctttcctccgcctgctataaaccaaaaggcggtgactcgatttgttccttctaagttcaaaaattgggtttccattaggattcaatttttactaaccctaaaaaacagaatctaatacacagagaaaagcgaaggttgttaccttcatcaatggcggatcctggtcctgccagtttctcaacgagagccaatgccttgcttaggaaaaacttaacctatcaggtactttttccgttttcttttcctctacgcaatccaattatacacatacaaattttcgtttaatgtgagtaagattctgttctgggattttcgtttaatagatcagtttccacaacaaaattagtggctgatttattgagtagattctgttctaattatgtctttgtgtaaattgtgtgttggtgtagaaacggaatctatggagcaatatacggctaatcatg

SEQ ID NO: 28083 - DNA, 3003 bp, Unknown
  misc_feature (1)..( 3003): 2750-1469P.txt file - cDNA_ID_2993836; gDNA_ID_1620715; Annot_ID_49103
atattacattgatcaaatcatttactccaggaaacatccattgttcttcctcctacaaagcacttccaagaagaaacaacacttctctgacaacaaaatatccaaagttgttgtagagatggaaaagccagatgtgtgtcgagaggtaatgaaaaatacaatatgaagataagtttcattattgacaaggctaagtaagatttgcatgcatcttttttggtgtcagagggagaaagtagagcagtgtctacttaaatcaactagagactctgcggttttatgcaataatctcaagaaggtgtactcgggtaaggacggtaatcctcagaagctcgcggttagaggattatctcttgctttacctcaaggagaatgctttggcatgcttggtcctaatggagcaggcaaaacctctttcatcaacatggtccgtataaacaatatcatacctattgatcttttgtctaatgagtcaatcctcaatcttctagtcaacctctttgacattctaatgttctgtgtagatgacaggaatcatcaaaccatcgtctggcacagcatttgtccaaggtcttgacatactaaccgatatggaccggatatatacaacaattggagtctgtccacaacatgagtaatctataaatataacaatctctgtttctttctttactttaaggctgccttgtttcttagtccattactccatttcattgaaatttctgcagtcttctgtgggagaagttgagtggaagggaacatctactgttctatggaaggctcaagaatctcaaaggttctgtcttaacacaagtaagtgtttgttttaacttttaacgtggtcggtttgtgaatggcttatgcaaaaactgatgagtttttaggctgtcgaagagtcgcttcgcagtgtcaaccttttccatggagggattggtgacaaacaagtcagtaaatacagtggagggatgaagagacggctcagcgtcgctatttctcttataggaagccccaaagtaacttgaaacatctcttggtatctatgttctatgatatgtaataagcctaatttgaggaaatttgtcaaggttgtttacatggatgagccaagtaccgggctagatccagcctcgaggaagagcttatgggatgtagtgaaacgggctaagcgaaaaggggcgataatactcaccagtagagtcttctaagcatcttatctcctttttgttctgccttataatgttttcatacacaagaaaacttcagctttggtcttatgcttcagcacattcaatggaagaagctgaaattttgtgtgaccgtataggaattttcgtcgatggtagtttgcaatgcattggcaatccaaaggaggtaaaactacaatacaccttatactcaatcgttagaaacagagtataacagtatgaacttgagccaatattaactgaaacattaatgacagttgaagagtcgatatggaggatcctatgtattgactgtgacaacctcggaggaacatgagaaagaagtagagcaattagtgcataacatctctacgaatgcaaagaagatatatcgaaccgcggggactcagaagtttgagctgccaaagcaagaggtgaagattggtgaggtgtttaaggctttggagaaggcgaagacaatgtttccagtagttgcttggggacttgcagacacaactcttgaagatgtctttataaaggttgctcaaacttcttaactaacaactcttttgaatgattccttcagatcaatctcaatcttttctatatcttatgtcaagctcaaaatcacaaactatatttcatataactctctctagccacttatgctcttaagaaaatcatttatttccgtaaatagttaatacgagctttcgagtctaaaaagggaaacaatggatagacttcatttagacgtaattttattccacaaataataaagagtctcttaatcttatccctttattctcgctttctttactctgcttttgctcctatcctattcctatgctttgtctattcttactttttcgaccaaactaaaaaaattactgtgtcaaatcttctttctaaaggataatgagacaaaattactttttcgaaatcttcttttaaaaggataatgagacaaattacttgttggaagagtgactaaaataggatttgcaggagctaagttctaaaagtgaatagtagaaatcaaatgtacaaaacaaaacgtacaccaaagaattaggggcataactctccaatgttatatcatggttaaaattttcaacgagtggtttccaatataaactaatttactggtctaattctacaatttagattattccttttttggtcaaacctacaatttaatgtactatagtcttttcaagcaagagaatttagctcgaatcaaattcaagaaactcacccaccagaagagagaaaaatcaaagtagtctactttttgcaagttggtccgtgggtgggtgcatttaagaacgagggacattgttcgtgaccacgagagcacgcacgcataccaaaactcaatgaaatgacaaaagacatataaacaagagagaaaaatgtatacacacaaatagaataacaactattcgtgaaagatagaatagaaaaattcaaaatatacaccttaaatttcatgtttctacccacaaaaaaaaagaatgtagaacattcaaaaacttatttttttgtatatttctgttaaaaaacaactgtaatatgaaaagtcctaaaataaaaggtcaagactaaaaatatcttataaaaatctaaaattacaaaacaaggaaaatttgtttatcaaagtttgggataatagtcttatctctttcatccacactaatataaataggatacatacacaacacattacaagaagataaatccaaacttttctttctctctctttcgtttcccattttttctcttattactcatagatcctgattgatctgaaaaaatg

SEQ ID NO: 28084 - DNA, 3000 bp, Unknown
  misc_feature (1)..( 3000): 2750-1469P.txt file - cDNA_ID_2993844; gDNA_ID_1620715; Annot_ID_49109
aaacaaactcaaaaacaagaatctcccctgaagatactcaaacaacgttttttttaatcaatcttataatctgtattttacttagtcttctttactagagaaatatccggcttatataccagactacttctccttcttcccttctctcatttcccaaaaaccattaacacacagacacactaacgcacacatctctcattttcaaaatcctcattttcatttctcaattctccagagtctcttgttctgttcccatcgaatgagcaatacaaaacacatccacaaagggttacaggagaggcttttagatcttctcttgatcgctcttatagtttacatgactcttaaaggcggcacgagtggggcttgtgccgcgtgcaagtaccaacgtagacgctgcgccgcggactgccccctcgcgccttacttcccagccgaacaaccgaaacttttccaaaacgttcacaggctattcggcgtaagaagtatcgtcaagatcctcgaaaaactagacgaaactcagaaaccagaagcaatgaaatcaatcatcttccagtcttatgtccgtgaccgttctcctgtccacggttgcctcggcgtcacgcaacaacttcaatacatgatctggtttgctgaagaagaactcaaagctgtcaattctcaattacaactatatcgctctcaaccacaaaacggtcaaaatcaaaaccaaaaccataatcataatcagatgattcatgagcttggtagtgatcataataagcagcaagaagatgttacatcgcagcagcttgacttgggtatgggacttaacgttaacaataatcagagcaatgtcgttacaccattctttagttcattattaccagtttccgaaacacaacagccacaaatgtcttacacttatagctgcagtgaggttaacaacaatggctatagtcctcctgcttataatacagattcgggcaaggagattctgaccaacaataacaatgtttggggtgatcagaatcgatttctgtataacaacaacaatggaggaggatacagcaaccaaaacgagagctgtcatgagatgaagagtaacggtgtaatggcaatacaatcacagctcgtaaatctgcaaatggtatcaaatcatcagcgagtggaagaagaagaagctgatcatgaatacgatgaactccatcagtttcttgatatcattgacgataggcaatcatttggggattctaaagaagcgtaggcctcaaggtaggggttttttcctttgtaaaactatgaaatatgtattttcttcttcttctgtagatatggtgattgaattggagtatattggtggttgtagctctggtggatcgttgaaggaacagattgatgaaattggagagaatgaattgagaagtgcagctacttgtttcagtctaaccagtgtgaataattgaattgatttctcaattcgtgatccctaattatgctctcgaaattttgttatacttttgttgacattttattattatcttttagtcagagacttaaaggttatgaattcagagtttctctaattttaataatatatctttttggagtctctaatgaacttgaatattagtgcaacgtaactctatttgctttatttttcttgggtttttaacttgttattcaagggacgcttctctgctaaaatctaacatggctgagtgaagaagagagacacaagacaaatgttaatgatgcattagctcccgaggatactcacattactcaggtaattatactagacttccacttatttatgaaactcaaaaatgtaatgttgatcttgtgttgaaccttgaggaaataatcaagaaactgtgtgtgttagtaggttagatgttggatcccgaactaatacctaaagtatcatgctccctagaagctgaagccatgttcataggactacactaagttttggaaatataggctacaagcatgtgattgtattcctcgaatctgattccaaagagatggttagagcagccctacgaatggcttcagccttcagcttaaaattgtgtcacattcagttggttgtacaagaactctagtaatcatggcagaatattctcgagtgtaatggttcaagaataattgatatatccatacgtgcgttagaaaaaaaaaacatgttcgatagtatatcagaatattttaactaatgattttgaaaatatcttcaaattatctgttatttttttttttatcaatagatattgtttaggactcaaacgagataatgtagagggaagttgtttacattatttagaattttttgtgccaaattatccgctttgacatttacattacgagaaattaaagataaagaaaaagaagtgaactcttccttatcgctctgaaactcctccaaatacgctgaaaatgctggccatttggttgggaaagacaccatcttcattaggtctgaacagtctgtgaaaaacctacttcttggttgtcggcaccaatcatacacttcattgtccagaataaagcgtcgacttcaaattatctgttaatgaaaacatttacactatttctttgaattttgcatttaaattattttgttaaaaaatcaaaagtcaaaaacttaaatcttttagatgataattcttgatattaaaataaaatgtcagaacaaaatttatgaaattcactcaaaattcatagaaaaaaaaaacactgaaactattcaatatattttatttgttttgagataggtgtcaaatgttttattcgaataacacgtctagttaacgtgaaaggtgaagccatgcactaatcacatcgttaatatcccctaatactatcctaatactatacactagaatttttcaaaacgacagtgtttttctgtgacaaggtaaagagaaagaaatatctcccaacctgtcaacacttaaaaaaagacataaaagtctgtggcgaccaaaagaagtgagagagaaagagagagatatg

SEQ ID NO: 28085 - DNA, 3000 bp, Unknown; identical to SEQ ID NO: 28084
  misc_feature (1)..( 3000): 2750-1469P.txt file - cDNA_ID_2993844; gDNA_ID_1620715; Annot_ID_165629

SEQ ID NO: 28086 - DNA, 3000 bp, Unknown; identical to SEQ ID NO: 7257
  misc_feature (1)..( 3000): 2750-1469P.txt file - cDNA_ID_2993855; gDNA_ID_1621135; Annot_ID_56546

SEQ ID NO: 28087 - DNA, 3000 bp, Unknown
  misc_feature (1)..( 3000): 2750-1469P.txt file - cDNA_ID_2993859; gDNA_ID_1621140; Annot_ID_56621
aaaaaaaaagatagcaaaacatgagcaatatataagcaaaacataatcatttttttcattatatacataatatagacttgaatttgagacattaaaccacataatgttaattagttttaggaaaatgaatcaactaaaagaagtttacatgttcttcaagcttttccattgccattcccctctttacgttgatttcccctctttatgttgattcatctataaacgcatccttccctcttcacttctttacataatctcatttctatagtaaaataaaactgtttgcaagaaaaaataaagaaaaatgtcaacaataggtgggatgataaaatgatagataagtactttgccgctgctagaaatacgacgagaacatgatcaagcgaatagctgaggatctaaaagtagtggagagcgaggtccaaagagaagcaaataaaatcaacaattttggatattactaaaattgcattgaaaatgtaaaacgccatcctttttgaaagaaaaagactccaaaacgatattttttatgaaacggatgaatttgaatgtgtttctgttttttttttctttataacaaattgtatgattctcgagatgagtgaaaaagcaaattttttatttgggggatcatactctttcatagacatgagatatcaaactttggaaataagaagcaactctttcatagagaaaaattcgtgaaacgaaagattttgtttggggatcatactccattagaccctcggaataacgatgcgaaatgaggatcttgttggtcttgcatatcacactggccgaaccacacccaaaagctattaccttggttttgccgttatgttctcctgtgagccaatagagcgtcccgttcacggaaaatatctagcacgtctttttagataaccattttaatgattaacatgtcaccacaaattttcttgttttacatggatagaattaagattaacttatctcaattaatacaaccaatcatcttgagaaaaaaaggaaactcaaacacaactatatatggttgagccatccacacctgtggcggtttgcaagaattagaagatcctgctctcacatcgccgtttccgcggtctcgtaaaatatgatcacctaacaaagtctctcgaaatcttttacagacatccgtgtgcttacagaaagttacttattttcaaagtttgatatcttatctataaaaaaccctactactactactactccttttgaagactttttatttgcttgcatccatacttggaaaatgactagatctccacaataagaggtctcttagcactgtcgtacagacaaatttggttctcaagttcgatctttgaacactttttcatcttgtggctttttggttttgatagatttcatactctctatcggcttcgttcctaggatatgactgaagatgacacatgcataatccaagttagtagaatttattattttatttataaatttgaagttagtagatttggtttatggtggtttgactgggttgcgctacctgtaaaatagtagtctatttagtgttgtttatgtggatgggacgtgacatcgatggttgtcattccgtccaagtagcttatgtggagtggagtgtcatgtatgtctggagtctggagatgtgcttttgcatggtcgacgcgtctctcaatgctcgttggtgtttggtttgtcccgtagagaattctatgcacgtttgagatgctttgctagcgaatgtacgttgtgtccaggagttggactcgtaagacccatatgaagattaaatgactaatacatgtctctttgaagcctctataaagacaatccggtgttgatatatcttgttggatagaccttgttgggagtagtttcgttgatgtggtgtccacttgttatatgttagttggctttctttggctacccgaaaaaacatctctatttgattttactttaaatctttttccatttgttcgtatagggaatgttttatcgaattaaaatattttttagcagtaataataaaatttaaaaatattggataatttaaaaatttaactgaatatataggtactacaacatgctttttttttttacttagattagttttttgtgcatttgagtttggtaacctaagtttgtttgtttcaccgatgatacctctttgttatttcgaaaaacagtttagtattgacaaagtatttgttattgaccaagaaaattttatatgagtcctaaagtcaggaacttgttaacaaaagataaccaaactttatacttaatttcgttataaaattattaaaagatcaaagtaggcttttatacaaactaaatttagtttcgattcaaataattttgaacttaagttatattttttgtgcgcatgtcttcttttagaccatagaataatattgggtttattcttgaattacggaaaacatgttttattagtgaggcaaagtacacgcgttcttccactttgggtttttgttttgtctatattcactttaggtatttattccaaaagctgttacaatttgaatgaaagcgactattaaacctatattcattcactttgaaataattaaaaagttcatattcattcacatacaaaaagccatctcaactcaaagtttataattaattagcttattaaacaaggaaaaaaacatattaattttgtcattaagaagaagacgaatttttcttcaaacatgattaatatataaataaaaagctagcaaccggaaacaaagaatcaaaaaggcaaaaagcaaagagagagagagagagaagaagaagtgagacttgtgttcttacggtgtttatagcttctttgttttgtcttttaggttcttgcctttttccgatcaatcagaccaatccctccttcacttttagcatcttattctctttcgttcttcttatatttctgggaattttcttcaatcgattcctctttgttgtaatctcacaattagagagagagatatg

SEQ ID NO: 28088 - DNA, 3000 bp, Unknown
  misc_feature (1)..( 3000): 2750-1469P.txt file - cDNA_ID_2993859; gDNA_ID_1621140; Annot_ID_172802
ctttttgaaagaaaaagactccaaaacgatattttttatgaaacggatgaatttgaatgtgtttctgttttttttttctttataacaaattgtatgattctcgagatgagtgaaaaagcaaattttttatttgggggatcatactctttcatagacatgagatatcaaactttggaaataagaagcaactctttcatagagaaaaattcgtgaaacgaaagattttgtttggggatcatactccattagaccctcggaataacgatgcgaaatgaggatcttgttggtcttgcatatcacactggccgaaccacacccaaaagctattaccttggttttgccgttatgttctcctgtgagccaatagagcgtcccgttcacggaaaatatctagcacgtctttttagataaccattttaatgattaacatgtcaccacaaattttcttgttttacatggatagaattaagattaacttatctcaattaatacaaccaatcatcttgagaaaaaaaggaaactcaaacacaactatatatggttgagccatccacacctgtggcggtttgcaagaattagaagatcctgctctcacatcgccgtttccgcggtctcgtaaaatatgatcacctaacaaagtctctcgaaatcttttacagacatccgtgtgcttacagaaagttacttattttcaaagtttgatatcttatctataaaaaaccctactactactactactccttttgaagactttttatttgcttgcatccatacttggaaaatgactagatctccacaataagaggtctcttagcactgtcgtacagacaaatttggttctcaagttcgatctttgaacactttttcatcttgtggctttttggttttgatagatttcatactctctatcggcttcgttcctaggatatgactgaagatgacacatgcataatccaagttagtagaatttattattttatttataaatttgaagttagtagatttggtttatggtggtttgactgggttgcgctacctgtaaaatagtagtctatttagtgttgtttatgtggatgggacgtgacatcgatggttgtcattccgtccaagtagcttatgtggagtggagtgtcatgtatgtctggagtctggagatgtgcttttgcatggtcgacgcgtctctcaatgctcgttggtgtttggtttgtcccgtagagaattctatgcacgtttgagatgctttgctagcgaatgtacgttgtgtccaggagttggactcgtaagacccatatgaagattaaatgactaatacatgtctctttgaagcctctataaagacaatccggtgttgatatatcttgttggatagaccttgttgggagtagtttcgttgatgtggtgtccacttgttatatgttagttggctttctttggctacccgaaaaaacatctctatttgattttactttaaatctttttccatttgttcgtatagggaatgttttatcgaattaaaatattttttagcagtaataataaaatttaaaaatattggataatttaaaaatttaactgaatatataggtactacaacatgctttttttttttacttagattagttttttgtgcatttgagtttggtaacctaagtttgtttgtttcaccgatgatacctctttgttatttcgaaaaacagtttagtattgacaaagtatttgttattgaccaagaaaattttatatgagtcctaaagtcaggaacttgttaacaaaagataaccaaactttatacttaatttcgttataaaattattaaaagatcaaagtaggcttttatacaaactaaatttagtttcgattcaaataattttgaacttaagttatattttttgtgcgcatgtcttcttttagaccatagaataatattgggtttattcttgaattacggaaaacatgttttattagtgaggcaaagtacacgcgttcttccactttgggtttttgttttgtctatattcactttaggtatttattccaaaagctgttacaatttgaatgaaagcgactattaaacctatattcattcactttgaaataattaaaaagttcatattcattcacatacaaaaagccatctcaactcaaagtttataattaattagcttattaaacaaggaaaaaaacatattaattttgtcattaagaagaagacgaatttttcttcaaacatgattaatatataaataaaaagctagcaaccggaaacaaagaatcaaaaaggcaaaaagcaaagagagagagagagagaagaagaagtgagacttgtgttcttacggtgtttatagcttctttgttttgtcttttaggttcttgcctttttccgatcaatcagaccaatccctccttcacttttagcatcttattctctttcgttcttcttatatttctgggaattttcttcaatcgattcctctttgttgtaatctcacaattagagagagagatatgtataatcagttggcgatatcttcgtcttcttcatcttcttcgtactatgaatctttgaaggttttggaagctgatgttcaacacgctaattctttgtaagtcctttttctgggtttcttctaaagtttaagactttagtttaaaattgtttgattagttgagctataagagtatagttagtgaaaaaattgaaaacccagatgataattttaggtcattctcttctctgtgtgtaatctcttctcatcaaaattgggttattttaggaaactccgataaatttttagtttagttttagaaagctttcacaaatagaacattctggaaagttgttgttggttttgatattctaatttaagcaaatttagtagcttttttgtttttgttttggctcaaggtccctaaactttgttattgcacatgttgtgttcgatgaattgtgtatgagaactttgaggtttatatcttttcagggcagaagcaattccaatg

SEQ ID NO: 28089 - DNA, 3003 bp, Unknown
  misc_feature (1)..( 3003): 2750-1469P.txt file - cDNA_ID_2993863; gDNA_ID_1620654; Annot_ID_47808
aaacatcttaatggttttcacctttgaatatccaatttaactaccagcaagcactacttacatacatctatctacatctttcattcttttatattgtcaaaatttgtcaccaccaaaaacattgatttatattcaaaatttggaaagtaactcaaagtagttgagttttgtgggtaccttcagaatgtccatttgattatcaatcaaaaagaagtttttagctggcgcatgaaaccgtcgttggaaactttgaaacggatgcttcactgtataaacgtactattattatttaatttttaataacgaaaagtaaattgtagatgaattctttttatttgattcatttttagttagtgctagccattatttctatctttaactatattcaaaattgttttttcatactataaactattattagaccattttcttgaatgaaccatactttctagacactatttctaaaatgactataaatcacaccatgtagttctatatttgtattattgtagtttattgatttaacattgaaaatttaataaattatacaattaaaaaattaataggttttaatacgtgtaaaattataaaacaaaatttataatgaaacagagagaatagtaaaaacatttatgagaaaaatatgtattggtgtcactaaagttattttagacatattttcattcaagaaatcagttgaataatagtcttactgtgacaaacaatttaatagataaaacattgagtagtattaactaataaatgaatcaaacaaacaaagtctaattgataaaatacgccatataaataaactataagtttctttaaaatatacattaaatatacaaaacgacaaatttatgaaacaaaaaagtgaagtcataagattaaaactattgtgaaatggatgacaaattcagtttcttctttattctttaaaccctaagtttaaattctttcaaacacaaatcgtagtatttgtaaaactgttattttcttgaaatataatttaacgttacattaacaaatcaaatggatgacatattacttaaaatttagattaccaataaaaaatcataaattcttcttttaaattgtaagatttaagtcttcccctttacatttagcaataaatagtttgctgcactggtttaaatgcactaatgcattgtttactgaattgtcttttgtttcatatatttgtctctactatacttttactaactttcccacctccaattaaaaaaattattacgaaataaacaaagtcatatctctctccacaacataattactttattcaacaaatattaattcctagtcatattttagctcctcttcttccttatatattacatacatacattttctttagaagtcattaccatcaacccatcccctagaaaaacacagagaaaaacaaatacaagaatacaaaaaccctctcgacgaaaccgaagtatcgaaatgagaaacaagaatggtaaaagaggtagcgttgagccctcggcgaggaccgtggcgtcggtggttgctaatgggaggtttgaaggaagatcaccatcgagcgacacatcatcatcacaaaactcgtgcctgacgaggacggaggaagtgaaggaggaggttgcatcgtcgtgggttgatgaagaagaggcgccggagatggtggtgatgggatgtcgaagttgtatgatgtatgttatggtcttacaagaacgtcaacgttgccccaagtgcaaatgcaccgacttgatcttcttttagagaatttgttttaagttattattcaatttggacttttgagtttgagatgatgaatttaattttctttgtaaagtcctctatataaatcatattgtttaaattataatctctattttaatatgttaaattgacagacagatcatttctgtttgtggccgtccctcttggttcattttgttaagttgtccattttcatgttttagtactatggaagccaatgacatgaacgaggatggattttcatcggagttgaattcgattgtttcaaacgctagttatggcgtttgcgtttatatttatttatttgtatactccagagaaacatagtttttcaatgtaaatgaaaaacgccaaaaaaaatagaaagtttatttttaaaaattacaaaatataaatttaaacacaagtaaaaaaatcgacacgtctcgaattagggtcttaagaatcaaattggtagtatgctaataatggtattgctttggtttcatcggcattcaatccgatgaaattttcaataattaaggttaaaagttgtatcttcatcaattaaaacgttatttattcaaaacaattcaccatcaaattcaataaaatttaagaacttttacaaacttcaaatattaaattatttaagaaaatatttttaaacctaaatttagtgaaaaagtagcaactaaaatttgttttaatgtattttatgacatttttctatttataagtactaaattttcaaaaatctaataaataattaatttctgtttttcatatatattaaggcacatgcgacgacatatatacgtgacaacattttatcctaaagttttaacatgatttttgaaaaagaaatttacattttacgataatttagttgcaaatcaagcgagttttaatatttcaataattttcatgtatatagaaattttgcattgctagttaaaataataacaaatagatgttgtcaaaactcgaaaataaaaggggtgtttctgtagttatcataatttaaggaattatatgatagaaaaacaaatttgggcggtaaatttgaaaaaaataactttttccagtctccccaaaagtacccgatttgccaaatttgaccctcccattttagctttctgtctattcaccagattctctctattcgattctccctttacttcttctcgtctctcttctctgctcgtcagatctcaaaatcaatcggatatcgaaaccacaacttcatcaattatg

SEQ ID NO: 28090 - DNA, 3000 bp, Unknown; identical to SEQ ID NO: 4364
  misc_feature (1)..( 3000): 2750-1469P.txt file - cDNA_ID_2993867; gDNA_ID_1620702; Annot_ID_48796

SEQ ID NO: 28091 - DNA, 3000 bp, Unknown; identical to SEQ ID NO: 4364
  misc_feature (1)..( 3000): 2750-1469P.txt file - cDNA_ID_2993867; gDNA_ID_2926189; Annot_ID_140949

SEQ ID NO: 28092 - DNA, 3003 bp, Unknown
  misc_feature (1)..( 3003): 2750-1469P.txt file - cDNA_ID_2993875; gDNA_ID_1620724; Annot_ID_49252
tgaccaggagatctgtcaagagcatgcactttttctgtctagtttaattggaatttggagttgtgtcagtgtcttggcgcttttaacactgggaagtgaagtgttgcatccttataatgccatccttctttgttacttggataactggatttcgcttagatccttctatgtatgaagaggttcagcttttgttgctaacaactcgataacagatcattttatctgttgatgccagtaccgtctgtacgtcttttctcggttcctcagcacttcttctttgtttttttgtgcaggcttattgctccaccagttcaaaatatatctgtacaggctagagtcaacgcaaaggtaacttactcatgattatctgttaggttgcattagactagcttcttagtatctctcccttggacgagtattcgttttgatatgtttatgggggaccataagatgtgcattttagccttctgctgttctgcatccgtagctatatctgcctgttgatggtagggagtatctgaaaggtttatgaattgaatgtggttgtaaatctttatgggtttgtaaatcccagaccatggaatgtgataggggcttgatctggtaaatgcttggtgtgataactgaatcgaatatcactatatccaataactttatactgaatgtttggagggctaataacaattgatcttcttaatctgcagaggcatgaggtagatcagaaagtagaacacagaggagggaagaggaagacactggactctcgctttgcaagcatgaaagagcagagaatgacgattaacaactatggtgttacagtgcaagttccaagattaccaccatgggttagagccagaagattttcccaatgagaaaccacaaagcttttacgggttgttccagtttagaatttggcttttgggtttagaatcttgttaagcaaacactaagcaatgcaattcttttgtaaacatattgacttttagtatcatgaaagaattttttttgagtcttggttcattatatagtcgcatttccacatttctgtcaattacatgtttgcctctaagtgagtacgcgtcgtcaagaagaaagcctatcagccaagtatgtcttaactcttaaggaatgcttcctgtataatctagacaaatagagttgtaacatttaaatcttcaaaattgggggtgtagctcatatggtagagcgctcgcttcgcatgcgagaggcacggggttcgattccccgcacctccaattttgttttttgttatttctgtatcttccgttccttgtatatgtggcctcagttaattcaggcgaaagaaactcgcaactttctctgtttcctccattccactttttcgaagatgtaactaatttacttaaggaaaacaataaattatgatctttagtaaatatggcctattccaaaaactgaaccaaacaaaatatttatgtttgattttgagttaattacacattaaatttttaatcacacacccagaagcagctaaaagacttcgacctaactccatcatataattatcttttgaatttatcttgaagaccatatataattatggcccaaagactccaaactgactctttgtttttagtgtgacctaatcaatatcactttcatatgttgtccaaaaaaactatacgacatacaactcgttctcatattttacagtgtacacttaacactttggtcacacgtattacgtaccgacatatttatatgcatagcttgagtatggagactgcgtcaaaaacaataaattaactatatttaaagaaacttggcaatcatctagtataaaaatagtcgattttttttctcttgtcaatccacgttaattaatctatgctttattatcaagtgaattaaagaatttgacgtaaaactggtgtattcaatggattaacattgaagcttattcacaaagtggtcggctattgatttactccttagacttgctctaattttctttcttaagctttttaattttggtacgtcacttagtttgacaagcggagctgtttaagtgaaccacaatatattaattctctaaacgggttattgtacaatatattaaatcaaaggaagttacgatgaccaaattaactttcataagaaaggaaaacaaatattaatttggagtttcaagcaatattacatctatatacctttctattggtttcttataatgttcacgagaaatgtaggaaaactataaagtataaactgaaaacagagaaaaagttgataaaagaagaaaataaatatcacacatttcttggctcatcactcaagtcacggaaagtctttggagaagtgtagctaccatttttgttcattttattttggatagaaatttaacacacacttaatgatatggtttgaggaaatagcttatattaacttacctttccatgtatctatttatattttgcttaataataatgtaaacgcaataacatatattaaaacaaaggaaataaaatcttaatatatacctaaagttacacacaatcttagaatgctagcatactcaaatctcgtgaccccgaattttctggaaaaatcaattctacttcttctacctaaacagtttaggcttacaaatccatccaaatttatccattcgctttgttaaatcttaattgagcctaataaaataacatttgttaccaaaaaaagaagatcaactatataaatacacttccattaacaaaaacgtcaaagggtaattaagacaattcacaacattccggtatattcgcaaccaaaccaaatcctgccacgtagcaattatttcctcttcatttttctctctgtctccctcgaagaaacgtagaaatcagaaagtaaatcatacagtcaaaaccgcttcttctataaaaccctttttagctcaatcccaaaacgcaataaaaaacaaaacgctctccagaatttcgaaacttctaagatattttgttttctctcttaacgatg

SEQ ID NO: 28093 - DNA, 3003 bp, Unknown; identical to SEQ ID NO: 28092
  misc_feature (1)..( 3003): 2750-1469P.txt file - cDNA_ID_2993875; gDNA_ID_1620724; Annot_ID_165899

SEQ ID NO: 28094 - DNA, 3003 bp, Unknown; identical to SEQ ID NO: 28092
  misc_feature (1)..( 3003): 2750-1469P.txt file - cDNA_ID_2993875; gDNA_ID_2926184; Annot_ID_140703

SEQ ID NO: 28095 - DNA, 3003 bp, Unknown; identical to SEQ ID NO: 28092
  misc_feature (1)..( 3003): 2750-1469P.txt file - cDNA_ID_2993875; gDNA_ID_2926184; Annot_ID_200486

SEQ ID NO: 28096 - DNA, 3003 bp, Unknown
  misc_feature (1)..( 3003): 2750-1469P.txt file - cDNA_ID_2993889; gDNA_ID_2926197; Annot_ID_141349
gatataaccaaaccaagcgtttggagaacacaatcagaagaactctcattcatatactagttgttttcaaatgtttgtatatgattggatatatacacatgtaaagtttatcagagacaccataaaataaaataagtaactggtgctacaaatttcatctaattcgacaaatgtaaattacaaagctaaatgactcgtctaaggtaagtgataatgttagtgcaaacatttagtattatttttgaactgcaagatgattaagtatttttctaaatcatgactatggtagtactatttaataattaaatgaaactgtatattcgaaagtagaaagaagaggtgtggaattggacaagagaagagtataacagagaaaagtttggtgtaaaaaaggctgcaaaggagttggttaaaaagtgagtgaactcgataaacgcgtaaccctaaaggcaaagcgtgcgttactctttccccaattattttaccttttaaacttttttttttctttctcttagaaatgattacggcatttttaaaactagttatctcatttatatttataacgactacaatatctcatgacgatggtaaatcacatgaataaagtaaatatgattcgactacttggacgagttttgaagttgtccacaattagttttggataataattgtagtgagtgcatggttactgtactcacatttcttctaaattacaaatgtctcacaaaacctagaattttaaaccatgagagctcttcaacatactatagagattaatttgtactctaatccggaatcctctggatactaataaaattaatgaatacttgatcacctctttactttcgttgcttataaatttattcatgtagtttgtagtatgaaacatgaaagtatgtatagtcgatactccatagcattattggttctgaaaaattgaatctcacgtaaagtacagtattaagtttttcgtagacatattgcaatgatgagaggtaacaaatgaaataaggacaatttgtttggtgtagaagaagtaagagtcatgtagcacaaaaagattgtctattaaatggtctctgaatttattgggtcggctcgcacatcggcacatgtgatgaccttaccattcttgtctctgcatttaatattctttatccaaataatgatacaagtgaagttggtaacaaaatcgatcgtcaatgttttgtaatttctttccttgttccaaaaggatgtcaagttgtcgtgcagccattggctattttgatttgttataattcaagtttagcgtttatcttgcttcgatggaaagacatttaatcaaaattatgatctttgtatcaaggaaatgaattcgtaacacttatgttacgttcttttcaatttgtttccggttcttctaatagaaaagttaaaacgttattttcaaaatgattgtgacactttggattgtatttcagttccaaatctaaaagcaagactggcacatgatcgatgatacattaaacacacataagctataacagtttgaagtaattctcgtaccttcgagtcagaaagatcaaactcgtagaatttatatgttcaaccttttcatttacttcaaagtgaagttctatgttacaattgatttccaaaatgctaactacaaaataaaaataaaagagcttttggatcggcgtaaaagagacagcagagagataaaaaggcaaaatacgaaaaggtgaaaaagctttttgagtcgattccttttgcagggattgcgtgtgatttacagatatttcgtttttttaaaacaaaacaaaaaacccaacgaatacaaaaaaactcacacgttttcaatagcgcgtgacatacaccgatcaccacctaagctgatcacgagtcagaaaaggcactcaagcaattatcgtacacgcgccactttaaaacgcgtgaacacttttgtctcattactatgactagattcaaactttaatttcgtcatcaaaactttattagttgctacctttttctttttttccccacattcatctaaacttagtaatttaattttttgcttttttccaaacgttttaattagtagtagtaaacatcaatatcaaatttctaatcttttccatataaagtttgttctcaaccgtatagcagcaacttacaaaaaaacgttaataaatcttcttccaatcttgtgcatgaacttgttgtagtcttgatgattatttaaatagtaacactaatatctcttctaaaatacgaaagatgacactgaaaacagagcatcgtattcgccgttttaagacctatatcggtattcatttagtacctatttcgagttttaattctctgtcatcacaattcacaaataatttaatcttaataattgggtctcaatacttaagtagatgttaattggtctagaaatgaagaaattaagcaattttcaaaaccaagttaatgactttgaggctcaatgcatggttactattctctatagccgcagacacaaaaggacactatcgtaatctcctcaatgctccttataatatttggcgtcgaataaattcaaatagatacacatagaaagctataataatgagagagtttataagttcttgtgaaggcaaatgatccaatctttccttttcttctcctcaaattttctttcttttcccacgcgcttacacacacactgcaaaaaccacagaaacacagagaaagagaaagacaattcaaacaaaagcttcgattttttacctttctgtttgatcggctttttgtttttctgtaaaaagccatcttttgtgtttgatcctttctttttttttacctgattaaacaacttttctcctctgcattttttcgtgacccttttaaatatcttgtggccggtcctaaaagttctttatgcaaaggtttcttctttataagataaacaaaaggtgaagaaaccacaaccaaaaaaaaaaacttcttgttgagaaaagtttttttgagatg

SEQ ID NO: 28097 - DNA, 3003 bp, Unknown; identical to SEQ ID NO: 28096
  misc_feature (1)..( 3003): 2750-1469P.txt file - cDNA_ID_2993889; gDNA_ID_2926197; Annot_ID_201565

SEQ ID NO: 28098 - DNA, 3003 bp, Unknown
  misc_feature (1)..( 3003): 2750-1469P.txt file - cDNA_ID_2993893; gDNA_ID_1621125; Annot_ID_172243
ttccaataacgctaatgggaacaggcaaaatcatgccaacgggtagtgaaggtatactgaaccatgggaatgtgagagttatcatccataaaccaatacatggaagcaaagcggatgttctttgcaacgaggccagaagcaagattgcagaatcaatggatctctaagctgatctcagaagttgtcttttgctgcgtctctgatgaacattgagaagctttaatttttacatgtggaagaattaaatgttgagatcttttttagtcaaaaattgtgatgctccctttaatgacatttaaaagaaactatcagtttttggtttattataaaattttgtatatttcgttgtatctcgcgaattatcgtacgtatcacagtcttggccgcattgtcacgcctcccaggaaacagagtccttcccagtccgtacgtgatttccgacttgtaatcccagaagacgtctccttccaaattccaaatctcatgtgagttttattgtatctcttttgttgaactgtgtaatttcggtctgttgaatgtatcgagttgaatcagagattcctgtgttctcagtgaaactgaagcaatatatactgaaatagttgtgcttataattcttgttgattctcccatagatgacagtagatcatctggttatatttatgcagaattgaaggctcttattctagttggaggattcggaaccagattgaggccacttaccttgagcatgcctaaaccacttgttgattttggaaacaaacccatgattttgcatcaggtaggttagcttcttcttcttcttttgtatttgctcaagttttcacagtttcttttgttctcattatgatgcattcgcagattgaagctctaaaaggtgctggagtgactgaagttgtattagctatcaatcaccaacaaccagaggtacatacattcattgtccttaataacgatacgataacaattgaaattcttccgtgtcatcctccttctccttgtgtgtttggtattactcaggtcatgttgaactttgtgaaagaatatgagaagaagctagagattaagattacattttcccaagaaactgaaccgcttggaacagcagggcctctcgcgctggctcgggataagctggtcgatgaatcaggccaacccttttttgtactaaacagcgatgttatctgtgaatacccattgcttgagatgatcgagtttcacaagactaaccgtgctgaagcatcaatcatggtgaccgaggtagtcaaacaggagcattttctgcattttgtgaagtttatctttcatctgttaatagcattttctgatattaacaggttgatgatccttctaagtatggtgtggtggttacagaggaaggtacagcgagagttgaaagttttgtcgagaaaccgaaacattttgtggggaacaagatcaacgctgggatatacctcttgagcccatctgttcttgacaggattgagctgagaaggacttcgatagagaaagagatattccctaagatagcttcagagaagaagctttacgcgatggtactacctggtttttggatggacattggtcaaccgaaagattacataaccgggcaaagaatgtaccttaactctctaagagagaaaactccgcaagaactggccacaggggataacataatcgggaatgttctcgtgcacgaaagtgcggttataggagaaggttgcttgataggacctgatgtggtgattggtccgggatgtgtgattgattcaggtgtaagattgtttggttgtactgtaatgcgcggtgtgtggatcaaggaacatgcgtgtatctctaatagtatcgtgggatgggattcaaccgttggaaggtgggctcgagtttttaatataacggttcttggcaaagatgttaacgtcgccgatgcagaggtttacaacagtggggttgttatcgaagagcaaggtctgtgaaaccagagcctagacctagattagttagttccactgtttccagagtcttatgaaccgcaatattcttacaatttaaaacagatacaaactctatggtaaaccatatcataaaccggttaaaaatggtattcgacaccaatagagaaaaacgtttttcagatccatccctaagcaagttgtgtatatttctttcgtaaatgttttgagacattcttataagggacatataaattattgtagataaagcctatgtttcttaaacacgaaactgtgatttattaatagactatagtttggtgtatgtaattaacgttgagaaaaatgaaagacgtgacggcagagagagagagagtggacccgacccggacggcacggagacactttcagtttcttcttcttctcttctgtctttgtgatatttctctcaaaatcaatattttttcatctgtgaaacgacttcgtctcctcccactccattgtcactttcttcttcacccttctctcgtctccgtctgatttggcgtgtaacttctttctaccgtaattctccttcgtcttcttctctggtatatctcttgcattccctcctaatttcttagccaattactgtttggaatgatcttcattttgtacttcccattgcttgattttggttgacacctttctcgtttaagatcgtctcgttttcatgctgaaaactcaagtatttagttttttcgtttgtacccttttgttgatgttttggtttggggagaaaatgtggttcctttcaagttttttccgtcaatttgagttctcaggtcaacgaaaatggatggatgttcttaacccattaaccaagtttgatttttagagagattctgtaaacaaacaataacattttttgtgcttgaattatttttatatttattgcaagtttaggattttgctgcttgaaatgattttgatcataaatgtttattacattttcttatgtgtgtaaaaacaggtttgggattcatgagttgagtcacaaggaaaaagcatg

SEQ ID NO: 28099 - DNA, 3000 bp, Unknown
  misc_feature (1)..( 3000): 2750-1469P.txt file - cDNA_ID_2993893; gDNA_ID_2926198; Annot_ID_141370
caataacgctaatgggaacaggcaaaatcatgccaacgggtagtgaaggtatactgaaccatgggaatgtgagagttatcatccataaaccaatacatggaagcaaagcggatgttctttgcaacgaggccagaagcaagattgcagaatcaatggatctctaagctgatctcagaagttgtcttttgctgcgtctctgatgaacattgagaagctttaatttttacatgtggaagaattaaatgttgagatcttttttagtcaaaaattgtgatgctccctttaatgacatttaaaagaaactatcagtttttggtttattataaaattttgtatatttcgttgtatctcgcgaattatcgtacgtatcacagtcttggccgcattgtcacgcctcccaggaaacagagtccttcccagtccgtacgtgatttccgacttgtaatcccagaagacgtctccttccaaattccaaatctcatgtgagttttattgtatctcttttgttgaactgtgtaatttcggtctgttgaatgtatcgagttgaatcagagattcctgtgttctcagtgaaactgaagcaatatatactgaaatagttgtgcttataattcttgttgattctcccatagatgacagtagatcatctggttatatttatgcagaattgaaggctcttattctagttggaggattcggaaccagattgaggccacttaccttgagcatgcctaaaccacttgttgattttggaaacaaacccatgattttgcatcaggtaggttagcttcttcttcttcttttgtatttgctcaagttttcacagtttcttttgttctcattatgatgcattcgcagattgaagctctaaaaggtgctggagtgactgaagttgtattagctatcaatcaccaacaaccagaggtacatacattcattgtccttaataacgatacgataacaattgaaattcttccgtgtcatcctccttctccttgtgtgtttggtattactcaggtcatgttgaactttgtgaaagaatatgagaagaagctagagattaagattacattttcccaagaaactgaaccgcttggaacagcagggcctctcgcgctggctcgggataagctggtcgatgaatcaggccaacccttttttgtactaaacagcgatgttatctgtgaatacccattgcttgagatgatcgagtttcacaagactaaccgtgctgaagcatcaatcatggtgaccgaggtagtcaaacaggagcattttctgcattttgtgaagtttatctttcatctgttaatagcattttctgatattaacaggttgatgatccttctaagtatggtgtggtggttacagaggaaggtacagcgagagttgaaagttttgtcgagaaaccgaaacattttgtggggaacaagatcaacgctgggatatacctcttgagcccatctgttcttgacaggattgagctgagaaggacttcgatagagaaagagatattccctaagatagcttcagagaagaagctttacgcgatggtactacctggtttttggatggacattggtcaaccgaaagattacataaccgggcaaagaatgtaccttaactctctaagagagaaaactccgcaagaactggccacaggggataacataatcgggaatgttctcgtgcacgaaagtgcggttataggagaaggttgcttgataggacctgatgtggtgattggtccgggatgtgtgattgattcaggtgtaagattgtttggttgtactgtaatgcgcggtgtgtggatcaaggaacatgcgtgtatctctaatagtatcgtgggatgggattcaaccgttggaaggtgggctcgagtttttaatataacggttcttggcaaagatgttaacgtcgccgatgcagaggtttacaacagtggggttgttatcgaagagcaaggtctgtgaaaccagagcctagacctagattagttagttccactgtttccagagtcttatgaaccgcaatattcttacaatttaaaacagatacaaactctatggtaaaccatatcataaaccggttaaaaatggtattcgacaccaatagagaaaaacgtttttcagatccatccctaagcaagttgtgtatatttctttcgtaaatgttttgagacattcttataagggacatataaattattgtagataaagcctatgtttcttaaacacgaaactgtgatttattaatagactatagtttggtgtatgtaattaacgttgagaaaaatgaaagacgtgacggcagagagagagagagtggacccgacccggacggcacggagacactttcagtttcttcttcttctcttctgtctttgtgatatttctctcaaaatcaatattttttcatctgtgaaacgacttcgtctcctcccactccattgtcactttcttcttcacccttctctcgtctccgtctgatttggcgtgtaacttctttctaccgtaattctccttcgtcttcttctctggtatatctcttgcattccctcctaatttcttagccaattactgtttggaatgatcttcattttgtacttcccattgcttgattttggttgacacctttctcgtttaagatcgtctcgttttcatgctgaaaactcaagtatttagttttttcgtttgtacccttttgttgatgttttggtttggggagaaaatgtggttcctttcaagttttttccgtcaatttgagttctcaggtcaacgaaaatggatggatgttcttaacccattaaccaagtttgatttttagagagattctgtaaacaaacaataacattttttgtgcttgaattatttttatatttattgcaagtttaggattttgctgcttgaaatgattttgatcataaatgtttattacattttcttatgtgtgtaaaaacaggtttgggattcatgagttgagtcacaaggaaaaagcatg

SEQ ID NO: 28100 - DNA, 3000 bp, Unknown; identical to SEQ ID NO: 28099
  misc_feature (1)..( 3000): 2750-1469P.txt file - cDNA_ID_2993893; gDNA_ID_2926198; Annot_ID_201608

SEQ ID NO: 28101 - DNA, 3000 bp, Unknown; identical to SEQ ID NO: 7076
  misc_feature (1)..( 3000): 2750-1469P.txt file - cDNA_ID_2993900; gDNA_ID_1621125; Annot_ID_172255

SEQ ID NO: 28102 - DNA, 3003 bp, Unknown
  misc_feature (1)..( 3003): 2750-1469P.txt file - cDNA_ID_2993900; gDNA_ID_2926198; Annot_ID_141361
cactatctttcttttctcatcagaaccaatttggtacacaagaatctactgcaagtgcatattcctcaaaggattttgttttcatgttaatttattggcgtatctcggtctaaatgtaaccagcaaactatctgccttgttcaatatgtacttccactaaactattttgcattccattggaaagtgacctccatgaaatgccgctcatgaatactcttaatcaatcatccaccaaatgttgcaggatctttttcgcacagaaccagaaaatgttgcatatctcattctcatctcttagtccgcactccacaccctacgccactcactttggagtctgctcttaaaatgatgttatgacatagtaagatatgaccaacataaaccctttcacactcacgacatcttcttatattgcttatttcttaggatcatgaatgaattgtttcgacaatactgagaacgatacacgtcttcaatattctgcataaaggccaacatggaagtagctatattttatcgtggaactagccataatgcttgaaataaacaatgttatactcataatatcaattaaatgtttgtgatatactactatataattaaccactagtaacttcatcatcatcctttttattatttttgggtcaactatatcattatccttattcaaccaattttattcttatataagaggaaaatcgaattaggtaaacggaaaatgcgattactttctgaactcaaaagaaggaatcgaaacaatttttgttataatattaacaattttcgtgtggtctttatcaaattacgatcctgatttatgaacacgtggcgctaagttagttcagtttcattcattgagcttttaattgaacaatgagcgttaccaattttgtgttttttttctcgcaaaatgattttttcttgttcagaaggacacgaagtgttcatcatcttcttacatggcaaaagtacgaaaacatctgagattgtggcacgtgtgttaccctgacgactctcttctcgtccctttttcacttttccagtttcaagttaacacgcggattgggcccggaggtttcttgattcgtcaatcgttagccacacacaagttttattctttaaccttttattttctttagttagtttcattgtaaacaatttttttttaaaaacaaaaaaaaacagaggttgacctagaaaagaaataaatgcagcggtattgaattgttttcttctcaacagtcatcatcatcatcaataaaagaaacatcaaatcaaatagttgaatcactgtatgaaattaagagccagaatttcacagctcaattgcaactttgcaaccgaatggctaaaaacccttacaaaaaaaaagacgaatgattgcaaacttgcggaattaaatgcaaatgcacttataacaagccgcagtacttaatcatcagtattagagtgacgctaaaaaatttgtatttgaaagaattatgttcattctcattaaaataagagtaggatacatgttatctctagacctaacatgtaacctaattttataactaatgaattcacattaaagcacgtacaagtcaatacaacatctccataacattcaagacatctttaatttggatctttttagggttgataatcacaacttttcgatcaaaaagatatatagatcgttcgttaattacaaaaaagtatgtaaagagtataatggaaacattttaagagtaaatttcacaattaaaaaaaactatagattatacaaaatgaagtgtctagagacgtggtaggttgtgtggcttgtgatgaaacttccccacgtaaattctcatcccaccacaatctctacctactaactgctaactactttacgtccagcgccctttcgctgttttgcttttattagttcttctcttatattttctcctagtttttctacttttttttatttatttattttagttttacaaatcttgaaattctatattatagttaaattttagaaagccacctttgtgtgagttttgcttatgcaattgccgaccgaagtttgttccattctggcgttctcaaacctaacaactgtaactacatctttcattcataatcagattgttttaataatatactcatatctaacaatatcaggagagttccagcagttttattcatataactggtgtagtttgaacgataaatagaacttattatagaattaccatcacccaaattttagtattgaactattcgatgagaattttgacatattcatggagctaaagaaatatgacgacgcatcacattttgatatgtacagtctctacattttttcaaatacatttttttctttttcaaatctagtatcaagtacaaacgaatgtctaaattcgcttggatttattaaaaaagtatctttaagtttggtgtacagtttgggttaaagtactgtgtaatataggtggattgttttgaaaaactttgaaccgatgccgatatctaattgattttcttgtttttttttggtaatttgaaaaccattttaatttatttggttacatatatttgtagtattcagtaagtaagaaacaacataagaagattggaatttgatattagctggtgctactaattttggagtgtttctgaaagaagacacacgttccaaaattgtcaacacgtaaacaaaaaccaataagggattgacttgtggatattggataaccaagcaattaattaagatggtttagagacgtaaaatgattaattaagaaatagtactaatactttattggaaaataagagatgaggtataataaaagatgagtagctgggaacgtgcaacagaaaaatagttcacccaactttctcctattaatacttgcctcttctctcttcctacttctaaccttctttttctccttcatcacacacatatacacacgctttcgtttaaactctctctgtttcaatcattaatcagaaagaagcaacacaaatatg

SEQ ID NO: 28103 - DNA, 3003 bp, Unknown; identical to SEQ ID NO: 28102
  misc_feature (1)..( 3003): 2750-1469P.txt file - cDNA_ID_2993900; gDNA_ID_2926198; Annot_ID_201597
